United States Patent Application Publication US 2024/0327476 A1 - sequence listing, part 100

SEQ ID NO: 192333 - DNA, 1128 bp, synthetic construct
  misc_feature 1..1128: note = Description of Artificial Sequence: Synthetic coding sequence
  source 1..1128: mol_type = other DNA
atgagcctgatggtgatcagcatggcctgcgtgggcttcttcctgttgcagggggcctggacccacgaaggcggccaggacaagccgctgctttcagcttggccatccgccgttgtcccgaggggaggacacgtcacgctgctctgtcgttctaggctcggatttacaatattttcgctgtataaggaagacggggtgcctgtcccggaactgtacaacaaaatattttggaagagtatactaatgggacccgtaacacccgcccacgcaggaacatatcggtgtcgcggcagtcaccctagatctcctattgagtggtccgcgccatctaaccctttggtgatcgtcgtaacgggcctgttcggtaagccatctctaagcgctcagccgggcccgaccgtgagaactggcgagaacgtaaccctctcatgttcctcacgatcgtcattcgatatgtatcatttgtcacgtgagggcagggctcatgagccgcgtctgccagccgttccctccgtgaacggaacctttcaggctgacttccctttgggaccagctacccatgggggaacatacacatgctttggaagccttcatgactctccttatgagtggagcgacccttcagaccccctcttagtctctgtgacaggcaattcatcctccagttccagctcaccaactgagccatcatctaaaacagggatccgccgccacctccacatcttaataggcacgtctgtagccattatcctgttcattatcctatttttctttctgctacattgttgctgctctaacaaaaaaaatgcagccgtaatggaccaagaaccagctggcgatagaaccgttaatagggaagactcggatgaccaagacccacaggaggtgacttacgctcagttggatcattgcgtcttcacgcagaccaaaatcacgtcaccatcacagaggccaaaaactcctcctacggacacaactatgtacatggagcttcccaatgctaagcctaggagcctgtctcctgcgcataaacatcactcacaggcgcttagaggctccagccgggaaacgactgctcttagccagaacagggtggcttcgagtcatgtgcccgcagcagggatctag

SEQ ID NO: 192334 - DNA, 1164 bp, synthetic construct
  misc_feature 1..1164: note = Description of Artificial Sequence: Synthetic coding sequence
  source 1..1164: mol_type = other DNA
atgagcctgatggtggtgagcatggcctgcgtgggcctgttcctggtgcagcgagccggtcctcatatgggaggacaggataaaccgttcctctccgcctggcccagtgcagtcgttccacgaggaggtcatgttaccctgcggtgtcactatcgccatcggtttaacaactttatgctctacaaggaggaccgtatccacgtgcctatctttcatgggagaatcttccaggagggatttaacatgagtcccgtcacgaccgctcatgccggaaattatacttgccgcggtagtcatccccatagtcctaccggctggtcggccccatccaaccccatggttattatggttacaggcaaccaccgcaagcccagcctcctcgcgcaccccggacccctggtcaagagcggagagcgcgtaatcttgcagtgctggtccgacatcatgtttgaacatttcttcttgcataaggagtggatttcaaaggatccatcacgactggtggggcagattcatgatggggtatcaaaagcaaactttagtatcggctcaatgatgcgcgcactggctggcacctatcggtgttacggcagtgtgacccatactccctatcaattgagcgccccaagcgaccctctcgatattgttgtgactggactctatgagaagcctagcctttcagcacagcctgggccgaaagtacaagcaggcgaatctgtcaccctgtcctgctcgtcccgttcatcctatgatatgtatcacctgtcacgcgagggaggcgctcacgagcgccggcttcccgccgtgaggaaggtcaaccgcacttttcaggctgacttcccgctgggacccgctacacacggcggaacctatcgttgtttcggctccttccgccatagcccctatgaatggtctgacccatcagaccctttgctcgtcagcgtgaccggaaatccctctagcagctggccctcccctactgagccctcctcaaaatccggtaatctgcggcacctgcacattctgataggcacttctgtcgtgaaaattccctttacaatcttactgtttttcctgctgcatagatggtgttctaataaaaagaacgccgctgttatggaccaggaacccgctggtaataggtcggagcagcgcggattttag

SEQ ID NO: 192335 - DNA, 1149 bp, synthetic construct
  misc_feature 1..1149: note = Description of Artificial Sequence: Synthetic coding sequence
  source 1..1149: mol_type = other DNA
atgctgctgatggtggtgagcatggcctgcgtgggcctgttcctggtccaacgtgccggccctcatatggggggacaagacaaacctttcctgagcgcttggccgtctgctgtggtaccgagaggaggtcatgtaaccctccggtgccattataggcaccgctttaacaatttcatgctgtacaaagaagatcgcatacacgtgcccatttttcacgggcgtatcttccaagaagggttcaacatgtcacctgtaactactgcccatgcggggaattacacctgtcgcggaagtcatccacacagtcctacaggatggtcagctccctctaacccaatggtaattatggttacaggcaaccacaggaagccatctctgctagctcacccagggcccttagtgaagagcggtgagcgagtgatattgcaatgctggagtgatattatgttcgagcacttcttcctacacaaggaatggataagcaaggatcccagccgtctcgtgggccagatccatgacggtgtttccaaggccaacttctcaatcggtagtatgatgagagccctggcgggaacgtaccgctgttacgggagtgttactcatacaccatatcagctttctgcccccagcgatccgttggacatagtggttaccggattatacgagaagccttcattgagtgcgcagccaggcccaaaggtgcaagcaggcgaaagcgtgacacttagttgcagttcgcggtcaagttacgacatgtaccacctgtctcgggagggaggcgcccacgaaagaagactccctgccgtaaggaaagttaatcgcactttccaggctgatttcccactggggcctgctacacacggaggcacgtaccgctgcttcgggtccttcaggcacagcccttatgaatggagcgaccccagcgatcccctcctcgtaagcgtcacaggaaacccgtctagcagctggccctcccccaccgaaccttcgtcaaagtctgggaacttgagacatctccacatcctcatcgggacgagcgttgttaaaattccttttacaatcctactatttttccttctgcacaggtggtgctctaacaaaaaaaagtgctgttgtaatgggccgcgtgcttgtagggagcagaagtag

SEQ ID NO: 192336 - DNA, 1194 bp, synthetic construct
  misc_feature 1..1194: note = Description of Artificial Sequence: Synthetic coding sequence
  source 1..1194: mol_type = other DNA
atgagcctgatggtggtgagcatggcctgcgtgggcttcttcctggatcaaagtgtgtgggctcacgtggggggccaagacaagccgttttgttctgcatggccaagtgcagtagtaccacagggcggtcacgtgacactgaggtgccattgtagaagaggattcaacattttcacactctacaaaaaggatggtgtgccagtccccgagctttacaataggattttttggaactccttcttgatttccccggtaactcctgcccacgctggtacctacagatgccgggggttccacccccattcccccactgagtggagcgctccctccaatcctctcgtgattatggttacaggattatacgagaaaccgtcactgactgctcgccctgggccgaccgtgagggccggggagaatgtgacactgtcatgtagctcacaaagttcctttgatatctaccacctgagcagggaaggcgaggcccatgaactcaggctccccgccgtgcctagcattaacggcactttccaagctgacttcccattaggaccagccacgcacggagagacctatcggtgctttggctcattccacgggtcaccttatgagtggagtgatccttcagacccccttcccgttagtgttacagggaacccaagctcatcttggccatccccgaccgagccatctttcaaaacaggcatcgcccggcacctgcatgccgtgataaggtactcagtggccatcatactgtttacaattctgcccttcttcctcctacaccggtggtgttcgaagaaaaaggtctccctgacaaagcaaagacctgagaactcaggcccgtgcgccgaagctgggtgggagcatgctgacgccgccgtaatgaaccaagagccagcaggacatagaaccgtgaatcgggaggacagcgacgaacaagatccccaggaagtaacatatgctcagctggaccattgcatcttcacacaaagaaaaatcaccggaccctcccagcggtctaagcgcccaagcactgacacttccgtttgcatcgagctgccaaatgcagagccccgagccttgtcaccagcacatgaacatcacagccaagcattgatgggctcaagtcgggagaccacagcccttagtcagactcaattagcatcctccaatgtgcccgccgcaggaatttag

SEQ ID NO: 192337 - DNA, 1029 bp, synthetic construct
  misc_feature 1..1029: note = Description of Artificial Sequence: Synthetic coding sequence
  source 1..1029: mol_type = other DNA
atgagcatgagccccaccgtgatcatcctggcctgcctgggcttcttcctggaccaaagcgtgtgggcacacgttgggggacaggacaagccattttgcagtgcgtggccctccgctgtggtcccacagggcggacacgtcacactgcgttgtcattgccggagggggtttaacatttttacactgtacaagaaggacggggtgccagtgcccgaattatacaatcgcatcttctggaactctttcctaatctccccggtcactcctgcccatgccggcacttatcgatgcaggggctttcatccacactcccctacagaatggtccgctccctctaaccctctcgtgatcatggtgaccggcctatacgagaaaccatccctgaccgctaggcccggacccaccgtgcgtgctggcgagaacgtgaccctgagttgctcttctcagtcctcctttgatatctatcacttgagccgggagggggaggctcacgagctgagactgccagccgtgccctctatcaatgggacgtttcaagccgattttcccctggggcctgctacccatggagagacatatagatgctttgggtctttccatggctccccttacgagtggagcgatccctcagatccactgccggtcagtgtgactggaaacccgagctccagctggccttccccaacagaaccatccttcaaaacagacgcggccgtcatgaatcaggagcccgcagggcacaggaccgtgaaccgcgaagattccgatgagcaggatccccaggaggtgacctacgcccagttggatcattgcatttttactcagcgcaaaattaccggcccatctcaaaggagtaagcgacccagtacagatacctcagtctgcattgaacttccaaacgcagagcccagagcactgagtcccgctcacgaacaccactcccaagcactgatgggtagctcccgcgagactactgccttgagccaaacccagcttgcttcctctaacgtgcctgctgcgggcatctag

SEQ ID NO: 192338 - DNA, 1083 bp, synthetic construct
  misc_feature 1..1083: note = Description of Artificial Sequence: Synthetic coding sequence
  source 1..1083: mol_type = other DNA
atgagcatgagccccaccgtgatcatcctggcctgcctgggcttctttcttgatcagtcagtgtgggcccatgtgggcggtcaggacaaaccgttctgctccgcatggcctagcgccgtggtcccccagggcgggcacgttacgctccgatgccattgtcgtagggggtttaatatctttacactttacaaaaaagacggcgtccccgttcctgagctgtacaaccgtattttttggaattccttcctgatttctcctgtgacacccgcccacgccggcacatatcgatgtaggggcttccatccccacagccccaccgaatggtcagccccctctaaccccctggttatcatggttaccggactgtatgaaaagccatcactgactgctcgacccggacctacggtgagagccggcgagaacgtgacccttagttgcagttcccagagcagcttcgacatctatcatctgtcaagagagggggaggcccacgagctgcggttgccggctgttccctccatcaacggcacatttcaggccgacttccctctgggcccagccactcacggcgagacttacaggtgcttcggctcctttcatgggagcccatacgagtggagcgacccctccgatccactaccggtctctgtgacaggtatagcccgccatctgcatgcggtgattcggtattctgtggccattattttgttcactattcttccttttttccttctccacaggtggtgcagcaagaagaagaacgccgctgttatgaaccaggaaccagctgggcacaggacagtcaatagggaagatagcgatgagcaagacccacaggaagtgacctacgcgcaactggaccactgcattttcacccagaggaaaattactggaccatcccaacggagtaagcgcccatccacagacacaagcgtatgtattgaattgcccaacgcagagccaagagctctttctccagcacacgagcaccattctcaagccttaatgggatcctctagagagactacagcattgagccagacccagctggctagtagcaatgtcccagctgccggcatatag

SEQ ID NO: 192339 - DNA, 1134 bp, synthetic construct
  misc_feature 1..1134: note = Description of Artificial Sequence: Synthetic coding sequence
  source 1..1134: mol_type = other DNA
atgagcatgagccccaccgtgatcatcctggcctgcctgggcttctttctggaccaaagtgtatgggcgcacgttgggggacaggataagcctttctgttccgcttggccatcagccgtggtcccccagggtggccatgtgaccctccgctgtcattgtagaaggggctttaatattttcaccctgtacaaaaaggacggcgtacccgtacctgagctgtacaatcgtatcttttggaacagcttcctgattagtccagtgacgcctgcccacgccggtacctatcggtgtcgtggctttcacccccactcacccacagaatggtcagcaccatcaaaccctctggtgattatggtgaccggattatatgaaaaaccatccctcacggctcgccctggccctactgtgagagcaggagagaatgtgactttgtcttgctcatcccagagcagcttcgatatttaccatctgtctagggaaggagaagcccatgagctgagactcccggccgtgccttctatcaatggtactttccaggctgacttcccgctgggacccgctactcatggcgagacttaccggtgtttcggttcctttcacggatcaccctacgaatggtcagacccctccgacccacttccggtgtctgttaccggcaacccatcatcctcctggccttcacctacagagccctccttcaagacaggaattgcccgtcatctgcacgccgttatccgctacagtgtggctatcattctgtttactattctccctttctttctattgcaccgttggtgcagtaaaaagaaaaacgcggccgttatgaaccaagagccagccggacacaggactgtcaacagagaggactcggatgaacaagacccacaagaggtaacttacgcccaactggaccactgtatcttcacccagcggaagatcacaggaccatcacagcggtctaagcggcccagcacagatacctctgtttgcattgagcttcctaatgccgagccccgagccctcagcccagcacacgagcaccattcacaagccctaatgggcagcagccgcgagaccaccgccctgagtcagacgcagctggcaagtagtaacgttcccgccgccgggatttag

SEQ ID NO: 192340 - DNA, 1233 bp, synthetic construct
  misc_feature 1..1233: note = Description of Artificial Sequence: Synthetic coding sequence
  source 1..1233: mol_type = other DNA
atgagcctgatggtggtgagcatggcctgcgtgggcttcttcctgttggaaggtccctggccccacgtcggtggccaggacaagcctttcttgagtgcatggcccggtactgtagtgagcgagggacaacacgtcacattgcaatgtcgatctagattgggcttcaatgaatttagtctcagtaaagaggatgggatgcctgtcccggagctatacaacaggatatttcgaaattcgttcctcatgggtcctgtgactccagcccacgccgggacttaccggtgttgtagttctcatcctcactcaccaacgggatggtctgctcctagcaatcccgtagtgattatggtaaccggcgtgcatcgaaagccttcattactggcccatccaggacctcttgtgaaatcaggcgaaaccgttatccttcagtgctggtccgatgtgaggttcgaaaggtttttgctgcatagagagggaattactgaagatcccctaagactgattggtcagttgcacgacgccggctctcaggttaattattccatggggccaatgacaccggccctagccggcacctatcgctgttttggatccgtcacgcacctgccctatgagttaagcgctccatccgatccactggacatagttgtagtgggtctgtacggtaaacccagtctgtccgcacagcccggccccactgtccaagcaggtgaaaacgtcacactttcttgcagctcacggtccctattcgatatatatcacctgagccgtgaggctgaagccggcgagctgcgcctgacggccgtgctgcgagttaatgggacattccaggccaacttcccattgggccccgtgacacatggcggtaactataggtgcttcggttccttcagagctttgccccatgcctggagcgatccaagtgacccattacccgtgtctgtcacgggaaattcccggtatcttcatgcgcttattggcacctcggtggtaataattccctttgctatcttgctgtttttcctgttgcaccgctggtgcgccaacaaaaaaaacgctgttgtgatggaccaggagcctgctggcaataggaccgttaacagagaagactctgacgagcaagatccccaggaagtgacctatgcccagcttaatcactgtgtcttcacccaaagaaagatcactcggcccagccagcggcctaaaactcccccgaccgacacttctgtatag

SEQ ID NO: 192341 - DNA, 1047 bp, synthetic construct
  misc_feature 1..1047: note = Description of Artificial Sequence: Synthetic coding sequence
  source 1..1047: mol_type = other DNA
atgagcctgctggtggtgagcatggcctgcgtgggcttcttcctgcttcagggagcctggcctcacgaaggggtgcaccgtaagccaagccttctagcacatccaggcaggctggtgaagtctgaggaaaccgtcattcttcagtgttggagcgatgtgatgtttgagcattttctgctgcaccgcgagggtatgtttaatgacaccctgaggctcattggggagcaccacgatggtgtttctaaagcaaactttagcatctccagaatgacacaggatctggccggcacctaccggtgctatggttcggtgactcactccccttatcaagtgagtgctcccagcgatcccctggacatcgttattataggtttatacgaaaaaccctctctctcagctcagcttgggcccaccgtactggccggcgaaaacgttactctgtcgtgttctagtcgctcttcctatgatatgtatcacctaagtagagagggcgaagcacatgagcgtcgcctgccagcaggcccaaaggtcaacgggacctttcaggccgactttccacttggcccggccacccatgggggtacttatcgctgtttcggcagctttcacgattcaccctacgagtggagcaaaagctccgatcccctcctcgtttctgtgactgggaatcctagtaattcctggccgtccccaactgaaccttccagtaagaccggcaacccacggcacctgcatatcctgattggtacaagcgtagtgatcatcttattcattcttctgttttttctgctgcaccggtggtgttccaataagaagaacgccgctgtgatggatcaggagtcagccgggaatcgaacagctaattctgaggattctgatgaacaggatccgcaggaagtgacatacactcagctgaaccactgcgtattcacacaaaggaagatcacaaggcccagccaaaggccgaagacaccgcccacagacataatagtatatacagaactacctaacgcggagagcagatctaaagtagtctcttgtccatag

SEQ ID NO: 192342 - DNA, 1026 bp, synthetic construct
  misc_feature 1..1026: note = Description of Artificial Sequence: Synthetic coding sequence
  source 1..1026: mol_type = other DNA
atgagcctgatggtggtgagcatggtgtgcgtgggcttcttcctgctgcagggagcatggccacacgagggcgtccaccgtaaaccatcccttcttgcccatcccggaccattggtgaagtcagaggaaactgtcatcctgcagtgttggtccgacgtaagattccagcactttcttctgcacagggaaggcaaatttaaagatactctccacctcatcggggagcatcacgatggcgtctctaaagccaatttttctatcggcccaatgatgcaggatctcgctggcacataccggtgttacgggagtgtgacgcattctccctaccaactgagcgctccaagcgaccctcttgatattgttatcactggcctatacgagaagccctccctgagcgcacagcccggcccgactgtactggccggtgagagtgtgactctttcgtgcagctcccgttcgagctacgatatgtaccacctgagtcgagagggggaggcacatgagaggcgatttagcgccggtcctaaggtcaatgggaccttccaggcagatttcccgctgggtcccgccacgcacggggggacctacaggtgcttcggtagcttcagagattcgccctacgagtggtccaactcctccgacccgttgctagtaagtgtaactggaaatccaagcaatagttggccttcaccaaccgagccgagctcagaaactgggaacccccggcatctgcatgtactgatcggaacttctgtggtgattattctcttcattctgttactcttttttctattacaccgttggtgttgcaacaaaaagaatgctgtggtgatggatcaagaacccgccggaaaccgtacagtgaacagggaagattccgatgagcaggatccccaggaggtcacatacgcccagttgaaccactgcgtcttcacacaacgcaaaataacacgtccaagccagagacctaagactccacctacggatatcatcgtatacacagaattgccgaacgccgagccctag

SEQ ID NO: 192343 - DNA, 1047 bp, synthetic construct
  misc_feature 1..1047: note = Description of Artificial Sequence: Synthetic coding sequence
  source 1..1047: mol_type = other DNA
atgagcctgatggtggtgagcatggtgtgcgtgggcttcttcctgttgcagggcgcctggccacacgagggagtgcacaggaagccttcactgttagcacaccccggcccccttgttaagagtgaagagaccgtcattctccagtgttggagcgatgtccgcttccagcacttcttgctacatcgggaagggaagtttaaggacacactccatctaattggagagcaccacgacggggttagcaaagccaatttcagcatagggccaatgatgcaagatttagctggcacttatcggtgttatggctcagtgacacattccccgtatcaactctcagctccaagtgatcccctcgacatcgtgattaccggactgtacgaaaagccatcgcttagcgcccagcctggcccaactgtcttagccggggaatccgtgactcttagttgcagtagcaggtcctcgtacgacatgtaccatctgtcccgcgagggggaagcacacgaacggagattcagcgcgggacccaaagtaaacggtacctttcaggcagacttcccactcggaccagccactcatggcggcacatatcggtgtttcggttcttttcgggactcaccttatgagtggtccaattcttccgatcccctgctggtttcggtcacgggaaatccatccaattcatggccttcccccaccgagccctcctcaaagactggaaatccacgtcatttgcacatcctgatcggcacgtcagtagtcatcatcctcttcattctcttattttttcttttgcaccgatggtgctctaataaaaaaaatgctgccgtcatggatcaggaatctgccggaaataggaccgccaattcagaagatagtgatgagcaggacccgcaggaagttacatacacgcagttgaatcactgtgtctttacgcagcgcaagatcactcgtccatcccagcgacccaagactccacccaccgatatcattgtgtataccgagttgcctaacgctgaaagccgctcaaaggtcgtgtcctgtccttag

SEQ ID NO: 192344 - DNA, 1029 bp, synthetic construct
  misc_feature 1..1029: note = Description of Artificial Sequence: Synthetic coding sequence
  source 1..1029: mol_type = other DNA
atgagcatgagccccaccgtgatcatcctggcctgcctgggcttctttttagatcaaagcgtatgggcacatgtaggcgggcaagacaaacctttttgttccgcatggccaagcgcagtcgtgcctcaggggggtcacgtgaccttaaggtgccactatcggagaggctttaacatatttactctgtataagaaagacggggtccccgttcccgagctatataatcgaattttctggaactctttcctcatctctccggtgactcctgcccatgccgggacatatagatgtcgcggtttccatccccactctcccactgagtggtccgccccgagtaaccccctcgtgattatggtcaccggtctttacgaaaagcctagtctgaccgctaggcccgggccgaccgtccgggccggcgaaaatgtgacactcagctgcagctcgcagagctccttcgatatatatcatttgtcgcgtgagggcgaagcacatgagctaaggttgccagctgtgccttctataaacggaacatttcaggcagatttccctctcggccccgccacacacggcgagacataccgatgttttggcagcttccatgggtcaccctacgaatggtcagatcccagcgaccctctgcccgtcagcgtcactggtaatccatcctcatcctggcctagtcctactgaaccatcttttaaaactgatgccgctgtcatgaaccaagaacccgccggccaccgcaccgttaacagagaggatagtgacgaacaggatccccaggaagtgacatacgcacagttggaccattgcatattcacccagcggaagatcaccggcccctcccagcggtctaagcgtccgtctacggatacaagcgtgtgcatcgagctaccaaacgctgagcctcgagctctgagccctgcccatgaacaccattctcaggcacttatgggatcttcccgcgagactactgctctcagccagacacagctggccagcagcaatgttccagcagcaggcatctag

SEQ ID NO: 192345 - DNA, 978 bp, synthetic construct
  misc_feature 1..978: note = Description of Artificial Sequence: Synthetic coding sequence
  source 1..978: mol_type = other DNA
atgagcatgagccccaccgtgatcatcctggcctgcctgggcttctttctcgatcagagtgtgtgggcgcacgtgggcggccaggataagcccttttgttcagcgtggccgagcgcggtggtgccccaggggggccacgtgaccctcagatgccattatcgaagaggtttcaatatcttcacactgtacaagaaagatggcgtgccagtccccgagttgtataacagaatcttctggaattctttcctcataagcccagtgacccctgcccacgccggtacatatcgatgtcgggggttccaccctcactcaccgaccgaatggagtgcaccaagcaaccccctggtcatcatggttactggattgtatgagaaaccttcactgaccgcgcgtccaggcccaaccgttcgcgccggtgagaacgtaacactgagctgttccagccagagctcctttgacatctatcacctgagtcgtgaaggggaagcccacgagttaagactgcctgccgtaccatccatcaacggaactttccaggccgatttccccctgggaccagccacccacggagaaacttacaggtgttttggatctttccatggctcgccttatgaatggtcagaccctagtgacccattgcccgtgtctgtcactgacgccgccgtcatgaaccaggagcccgccggccaccgtacagtgaacagggaagactcagacgagcaggatccccaggaagtaacctacgctcaacttgaccattgcattttcacccagaggaagatcacaggcccttcacagcgctccaaacggccttccactgatactagcgtgtgcatcgagctaccgaacgcagaaccgcgagccctgagccccgctcacgagcaccactctcaggccctcatgggcagttcacgcgagaccactgcacttagccagactcagttagccagctctaacgtgccagctgcagggatctag

SEQ ID NO: 192346 - DNA, 1194 bp, synthetic construct
  misc_feature 1..1194: note = Description of Artificial Sequence: Synthetic coding sequence
  source 1..1194: mol_type = other DNA
atgagcctgatggtggtgagcatggcctgcgtgggcttcttcctggaccagagcgtctgggcgcacgtgggtgggcaggataagcctttctgttcagcgtggcccagcgccgtagtccctcaaggggggcacgtgaccctcagatgccactacaggcgaggctttaacattttcactctgtataagaaggacggagttccagtccccgaactttacaacaggattttttggaactcgtttttaatcagcccagtgacacccgcccacgcaggcacctatcggtgcaggggattccacccacattcacccaccgagtggtcggcacctagtaaccccctcgtgatcatggtaactgggctttacgaaaagccctctttaaccgccagaccggggcccacggtgcgggccggggagaacgttacattgtcttgttccagccagtccagctttgatatataccatctgtcgcgtgagggtgaagcacacgagctccgcctgcccgccgtaccgagcataaacggtactttccaggcggatttcccgctcggccccgcaacacacggcgaaacctatcgatgcttcgggagctttcacggaagcccctatgagtggagtgacccctccgatccactccccgtttctgttacagggaatccatcttctagctggcccagcccgaccgagccatcttttaagactggaatcgcaaggcacctgcacgcagtcataagatacagcgtggctataattctgtttaccatcctgcccttcttcctgctgcaccggtggtgcagcaaaaaaaaggtgtcactcacgaagcagcgccccgaaaatagtggcccctgtgcggaggcaggttgggaacacgcagatgctgcagttatgaatcaggaacccgccggccaccgtaccgtcaatcgtgaagacagtgacgagcaggacccgcaggaggtaacttacgctcagttggaccactgtatttttactcagcgcaagatcacaggccccagccagagaagcaagcgcccatctacagacacctccgtgtgtatagagctgcccaatgcggagccccgcgcgttatctccagcccacgaacaccactcccaggccttgatgggttcaagcagggaaacgaccgcactgtctcagactcagttagcaagctccaacgttccggccgctggaatctag

SEQ ID NO: 192347 - DNA, 693 bp, synthetic construct
  misc_feature 1..693: note = Description of Artificial Sequence: Synthetic coding sequence
  source 1..693: mol_type = other DNA
atgagcatgagccccaccgtgatcatcctggcctgcctgggcttctttttagaccagagcgtatgggcccacgtcggactgtacgaaaaaccttccctgaccgcgcgccccggtcccaccgtgcgggcaggggagaacgtgacactgtcctgtagctctcagtcttcctttgatatttatcatctgtcgagagaaggcgaagcacatgagctgcggttgccagccgtcccttcaatcaacgggacgttccaagcggatttcccattaggtcccgccacgcatggggagacttacagatgctttggctcattccatggctccccatatgagtggtcggatcccagtgatcccctgccagtttccgtgacggacgccgccgtgatgaaccaggaacctgctggtcatcggactgtcaatcgcgaagacagtgacgagcaggacccgcaggaggttacgtacgcccagttggaccactgcatttttactcagaggaaaattacaggacctagtcaaagatctaaaagacctagtactgacacttcggtatgcatcgagttgccaaatgctgagccccgagccctcagtccagcacacgagcaccattctcaggcactgatgggctctagcagggaaacaactgcccttagccaaacgcagctagcatcttctaatgtacctgcagctgggatttag

SEQ ID NO: 192348 - DNA, 762 bp, synthetic construct
  misc_feature 1..762: note = Description of Artificial Sequence: Synthetic coding sequence
  source 1..762: mol_type = other DNA
atgagctgcaccatcgagaaggccctggccgacgccaaggccctggttgaacgtctgagggaccatgatgacgctgcagaatccctaatcgaacagaccacagcacttaacaaaagggtcgaggctatgaaacaataccaggaggagatccaggaactgaacgaggtggcacggcacaggcctcgctccacactggtcatggggattcagcaagagaaccgtcagattagggaattacaacaagagaataaggagctgcggacctcacttgaggaacaccagagcgcactggaattaattatgagcaagtatagggagcagatgtttaggttactcatggcctcgaaaaaagacgacccagggattatcatgaaactgaaggaacaacatagcaaaatagatatggtgcaccgcaacaaatctgaggggtttttcttggatgcctcgaggcacatcttagaagcccctcagcacggtctggaaagaagacacttagaggcaaaccagaacgagctgcaggcacatgtagatcagatcactgaaatggccgcagtaatgagaaaggcaatcgagatcgatgaacagcaggggtgtaaggaacaggagaggatctttcagctggagcaagagaataagggactgagggaaattctgcaaattacacgcgagtccttcctcaaccttcggaaggacgacgctagtgagagcaccagcctgtcggcgctagttaccaactcagacctttcgcttagaaagagctag

SEQ ID NO: 192349 - DNA, 648 bp, synthetic construct
  misc_feature 1..648: note = Description of Artificial Sequence: Synthetic coding sequence
  source 1..648: mol_type = other DNA
atggacaaccagggcgtgatctacagcgacctgaacctgccccccaaccctaagcgccagcagcgtaaacctaaaggcaacaaaaactcgattctggcgacagagcaagagattacctatgcggaactgaatttgcaaaaagccagtcaggatttccagggcaatgacaagacatatcactgcaaggaccttccctctgctccagaaaagcttatcgtgggtattcttggcataatttgtttaattcttatggcttctgtggtgactattgtcgtgattcccagccgccattgtggccattgccctgaagagtggataacctacagcaacagctgctactatatcggcaaggaacggcgtacatgggaggaatcattgctggcctgcacatctaagaatagtagtctgctcagtattgataatgaagaggagatgaagttcctgagcattatcagcccctccagttggatcggcgtctttagaaatagttctcaccacccctgggtcacgatgaacgggctggcttttaaacatgagataaaggactctgacaatgctgaattgaattgcgccgtgcttcaagtgaaccgcctcaagagtgcccagtgcgggtccagcataatctaccattgtaagcataagctgtag

SEQ ID NO: 192350 - DNA, 702 bp, synthetic construct
  misc_feature 1..702: note = Description of Artificial Sequence: Synthetic coding sequence
  source 1..702: mol_type = other DNA
atggacaaccagggcgtgatctacagcgacctgaacctgccccccaatccaaagcgccagcagaggaagccaaaagggaataagaattccatcctggcgaccgaacaggaaataacctatgcggagctgaacctccagaaagcatcccaggattttcaagggaatgacaaaacctaccactgcaaggatcttccgagtgccccggaaaaactaatagtaggtatcctgggaattatctgtttaatccttatggcttcagtcgtgaccattgtggttatcccttcaactctgattcagcgccataataacagcagcctgaacacgaggacacagaaggcaaggcactgtgggcattgtcccgaggaatggattacttactcaaacagctgctattacatagggaaggagcggcgcacatgggaagagtctttactcgcttgcacaagcaagaattcatccttattgtccatagataatgaagaggagatgaaattcttgagtatcattagccccagctcctggattggggtttttaggaattccagccatcatccctgggttaccatgaacggcctcgcctttaagcatgagattaaagattccgataatgcggagcttaactgtgctgtactgcaggtgaacagattgaaaagcgcccagtgtgggagctcgatcatctaccactgtaagcacaagttgtag

SEQ ID NO: 192351 - DNA, 648 bp, synthetic construct
  misc_feature 1..648: note = Description of Artificial Sequence: Synthetic coding sequence
  source 1..648: mol_type = other DNA
atggacaaccagggcgtgatctacagcgacctgaacctgccccccaatcccaagcggcagcaacggaaacccaaaggcaacaaaaatagtatcctggccactgagcaggagatcacatacgctgaacttaatttgcagaaagcctctcaggattttcagggcaatgataagacatatcattgtaaagatctgccctccgcaccagaaaagctgattgtgggcatccttgggatcatttgcttaattttgatggcgagcgtggtcacaatcgtggtgatccctagtaggcattgcggtcactgccccgaggagtggatcacctatagtaattcatgttattacatcgggaaagagaggcgcacttgggaagagagcctgcttgcctgcaccagcaaaaacagcagcctgctatccattgacaatgaggaagaaatgaagtttttatccataatctctccttcgtcatggataggagtgttccgcaactcttcacatcacccttgggtaactatgaacggtttggcctttaagcacgaaattaaggactccgataatgctgaactgaactgcgccgttctgcaggtcaaccgtttgaagtcagcgcagtgtgggtcaagcatcatctatcactgcaaacataaactatag

SEQ ID NO: 192352 - DNA, 702 bp, synthetic construct
  misc_feature 1..702: note = Description of Artificial Sequence: Synthetic coding sequence
  source 1..702: mol_type = other DNA
atggacaaccagggcgtgatctacagcgacctgaacctgccccccaatcccaaacgtcagcaacgcaagccgaagggcaataagaactccatcctggctacggagcaagagatcacgtatgctgagctgaacctgcaaaaagcgagccaagactttcagggtaacgacaaaacatatcactgcaaagacctcccgagtgcacctgagaaactgatcgtcggaatcctgggtataatatgtctgattctcatggcctccgttgtgaccatcgtcgttatcccttcaactctcatccaaaggcataataactctagtttaaatactcgcacacagaaagctcggcactgcgggcactgccctgaagagtggatcacctactctaattcatgctactacatcgggaaagaacggcgcacttgggaggagtcactcctggcctgtacatctaaaaattcaagtcttttatcgatcgacaacgaagaggagatgaaatttttgagtattataagcccatcatcatggataggtgtctttaggaactcaagccaccacccttgggttacaatgaatggcctggccttcaaacatgagattaaagacagtgacaatgcggaactcaactgtgcggtgctgcaagtgaataggctcaagagcgctcagtgcggaagtagcattatctatcactgcaaacacaaactatag

SEQ ID NO: 192353 - DNA, 696 bp, synthetic construct
  misc_feature 1..696: note = Description of Artificial Sequence: Synthetic coding sequence
  source 1..696: mol_type = other DNA
atgaacaagcagcggggcaccttcagcgaggtgagcctggcccaggatccaaaacgccagcagcgcaagcctaagggaaataagagctcgatcagcggaactgaacaagaaattttccaggtggaactgaacctgcagaacccctctctgaatcatcagggcattgacaagatttacgattgtcaggggctgttaccgccacccgagaaactcaccgcagaggtgttgggtataatttgtatcgtgttgatggctacagtcctgaagacaattgtgctgatccccttcttggaacaaaataactcttcccctaatacaaggacccagaaaactcgccattgtggtcactgcccagaagaatggataacctattcgaacagctgctactatatcggcaaagaacgccggacgtgggaagagtcactcttggcctgcacttctaaaaactccagcctcctgtccatcgacaatgaggaggagatgaagtttctggcttccatccttcccagctcatggatcggagtgttccgcaattccagccaccatccatgggtgactatcaacggtctggccttcaagcataagatcaaggattcggataatgcagagctgaactgcgccgtgctccaagtgaaccgcttaaaaagcgcccagtgcggatcctcaatgatttaccactgcaaacacaagttgtag

SEQ ID NO: 192354 - DNA, 696 bp, synthetic construct
  misc_feature 1..696: note = Description of Artificial Sequence: Synthetic coding sequence
  source 1..696: mol_type = other DNA
atgaacaagcagcggggcaccttcagcgaggtgagcctggcccaggatcccaagcgccagcagaggaagccaaagggtaataaaagcagtatctctggaaccgagcaggaaatcttccaggttgagcttaacctccagaaccctagcctcaatcatcagggcatcgacaaaatctacgactgtcagggattattgccgccccctgaaaaacttaccgctgaggtactcggaataatatgcattgttctgatggcaaccgtgctgaagacaatcgtactgataccttttcttgagcaaaataatttctcgcccaacacccgaacgcaaaaagccagacactgtggccactgtcccgaggagtggatcacctattccaacagctgttattacatcgggaaggagcgaaggacttgggaagaaagtctcctcgcctgcacctctaaaaattcttcgctgttgtcaattgataacgaggaagagatgaagttcctagcttccatcttgccaagctcctggattggagtgttccgaaattctagtcaccacccctgggtgactataaatggactcgccttcaagcacaagatcaaggactctgacaacgctgaacttaattgcgccgtgctgcaggttaaccggctcaaatcagcccagtgcggatcatccatgatttatcactgcaagcacaaactatag

SEQ ID NO: 192355 - DNA, 375 bp, synthetic construct
  misc_feature 1..375: note = Description of Artificial Sequence: Synthetic coding sequence
  source 1..375: mol_type = other DNA
atgatccccacccggcactgcggccactgccccgaggagtggatcacctactctaactcttgttactatatcggaaaagaaagacgcacatgggaagagagtctgctagcctgtacgtctaaaaacagtagtcttctgtccattgacaacgaggaagagatgaaattccttgctagtatactcccatcctcctggattggtgtcttcaggaattcatcccaccatccgtgggtaaccattaacggcctcgccttcaaacacaaaattaaagacagtgataacgccgagcttaactgtgccgtcctgcaagtgaacaggctcaaatccgctcagtgcgggtcaagcatgatatatcattgcaagcataagctgtag

SEQ ID NO: 192356 - DNA, 774 bp, synthetic construct
  misc_feature 1..774: note = Description of Artificial Sequence: Synthetic coding sequence
  source 1..774: mol_type = other DNA
atgagcaagcagcggggcaccttcagcgaggtgagcctggcccaggaccccaaatggcagcagcgaaagcctaaaggaaataagtcatcaatctctgggaccgagcaagaaatcttccaggttgaactcaacctgcagaacgcctcccttaatcatcaggggattgataaaatctacgactgccagggccttctgcctccacctgaaaagctgaccgcggaagtgttggggataatttgcatcgtgctgatggccacggttctgaaaacaattgtgctgattccctttctcgagcagaacaactcttcccccaacgcgaggacccaaaaagccagacactgtggccactgccccgaagaatggattacatatagtaactcctgttattatattggcaaggaacgaagaacttgggaggagtcactccaggcctgcgcaagcaagaactcttcttctctcctgtgtatcgataacgaggaggagatgaagtttctggcgagtatcttgccttcatcatggatcggggtgttcaggaactcgagccatcacccatgggtaaccatcaatggcctcgcctttaaacacgagatcaaggattccgatcatgcagaacggaattgcgctatgctgcacgtgcgcggccttatctccgaccagtgtgggtcttccaggatcattgtgagcatctcttttcgaatcaaagccctagagcttgccgtgcaccagattaagttctatatttgctcaaatcgcaacgacattatgattgcgtag

SEQ ID NO: 192357 - DNA, 723 bp, synthetic construct
  misc_feature 1..723: note = Description of Artificial Sequence: Synthetic coding sequence
  source 1..723: mol_type = other DNA
atgagcaagcagcggggcaccttcagcgaggtgagcctggcccaggatccaaaatggcagcagcgaaagcctaagggcaataaatcctctatttcagggaccgagcaagagatttttcaggttgaactgaacctacagaacgcctccctgaatcatcagggaattgataagatttatgactgccagggcttgctccctccgcctgaaaagcttacagcagaggttctcggtattatctgtattgtgctgatggcgacagtgctgaaaacgatcgtgctgatacccttcctcgaacagaataactcttccccaaataccaggactcagaaaacacgccactgcgggcactgccctgaagaatggataacatattctaactcctgttattacatcggaaaggagaggaggacttgggaagagtccctacaggcgtgcgctagcaaaaactctagttctctgctgtgcatcgacaacgaggaagagatgaagttcctcgcctctatcttacccagctcctggataggtgtgtttcgcaactcatcacaccatccatgggttaccatcaatggactcgcctttaagcatgaaattaaggactcagatcatgccgagcggaactgcgcgatgctgcatgtaagaggcttgatttccgaccaatgcggttcaagcagaatcattcgccgaggatttataatgcttaccaggctggtcctcaatagttag

SEQ ID NO: 192358 - DNA, 723 bp, synthetic construct
  misc_feature 1..723: note = Description of Artificial Sequence: Synthetic coding sequence
  source 1..723: mol_type = other DNA
atgagcaagcagcggggcaccttcagcgaggtgagcctggcccaggatcctaagtggcaacagaggaaacccaaaggcaataagtcctcaatctccggaaccgaacaggaaatctttcaggttgaactgaacttacaaaacgcctctctgaaccatcaaggaatcgataagatttacgattgtcagggcctcttaccccctcccgagaagctgaccgccgaggtactgggcataatctgcattgttcttatggccactgtcctgaagaccatcgtattgattcctttcctggagcagaataattcttccccaaatgcccgcactcagaaggccagacactgtggacactgtccggaggagtggattacatatagcaactcatgttattacatcgggaaggaaagaagaacctgggaggagagcctccaggcttgtgcctccaaaaactcgagctctctgctttgcatcgataatgaggaagagatgaagtttttagctagcatattaccttccagctggattggagtgttcagaaatagctctcatcacccatgggtgacaattaacgggctcgcttttaagcacgagatcaaagattccgaccatgccgagcgcaactgcgcaatgctccacgtacggggacttatcagcgaccaatgtggcagctcacgaattatccggaggggatttatcatgctgacccggttggtcttgaacagctag

SEQ ID NO: 192359 - DNA, 477 bp, synthetic construct
  misc_feature 1..477: note = Description of Artificial Sequence: Synthetic coding sequence
  source 1..477: mol_type = other DNA
atgaacaagcagcggggcacctacagcgaggtgagcctggcccaggatcctaaaaggcagcagcgtaagctcaaaggaaacaagataagcatcagtgggaccaagcaggaaatcttccaggtcgagctaaatctgcagaacgcttcctcagaccatcaaggaaatgacaagacctaccactgtaaggggttactcccaccccccgaaaagctgacagccgaagtgttaggcattatctgtatagtgctcatggccacagtgctgaagacgatcgtcctaattccctgcataggagtgctggagcaaaacaatttctcactcaataggcggatgcaaaaggccaggcattgtgggcactgtccagaagaatggataacgtacagcaacagttgctactatattgggaaagagagacggacatgggaggaacgggtttgctggccagtgcttcggcgcaccttgatatgctttttatag

SEQ ID NO: 192360 - DNA, 540 bp, synthetic construct
  misc_feature 1..540: note = Description of Artificial Sequence: Synthetic coding sequence
  source 1..540: mol_type = other DNA
atggccgtgttcaagaccaccctgtggcggctgatcagcggcaccctgggaatcatctgtctgagcttaatgtccactctcgggatcctgctgaagaacagctttactaaattatccatcgaaccagccttcacccccggtcccaatatcgaattacagaaagatagcgactgctgttcttgccaggagaagtgggtggggtaccggtgcaattgttatttcatcagctccgaacaaaaaacctggaacgaatcgcgccacttgtgcgccagtcaaaagagctcactgttacagttgcagaacaccgacgaactggactttatgtcctctagccaacagttttactggatcggtctgagttattctgaggagcacaccgcttggctctgggagaatggcagtgctctgagccagtacctctttccatctttcgagacatttaataccaaaaattgtatcgcttataatccaaatggcaacgctctcgatgagtcctgtgaggataagaatcggtatatttgcaagcagcagctaatctag

SEQ ID NO: 192361 - DNA, 447 bp, synthetic construct
  misc_feature 1..447: note = Description of Artificial Sequence: Synthetic coding sequence
  source 1..447: mol_type = other DNA
atggccgccttcaccaagctgagcatcgagcccgccttcacccccggacccaatatagaacttcagaaggactccgactgctgcagctgtcaggagaagtgggtgggatacaggtgtaattgttatttcatttcttccgagcagaaaacttggaacgaaagccgacatctctgcgccagtcaaaagagtagccttttgcagctgcaaaataccgacgaactggattttatgtcatcatcccaacagttttattggataggcctcagctacagcgaggaacataccgcctggttgtgggaaaatggcagcgccctttcgcagtatttgttcccaagtttcgagacttttaacacaaaaaactgtatagcttataatccgaatggaaatgctctggatgaatcctgcgaggacaagaaccggtatatatgcaaacagcaactgatctag

SEQ ID NO: 192362 - DNA, 540 bp, synthetic construct
  misc_feature 1..540: note = Description of Artificial Sequence: Synthetic coding sequence
  source 1..540: mol_type = other DNA
atggccgtgttcaagaccaccctgtggcggctgatcagcggcaccctcggcatcatttgcctctcattgatgtccaccctcgggatactcctcaaaaacagctttaccaaacttagcatcgagccagcattcacaccaggacctaacatcgagctccagaaggattcagactgttgtagctgtcaggagaagtgggtgggctacagatgtaactgttattttataagctccgagcagaagacctggaatgaaagtcgccacctgtgtgcgtctcagaagtcatccctgctacaactccaaaatactgacgaattggactttatgtcatcttctcagcaattttattggattgggctcagttactctgaggagcatactgcctggttatgggagaatgggtcggcgttgtcgcagtacctttttccctcgtttgaaacatttaatacaaaaaactgcatcgcttacaacccgaatggcaatgcactggacgagtcatgtgaggacaaaaatcggtatatctgtaagcagcaattaatctag

SEQ ID NO: 192363 - DNA, 543 bp, synthetic construct
  misc_feature 1..543: note = Description of Artificial Sequence: Synthetic coding sequence
  source 1..543: mol_type = other DNA
atggccgtgttcaagaccaccctgtggcggctgatcagcggcaccctgggcatcatatgtctgtcactaatgtccacactgggaatcttactgaagaatagctttactaagctgagtatcgaacccgccttcactcccggacccaacatcgagctgcaaaaggattccgactgttgctcttgtcaggagaaatgggtcggataccgttgcaactgctacttcatcagctccgagcaaaagacatggaatgagtctaggcacctttgcgcatcgcaaaaatcctcactcttgcagcttcaaaatacggacgagctgcaggatttcatgtcaagctctcagcaattctactggatcggcttgagctacagcgaggagcacacagcctggctttgggaaaacggcagtgcactctctcagtacctttttccgagctttgagacattcaacacaaagaattgcattgcttataatcccaatggcaatgccctggatgaaagttgcgaagataagaaccggtatatctgcaagcaacagctgatttag

SEQ ID NO: 192364 - DNA, 156 bp, synthetic construct
  misc_feature 1..156: note = Description of Artificial Sequence: Synthetic coding sequence
  source 1..156: mol_type = other DNA
agcgccctgagccagtacctgttccccagcttcgagaccttcaacaccaagaattgtattgcctacaatccgaacgggaacgcacttgacgagtcttgcgaggacaaaaaccgctatatctataaggtgttgttgtgttgccctggatggtcttag

SEQ ID NO: 192365 - DNA, 420 bp, synthetic construct
  misc_feature 1..420: note = Description of Artificial Sequence: Synthetic coding sequence
  source 1..420: mol_type = other DNA
atggccgccttcaccaagctgagcatcgagcccgccttcacccccgggccaaatatcgagttgcaaaaggatagcgactgttgttcttgtcaggagaagtgggttgggtatcgatgcaactgctattttatctctagcgaacagaagacgtggaacgaatcacgccacctatgtgcgtcccagaagtcctctctcctgcagctccagaacacagacgagcttgactttatgtccagtagtcaacagttctactggattgggctgagctacagcgaggaacataccgcctggttgtgggaaaatggcagcgccctttcacagtatttatttccgtctttcgaaacctttaacacgaaaaactgcatcgcttataatcccaatggtaacgcccttgacgagagctgtgaagacaagaattag

SEQ ID NO: 192366 - DNA, 699 bp, synthetic construct
  misc_feature 1..699: note = Description of Artificial Sequence: Synthetic coding sequence
  source 1..699: mol_type = other DNA
atgcaggacgaggagcggtacatgaccctgaacgtgcagagcaagaaacgcagctctgcccagacctcccaacttacttttaaagactatagcgtgaccctgcattggtataagatactgctgggtataagcggtacagtcaacgggatactgactctgacactaattagcctgatattgctggtgtcacagggcgtcctgctgaagtgtcagaaggggtcctgttctaatgccacacagtacgaggacaccggcgatctgaaagttaataacgggactagaagaaacatctccaacaaagacttgtgtgccagccggtctgcggatcagacagttctgtgccaatctgaatggctgaagtatcaggggaaatgttgttactggttcagtaatgagatgaaaagctggagcgacagctacgtctattgcctagagcggaagtcgcatctcctgattatccacgatcaactcgagatggccttcattcagaagaacctgagacagctgaactatgtctggatcggcctcaatttcacatcactgaagatgacatggacatgggtggatgggagtccaatcgacagtaaaatcttctttatcaaggggcctgcaaaggaaaacagctgtgccgccatcaaagagtccaagatcttctccgaaacctgtagctccgttttcaagtggatttgtcagtattag

SEQ ID NO: 192367 - DNA, 549 bp, synthetic construct
  misc_feature 1..549: note = Description of Artificial Sequence: Synthetic coding sequence
  source 1..549: mol_type = other DNA
atgcaggacgaggagcggtacatgaccctgaacgtgcagagcaagaaacgctcctcagcccagaccagtcagcttacgttcaaggactattccgttaccttgcactggtacaagatcctacttgggatcagcggcactgtgaacggtattctcacactgacgctgatctcactgattctgctcgttctgtgtcaaagtgaatggttgaaataccagggcaagtgttgctactggttctctaatgaaatgaagtcttggtccgacagctatgtgtattgtctcgagcgcaagtcccatcttctgatcatccacgaccagctggagatggcttttatccagaagaatctccgtcaactgaactacgtgtggattgggctgaactttacctctctcaaaatgacctggacatgggtcgacggttctcccatagactcaaagattttctttatcaaggggcctgctaaggaaaattcttgtgcagcgattaaggaaagtaaaattttttctgaaacatgtagcagtgttttcaagtggatttgtcagtattag

SEQ ID NO: 192368 - DNA, 195 bp, synthetic construct
  misc_feature 1..195: note = Description of Artificial Sequence: Synthetic coding sequence
  source 1..195: mol_type = other DNA
atgcaggacgaggagcggtacatgaccctgaacgtgcagagcaagaaacggtcctccgcacagacctctcagttgacctttaaggactactctgtgaccctccactggtataagattctcctcggaattagcggcacagtgaatgggatactgactctcacacttattagcctgatattgctggatagctcctag

SEQ ID NO: 192369 - DNA, 588 bp, synthetic construct
  misc_feature 1..588: note = Description of Artificial Sequence: Synthetic coding sequence
  source 1..588: mol_type = other DNA
atgaccgacagcgtgatctacagcatgctggagctgcccaccgccacacaggctcaaaatgactatggcccccagcagaaaagcagcagcagcagaccatcctgcagctgcctagtggccatcgcgttgggcctgttgaccgccgtactgctttccgtgctgctgtaccaatggattctctgccagggctctaattatagtacctgcgcgtcatgcccctcatgccctgatcggtggatgaagtatggtaaccattgttattatttcagcgtcgaggaaaaagattggaattctagcctcgagttctgtctggcgcgcgattcacacctgctggtgatcactgataatcaagagatgtctctcttgcaggtgttcctcagtgaggctttctgctggatcgggctgagaaataatagcggatggcgctgggaagatggaagccccctaaatttctcacgcatttcatctaatagctttgttcagacttgcggtgccatcaataagaacgggctgcaggcaagctcctgcgaagtccccttgcactgggtatgcaaaaaatgcccctttgcagaccaagctctcttttag

SEQ ID NO: 192370 - DNA, 570 bp, synthetic construct
  misc_feature 1..570: note = Description of Artificial Sequence: Synthetic coding sequence
  source 1..570: mol_type = other DNA
atgaccgacagcgtgatctacagcatgctggagctgcccaccgccacacaagcccagaacgactacggtccccagcagaaatctagctcctcaagacccagctgttcgtgtctagttgctatcgctctaggactcctgactgccgttctgttatccgtgctactgtatcagtggatcttatgccaaggcagtaactatagcacatgcgcaagttgcccgtcttgccctgataggtggatgaaatatgggaaccattgttattatttttccgtggaggaaaaagattggaattccagcctcgaattttgccttgcccgcgattcacatctgctggtcatcaccgataatcaggagatgtccctccttcaggttttcttgtcggaggccttctgctggatcggcctgcgtaataatagcggatggcgctgggaggacggtagtccactgaacttttcccgaattagtagcaacagcttcgtgcagacttgcggagctattaataaaaacggcctacaagcatcatcctgtgaggtgcctttgcactgggtgtgcaaaaaagtcaggctgtag

SEQ ID NO: 192371 - DNA, 651 bp, synthetic construct
  misc_feature 1..651: note = Description of Artificial Sequence: Synthetic coding sequence
  source 1..651: mol_type = other DNA
atgggctggatccggggccggcggagccggcacagctgggagatgagcgagttccacaattacaatctggacctgaagaaaagtgatttctcaaccaggtggcagaagcaaaggtgtccggtggtcaagtcaaagtgcagggaaaacgcctcaccattctttttttgttgctttattgcggtcgcgatggggattagattcattatcatggttaccatctggtcggctgtgttcctgaatagtctctttaaccaggaggtgcaaattcctctgacggaaagctattgtggcccgtgccctaagaattggatctgctataagaataattgctaccagttttttgacgagtcaaagaactggtacgagtcccaagcttcctgtatgagtcagaacgcctccctgcttaaagtgtattctaaggaagatcaggacctccttaagctggtcaagtcataccactggatgggtttagtgcatattcctactaacggtagctggcagtgggaggatggctccatcctctcacccaacctcctgacgatcatagagatgcagaaaggtgattgcgctctatatgcaagctcatttaaaggatacattgaaaattgctctaccccaaacacttacatttgtatgcagcgcactgtatag

SEQ ID NO: 192372 - DNA, 243 bp, synthetic construct
  misc_feature 1..243: note = Description of Artificial Sequence: Synthetic coding sequence
  source 1..243: mol_type = other DNA
atgggctggatccggggccggcggagccggcacagctgggagatgtcagagtttcacaattataatctggatcttaaaaaatccgattttagcactcgatggcagaaacagcggtgccccgtggttaagtctaaatgccgggaaaacgcctctccattctttttctgctgcttcatcgcagtcgctatgggcatccgcttcattattatggtgacaatttggagcgctgtgtttctgaattag

SEQ ID NO: 192373 - DNA, 651 bp, synthetic construct
  misc_feature 1..651: note = Description of Artificial Sequence: Synthetic coding sequence
  source 1..651: mol_type = other DNA
atgggctggatccggggccggcggagccggcacagctgggagatgtcagagtttcataactacaatctcgatctcaaaaaatccgatttctcaacgcgctggcagaagcagagatgcccagtcgttaagtcaaaatgtcgcgaaaatgcatctccgttcttcttctgctgcttcatcgctgtggcaatggggattcgtttcattattatggtgaccatctggtccgcagtcttcctgaacagtttgtttaatcaggaggtccaaatcccactgacagaatcctactgtggaccctgtcctaaaaattggatttgctacaaaaacaactgttatcagttcttcgacgagagcaagaactggtatgaatcccaggcatcctgtatgtcccagaatgcctcgttgctgaaagtgtactccaaagaggaccaggacctcctgaaactggtgaagtcctatcactggatgggtctagttcacatacctactaacggtagttggcagtgggaagatggcagcatcctgtcccccaatctgctgactattatagaaatgcagaaaggagactgcgccctctacgcgagcagcttcaagggatacatcgagaattgtagcacacccaacacatacatctgcatgcaacggaccgtgtag

SEQ ID NO: 192374 - DNA, 537 bp, synthetic construct
  misc_feature 1..537: note = Description of Artificial Sequence: Synthetic coding sequence
  source 1..537: mol_type = other DNA
atggaccggcccggccccggcagcgcccggcccggccggaccgtgcacgtgtgggggtatagagtggagtggaaagttaggaatggacgaaaactgcagccttcggagtgggcaggtaggggagacttgggaggcttcaagcgccgttggaaagatacccgagcaacagtgggtaccactttcagacgtaggagtagagtatcgttagtgggcgagctgtcgaagttccctctgccatccgattcttctggcggaaaatcatcctcgtcatttgcgcgtggcgcactcgcctggtgtagacagcgtaatcccaatccatcctgcgcagcggcagaaacgggagccagaacgtccctccctaaggaaagatgccggggctggaggctgggcaactggctgcacaagcatccacaccccaatacttgtcctcgcctacctgcctgctggctgccccctatcctgacagaacggggagaaagagtccccaagttggtacccctccttgcctgctaccccaaaagcaaaccaaaggattag

SEQ ID NO: 192375 - DNA, 1902 bp, synthetic construct
  misc_feature 1..1902: note = Description of Artificial Sequence: Synthetic coding sequence
  source 1..1902: mol_type = other DNA
atgctgcggatgcgggtgcccgccctgctggtgctgctgttctgcttccgcggccgggccggcccttcgccacactttcttcagcagccagaagacctggtggtcttattgggagaggaagctaggctgccctgtgccctgggcgcatattgggggctagtgcagtggactaaaagtggcctggcccttggcggtcagcgtgatctgccaggctggtcccgatactggattagcggaaacgctgccaatggccagcacgacctccacatcagaccagttgaactcgaggacgaggctagctacgagtgccaagccacccaggccggcctacgatcccgaccggcacaattgcacgttctggtgcctccagaagcgcctcaggtgctcggaggcccctctgtctcactggtggcaggggtccccgcaaatctgacatgtcggtcccggggtgatgccaggccaacacccgaattgttgtggttcagggatggagtgctcctggacggcgccacgttccatcaaactctgctcaaagaagggacacccgggtccgtcgagtctacattgactctaacgccattttcccatgacgatggcgctaccttcgtgtgtagggccaggagccaggcccttcccaccggccgagacacagcgataactctgtccctgcagtaccctccagaggtcacactatccgcatccccccacacagtccaagaaggcgagaaggtgatctttctgtgccaggctactgctcagcccccggtgacagggtataggtgggcaaaagggggctccccggtgctgggagctagagggcctcggctggaagtagtcgcagatgcaagctttctgaccgagcccgtgagttgtgaagttagtaatgccgtcggatcagcaaataggagtacggctctggacgtgctgtttggaccaatcctgcaggccaagcccgaacctgtgagtgttgatgtgggtgaggacgcctcattcagttgcgcgtggcgggggaatccgctgccacgggtgacatggacccggcgagggggagcccaggtgctggggtcgggcgccacactgaggcttccatccgtgggcccagaagatgcaggggattatgtatgcagagctgaagccggcctgtcaggcctgagaggaggagcagctgaggcccgcctaactgttaatgcccctccagtggtcaccgcactgcactccgcccccgcttttctgcgcgggccagctcgactccagtgcctggtttttgctagccctgccccagatgcagtggtatggtcgtgggacgaagggttcttggaagctggctcccaaggaaggttcctcgtggagacctttccagcccccgaatcacgaggtggtctcggcccaggactgatttcagtgctgcatatcagtggtacacaggaatccgatttctcacgatcctttaattgttctgcacggaataggctgggcgaaggtggcgcccaggcaagcctgggacggagagacctgctccctaccgttcggattgtggctggcgttgccgctgctaccactactcttttaatggtcattactggggtggccctgtgttgctggcggcactctaaagcttctgcatccttttcagaacagaaaaacctgatgcgcatcccaggctctagtgacggatcctcttcacgtgggcccgaggaagaggagaccggatcaagagaggaccgcggtccgatcgtgcacaccgaccatagtgacttggttctggaggaaaagggcaccctcgagaccaaggatccaaccaatggctactataaggtccggggtgtaagccctcctgcctcaccggactccagggtgacttcgttccaatggaaatcccccggcatcagtaaccttccatag

SEQ ID NO: 192376 - DNA, 660 bp, synthetic construct
  misc_feature 1..660: note = Description of Artificial Sequence: Synthetic coding sequence
  source 1..660: mol_type = other DNA
atgctgcggatgcgggtgcccgccctgctggtgctgctgttctgcttcaggggtcgcgccgggccctcaccacacttcttgcaacagccagaggacttggtagttttgctgggcgagggcggcgctcaggcgagcctgggtcgccgagcgagcgcgagctttagcgaacaaaaaaatctcatgcgcatccccggatctagcgatggatcctcctcacgtggccccgaagaggaggaaaccggctcaagggaggatcggggacctatagttcacactgatcacagcgacctggtcctggaggagaaaggaactctcgagactaaagacccaactaacgggtattacaaggtacgaggagtttcagtgtctctgagcctaggagaagcgccgggcggtgggctgttcctccccccccctagtcccctgggaccacctggcacacctactttttacgactttaatcctcatctgggcatggtgccaccatgcagactgtacagggctcgagctggatacctcacgaccccccacccaagggctttcactagttatatcaagcccacttcctttgggcctcccgatctagctcccggcacacccccctttccatacgccgcttttccgactccctcccacccaagactccagacccatgtttag

SEQ ID NO: 192377 - DNA, 2067 bp, synthetic construct
  misc_feature 1..2067: note = Description of Artificial Sequence: Synthetic coding sequence
  source 1..2067: mol_type = other DNA
atgctgcggatgcgggtgcccgccctgctggtgctgctgttctgcttcagggggcgggcaggtcctagtccacactttcttcaacagccagaagatttggtggtgcttcttggagaggaggctagattgccatgcgccctgggggcttactggggcctcgtgcagtggaccaaatcgggcctggccctgggaggacaaagggatctgcctggctggtcacgctattggatctccgggaacgcggcaaacggccagcatgacctccatattagacctgtggaattggaggacgaagcctcttatgagtgccaggccacccaagccggcttacggtcccggcccgcccagctgcatgtgttggtccccccagaggccccacaggttttaggtggaccttcagtctcccttgttgccggcgtaccggccaatctgacatgtcggtcgagaggcgacgctcggcccacaccagaactgctgtggtttcgtgacggagtgctcctggacggcgccactttccaccagacactgctaaaggagggtacgcccggtagtgtggaaagcacattgacactacccaccggaagggacactgccattacactgtccctgcagtaccctccggaggtcacactctccgcttcaccgcacacagtccaagagggagagaaagtgatatttctgtgccaggcaaccgcgcagccaccagtgactggctacagatgggcgaaaggggggtctcccgtgctgggggcccgcggtccgcgattggaggtggtagcagatgcaagctttctcaccgaacccgtgtcctgcgaggtaagcaacgcagtgggttcagccaaccgatcaactgcactcgacgtgttattcggacccattctgcaggctaagcctgagcccgttagcgttgatgtaggggaggacgcttcttttagttgtgcttggaggggcaatccacttccccgcgtgacctggacccgacgcggaggggcccaggtgcttggctcaggcgcgacactccgcctcccgagtgttggtccggaagatgccggtgactatgtgtgccgggccgaggcgggacttagcggacttcgcggcggtgctgctgaagcgagattgaccgttaatgcgccacctgtggttaccgccctgcactccgcccccgccttcctccggggccccgctagactccaatgcctggtgtttgccagtcctgctcctgatgctgtggtgtggtcttgggatgagggctttctcgaggcaggctcccaggggcgctttttggtggaaaccttccctgcgcccgagagtaggggcggcctgggacctgggcttatttctgtgctgcacatctcgggaacgcaagagtccgatttctctagaagcttcaattgctcagcccggaacaggctcggcgaagggggcgcccaggctagtctggggaggcgagacctacttcccacagtgagaattgtggccggggtggctgcggcaactaccactctattaatggttattaccggtgttgctttgtgctgttggcgacactctaaagcctctgcttccttctccgaacagaagaacttgatgcgaatacccggttcatctgatggttcctccagccgtgggcctgaagaagaggagactggatcaagagaggatagaggccccatagtacacacggatcacagcgatctagtcctcgaagaaaagggaaccctggagaccaaagaccctacaaacggctattacaaggtccgtggtgtgagtgtatcactgagcctgggggaagcacctggtggtgggttgtttctccctccgccatcaccactgggcccgcccgggactccgactttctacgatttcaaccctcacctaggcatggtacctccttgtaggttgtacagggcacgcgccgggtacctcactacgccccatcctcgggctttcactagttatataaaacccacatctttcgggccccctgatctcgctccgggcacaccgcccttcccttacgcggcgttcccgactccttcacacccacgactgcagacccatgtgtag

SEQ ID NO: 192378 - DNA, 1752 bp, synthetic construct
  misc_feature 1..1752: note = Description of Artificial Sequence: Synthetic coding sequence
  source 1..1752: mol_type = other DNA
atgctgcggatgcgggtgcccgccctgctggtgctgctgttctgcttccgcgggcgggcaggatggagccgatactggattagcggcaacgctgcaaatggccagcacgatttgcatatacgccctgtggagctcgaagacgaagcctcctacgaatgtcaagccacacaggccgggcttcggtcgcgccccgcacaacttcacgtgctggtccctcctgaggccccacaagtgttaggcggcccaagcgtttctttggtggccggagtgccagccaacttgacgtgtcgatcccggggcgacgcccggccgaccccagaactgctgtggttccgtgacggagtactgcttgatggggcgacattccaccagacgttgttgaaggagggcactcctggatctgtcgagtccaccctcacacttactcccttttctcacgatgatggcgcaacgttcgtgtgccgcgcccgatcacaagcactgcccactggtcgggataccgcgattacgttgagcctacagtatccaccggaggtcactctgtccgccagtccgcacaccgtacaggagggagagaaggttatatttctctgccaggctactgcacagccgcctgtcaccggatataggtgggcaaaagggggaagcccagttctcggtgcccgaggcccacgactggaggttgttgcagacgcatccttcctgactgaacccgtctcatgcgaggtgagcaacgccgtggggagtgcaaataggtctacagctctggacgtgctcttcggccccattctgcaggcaaaacctgagcccgtatccgtcgacgtcggcgaggatgcaagcttcagttgtgcctggaggggcaacccacttccgcgtgtaacctggaccagacgcggaggggctcaggtgctgggctcaggggcaactctgcgcctgccatctgtggggccagaagatgccggcgattacgtatgtcgtgctgaggccggtctgagtgggctgaggggtggcgccgccgaagctcgtctaaccgtcaacgctcctcccgtggtcaccgccctccattcggcacccgccttcctgcggggccccgcacggctgcagtgcctggtgttcgcctctcccgctccagatgctgtggtgtggtcttgggacgaagggtttcttgaggccggcagccagggtcggtttcttgtggagacattcccagctcccgaaagtagggggggcctgggcccagggcttatcagcgtgcttcatatttctggcacacaagagagtgatttctcgagatccttcaactgttctgcacggaacagactgggcgaggggggcgctcaggcatctttgggcaggcgtgatctgttgccaactgtgcggatcgtggcaggagttgcagcagccactactacacttctgatggtgattacgggagtcgccctgtgctgctggagacactccaaagctagcgcctccttttcagagcagaagaacctcatgagaatacccgggagcagcgacggctccagctcaaggggaccggaggaagaggagaccggctcccgggaagatcgcggccctatcgtacacacagaccattctgacttggtgcttgaggaaaaaggcacactggagaccaaagaccctacgaatggttattataaagtgagaggtgtgagtccaccagcctcacccgactcccgcgtcacatctttccaatggaagtcgccagggatctcaaacctcccctag

SEQ ID NO: 192379 - DNA, 2127 bp, synthetic construct
  misc_feature 1..2127: note = Description of Artificial Sequence: Synthetic coding sequence
  source 1..2127: mol_type = other DNA
atgctgcggatgcgggtgcccgccctgctggtgctgctgttctgcttccgtggaagagctgggcctagtccacattttttgcaacaaccagaagacttggtggtactgctgggggaagaggccaggttgccttgcgccctcggtgcatactggggactggttcaatggacaaaatctggccttgccctgggaggacaacgggatttaccaggttggtccaggtactggattagcggtaacgccgctaacggccaacacgatttacacatcagaccagttgagctggaggacgaagcttcatatgagtgtcaggccactcaggccgggttgagaagccgacccgctcagctgcatgtcttggtgcctccagaagctccacaagtgttaggaggtccgtcggtgtcccttgtagctggggtcccagccaatttgacatgcagaagtcgcggagatgctagacccactcccgagctcctctggtttcgggatggggtgttactggacggggcgacatttcatcagaccttgttgaaggaagggactcccggcagcgtggaatccacactgacgctgaccccattcagtcatgacgacggcgccaccttcgtgtgtcgggcacgcagccaggcccttcctactggccgcgacaccgccattactttgtctctgcagtatcctcccgaggtgacgctttctgccagtccacacaccgtacaggaaggggaaaaggtcatctttctctgccaggccacggcccagcctcctgttaccggctacagatgggccaagggcggatctccggttctgggggctagaggtccacgactcgaggttgtcgccgatgcttccttcttgaccgaaccagtgtcatgcgaggtttccaacgccgtggggagcgctaatcggtctaccgccttagacgtgctgttcggtcctatcctgcaggccaagccagagcctgtaagcgtagacgttggtgaagacgctagcttcagctgtgcttggcgaggaaatcccctaccccgggttacttggacgaggagaggaggggcacaggttcttgggtccggagctactttgcggctaccttccgtcggccccgaagatgcgggggactacgtctgccgagccgaggctgggttgtcggggctcaggggaggtgccgcagaagcccggctgacggtgaacgcgccaccagtggtaacggctttacatagcgccccagcgttcttaaggggtcccgccagattgcagtgtctcgtgtttgcttctcctgctcctgacgctgtggtgtggagctgggatgagggcttccttgaggctggaagccaggggcgatttcttgttgaaacattccctgcccccgaatcccgtgggggccttgggcctggcctgatttccgtgcttcacatttcagggactcaagagtcagacttctcgcgctcctttaactgttccgcgcggaaccgattaggcgagggcggggcccaggcgtccttaggaagaagagacttgttaccaacggtccggatagtggctggggttgccgccgcgacgaccaccctgctaatggtcatcactggagtggccctgtgctgctggcgccattcgaaagccagcgcttccttctccgagcagaaaaaccttatgcgcatcccaggaagtagcgacggtagcagtagccgaggtcctgaagaagaggagacggggtccagagaggatagagggcccatagttcacacagatcactcggatctggtgttagaggagaagggcacattggagactaaggaccccaccaacggctattacaaagtcagaggagttagcgtgtctctctcactgggcgaggcacccggcgggggactgtttctgcctcctccgtccccacttggaccccccgggacacctaccttctacgacttcaacccacatttgggcatggtccccccctgccgcctctaccgcgcgagagcgggttacctgaccaccccccatccacgggccttcacttcctatatcaagcctacaagtttcggcccccctgacctcgcccccggaaccccaccctttccctatgcagccttcccaactccctctcaccctcgtcttcaaactcatgtgtag

SEQ ID NO: 192380 - DNA, 738 bp, synthetic construct
  misc_feature 1..738: note = Description of Artificial Sequence: Synthetic coding sequence
  source 1..738: mol_type = other DNA
atggccgtgatcatcggcgtggccgtgggcgccggcgtggccttcctcgtactgatggcgaccatagtagcgttctgctgtgcacgaagtcaacgcaacttgaagggggtggtgtctgctaagaatgacatcagagtggagatagtccataaggagccagccagcggaagggagggagaggagcactctaccataaagcagctcatgatggatcggggagaatttcaacaagattcagtgctaaagcagcttgaggtattgaaagaggaggaaaaggagtttcaaaatctaaaagatcccaccaatgggtactactctgtgaacacattcaaggaacatcactccacgcctaccatttcactgtcttcttgtcagcccgacctcaggcctgcaggtaagcagagggtacccacgggaatgagctttacaaacatttattcgactctaagtggccagggacgcctctatgactacgggcaacggttcgtgcttggcatgggatcctcatctattgagttgtgcgaaagggagtttcagaggggttctttgtccgactcctctagcttcctagacacacaatgcgattcttccgttagcagcagtggcaagcaggacgggtatgtgcagttcgacaaagccagcaaggccagcgcatcatcctcacaccacagccaatcatcttcccagaactccgacccatccagaccacttcagcgacggatgcagacacacgtatag

SEQ ID NO: 192381 - DNA, 2337 bp, synthetic construct
  misc_feature 1..2337: note = Description of Artificial Sequence: Synthetic coding sequence
  source 1..2337: mol_type = other DNA
atgaagcccttccagctggacctgctgttcgtgtgcttcttcctgttcagccaagagctgggactccagaagcgcgggtgttgcctagtccttgggtatatggcgaaagataaattccgaaggatgaacgagggccaggtttatagcttcagccagcagccccaggaccaggttgtggtcagtggacagccagtcacactgctctgtgcaatcccggagtatgatgggttcgtgctctggattaaggacggactggcccttggtgttggaagggacctctcttcttacccacagtatttggtcgtagggaatcatcttagcggagaacatcatcttaagatcctgagagcggaactacaagacgatgctgtgtacgagtgccaggcaatacaggccgctattcgtagtagacctgcacgactcacagtcctggtcccgcccgatgaccccgtaatcctcggggggcccgttatatcccttcgtgccggcgatcccttgaatctcacatgccacgctgataatgccaagcctgctgcaagtatcatttggttgcgtaaaggcgaggtgatcaatggtgccacctattctaagaccctgttgcgcgacggcaagagagaaagcattgtttccaccctttttattagccccggcgacgtcgaaaatggtcagtccatcgtatgccgcgccacaaacaaagctatccccgggggcaaagagacctctgtgacaatagatattcaacaccctcctctggtgaatctgagcgttgagccgcaaccagttctggaagacaatgttgtaacatttcattgctctgctaaagctaacccagctgtgacccagtataggtgggccaaacgagggcaaataatcaaggaggcttcaggggaggtctaccgaaccaccgtggattacacttatttcagtgaacctgtctcgtgcgaggtcaccaacgctctgggtagcaccaacttgtcacgcacagtcgatgtgtattttggtcctaggatgaccacagagccgcagtcacttctggtagatttgggaagtgacgctattttttcgtgtgcatggaccggaaatccgagtctgaccattgtatggatgaagagaggatccggagtcgttctttctaatgaaaagaccttaaccctgaaatcggtaaggcaggaggacgccggaaaatatgtgtgccgtgctgtggttcctcgagttggagccggcgaaagagaggtgactctgacagttaatggaccgccaatcatctctagcactcaaacccagcatgctttgcacggcgagaaaggtcagattaaatgctttattaggtcaactccgccaccggaccgtattgcctggagttggaaagagaatgtgctggagagcgggacatccggccgttacacagtcgagactataagcactgaagaaggggtcatttccactttgacaatatccaatatagttagagccgacttccagaccatttacaactgtaccgcctggaatagctttggctctgatactgaaattatccgactgaaagagcaaggttcagagatgaagtccggggccgggctggaggcagaatcagtgcctatggccgtaatcatcggagttgcagtgggggccggcgttgcctttctggtgttgatggccacaatagtggcattttgctgtgctcgaagccagaggaatctgaagggggttgtgagcgccaagaacgacatccgggtggagatcgtacacaaagagcctgcatcaggacgcgaaggggaggagcatagcacaattaaacagctgatgatggaccgaggggagttccagcaggattctgtgctgaaacaactggaggtgctgaaggaagaagaaaaggagttccaaaacctgaaagatcccaccaacggctattattccgtcaacaccttcaaagagcatcactctacacctacaatttctctgtcctcgtgccagccagatctgaggcctgccgggaagcagagggtccctaccgggatgtcttttacaaatatatattcaactctatcaggccaaggcaggctctatgattatggacagcggtttgttttgggaatgggaagttcctctatcgagttgtgcgagcgcgagttccaacgcggctccctttccgattccagcagcttcctggatacacagtgcgattcatcagttagtagcagtggaaaacaggatggctatgtgcagttcgataaagcctctaaggcttctgcttctagcagccatcacagccagagttcttcacagaactcagatccatccaggccgctgcaaaggcggatgcaaacccatgtgtag

SEQ ID NO: 192382 - DNA, 1803 bp, synthetic construct
  misc_feature 1..1803: note = Description of Artificial Sequence: Synthetic coding sequence
  source 1..1803: mol_type = other DNA
atgaagcccttccagctggacctgctgttcgtgtgcttcttcctgttcagccaagaactcgggctacaaaaacgcggatgttgtttggtcctggggtacatggctaaagacaaatttcggaggatgaacgagggtcaggtgtatagcttttcccaacaacctcaggaccaggtggtggtcagtgggcagcctgtgaccctcctctgcgccatcccggaatatgacgggttcgtcctttggatcaaagacggcctggcgttgggcgtagggcgagatttatctagttaccctcagtacttggtggttgggaatcatctgtccggcgagcatcatttaaagatactgcgcgccgagctccaggacgatgcagtctacgaatgtcaggcgatccaagcagcaattaggagcagacctgcccgactgacagtcctggtaccaccagatgacccagtgattctagggggacctgtcatttccctgcgggcaggggatcctctcaatctcacgtgccatgctgataacgcaaagccagcagctagcattatttggctccgtaaaggggaggtcatcaatggagcgacctacagtaagacccttctccgagacggtaagcgggaaagtattgtctctactctgttcatcagccctggagatgtggaaaacgggcagagtatcgtatgcagggctactaacaaggccattcccggggggaaagaaaccagtgtcaccatcgacattcaacacccccctcttgttaacctctccgtggaaccacagcctgtgctcgaagacaatgtggtgactttccattgctcagccaaagcaaatcctgcagtgacccagtatcgttgggcaaaaagagggcagatcatcaaagaggctagcggggaggtgtacagaacgactgtggattatacatacttttcagagcccgtttcatgtgaagtaacaaatgctctgggatcaacaaacctgagtagaactgtcgacgtatactttgggcctcgaatgactactgagcctcagtccctccttgttgacctgggaagcgacgctatcttctcctgtgcttggacgggcaatccttctctgacgatagtgtggatgaagaggggaagcggtgtcgtcttgagcaacgagaagaccctgaccctcaaatctgtacggcaggaggacgccggcaagtatgtgtgccgagcggtagtaccgagagtgggagctggcgagcgagaggtgaccttaacggtcaacggcccacctattataagctcgacccagacgcagcacgccctgcacggtgagaaaggtcagattaaatgcttcattcgttccacacccccgcctgacaggatcgcctggagttggaaggaaaacgttctggaatcaggaacctctggacggtacacagtggagaccataagcacagaggagggcgtgatcagcaccttaaccattagtaacatagtgagagccgattttcagaccatctacaattgcaccgcatggaattcatttggctctgacacagaaatcataaggttgaaagaacaagggtccgagatgaaaagtggtgctggcctggaagctgaaagcgtccctatggctgtgattattggcgttgccgtgggggccggcgtggccttcctcgttctcatggctaccatcgtcgctttttgctgcgctcgcagtcagagatcaacaggaggaagatccggcatcagcggaagagggacagagaaaaaggctagactgagactcccacgtagggcatcgaagcaggaatgcaatgagcagggctcttag

SEQ ID NO: 192383 - DNA, 2301 bp, synthetic construct
  misc_feature 1..2301: note = Description of Artificial Sequence: Synthetic coding sequence
  source 1..2301: mol_type = other DNA
atgaagcccttccagctggacctgctgttcgtgtgcttcttcctgtttagccaggaactgggactgcagaagcgaggatgttgcctagtcttaggatacatggctaaggacaaattccgacgtatgaatgagggccaagtctactccttttcccaacagccccaggaccaggtggtggtgtctggacaacctgtgaccctgctttgcgccatccctgagtatgatggcttcgtcctgtggatcaaagatggcctggctctgggagttgggagggatttgagctcctacccccagtacctcgtggtgggtaatcacctgtctggggaacatcatctgaagattttgcgtgctgagctgcaagatgatgcagtctatgaatgccaggccatccaagccgcgattcgatcacggcccgctaggctgaccgtcctagtgccccctgatgaccccgtgatcctcggggggcctgtgattagcctgcgtgccggcgacccactcaatttgacatgtcacgcagacaacgcaaagcctgcagcctccataatctggctccgcaagggtgaagtcataaatggcgccacctattctaaaactctactaagggacggcaagagagaaagtattgttagcaccctcttcatcagcccgggggatgtcgagaacgggcagtctattgtgtgcagggccaccaacaaggctatccccggcggcaaagagacgtccgtgacaattgatatacagcatccacccttggttaacctcagcgtggagcctcaacctgtgttggaagataacgtggtgaccttccactgctcagcaaaggcaaaccctgcggtgacccagtaccgatgggctaagcgtggtcagattattaaggaggccagcggtgaagtctatagaaccacggtagattatacgtacttttctgaaccagtcagctgtgaagtgactaacgctttgggctccactaatctttcccggaccgttgatgtttattttggacccagaatgactaccgaaccccaatccctgcttgtggatctgggatcggacgctattttcagttgcgcttggactggcaacccaagtctcaccattgtgtggatgaaacgcgggtccggagttgtgctcagcaacgaaaagaccttaactctaaaatctgtgagacaggaggatgcaggcaaatatgtttgtcgggcagtggtgccccgtgtgggcgcaggggagagggaggttactctgacagtgaatggcccgcccattatctctagcactcagacccaacatgccctccacggagaaaagggacaaatcaagtgttttatccggagcacccccccaccggatcgcattgcctggtcttggaaggagaacgtgcttgagtctgggacttcaggacggtacactgtggaaactatctcaactgaggagggggtcataagcaccctgactatcagcaacatagtgagagcggacttccagacgatatacaattgtaccgcctggaattccttcggctccgacactgagataattcgacttaaggaacaggagtctgtccccatggccgtcatcattggagtagcagtgggagctggggtcgcctttttggtgctgatggcgactatcgtggcattttgttgtgccaggtcacagagaaatttgaagggagtggtatccgccaagaatgatatccgggtcgagattgtgcataaggaacccgcctctggtagggagggagaggagcacagcacaatcaaacagctgatgatggataggggggaattccaacaggacagtgtactgaagcagctggaggtcctcaaggaggaggagaaggaatttcagaacctcaaggaccccacaaatgggtattatagcgtgaacaccttcaaggaacatcacagtactccgacaatttccctgtcctcttgtcagcctgacctgagacctgctgggaaacagcgagttcccactggtatgtcatttactaatatttactcgactttgtccggacaagggagactgtacgattatgggcagaggttcgttcttggcatgggttccagctcaattgaactgtgcgagcgagagtttcaacgcgggtcactgtccgactcctcctctttcctcgacacacagtgcgactcgtctgtgtccagcagcggcaagcaggacggttatgtccagtttgacaaagcctctaaagccagcgcatcctctagccatcactctcagagcagttctcagaactctgacccatcaagacccttgcagaggcgcatgcaaacacatgtgtag

SEQ ID NO: 192384 - DNA, 1182 bp, synthetic construct
  misc_feature 1..1182: note = Description of Artificial Sequence: Synthetic coding sequence
  source 1..1182: mol_type = other DNA
atgggcaagagcgacttcctgacccccaaggccatcgccaaccggattaaaagtaaaggtctgcaaaagctaaggtggtactgccagatgtgccagaaacagtgcagagatgagaacggattcaagtgccactgcatgtccgaatcccatcagaggcaacttctgttagcaagcgaaaacccccagcagtttatggattacttttccgaggaattccgcaacgactttctggaactgctcaggaggcgtttcggaactaagcgggtgcataataatatcgtgtacaatgaatacatctctcatcgcgaacacatacacatgaacgccacacaatgggagaccctgaccgattttactaagtggctgggacgggagggcttgtgcaaggtcgacgaaaccccaaaaggctggtacatccagtacattgatagagaccccgagacgattcggaggcagctggaactggagaaaaagaagaagcaggacctggacgacgaggaaaagacggcaaagtttatagaggagcaggtgagaaggggactggaaggcaaggaacaggaggtacccactttcactgagctttcaagagagaatgatgaggagaaggtgactttcaaccttagtaaaggtgcctgcagtagctcgggcgccacctcttctaagtcaagcaccctgggtccctctgccctgaagaccattgggtcgagcgcatcggtaaagcggaaagaatccagccagtcttccacccagtcgaaagaaaaaaagaaaaaaaaaagcgccctcgatgaaataatggaaatagaggaagagaagaaacggaccgcgcgcactgattactggctccaacctgagatcattgtgaagattatcaccaaaaaactgggggagaaatatcataaaaaaaaggcgattgtcaaggaggtgatcgacaagtacaccgccgtagtgaagatgattgactccggggacaaattaaagttagaccagacacatctggaaacagtaataccggcgccggggaaacggattctagtcctgaacggaggatacaggggcaatgaggggacactggaatctattaacgagaagactttctctgccacaattgtcatagagaccggacccttgaagggccgcagagtcgagggcattcaatatgaggatataagcaagttagcatag

SEQ ID NO: 192385 - DNA, 1125 bp, synthetic construct
  misc_feature 1..1125: note = Description of Artificial Sequence: Synthetic coding sequence
  source 1..1125: mol_type = other DNA
atgggcaagagcgacttcctgacccccaaggccatcgccaaccggatcaaatccaaagggttgcaaaagcttcgctggtactgtcagatgtgtcaaaagcaatgcagggatgaaaacggttttaagtgtcattgcatgtcagagagccaccaaaggcaattattacttgccagcgagaacccgcagcagtttatggattactttagtgaagaatttcgaaatgacttcctggaattacttcgcaggagattcggaactaaaagggtccataacaacatcgtgtataatgagtacattagccaccgggagcacatacatatgaacgccacccagtgggaaacactgacagactttaccaaatggcttgggagggaagggctctgtaaggtggacgaaacacccaagggctggtacatccagtacatagatagagatcccgaaacaatccgtcgccaattggagctcgagaagaaaaaaaaacaagatctggatgacgaagagaaaacagcaaagttcatcgaggaacaagtgcgcagagggctggaggggaaggaacaggaagtgcccactttcaccgaattgtcaagagagaatgatgaggaaaaggtgactttcaatctgtctaagggtgcatgctcatcctcaggagccacatcaagcaagagctccactctcggcccatcagcacttaagaccatcggctcttctgcatcagttaaacgaaaggaatcctctcagtcctccactcagtcaaaggagaaaaaaaaaaaaaaaagcgcactggacgagattatggagatagaagaggagaagaagcgcactgccagaactgattattggctccagcccgaaattattgtaaagataatcacaaagaaactgggcgaaaaataccataaaaaaaaagctatcgttaaagaggtgatagacaagtacaccgccgtggtcaagatgattgattccggggataaactcaaacttgaccagacgcacctcgagactgtcatacctgctccaggcaagcggatcttggtactgaacggcgggtacagaggtaacgaagggactttagaaagcatcaacgagaagaccttttccgccacaatcgtcatagagactgtatag

SEQ ID NO: 192386 - DNA, 867 bp, synthetic construct
  misc_feature 1..867: note = Description of Artificial Sequence: Synthetic coding sequence
  source 1..867: mol_type = other DNA
atgaacgccacccagtgggagaccctgaccgacttcaccaagtggttaggacgggaagggctgtgcaaggtggatgagactcctaaaggctggtatattcagtatattgaccgcgaccctgagactattagacgccaattagagctggagaaaaagaaaaagcaggatctcgatgatgaggagaagacggcaaagtttatcgaagaacaagtgagaagagggctcgaaggaaaagaacaggaggtgcctactttcacagagttaagcagagagaatgacgaggagaaggtcacgttcaatctatctaaaggagcctgcagctcctcgggtgcaaccagttccaagtctagcacattaggaccttctgcactcaagacaataggctcttccgcaagcgtcaaacgtaaagagtcctcccagagctcaacgcagagcaaggagaaaaagaaaaaaaagtctgccctggacgagattatggagatagaagaggaaaagaagcgaactgctagaaccgactattggttgcagccagagattatagttaagattatcactaaaaaactgggggaaaaataccacaaaaagaaggccattgtgaaggaagttattgataaatataccgccgttgttaaaatgattgactccggcgataagcttaagctcgatcagacacacttggaaacagtgatccccgctccagggaaacgaatcctagttcttaacggaggctacaggggtaatgaaggtacgctggaatctattaacgagaagaccttcagtgcgacaattgtcattgaaacagtgagcctcttcacccaacggcagaaatttcagaatgctctgaaaatgtgccattcctttttttag

SEQ ID NO: 192387 - DNA, 2361 bp, synthetic construct
  misc_feature 1..2361: note = Description of Artificial Sequence: Synthetic coding sequence
  source 1..2361: mol_type = other DNA
atgaacgaggccaaggtgaaggagaccctgcggcggtgcggcgcctcaggagatgaatgcggtcggctgcagtatgcactgacctgtttgaggaaggtgaccggactcggtggagaacacaaggaagactcttcgtggtcctcactcgatgcccgtcgcgaaagcgggtccggacccagcacagataccttgagtgctgccagtctaccgtggccccctgggtcatcccagttgggaagggccggcaattcagcgcagggaccaagatcgatctccgtatcggctctaccagctagtgactcgcctaccccatccttctcagagggcctgtccgacacctgtatcccactccacgcctccgggagacttactcctcgggctctgcatagctttattactcctccaaccacccctcagctccgccggcacaccaagctgaaacctccaagaactccgcctccacctagcagaaaagtatttcagctgttgccctcatttccgacgctgaccaggagtaagtcacacgaatctcaactgggaaatagaatagatgacgtctcaagcatgagatttgatctcagccacggatctcctcaaatggtgcgtcgggacataggcctgtctgtgacccaccgcttctctactaagagctggcttagccaagtgtgccacgtgtgtcagaagagtatgattttcggcgtaaagtgtaaacactgcagactgaaatgtcacaacaagtgcacgaaagaggcccctgcctgccggatctcattcctccctttgactagactcagacgaaccgaatccgttcccagcgacattaacaatcctgtagatcgggccgccgagccacactttggaacactccctaaggctctgaccaaaaaagagcacccgccagctatgaaccacctggatagttccagcaatccatcatcaacaacatctagcaccccctctagccccgcaccttttcctacgagctcaaacccttctagcgccacgactcctccgaaccccagtccaggtcagagagattctcggtttaatttcccggctgcatactttatccaccatcgccaacaattcatttttcctgtgccttcagccggccactgctggaaatgccttcttattgctgagagcctcaaagaaaatgccttcaatatctcagcctttgctcatgcggctcctctgccagaggcggctgatggcacacgactggacgatcagcctaaagctgatgtgttggaggcccacgaggctgaggcagaggagcccgaagcgggcaagtccgaagcagaggatgacgaggatgaagtcgatgacctgccatcctccaggagaccgtggcggggaccaatttccaggaaagcttcccagacctccgtgtacctccaagagtgggacattccctttgagcaggtggaactcggcgaacccattggtcagggacgatggggaagggttcatagggggcgctggcacggcgaggtagctatacgcctgctggagatggacggacacaatcaggatcacctaaagctgttcaaaaaggaggttatgaattacaggcaaacaaggcatgagaacgttgtattgtttatgggggcctgcatgaatcctccgcatctggccattattacttctttttgcaaaggaagaaccctgcatagtttcgttagagaccctaagactagcttggatatcaataaaacaaggcaaatcgctcaggaaatcattaaggggatggggtacttgcacgccaaagggatcgtgcataaggatctgaaatctaagaacgtgttctacgacaacggaaaagtggttatcacagacttcggtctgttcggaatcagcggcgtggtgcgggagggccgacgagagaatcagttaaagctgtcacacgactggctgtgttacctagctcctgagatcgttcgcgagatgacgcccggcaaagatgaggaccagcttccgttctccaaagcagctgacgtgtatgcgtttggaacagtgtggtatgaattgcaagctcgggattggccacttaaaaatcaggccgctgaagcaagtatttggcaaattggctctggggaggggatgaagcgagtgttgacctcggtttctctgggcaaggaagtgtccgaaatcctgtctgcttgttgggccttcgaccttcaggaacgtccgtctttcagccttcttatggacatgctggaaaaattgcctaaactgaacaggagactctcacatcccgggcacttctggaagtctgctgacatcaatagctcaaaagtggtgcctcgtttcgaaaggtttgggttgggcgtgctggagagcagtaaccctaaaatgtag

SEQ ID NO: 192388 - DNA, 2772 bp, synthetic construct
  misc_feature 1..2772: note = Description of Artificial Sequence: Synthetic coding sequence
  source 1..2772: mol_type = other DNA
atggaccgggccgccctgcgggccgccgccatgggcgagaagaaggaaggcggggggggcggagatgccgccgcggccgagggaggtgcaggcgccgcggcttccagggcactccagcagtgcgggcagctgcagaaattaatcgatatcagtatcgggagcttgcgcggtctgaggactaaatgtgctgtgtcaaatgatctgacccaacaggagattagaaccttggaggctaagctggttcggtacatctgtaagcagagacagtgtaagctttccgtcgctcctggggagaggacacccgagctaaattcctacccccgcttttctgattggctgtacacattcaatgtacggccagaggtcgtgcaggagatccccagggatctaaccctggacgctttgctggagatgaatgaagccaaagtcaaggaaaccctgcgcagatgtggagcatctggtgacgagtgcggaaggctgcagtatgcccttacttgcttgaggaaagttaccgggttaggtggcgaacataaagaagacagcagctggtcctccctcgacgcgcgaagggagtccggatctggcccttccacagatacactttccgccgcttctctgccttggcccccaggctcttcccaacttggtagagctgggaacagcgctcagggtccccggagtatcagcgtcagtgctttgcccgcatctgactccccaactccaagcttcagcgagggtctgagtgacacgtgtattcctctgcacgcaagcggtcggctgaccccgcgggctcttcatagtttcatcactccaccaactacgccgcagctacgccgacacaccaaacttaaacctccccgcacaccacctcctccatctcgcaaggtgtttcaactcctgccttcatttcccaccttgacccgcagtaagtcacatgaatcacagctggggaaccgaattgacgacgtgtcaagtatgcggttcgatctgtctcacggctctccccagatggtgcgcagggatattggactgagcgtgacccacaggttcagcaccaagagctggctctcccaagtgtgtcatgtctgccagaagtcaatgatcttcggcgtgaaatgtaagcactgtaggctgaaatgccataacaaatgtactaaagaggcacccgcatgcagaatttctttcctgccgttgaccaggttacgaagaacagaaagcgtccctagcgatattaataaccccgtggatagagctgcggagccccatttcggaaccctccctaaagccctcacaaagaaggaacacccacctgccatgaatcatctggatagttcatctaatccatcaagcacaacgtcctccacgccttcgagcccagcgccttttcctacaagctcaaatccaagcagtgcaaccacaccacctaaccccagtcccgggcagcgcgacagccgatttaattttcctgctgcatatttcatccaccataggcagcaatttatatttccagtgccctctgccggtcactgttggaagtgcctgttgattgcagaaagcctgaaggagaacgccttcaatatttccgcatttgcccacgccgccccgctgccagaagcggccgatgggacgagactggatgaccagccaaaggccgacgtgctggaggctcatgaggcagaagcagaggagccggaggccgggaagagcgaagcagaagatgatgaggatgaagtggacgacttgccttccagtaggcggccatggcgtgggcccatctcccggaaggcatcccagacgagtgtatacctccaggaatgggatatcccgtttgaacaggtggagcttggcgagccaataggccagggacggtggggaagagttcaccgagggcggtggcacggagaagtggctattagactgctagagatggatggccacaatcaggatcatctgaagctcttcaagaaagaggtgatgaactataggcagacacggcatgaaaatgtcgtactttttatgggtgcatgcatgaacccaccccatttagccattatcacctccttctgcaaagggcggactctgcactcatttgtccgggaccccaagaccagcctggatataaacaagacccgacagatcgcacaggaaatcatcaaagggatgggttatctccatgcaaagggcattgtacataaggatctcaagtccaagaacgtgttctatgacaacggcaaagtcgtcattacagatttcgggctgtttggaatctccggtgtagtccgggagggacggagagagaatcagcttaagctgtcccatgattggctgtgctacctggctcccgaaatcgttagggagatgactccaggtaaagacgaagaccagcttccgttctctaaggccgctgacgtgtacgctttcggcacagtctggtatgaattgcaggcaagggactggcctctgaaaaaccaggctgctgaggcgagcatatggcagatcggatcaggagaagggatgaagcgggtgctcacgtccgtttcccttggcaaggaagtgagcgaaatcctgtcggcgtgctgggcctttgacctgcaagagaggccatcattctccctattaatggacatgctagagaagctgcccaagttaaaccgcaggttaagccatccaggacacttttggaaaagcgccgatatcaactcgtccaaggtcgtgccacgcttcgagagattcggtctgggcgttctggagtccagtaacccaaaaatgtag

SEQ ID NO: 192389 - DNA, 2289 bp, synthetic construct
  misc_feature 1..2289: note = Description of Artificial Sequence: Synthetic coding sequence
  source 1..2289: mol_type = other DNA
atgaacgaggccaaggtgaaggagaccctgcggcggtgcggcgcctcgggcgacgaatgcgggcggctgcagtatgccttgacatgcctgaggaaggtgacggggctgggcggggaacataaagaggatagtagttggtcttcactagacgcccggcgtgaatcaggtagtggcccatcgactgatactctctccgctgcgtccctcccctggccacctggctcttcccagttgggccgggcaggaaactcagcccaaggcccccggtccattagtgtgtccgccttgccagccagcgactctccgaccccaagcttcagtgaaggactttcagacacttgtataccattgcacgcaagtgggagattgactccgcgagccttacattcatttatcacgccacccacgacaccccagctacggcgccataccaagctcaagccgcctaggaccccgccccctccctcacgcaaggtcttccagctgttaccgagcttccctacactcaccaggtccaagtcgcacgagtcccagctcggaaaccgaatagatgacgtgagcagcatgaggttcgacctgtcacacggaagcccacaaatggtccgccgtgatattggattgtcagttacccataggttcagcactaaaagttggcttagccaggtgtgccacgtctgccagaagtcgatgatatttggggtaaaatgtaaacattgtcgattaaagtgtcacaataagtgtacaaaggaagcgccagcctgcaggattagctttctgcccctgactcgccttagaaggacagaatccgtaccgtctgacatcaataatcctgtggatagagcagcggagccacacttcggtactctcccgaaggccctgacaaaaaaggagcatcctccagctatgaaccatctggatagcagcagtaacccgagtagtactaccagctccaccccctctagtcccgctccgtttcctacaagttcaaacccgagttccgcaacgacccccccaaacccgagtcctggtcaacgagactccagattcaacttcccagctgcatacttcattcatcaccgacagcaattcatatttccagtccccagtgccggccactgctggaaatgtctcttgatcgccgaaagccttaaagagaacgccttcaacatttctgcgtttgctcacgcggcacccctgccagaggccgccgatgggacgcgcctcgatgatcaacctaaagccgacgtcttggaggctcatgaggctgaggcggaagagccagaagccgggaaatccgaggccgaagacgatgaagatgaagtcgacgacctcccaagctcacggagaccctggcggggcccaatatctcgcaaggcatctcagacaagcgtttatctgcaggagtgggatattccattcgagcaggtggaacttggcgaacctatcggccagggccggtgggggcgagtgcatcgaggccggtggcacggagaagtagccatcagacttttggagatggatggacacaatcaggaccacttgaaactcttcaaaaaagaagtgatgaattacagacagacccggcacgaaaacgtagtcctctttatgggggcttgtatgaatccaccgcaccttgcgataattacctccttctgcaagggccggaccctgcacagtttcgttcgggatccaaaaacaagtctcgatattaacaaaaccagacaaatagcacaggaaattatcaaaggcatggggtacctccatgcaaaggggatcgttcacaaagatctaaaatcaaaaaacgtattctacgataatgggaaagtggtgatcacagactttggattgtttggtatttctggagtcgtgagagagggaagaagggagaatcagctgaagctatcgcatgactggctgtgctacctggcgccagaaatcgtccgagaaatgacacccggcaaggatgaagaccagttgcctttcagcaaggctgccgacgtttacgctttcggtacagtctggtacgagctgcaagctagagactggcccttaaagaaccaggcggctgaagcatcaatttggcagatagggagcggcgagggcatgaaaagggttctcacctcagtgagtctgggtaaagaggtgtccgagattctgagtgcatgttgggcttttgatctccaggaacgaccctcgtttagtttgcttatggacatgctggagaaactccctaaattgaatcggaggttaagtcatccgggccacttttggaagtccgcggaactgtag

SEQ ID NO: 192390 - DNA, 375 bp, synthetic construct
  misc_feature 1..375: note = Description of Artificial Sequence: Synthetic coding sequence
  source 1..375: mol_type = other DNA
atgcaggccgacctggagatcccccgggacctgaccctggacgccttgctggagatgaacgaggctaaggtgaaggagacactcagaagatgtggcgcttctggggacgagtgcggcagactgcagtatgctcttacttgccttcgcaaggtaacagggctgggaacttggggacttcccccatctcctctgcccgggctggttcccctgggactatggcccagcttgtggtgggtcatggaacgggggaaaaggggccccgggtttttgggccagcctgggaaggctcgcgttgggtgctctcagcctcccgagaagctgagccagggtcctcagggttctggttcatggtgggtgtggccaggccgaatttag

SEQ ID NO: 192391 - DNA, 1842 bp, synthetic construct
  misc_feature 1..1842: note = Description of Artificial Sequence: Synthetic coding sequence
  source 1..1842: mol_type = other DNA
tgacacagcttcatcaccccccccaccaccccccagctgcggcggcacactaaactgaagcctccacgcacacccccccccccatcacggaaagtgtttcagctcctgccctcttttcccaccctgacccgcagtaagagtcatgaatctcagctgggcaatcggatcgatgatgtcagtagtatgaggtttgacttgtcacacgggagcccccagatggttaggagggatatcgggctgtcagtaactcataggtttagcaccaagtcttggctgtcccaggtctgccatgtgtgccagaagtccatgatttttggagttaaatgtaaacattgccggctgaaatgccacaacaagtgcacgaaggaggcaccagcgtgtcgtattagtttcctgcctctgacgcgccttaggaggactgagagcgttccatccgacattaataatccagtggatcgcgctgcagaaccccactttggaactctgcctaaggccctaacaaagaaagagcatcctccagcaatgaaccatctggacagcagcagtaacccaagttctaccactagctcaaccccctcttcccctgcgccttttcccacctcctctaacccttcttcagccacaacaccccctaacccttcgcctggccagagggacagccgcttcaattttcctgctgcttattttatccaccatcgacagcagtttatattcccagacatttccgctttcgcgcatgccgcccctctgcctgaagccgctgatggcacaaggctggatgaccagcccaaagctgacgttctggaagcacacgaggcggaggcggaagagcctgaagcaggcaagtctgaggccgaagacgatgaggacgaagtcgacgacctgccatccagtaggaggccgtggcgagggcccatcagtaggaaggcatcacagacctcagtgtacttgcaagaatgggatataccttttgaacaggtggagcttggcgagcccattggccagggccgatggggtcgtgtacaccgggggcggtggcacggagaagtggctatccgactgctcgaaatggacgggcacaatcaggaccacctcaagctgtttaagaaagaggtcatgaattacagacaaacccggcatgagaatgtggtcttgtttatgggagcctgcatgaaccctccccacttggctatcatcactagcttctgcaaaggacgaactctgcatagcttcgtccgggatccgaagacttcgttggatatcaataagactagacagatagcccaagaaattataaaaggaatgggatatctgcacgcgaaaggtattgttcacaaagacctcaagtccaagaatgtattttacgataatggaaaagtcgtgattactgactttggactgttcggtatctctggcgtggttcgggaaggcagaagggaaaatcagctgaagctttcacatgactggttatgctaccttgctccagaaattgtacgagagatgacgccagggaaagacgaggatcagctgcccttcagcaaagccgccgacgtgtacgcatttggaacagtgtggtatgagctgcaagcacgggattggcctctgaagaaccaggccgcagaagcatccatttggcagatcggatccggtgaggggatgaaacgagtgctcacgagcgtgagcctcggtaaagaggtcagcgagattttatctgcctgctgggcttttgacctccaggagagacccagtttctcattgctgatggacatgctcgaaaaactgcctaagctcaatcgtcgactgtctcatccaggccacttttggaaatctgccgagctgtag

SEQ ID NO: 192392 - DNA, 2634 bp, synthetic construct
  misc_feature 1..2634: note = Description of Artificial Sequence: Synthetic coding sequence
  source 1..2634: mol_type = other DNA
atggaccgggccgccctgcgggccgccgccatgggcgagaagaaggaaggcggtggagggggcgacgctgccgccgctgaagggggggctggtgccgcagcaagtcgcgcccttcagcagtgtgggcagctgcagaagctaatcgacatcagcatcgggtctttaagaggtctccggacaaaatgtgccgtgagcaatgacctgacgcagcaggaaatccgaaccctcgaagctaagctagtaagatacatctgcaagcaacgtcagtgtaagttatccgtggctcctggagaaagaacacccgagctgaacagctacccccggttcagcgactggctgtacacttttaatgtgcggcccgaagtggtccaagagatcccgcgcgacctgacattggacgcacttttagaaatgaacgaagcaaaagtgaaggaaacactgaggaggtgcggggcgtccggcgatgaatgtgggcgcctgcagtatgctctgacttgcctacgcaaggtgacaggacttggaggagaacacaaagaagatagttcatggagttcgctggacgctagaagagagtcaggaagcggcccctcaactgacactctgtcagctgcttcattgccctggcctcctggcagttcacagcttggcagagctggcaattctgcccaagggccccgatcaatctccgtctctgccctgcccgccagtgattctcctacgccgagtttctctgaagggctgagcgatacctgtattcccctacatgctagtgggcgattgaccccccgtgctctacatagtttcatcactccgccaacaactccccagcttagacggcacaccaagcttaagccccctagaactccaccccccccttcacgaaaagtctttcagctgctgccatcttttccaacactcacacgctctaaatcacacgagtcccagctaggaaaccgaatcgatgacgttagctccatgcgtttcgatctgtcccacggatcaccccaaatggtgcgacgggacatcggattatccgtgacccaccggttctctaccaagagttggctgagccaagtctgccacgtttgtcaaaagtccatgattttcggcgtgaagtgcaaacattgccggctcaaatgccataataagtgcactaaagaggctcctgcctgtagaatatccttcttgccactgacaaggttaaggcgaaccgaaagtgtaccttcagatattaataacccagtggaccgcgcagccgagccccacttcggtaccttacctaaagccctgacgaagaaggaacatccaccagcaatgaatcacctggacagctcaagtaacccgtcctcaacaacatccagcacgccctcatcccccgccccattcccaacatccagcaatcctagcagtgcaacgacaccacccaacccctccccaggccagcgcgacagcagattcaactttccggccgcctattttatacatcatagacaacaattcatcttcccggatatcagcgcctttgcacacgccgcaccactgccagaggccgcagatggaacccgtctggatgaccagcccaaggctgatgtgctggaagcacacgaggccgaggccgaagaaccagaagccgggaaaagcgaggctgaggatgatgaggatgaagtagacgacctgccttcctctcgacgcccttggcggggaccaattagcagaaaggcgtcacaaaccagcgtgtatttgcaggaatgggatatcccttttgagcaggtggaactaggcgagcccatcggccagggccgctggggcagggtccacagggggcggtggcacggggaggtcgcaatcaggctgctggaaatggatggccataaccaagaccatctgaaactgtttaagaaggaggtcatgaactataggcagacccgccacgaaaacgtcgtgttgtttatgggcgcatgtatgaaccctcctcacctggcgataatcacttctttttgtaagggcagaactctgcacagtttcgtgcgagatcccaagacaagcctagacatcaataaaacacgacagattgcacaagagatcatcaaaggtatgggataccttcacgcaaaaggtatcgttcacaaagacttgaaatcaaagaacgtgttttacgacaacggaaaagtggtgataaccgacttcggactgttcggtattagcggagtagtgagagaggggaggagggagaaccagctgaaactctcccacgactggctgtgctacctggccccggagatcgtacgcgaaatgacccccggcaaagacgaggaccagctgcccttctcgaaggctgccgacgtctacgcattcggaaccgtttggtacgagctgcaggcccgagactggcccctgaaaaatcaggccgctgaggcaagcatttggcagatcggatccggggaagggatgaaaagagtcctgaccagcgtttccctgggaaaagaggtttccgaaatcctcagcgcttgttgggcttttgacttgcaagagaggcccagcttttctctcctcatggatatgctagagaagctgccgaagttgaaccgccgactgtcccaccctggccacttctggaaatctgccgaactctag

SEQ ID NO: 192393 - DNA, 1311 bp, synthetic construct
  misc_feature 1..1311: note = Description of Artificial Sequence: Synthetic coding sequence
  source 1..1311: mol_type = other DNA
atgtacaacaagaaggccaagatggagcccaacgccagcgagagcgcaatccccgctaggcggcagcgtcagcccagggccaagaaaaaaagcaagcctcttaatcttaagatccactcaagcgttggctcctgtgaaaatatccccagccagcaacgaagcccactcttatctgagcggagtctccgctctttctttgtgggccacgccccctttctgcccagcactcctcccgtgcatacagaggctaacttctcggctaataccctgtctgtgccacggtggtcaccgcagatcccacgcagggacctcggaaactctataaaacataggtttagtacgaagtactggatgagccaaacctgcacggtctgtgggaaaggcatgctgtttggtctcaaatgcaagaattgtaagctcaaatgtcacaataaatgtacaaaggaggctcccccctgtcacctgctgattatccacagaggcgacccagccaggcttgtgcgtactgagtctgtgccctgcgacataaataacccactgaggaagcccccccggtattccgatctacatatctctcagaccctcccgaaaacaaataagatcaacaaggatcacatacctgtgccgtatcagcccgattcatcttccaatccctcgagcaccactagttcaaccccctcttccccggcacctccactgcctccgtccgcaacccctcctagcccccttcacccatccccacagtgtacacgccagcagaagaatttcaatctgcctgccagccattactacaagtacaaacagcagtttatttttcctgacgttgttcccgtgcccgaaacccctactcgggccccgcaggttatcttgcatccagttaccagcaatccaatactggaaggcaaccctctgctacagatcgaggtagagcccaccagcgaaaatgaagaggtgcacgatgaagcagaggagtctgaggacgacttcgaagaaatgaatttaagcctcttgagtgcccggtcctttcctcggaaggcaagtcagacttccattttccttcaggagtgggacattccctttgaacaactcgagattggggagcttataggaaagggtagatttgggcaggtgtatcatggacgctggcacggcgaggtggctataaggctgatcgatatagagcgtgataatgaggaccagctgaaagctttcaaaagggaagtgatggcgtatcgacagaccagacacgagaacgtcgtgctcttcatgggcgcttgcatgtcaccgccccacctggctataatcacttag

SEQ ID NO: 192394 - DNA, 2853 bp, synthetic construct
  misc_feature 1..2853: note = Description of Artificial Sequence: Synthetic coding sequence
  source 1..2853: mol_type = other DNA
atggacgaggagaacatgaccaagagcgaggagcagcagcccctgagcctgcaaaaagcgttacagcaatgcgaactcgtgcagaatatgatagatctgtccatatctaatctcgagggtctcaggactaaatgtgcaacatccaatgaccttactcagaaggagataagaaccttggaaagtaagctggtgaagtatttctccagacagttgagctgtaaaaagaaagtagcactgcaggagcggaacgcagagctggacggattccctcaactgaggcactggttccgcattgtggacgtgagaaaagaagtgctggaagaaattagccctggccagctgagcctggaagacctcctggagatgaccgacgaacaggtgtgtgaaactgtggaaaaatatggggcgaatcgtgaggagtgtgcgagattaaatgcctctctgagctgcctgcgaaatgtgcacatgtcggggggtaatctcagcaagcaggactggaccatccagtggccaaccaccgaaaccgggaaggaaaataatcctgtctgtccccctgagcctaccccttggatccggacgcatctctcccagagccctcgcgtgccaagcaagtgtgtacagcattactgtcatacatcacccaccccaggagcccctgtctatacacatgtagaccggctgaccgtggatgcctaccctggcctgtgtccacctcctcctctcgagtcaggacaccggtcacttccacccagccccagacaacgacacgccgtccggactccccctcggacgcctaacatcgtcactaccgttactcccccaggaaccccccctatgaggaaaaagaataaattgaagccgccaggcactcctccaccatcatccagaaagcttatccaccttataccgggattcaccgccctgcaccgttcaaagagccatgagtttcagcttggacatcgtgtggacgaggcccacacaccaaaagcgaagaagaagagcaaaccactcaacttgaagatccatagcagcgtggggagctgtgaaaacattccatcccagcaaagatctcccctgctgtccgaaagatcactgcggtctttttttgtggggcatgcccccttcttaccaagtacccctcccgtacacacagaagcaaattttagcgccaatactttatccgtccctcgctggagcccacagattcctcgacgagacctggggaattcaatcaagcacagattcagcactaaatactggatgtctcagacttgtacggtctgtggaaaaggtatgctcttcgggcttaagtgcaaaaattgtaagctcaaatgccacaacaaatgcacaaaagaagcacccccatgccaccttctaattatacaccggggtgaccccgctcggctggttcggaccgagagtgtcccgtgtgacataaataacccccttaggaaacctcccagatatagcgaccttcacatcagtcagaccctgcctaagacaaacaagatcaacaaggaccatatacccgtgccctaccagcccgactcctcctcaaaccccagctccaccactagcagcacaccgtcctctccagccccacctctccccccctcagccacaccacccagcccactccacccgagcccacaatgcaccagacaacagaaaaattttaatctgcccgcctcccactattataaatataagcaacagtttatattccccgatgtggtccccgtccctgagacccctacaagggcaccccaggtgattcttcacccagtgacctcaaatcccattttggaaggcaaccctcttctgcagatagaagtcgaacccacatccgaaaacgaagaggttcacgatgaggcggaagagagcgaagacgacttcgaggaaatgaatttgagccttctaagcgccaggagctttccccgtaaggcttcgcagacatctatcttcttgcaagagtgggacatcccgtttgaacagctggagatcggggagctgattggcaaggggcggttcggccaagtgtatcacggccgttggcatggcgaggtggctattaggctgattgatatagagcgcgataacgaggatcagctgaaagcttttaagcgtgaggtgatggcgtacagacagactcgacacgagaatgtggtgttgttcatgggagcttgtatgagtccccctcacctagctatcataacgtcactttgcaagggccgcaccttgtattcagtcgttcgcgacgctaagatagttctggacgtcaataaaactaggcagatagctcaggagatcgtgaagggcatgggctacctacacgcgaagggtatacttcacaaggacctaaagtcaaagaacgtcttttacgacaacggcaaggtggtgattaccgacttcggattattctctattagcggagttctccaagccgggcgccgcgaggacaagctccgtattcaaaatggatggctctgccacctggcaccggagatcattaggcagctctccccagatacagaagaagataagcttccttttagcaagcatagcgatgtcttcgcactgggtactatttggtatgaactgcacgcaagagaatggccttttaagactcaaccagcagaagctataatctggcaaatgggaacaggcatgaagcccaatctgagccagattggtatggggaaggagatcagcgatattctcctgttctgctgggcatttgaacaggaggaacgcccaaccttcactaaacttatggacatgctcgaaaagctacccaagcggaaccgaagactgtcccatcccggccacttttggaagagtgctgaattgtag

SEQ ID NO: 192395 - DNA, 2766 bp, synthetic construct
  misc_feature 1..2766: note = Description of Artificial Sequence: Synthetic coding sequence
  source 1..2766: mol_type = other DNA
atgatcgacctgagcatcagcaacctggagggcctgcggaccaagtgtgctacctcgaatgatctcacccagaaagagattcggacccttgaatctaagctcgtgaaatacttctcccgacaactcagctgtaaaaagaaggtggctttacaggagagaaacgcagagcttgacggtttcccccagttacggcattggttcagaattgtagacgtccgtaaagaggtcttggaggaaatttcccccggccaactgagcctagaagatttgttggagatgaccgatgagcaggtatgcgaaaccgtggagaagtacggagccaatcgggaagagtgcgcccgtctgaacgcctccctgtcctgtcttcggaatgtgcatatgtccggcggaaatctttcaaagcaagattggaccatacagtggcccactaccgaaactggaaaagaaaacaacccagtttgcccacctgaaccaacaccgtggattagaacccatttgtcgcaaagcccaagggtgccttccaagtgtgtacagcactattgtcacacctcccccacccctggggctcccgtgtacactcatgttgatcgattgactgttgatgcgtatcccggcttgtgcccacctcccccactggagagtggccaccgcagcttgccccccagtccacggcaaagacacgctgtccgtacacctcctagaacgcctaacattgtaacaacggtcacccccccaggaaccccccctatgcggaaaaaaaacaagctgaagcctcctgggaccccccctccatctagcagaaagttaatacacctgatccctggattcacggccctgcatcgaagcaaaagccacgagtttcagctgggtcaccgcgttgacgaggctcacaccccgaaagccaaaaagaaaagtaaacccttaaaccttaagattcatagcagtgtggggagctgcgaaaatatcccatcacagcagcgtagcccactcttgagtgagcggagcctccgaagcttctttgttggccatgccccctttctgccctccacgcccccagtacataccgaagctaatttctctgcgaataccctctcagtccctcgttggtcacctcaaatccctcgtcgcgatctgggaaattctattaagcaccggttctccaccaagtactggatgtcgcagacgtgcaccgtgtgcggcaaaggaatgctgtttggcctgaagtgcaaaaattgcaaattgaagtgccacaataaatgtacgaaagaggcaccaccctgccatttgctgatcatacatcggggagatcccgctaggctcgtccgcaccgagtctgtgccctgcgatattaacaacccactgaggaaacccccacggtacagcgacctgcacatttctcagactttgcccaagacaaacaaaatcaacaaggatcacattccagttccatatcagccagattcaagttcaaacccaagctctaccaccagctctaccccatcatctcctgccccccccctgccccccagtgccaccccccccagtccactacacccgtcaccacagtgcacaagacaacagaagaacttcaatctccctgcttctcattattataagtacaagcaacagtttatctttccggatgtggtgccggtgcctgagaccccaacccgcgcgccccaagtgatcctgcaccccgttaccagtaaccccatattggagggcaacccgctgttacagattgaagtagagccaacgtccgaaaatgaggaggtccacgatgaggctgaagagtcggaggacgacttcgaagaaatgaatctgtctctgctttctgcacgctcgtttcccagaaaggcttcccagacaagcattttcctgcaagaatgggatattccctttgaacagttagaaataggggaactcattggaaaggggcggttcggtcaagtgtatcatggccggtggcatggtgaggtggcaatccggcttattgacatcgaaagagataacgaagaccaactcaaggcatttaagcgcgaggtaatggcctaccgccagacacggcacgagaatgtggtcttgttcatgggggcgtgcatgtcccctcctcatctagctataatcaccagcctctgcaaggggagaaccctttactccgttgtgagagatgccaaaattgttctggatgtgaataaaacacggcagatcgcacaagagattgttaagggaatgggctatctccacgccaaaggcatcctccataaagacttgaaaagtaaaaacgtgttctatgacaatgggaaagttgtgatcactgacttcggcctgttttctatcagtggtgtgctccaagctggtagaagagaagataagctgcggattcagaatggatggctctgccatctcgcccccgagatcatcaggcagttgagtcctgatacagaggaggataaactgcctttctccaagcattctgatgtgtttgcactcggcactatctggtatgaactacatgctcgggagtggccattcaaaacacaacctgctgaagccattatctggcagatgggcaccggaatgaagccaaatctgtcccagattggaatggggaaagagattagcgacatcctccttttctgttgggccttcgaacaggaagagcggcccacattcaccaaactgatggacatgctcgagaaacttccgaaaagaaaccgtagattgtcccatcccgggcacttttggaagtccgctgagctgtag

SEQ ID NO: 192396 - DNA, 1245 bp, synthetic construct
  misc_feature 1..1245: note = Description of Artificial Sequence: Synthetic coding sequence
  source 1..1245: mol_type = other DNA
cgggccaagaagaagagcaagcccctgaacctgaagatccacagcagtgtcgggtcatgcgaaaacatccccagtcagcaacggagcccactgcttagcgaaagaagcttgagaagctttttcgtaggccacgccccgttcctgccatcaacaccacccgttcatactgaagccaatttctccgctaacactttgtcagtgccccgctggtctcctcagatcccacgccgagacttaggaaattcaattaaacacagattctcaacgaagtactggatgagtcagacctgcacggtgtgcggtaaaggtatgttatttggactcaaatgtaaaaactgtaagctcaagtgccataataagtgtacaaaggaggcgcccccctgccatctgttaataattcaccgtggggacccagccaggctggtgaggaccgaaagcgttccttgcgacataaataacccattaaggaagcctccacggtatagtgatctgcacatctcccagacattgccaaaaaccaacaagattaacaaggatcacattcctgtaccttatcagcctgactcgagctctaatcccagctcaaccacgtcttctacccccagttcccccgccccacctctgcctccctcagccactcctccttctcctctgcacccctccccgcagtgtactaggcagcagaagaatttcaacctgcctgcttctcactattacaagtataagcaacaatttatcttccctgatgtcgtcccggttcccgaaacccccacacgggcacctcaagtgatactgcaccccgttacaagtaacccaattctcgaagggaacccgttacttcagatcgaggtcgaaccaaccagtgagaacgaggaagtgcatgatgaagcggaggagtctgaggatgattttgaggaaatgaacctgtcactcctgtctgctcggagcttccctagaaaggctagccaaacgagcatcttcctccaggaatgggacattccattcgagcagctggagataggcgaactcatcggcaaagggagattcggccaggtatatcacggtcgctggcacggggaggtcgctattagattaattgacattgagcgggacaacgaagatcagctcaaggcctttaaacgggaggtgatggcctacaggcagaccagacacgagaatgtggtgctgtttatgggcgcctgcatgagccctccccacctcgccattataactcggcccgtctag

SEQ ID NO: 192397 - DNA, 3921 bp, synthetic construct
  misc_feature 1..3921: note = Description of Artificial Sequence: Synthetic coding sequence
  source 1..3921: mol_type = other DNA
atggagttctacgagagcgcctacttcatcgtgctgatccccagcatcgtcataacagttatcttcctgttcttctggcttttcatgaaggagacattgtatgatgaggtgctcgccaagcagaagagagagcaaaagctcatcccaaccaagaccgataaaaagaaggcagaaaagaaaaagaacaagaagaaggaaatacaaaatgggaacctccacgaaagtgactcggagtcagtgccacgggattttaaactcagcgatgcattagccgtggaagatgatcaagtggcaccagtgccccttaatgtggtggagacatcaagcagcgttcgagagagaaaaaaaaaggaaaagaagcagaagcccgtacttgaggagcaagttatcaaagagtccgatgccagcaagattcccggaaaaaaggtggaacccgtacctgtgaccaagcagcccacccctccttccgaggccgccgcgtccaagaaaaaaccagggcagaaaaagagtaagaatggcagcgatgatcaggacaaaaaagtggagaccctgatggtgcccagcaaaagacaggaggctctcccgctgcatcaggaaaccaaacaagagagcggctctggaaagaaaaaggctagcagcaagaaacagaagacagagaacgtctttgtggacgagcccctgatacacgcaaccacatacattcccctgatggataatgccgacagttctcccgtcgtcgacaagcgtgaggtgattgacttgttgaagcctgatcaagtggaggggatccagaagtctggaactaagaagctgaaaacagagactgacaaggaaaacgctgaagttaaattcaaagatttcctgctgtccttaaagacaatgatgttctccgaggatgaagcgctgtgtgtagtggacctactgaaagagaagtccggggtgatccaagacgcactgaaaaagtcctctaagggcgaacttaccaccctgatacatcagctacaggaaaaagacaagctcctcgccgctgtgaaggaagacgcagccgccaccaaagaccgctgcaaacaactcacgcaggagatgatgactgagaaagagcgatcaaacgtcgtcatcacccggatgaaagaccgcatcggcacccttgagaaagagcacaatgtgtttcagaacaaaatccacgtgtcctatcaggaaacacagcagatgcaaatgaagtttcaacaagtgcgcgagcaaatggaggccgagatcgcccacttaaaacaggaaaatggcatcctgcgagatgctgtcagcaataccactaaccagctggaatctaaacagtctgctgagctgaataagttacgtcaggattatgcaagattggtgaatgaactaaccgagaagaccggtaagctgcagcaagaagaggtgcaaaagaagaatgccgagcaggcagctacccagctgaaggtgcagttgcaagaggccgaacggcgttgggaagaggtgcagagctacatcagaaaaagaacagctgagcacgaagcagctcagcaggatttacagtccaagtttgtggccaaagaaaacgaggtacagtccttgcacagcaaactcaccgatacgctcgtgagcaaacagcagttggagcagaggctgatgcagttaatggaatccgaacagaagcgagtgaataaagaagaaagccttcagatgcaggtacaagacatactggaacagaacgaggctttaaaagcacagatccagcagtttcactcccaaatcgctgcccagacaagtgcttccgtactcgctgaggagctacataaagtgattgcggaaaaagacaaacagattaagcagacagaggactcactggccagcgagcgggatcgcctgaccagtaaagaggaggaactgaaagatatccaaaatatgaactttctgctgaaagccgaagtacagaagctgcaagcactcgctaacgaacaggcagccgctgcgcacgagcttgaaaagatgcaacagtcagtctatgtgaaggacgacaaaattaggttgctggaagagcaattacaacacgagatttcaaataaaatggaagaatttaaaatccttaacgaccagaacaaagcactgaaatcggaagtacagaaactccaaacactggtcagtgagcagcccaacaaggacgtagtggagcagatggagaagtgcattcaggaaaaagacgaaaaactgaaaaccgtcgaggaactgttggaaactggactgatccaggtggcaacaaaagaggaagagctaaacgccattaggacagagaactccagtttaacgaaggaggtccaggacttgaaagcaaagcagaacgaccaggtgtcatttgcgtccctcgtggaggaactcaaaaaggtgatccacgaaaaggatggcaagatcaagtccgtcgaggaactgctagaagctgagctgctgaaggttgcaaataaagagaagactgtacagctctcgatcacttcgaaggtacaggagctgcaaaacttactgaagggaaaagaagaacagatgaataccatgaaagctgttttggaagagaaggaaaaggaccttgctaatacaggaaaatggctgcaagatctccaagaagaaaatgaatcacttaaggcgcacgtgcaagaggtcgcccagcataaccttaaggaggcatcttccgcctcacagttcgaagagttagagatcgtcctgaaagagaaggaaaatgagctcaaaagactcgaggctatgttgaaagagcgcgagtcagacttgagcagcaagactcagcttctccaggacgtccaggacgaaaacaagttgtttaaaagtcagatcgagcagctgaagcagcagaactatcagcaggcctcttcatttccacctcacgaagaactgcttaaagtcatctcagaaagggagaaagagatcagtggattatggaacgagcttgactcgctgaaagacgccgtggagcaccaacgaaagaaaaacaacgacctgagggaaaaaaactgggaggctatggaggccctagcgtctacagaaaagatgctgcaggacaaggtcaacaaaacctcaaaagagcggcagcagcaagtggaagcagttgaactggaggcaaaagaggttctaaaaaagcttttccccaaggtctcagtcccctccaatctctcttacggtgagtggctgcacggatttgagaaaaaggctaaggaatgtatggcaggcaccagcgggtcagaagaagtcaaagtgctcgaacacaaactgaaagaagccgatgaaatgcacactctcctgcagcttgagtgcgagaaatacaagagcgttctggcagagactgagggaattctgcagaaactacagcgctccgtggaacaggaggaaaacaaatggaaggtgaaggtggatgagagccacaagacaataaaacagatgcagagctctttcacctccagtgagcaggagctcgagagattgcgatccgaaaacaaggatatcgagaatttgagaagggagcgagagcacctggagatggagctcgagaaggccgagatggagaggtctacgtatgtgactgaagtgagagagctgaaggcccaactgaatgaaaccttaaccaagcttcggaccgagcagaacgaacggcagaaggtcgctggagacctccataaggcgcagcaaagtctggagcttattcagtctaagatcgtcaaagctgcaggagatactaccgtgatagagaactcggatgtgtctcccgaaaccgagtcttcagagaaagagaccatgagtgtcagtctgaaccaaactgtgactcaactgcagcagctccttcaggcagtcaatcagcagcttaccaaggaaaaagagcattaccaggtacttgagtag

SEQ ID NO: 192398 - DNA, 4074 bp, synthetic construct
  misc_feature 1..4074: note = Description of Artificial Sequence: Synthetic coding sequence
  source 1..4074: mol_type = other DNA
atggagttctacgagagcgcctacttcatcgtgctgatccccagcatcgttataactgttatcttccttttcttctggctgttcatgaaagagaccctgtacgacgaagttctagcgaaacagaagagggagcagaagttgatccctacaaaaacagataaaaaaaaagccgaaaaaaaaaagaataagaaaaaggaaattcagaacggcaatctgcatgaatccgatagtgagtccgtcccacgcgactttaagctgtcagacgcactcgccgtcgaggatgatcaggtcgcgcccgtccctctcaacgtggtcgagaccagcagttcagtcagggaaaggaagaagaaggagaagaagcagaaacctgtgctggaggaacaggtcatcaaggagtctgatgctagcaaaatccctggcaaaaaggttgagcccgtgccagtgaccaaacaacctaccccgccctcagaagcggccgcatccaaaaagaagcctggacagaagaaatcgaagaacggctcggacgaccaggacaagaaagtggaaacacttatggttccctcgaaacgtcaggaagccctgccactccatcaggagacgaagcaggagtcaggcagcggcaaaaaaaaggcttccagcaagaagcaaaagaccgagaacgtcttcgtagatgagccgctgattcatgcaaccacgtacatccctctgatggataacgcagatagttcccccgtcgtcgataaaagggaagtaattgaccttttaaaaccagaccaggtcgagggcatccagaaaagcggcacaaagaaactcaagaccgaaaccgacaaagaaaatgctgaagtgaaattcaaagacttcctcttaagcttgaagacgatgatgttctccgaggacgaagcactgtgtgtcgtcgatttgctgaaagagaaatctggagtgatccaagatgccctcaagaagagcagcaagggcgagctgacaacgctgatacaccagctgcaagagaaggataaactgctggcagcggtcaaagaagacgccgctgctaccaaagacaggtgcaaacaactgactcaggaaatgatgaccgagaaggaacgttccaatgttgtgatcaccaggatgaaggacagaattggcactctggagaaggagcacaacgtgttccagaacaagatccacgtgtcctaccaggagacccagcaaatgcagatgaagttccaacaggtgcgagaacagatggaggctgagatcgcgcacctgaagcaggagaatggaatcctcagagatgcagtttctaacacaaccaaccaactggagagtaagcagtccgcggaactcaacaaactccgccaggactatgcaaggctggtcaatgaacttacagagaaaaccggcaagctgcagcaggaagaagtgcagaagaaaaacgccgaacaagccgcaacacaacttaaggtgcagttgcaggaggccgagaggagatgggaggaagtgcagtcttacatccgtaagagaaccgccgagcatgaagcagctcagcaagacctccagagtaagttcgtggccaaggagaacgaagttcagtctctgcactcaaagctcaccgacacactggtgtcgaaacaacagctggagcaacgcctcatgcaactaatggaaagcgagcaaaagagagtaaacaaagaagagagtctgcagatgcaagtacaggacatactcgagcagaatgaagcattaaaggctcaaatccagcaatttcatagtcagatcgctgctcagaccagcgcctccgtcctggccgaggagctgcacaaggttattgccgagaaggataagcagataaagcagacggaggattccctcgccagcgagagggatcggttgacttcaaaggaggaggaactcaaagacatccagaacatgaactttctccttaaggccgaagtgcagaaactgcaggcactggctaatgagcaggcagccgcagctcatgaattggaaaagatgcagcagagcgtttacgtgaaggacgacaagattcgtctcctggaagagcagctgcagcacgagatttctaataaaatggaggaattcaaaattctgaacgaccagaacaaagccctgaagagcgaggtgcagaaactacagactctggtgagcgagcagccaaacaaagatgtggtcgagcaaatggagaaatgcattcaggaaaaggatgaaaaactcaagactgtggaggaactcctggaaactggactgatccaggtcgccaccaaggaggaggagttgaatgccattcggacagaaaactcttcgcttacaaaggaggtccaagacttgaaggctaaacagaacgaccaggtttcattcgcatcattggtggaagagttgaagaaagtcattcatgagaaggacggaaagataaaatctgttgaagaactactagaagcagagttacttaaggtggccaacaaggaaaagacagtccaagatctcaaacaggaaatcaaagctttaaaggaagaaatcggcaatgtgcagctggaaaaagctcagcagctgtccatcactagcaaggtgcaagagctgcagaaccttctgaagggcaaagaggagcaaatgaatacgatgaaagccgtgctcgaagagaaagaaaaagatctggccaatacggggaagtggctgcaagatctccaggaggaaaacgagtccctcaaggctcatgtgcaggaagtggcacagcacaacctcaaagaggccagctcagcctcacaattcgaagagctcgaaatagtgctgaaagagaaagaaaatgagcttaagcgactcgaagctatgttgaaggaacgtgagtccgatttgtcttcaaaaacacagctgttacaagacgtgcaggatgaaaacaagctcttcaagtcacagattgaacagctcaaacagcaaaactaccagcaggcaagctcatttccccctcacgaggaactactgaaggtgatatctgagcgcgagaaagagataagcgggctctggaacgagttagattcactcaaagacgccgtcgagcaccagcgtaaaaagaacaatgacctaagagaaaagaactgggaagcaatggaagctctggccagtaccgagaaaatgcttcaggacaaggtgaacaagacgagcaaagaacggcagcagcaggtggaagccgttgagttggaagccaaagaggtcctcaaaaagctgtttcccaaggtgtcagttccatccaatctgagctatggagagtggctgcatggcttcgaaaaaaaagccaaggaatgcatggccggcacttccggcagcgaagaggtgaaagtcctggagcataagcttaaagaggcggacgagatgcatacccttcttcaattggagtgcgaaaaatacaaatcagtcctggccgagactgaaggtattctacagaaactacagaggagcgtcgagcaggaagagaacaagtggaaggtgaaggtggatgagtcgcataagacgatcaagcagatgcaaagtagcttcaccagctcagagcaggagctcgagcgcctgcggtccgaaaacaaagatatcgagaacctgaggagagagagagaacaccttgagatggagttggagaaagctgagatggaaaggtcgacatacgtaacagaggtgagggaattaaaggatctcctaaccgagctgcagaagaaactcgacgattcgtattctgaagcagtgagacaaaatgaagaattgaacctcctgaaagcccagctgaacgaaactctcacgaagctacggaccgagcaaaacgaaaggcagaaagtcgcaggggacctccataaagcacagcagtccctcgaattgatccagagtaaaattgtcaaagctgctggcgatacgacagttatagagaactctgacgtgagtccagagacagaaagcagcgagaaagagaccatgtccgtcagcttgaaccaaaccgtgacgcaactgcagcaattactccaagcagtcaaccagcaactgactaaggagaaggaacactatcaagtgctggaatag

SEQ ID NO: 192399 - DNA, 3921 bp, synthetic construct
  misc_feature 1..3921: note = Description of Artificial Sequence: Synthetic coding sequence
  source 1..3921: mol_type = other DNA
atggagttctacgagagcgcctacttcatcgtgctgatccccagcatcgtgatcaccgttatatttctattcttctggctgtttatgaaggaaaccctatacgatgaggttcttgccaagcagaaaagagagcaaaaactgatccctactaagactgacaagaagaaagccgaaaagaagaaaaacaagaaaaaggaaattcagaacggtaatctccacgaaagtgacagcgagtctgtgcctcgcgactttaagctctctgatgccctcgcagtggaagacgatcaggtggcacccgtgcccctcaatgttgttgaaaccagctcgtccgtccgtgaaagaaagaagaaggaaaaaaaacagaaacccgttctcgaggaacaggttatcaaagagagtgacgcaagcaagataccaggcaagaaggtcgaacccgtaccagttacaaagcagccaactcccccctccgaagccgccgcaagcaaaaaaaaacccggacagaaaaagtccaagaacgggagtgacgaccaggacaagaaagtagaaacactgatggtcccctccaaacgtcaggaagcactccctctgcatcaggagactaaacaggagtcaggaagtggtaaaaagaaagcctcgagcaagaaacaaaagaccgagaacgtcttcgttgacgaacccctaattcatgccacaacttatattcccctcatggacaatgctgactcgtcgcccgtggtggataaaagggaggtcattgacttgttaaagcctgaccaggttgagggcatccaaaagtcgggtactaagaaactgaaaaccgagacagacaaggaaaatgccgaggttaaattcaaagatttcttactatctctcaagactatgatgttttcggaagacgaagccctgtgtgtggtcgacctgctgaaagagaagtcaggagttatacaggacgcattgaaaaaaagctcaaagggtgagctaacaacccttatccatcagctgcaggaaaaggacaagctcctggcagcagtgaaggaggatgcagccgcgaccaaggaccgttgcaagcagctgactcaggaaatgatgactgagaaggagagaagtaatgtcgtcatcacaaggatgaaggacagaatcggaacgcttgagaaagaacacaacgtcttccagaataaaattcatgtctcatatcaggagacacagcagatgcagatgaaatttcagcaggtccgagaacagatggaggccgaaattgcacatttaaaacaagagaacggaatcttgcgcgatgccgtgtccaacacaaccaaccaattggagtccaagcaaagtgctgagctgaacaagctcagacaggattatgctaggctggtgaacgagctgactgaaaaaaccggcaagctgcagcaggaggaagttcagaaaaaaaacgctgagcaagcagccacccagctaaaagtgcagctgcaggaggccgagcgaaggtgggaagaggttcagtcttacattcgcaagcggactgccgagcacgaggctgcccagcaggatctacaatcgaagtttgtcgccaaggaaaatgaagtgcagtctctccacagcaaacttactgatactttggtatccaagcagcaactggagcagagactgatgcagctgatggagtcagagcagaagagagtcaataaagaagagtccctccagatgcaggtgcaggatattttagaacagaacgaagcccttaaagcacagatccagcagtttcactcccagatcgccgctcagactagcgcaagcgtgctggctgaagaactacacaaggtcatagccgagaaagataaacagatcaagcaaactgaagactccctcgccagcgagagagaccgcctgacaagcaaggaggaggaactgaaggacatccagaatatgaatttcttactgaaggctgaagtgcagaagttacaagcattggctaatgagcaggccgccgccgcgcacgagcttgaaaagatgcaacaatcagtgtacgtgaaggatgataagattcgattgctcgaggagcagctgcaacatgaaatctctaataagatggaggagtttaagatcctgaatgaccaaaataaagcccttaaaagcgaagtgcagaagcttcagacactcgtgagcgagcagcctaacaaggacgtcgtggaacagatggaaaagtgcattcaagagaaagatgaaaagctgaaaacggtagaggagctgctggagaccggcttgattcaggtcgcgaccaaagaagaagagctcaatgcaatccgcaccgaaaattcgagcctgactaaggaggtgcaggatctgaaggccaagcagaacgatcaggtttccttcgcgtcattggtggaagagcttaagaaggtgatacatgagaaggacggcaagattaaaagcgtggaggaattgctcgaggccgagttacttaaagtcgctaataaggaaaaaacagttcagctgtctattaccagtaaggtccaggagctgcagaacttgctgaagggaaaggaagagcaaatgaataccatgaaggcagtcctggaggaaaaggagaaggatcttgccaatactggcaagtggctccaggatctccaggaagaaaacgagtccctcaaagctcatgtccaggaagtggctcagcacaaccttaaagaggcgtcgtccgcttcacagtttgaagaactagagattgtgctgaaagagaaagaaaacgagctaaagcgccttgaggctatgctgaaagagcgggagagcgatctatcgtctaagacacagttgctgcaggatgtgcaagatgaaaacaagctgtttaagtcccaaattgagcagctcaaacaacagaactatcagcaagcctcctccttccccccccacgaagaactgctcaaagtcatctctgagcgcgagaaggaaatttcaggcttatggaacgagctggatagccttaaagacgccgtcgaacaccagaggaagaagaataatgatctcagagagaagaactgggaggctatggaggctctcgcaagcaccgagaaaatgctgcaggataaagtcaataaaaccagcaaggagagacagcagcaggtcgaggctgttgagttggaagcaaaagaggtcctgaaaaaattattccctaaagtatctgttccatccaacttgtcatatggggaatggttgcatggtttcgaaaagaaggcgaaggagtgcatggccgggacatctggcagcgaggaggttaaagtcctggagcacaaactcaaagaagctgacgagatgcacactctgctgcaactggagtgcgagaaatataaaagcgtgcttgctgaaacggaaggcattctccagaagctgcagaggtcagtcgaacaggaagaaaataaatggaaggttaaagtggatgaaagccataaaaccattaagcagatgcagtcctctttcactagcagtgaacaggaactcgagagactgcgatccgagaacaaagatatagaaaatctcaggagggagagggagcacctcgagatggagctggaaaaagctgagatggagcggagtacatacgtcacagaggttagggagttgaaggcccagctcaatgaaacacttacaaaattgaggacagagcagaatgaacgtcaaaaggttgcaggggacctgcacaaggcccagcagagtctggagctcatccagtccaaaattgtaaaggcagcgggggatacaactgtcattgaaaactccgatgtgtccccagaaaccgagagcagcgagaaagagaccatgtctgtgagcctgaatcaaacagtcacacaactgcagcaactgctgcaggccgtcaaccagcagcttaccaaggagaaggaacactaccaggtgctggagtag

SEQ ID NO: 192400 - DNA, 4074 bp, synthetic construct
  misc_feature 1..4074: note = Description of Artificial Sequence: Synthetic coding sequence
  source 1..4074: mol_type = other DNA
atggagttctacgagagcgcctacttcatcgtgctgatccccagcatcgtcatcactgtcatttttttattcttctggttatttatgaaagagactctctacgacgaagtacttgcaaaacagaaacgagaacagaagctgatcccgaccaagacagacaaaaagaaagccgagaagaagaaaaataaaaagaaagagattcagaatggcaatttgcacgagagtgatagcgagtctgttcctcgtgattttaagctatccgatgctctcgccgttgaggacgatcaggtggccccagtgccactaaacgtcgtggaaacaagttcatcagtccgtgagcgcaagaagaaggaaaagaagcagaaaccagtcttggaggagcaagtgattaaggaatcggatgcttccaaaattcctggcaaaaaggtggagccagtgcctgtcacaaagcagccaactccaccgtcagaggcagccgcgtctaaaaagaagcctggtcagaagaaatccaaaaacggaagcgatgatcaggataagaaggtggagaccctcatggtgccatcaaagaggcaggaggccctccctcttcatcaggagactaagcaggaaagcgggagtggcaagaagaaagcctcctccaagaagcagaagacagagaacgtcttcgttgatgaaccactaattcatgctactacatacatccctctgatggacaatgctgatagctcacccgtggttgataagcgcgaggttattgatttgctgaagcctgatcaggtggagggcattcaaaaatcgggaacaaaaaagcttaagaccgagactgataaggaaaatgctgaggttaagttcaaggactttcttttgagcttgaagacgatgatgttctccgaggacgaagccttgtgcgttgtcgatttgctgaaagaaaagtctggcgttatccaggacgctctcaaaaaaagctcaaagggcgagctaacaaccttgatccaccagctccaggagaaggataagctgttagctgcagtgaaagaggatgcggccgcaacaaaagacaggtgcaagcagttgacacaagaaatgatgacagagaaagagagatcaaatgtggtgatcacccgcatgaaagaccgcatcggcacgctggagaaagagcataatgtgttccagaacaagatccacgtgtcgtatcaggagactcagcaaatgcagatgaaatttcagcaggttagagagcagatggaggctgaaatcgctcatcttaagcaggaaaatgggatccttagagacgcagtgtccaacaccacaaaccaattggagtccaaacagtccgccgaactcaacaagttaaggcaggactacgccagactggttaacgagctcacagaaaaaacggggaagctgcagcaggaggaggtccagaaaaagaacgcagagcaagctgctacccagctgaaggtgcagctgcaagaagctgagaggcggtgggaagaggtgcagtcttatattcggaaaaggaccgctgagcatgaggcagcccagcaggaccttcagtccaagtttgtggcgaaagaaaatgaggttcagtctctgcacagtaagttaacagacacattagtgtcaaaacagcagctggagcagaggctgatgcaactgatggagtctgaacagaagcgagtcaacaaagaggagtctttgcagatgcaagtgcaggatattctcgagcagaatgaagcactgaaggcgcaaatacaacagtttcacagccagatcgcagcccaaacatctgcctcagtgctcgcagaagagctgcataaagtgattgctgagaaggacaagcagatcaaacagaccgaggactcattggccagcgagcgggatcgactcacgtcaaaagaggaagaactgaaagacatccagaacatgaattttctgttaaaggctgaggttcagaagctgcaggcactggccaatgaacaggcagccgccgcccatgagctcgaaaagatgcagcaatcagtctatgtgaaggatgataagatcaggctcctagaggaacagttgcagcatgaaataagtaataaaatggaggagttcaagatcctgaacgatcagaataaggcactaaaaagcgaagtacagaagcttcagacactcgtgagcgaacagcccaataaagatgtggtggagcagatggaaaaatgcatccaggagaaggacgagaaattaaagactgttgaggaattgctggagaccggccttatccaagtggccacgaaggaagaagagctgaacgccattcgcaccgagaattcctcgctcaccaaggaggtgcaggatctgaaggccaagcagaacgaccaagtgtcatttgcaagtctagttgaggaactgaagaaagttattcatgaaaaagacgggaaaatcaaatctgttgaagaacttcttgaggccgagctcttgaaggtggctaataaagaaaaaacagtgcaagacttaaaacaagagatcaaagccctgaaggaggagataggaaacgtacagctggagaaggcccagcagttgtcaatcacgtccaaagttcaggagttacagaacctcctcaaaggcaaggaggagcagatgaacacaatgaaagccgtgctcgaggagaaagaaaaagaccttgcaaatacaggtaagtggctccaagatctccaggaggagaatgagtcactgaaggctcatgtccaggaagttgcgcaacacaacctgaaagaagcctcatctgcatctcagtttgaagaactggaaattgttcttaaagagaaggaaaacgaacttaaacgcctggaggcgatgctaaaagagcgagagtccgatctgtcatccaagacccagctgctgcaagacgtgcaggatgagaacaagctgtttaagagccaaatagaacagctcaaacagcaaaactatcaacaggcctccagtttccccccacacgaggagctcctcaaggtgattagtgaaagggaaaaagaaattagcggcctgtggaatgagcttgattcactcaaggacgcagtagagcaccagagaaaaaagaataatgatcttcgggaaaaaaattgggaagcaatggaagcactggcttcgaccgagaagatgttacaagacaaagtgaataagacatcgaaggagcggcaacaacaggtggaggcggtggagttggaagctaaggaggtcctgaagaaactcttccccaaggtgtccgtgccgtccaacctatcttacggtgaatggctacatgggttcgaaaagaaagctaaggaatgtatggccggaacctccggatccgaagaggtgaaagtgctcgagcataagttgaaagaagctgacgaaatgcataccctactgcagctggagtgtgaaaaatataagagtgtcctcgcagagacagagggaattctccaaaagcttcagcgcagcgtcgaacaagaagaaaacaagtggaaggtgaaagttgacgagagccataagactattaaacaaatgcagagttccttcacttcatcagagcaggagcttgagcggctcagatccgagaataaggacatcgagaatctccgcagggaacgagaacacctcgagatggagcttgagaaggcagagatggaaaggagcacatatgtcacagaagtccgagagctgaaggatttacttacagagctccagaaaaaactagatgacagctattccgaagctgttcgtcaaaacgaggagctgaacctcctcaaggctcaacttaacgagactctaacgaagctccgcaccgaacagaacgagagacagaaggtagctggagacctccacaaagcccagcagagtctggagttgatacaaagcaaaatcgtcaaggctgccggcgatactaccgttatagagaacagtgacgtgtcacccgaaacggagtcttctgagaaagaaacaatgtctgtgagtctgaatcagacagtgactcagctccaacagctcctgcaggccgttaatcagcagctgactaaggagaaagagcattatcaagtgttagagtag

SEQ ID NO: 192401 - DNA, 3921 bp, synthetic construct
  misc_feature 1..3921: note = Description of Artificial Sequence: Synthetic coding sequence
  source 1..3921: mol_type = other DNA
atggagttctacgagagcgcctacttcatcgtgctgatccccagcattgtgattacagtcatcttcctctttttctggctctttatgaaggagaccctatatgacgaggtgttggcaaagcagaagcgcgagcagaaattaattcctactaagactgacaaaaagaaggcagaaaaaaagaagaataaaaagaaagaaatacagaatggcaatctgcacgaaagtgactccgagagtgttcctagagactttaagttgtccgacgccctcgcagtggaggatgaccaggtggcgccagtccccttgaatgtcgtagaaacatcctctagtgtgcgagaacgcaagaaaaaagaaaaaaagcagaagccggtcctcgaggagcaagtcataaaagaaagcgacgcatccaagatacccggtaagaaagtggaacctgtgcctgttacaaagcagccgactccacctagcgaggcagctgcctcaaagaagaagcctggtcaaaagaagtcaaaaaacggatccgacgaccaagacaagaaagtggagactttgatggtgccttcaaagcgacaagaggcactgcctctgcatcaggagaccaagcaagagtccggcagtgggaaaaaaaaggcctcatcaaaaaagcagaaaacagaaaatgtatttgtcgatgaacccctgattcacgccaccacctacattccgctcatggacaacgccgacagttcacccgtggttgacaaacgcgaggtcatcgatttactcaaaccagatcaagtcgagggcattcagaaaagcgggacaaaaaaactgaagaccgaaacggacaaggagaacgcagaggtcaagtttaaggatttcctcttgtccctgaagactatgatgttcagtgaagacgaggcgctctgtgttgttgacctgctaaaagaaaaatccggcgttatacaggacgcgttgaagaaatcttctaaaggggagctcaccactcttatccaccagctgcaggaaaaagacaagttgctagccgcggtgaaagaggacgccgccgccacaaaggatcgctgtaaacaactcacacaggagatgatgactgagaaggagcgttcgaacgtggtaattactcgaatgaaagacagaattgggaccttggagaaggaacacaacgtgttccagaacaaaatacacgtcagttaccaggaaacacagcaaatgcagatgaagtttcaacaggttcgagagcagatggaggcagagatcgcccatttaaagcaggaaaacggaatcctgagggacgctgtctctaataccacgaaccagttggagtctaagcagtccgccgagctgaacaagctgcgtcaagactatgccagactggtgaatgaattgacagagaaaaccggtaagctgcagcaggaggaagtccagaagaaaaacgccgagcaggcagccacccagctgaaagtgcagcttcaagaggcggagcgtcgttgggaagaggtgcagagctatattaggaagcgcactgccgaacacgaagccgcacaacaggacctgcagtccaaattcgtggccaaagagaacgaggtgcagtcccttcactcgaagttaacagacaccctggtgagcaagcagcaactggagcagcgcctgatgcagctcatggagagcgagcagaaaagggtcaacaaagaggaatcactacaaatgcaagttcaggatatcctcgagcagaacgaggccctgaaggcacagatccagcaatttcatagccagattgccgcacaaacctcagcaagcgtacttgcggaagagttgcataaggtcatcgctgagaaagacaaacaaataaagcagaccgaagacagtctggccagcgagcgagatcggctgactagcaaggaggaagaacttaaggacatccagaacatgaacttcctcctcaaggccgaagtccagaagctacaagcgctcgccaatgagcaggcggccgctgcacatgagctcgaaaagatgcaacagtccgtgtacgtcaaggacgataaaattcggctactggaggaacagctccaacacgagattagtaataagatggaagagttcaagatcctcaatgaccaaaataaagctctgaaatccgaggtacagaaactacagacgctggtgagcgaacaacccaacaaagacgtggtggaacaaatggagaagtgtatacaggagaaggatgaaaagttgaaaacggtcgaagagcttctcgagacaggtctcatccaggtggccacgaaggaagaggagctcaacgcgattcggactgagaattcatccctcaccaaagaggtccaagacctgaaggctaaacagaatgaccaagtatcttttgcttctcttgtggaagagctgaagaaggtcatacatgagaaagacggtaaaatcaaatccgtcgaggagctgctcgaggccgaactgttgaaggttgcaaacaaggaaaagactgtgcagctttcgatcacttccaaggtgcaagagcttcaaaacctgcttaaggggaaggaagaacagatgaatacgatgaaggcggtgttggaggagaaagagaaggacctggctaacacgggtaaatggttacaggatctgcaggaggagaatgagtcactaaaggcacacgtccaggaagtggcccagcacaatttgaaagaagctagcagtgcctcccagttcgaggagctagagattgtgttgaaagagaaagaaaacgagcttaagagattggaagctatgctgaaggagcgggagagcgacctgagctctaagacacagttgctgcaggatgtgcaggacgaaaataaactctttaagagccagatcgagcagctcaaacagcaaaactatcagcaagcttcaagctttcctcctcatgaagagcttcttaaagtgataagcgagagggaaaaagaaatcagcggcctctggaatgaactggattctttgaaggacgccgtcgaacaccaacggaaaaaaaataacgacctcagggagaagaactgggaggcaatggaagcccttgccagtaccgagaaaatgctccaggataaggtcaataagacatctaaagaaaggcagcagcaggtagaagctgtggagctcgaagcgaaagaggttttgaaaaaactttttcctaaggtaagcgtgccatcaaacttatcatacggggaatggctccatggcttcgagaaaaaagcaaaggagtgcatggccgggacatcagggtctgaggaagtaaaggtgcttgaacacaaacttaaagaagcagatgagatgcatacactcctgcagctcgagtgcgaaaagtacaaatcggtgctggctgagacggagggcattctgcagaaactgcagcggagtgttgaacaagaggagaacaagtggaaggtcaaggtggacgaatcacacaagacaatcaagcagatgcaaagctctttcacctcatcggagcaggaactcgaacggctccgctccgaaaacaaagacatagaaaacttaaggagagagcgggagcatctggaaatggaactcgagaaggcggagatggagcgctcgacctatgtaacggaggtgcgggagttgaaggcgcagttgaacgaaacattgacgaagctgagaacagaacagaatgagcggcaaaaagtggccggcgacctccacaaggctcagcagtccctggagcttatccagtccaagatagtgaaagcagccggtgacacgacagtgattgagaatagcgacgtgtctccagaaactgagagttctgagaaggagacgatgtcagtcagcctcaatcagactgtcacccagctgcagcaactgttgcaggctgttaaccagcagctgaccaaagaaaaagagcactaccaagtgctagaatag

SEQ ID NO: 192402 - DNA, 4074 bp, synthetic construct
  misc_feature 1..4074: note = Description of Artificial Sequence: Synthetic coding sequence
  source 1..4074: mol_type = other DNA
atggagttctacgagagcgcctacttcatcgtgctgatccccagcatcgttatcaccgtgatttttttgttcttttggctgttcatgaaggagaccctttatgacgaggtgctggccaaacagaagagagaacagaaattgatacccaccaaaactgacaagaaaaaggctgagaaaaaaaagaataaaaaaaaagaaattcagaacggaaacctccatgagagcgactcagagtccgtgccacgggacttcaagctgagcgatgctctggccgtggaagatgaccaggtcgctcccgtccccttgaacgtcgtcgagacttcatcctccgtgcgcgagagaaaaaagaaggagaaaaaacagaagcctgtcttggaggaacaagtcatcaaggaaagcgacgcctctaagatacccggcaaaaaggtggagccagtccccgtaaccaaacagcccaccccaccgtccgaagctgcagcttccaaaaagaagccaggacaaaagaagagcaaaaatgggtcagacgaccaagacaaaaaagtggagaccctgatggtcccaagcaaaaggcaggaagccctaccgctccatcaggaaacgaagcaggagtccggttcagggaaaaaaaaggccagttctaaaaaacagaaaaccgagaacgttttcgttgatgagccgctgattcatgcaacaacatatattcccttgatggataacgctgactcctcccctgtcgtagacaaacgcgaagttatcgacctattaaaaccggaccaggtagaaggtattcaaaagtcgggaaccaagaagcttaaaaccgaaaccgacaaagagaacgcagaagtcaagttcaaggacttcctgctgagtctgaaaactatgatgttttcagaggacgaagcactgtgtgtagtggacctactcaaggaaaagtctggcgttattcaggacgcactgaaaaaatcttctaaaggcgaactgaccacactgatccaccagctgcaggaaaaagacaagttgctcgcagctgtgaaagaagacgccgcagcaacgaaagaccggtgcaagcagctgacccaggaaatgatgacagagaaagaacgcagcaacgtggttatcaccaggatgaaggaccgaatcggtaccctcgaaaaggagcataacgtctttcagaacaagatccacgtatcctaccaagagacacagcagatgcagatgaagttccaacaggtgagagagcagatggaagccgaaatagcacacttgaagcaagagaacggcatcctgagggacgccgtatctaacaccaccaaccagcttgagtcaaagcagtcagcagaactgaacaaactgaggcaggattatgctcgccttgtcaacgagctaaccgagaaaacgggaaagttacagcaagaagaggtccagaagaaaaatgcggagcaagctgcaactcagttgaaggtacagctgcaggaagccgagagacgatgggaggaagtccagagctatattcgaaaacgtaccgccgaacatgaggccgcccaacaggacctgcagagcaagtttgtggcaaaggagaacgaggttcagtcactgcattccaagctgacagatacactggtgtctaagcaacagttagagcagcgattaatgcaattaatggaatccgagcagaaacgagtgaataaagaggagtcactccaaatgcaggttcaggatatcctggagcaaaatgaggccctgaaagcgcaaatccagcaattccactcccaaattgcagcccagacatctgcctcagtactggccgaggagctccataaagtgattgcagagaaagacaaacagatcaaacaaaccgaggacagtctggctagcgagcgggaccggctgacatcaaaggaggaggaacttaaggacatccaaaacatgaactttctcctaaaagctgaagttcaaaagctgcaggcgttggctaacgaacaggccgccgctgctcatgaactggaaaagatgcaacagtctgtgtacgtgaaggacgacaaaattaggctgctcgaagagcagcttcagcatgagatctccaataagatggaggagttcaagattcttaatgaccaaaacaaggccctcaagagtgaggtgcaaaagctgcagacattggttagtgagcagccaaacaaggatgtcgttgaacagatggaaaaatgtattcaggagaaagacgaaaaacttaagacagtcgaagagttgcttgagacaggccttatccaggtggctacaaaggaagaggagctgaatgccatccgcaccgagaatagcagcttgaccaaggaggtacaagacttgaaggcaaagcagaacgaccaggtcagctttgccagtctcgttgaggagctgaaaaaagtgattcatgagaaggacgggaagataaagtccgtggaagagctgttggaggcggaactcctcaaggttgcaaataaggagaagacagtgcaagaccttaagcaagaaattaaggctttgaaggaggagatagggaacgtacagctcgaaaaggcccagcagctcagtataacctctaaggtccaagaactgcagaatctgctaaaaggcaaagaggagcaaatgaacaccatgaaggcagttctggaggagaaggagaaagacctggctaacaccggaaaatggctgcaggacttacaggaggagaacgaaagtctcaaggctcacgtgcaggaagttgctcagcataacctgaaggaggcctctagtgcgagccaattcgaggaattagaaattgtgctgaaggaaaaagagaatgagctcaagaggctggaagccatgctgaaggaacgagagtccgatctgagttcgaagacacagctattacaggacgtgcaggatgagaacaaactgtttaaatcccagatagagcagctgaaacagcagaactaccaacaggcttcctcgtttcctcctcatgaagagctgctgaaagtaatttccgagcgcgaaaaagagatcagcggcctttggaacgagcttgattctttgaaggacgcagtggaacaccagcgcaaaaaaaacaatgacctacgtgagaagaactgggaggcgatggaggccctcgcatcaaccgagaaaatgttacaggacaaggttaacaagacctccaaggagcggcagcaacaggtcgaggcggtggagctggaggccaaggaggttctgaagaagcttttcccgaaggtctcagtgcctagcaatttgagctacggggagtggttacacggttttgagaaaaaagcgaaggaatgcatggcaggcacaagcggttccgaagaggtgaaggttctcgagcacaagctcaaggaggccgatgagatgcacacgcttctgcaactggagtgtgaaaagtacaagagtgtgctggctgagaccgaaggtattctgcagaagctacagcgcagcgtggagcaggaggagaacaaatggaaggtcaaagttgacgagtcacataagacgatcaagcagatgcagagctcttttacaagcagcgagcaagagctggaaaggctgagatctgagaacaaagatattgagaacttgagaagggagcgcgagcacttggaaatggagctggaaaaggccgagatggagcgctccacctatgtcaccgaggtaagagaactgaaagacctgctcactgagctgcagaagaagctcgacgactcgtacagtgaagccgtgcgtcagaacgaagaactgaaccttctgaaggcccagctcaatgaaacgctaacgaagttacgcactgaacagaatgagcgccaaaaagtggctggcgacctgcacaaagcccagcagagccttgaactgattcaatcaaagatagtgaaagcagctggcgatacaacagtgatagaaaactctgatgtatcgcctgagacagagtcatcagagaaggaaaccatgagcgtctctctaaaccagacagtgacccagctgcaacagttactccaggctgtgaaccagcagctgactaaagagaaggaacattatcaggtgttggaatag

SEQ ID NO: 192403 - DNA, 3903 bp, synthetic construct
  misc_feature 1..3903: note = Description of Artificial Sequence: Synthetic coding sequence
  source 1..3903: mol_type = other DNA
atggagttctacgagagcgcctacttcatcgtgctgatccccagcatcgtgattaccgtcatcttcctgtttttttggctttttatgaaggaaaccctctacgatgaggtgcttgctaagcagaagcgggaacaaaaacttatccccaccaaaacggataaaaaaaaggctgaaaaaaagaaaaacaagaagaaagaaatccagaacgggaaccttcatgagagtgactctgagagcgtgcctcgggactttaaactgtcagacgccctggccgtggaagacgaccaggttgcaccagtcccactcaatgttgtcgaaaccagttctagcgttagggaacgcaaaaagaaagagaaaaagcagaaacctgtgctggaggagcaggtcattaaagagtcagacgcatccaaaattcctggtaaaaaagtagagccagttcctgtgactaagcagccaacccctcccagtgaagctgccgcaagcaaaaaaaagcccgggcagaaaaaaagtaaaaatggaagcgatgaccaggataagaaagtagagacactgatggtaccctcaaagcggcaagaggccctcccactgcaccaagaaacaaagcaggaatccggttccggcaagaaaaaggcctctagcaagaagcagaagacggagaatgtctttgtggatgaaccactcattcatgccacgacatacattccactgatggataacgctgatagttcacccgttgtagacaagcgggaggtgatcgacctgctgaagcctgaccaggttgagggaattcaaaaaagcgggactaaaaaactcaaaacagagacagacaaggaaaacgccgaagttaagtttaaagattttctcctgtcattaaagaccatgatgttctccgaggacgaggccctgtgtgttgttgacttgctgaaagagaagtcaggcgtaattcaggatgccctgaagaaatcaagtaagggcgagttgaccactcttatacaccagctgcaagagaaagacaaactgctcgctgcggtcaaagaagacgccgctgctacaaaagacaggtgtaagcagctaacccaggaaatgatgacggaaaaggaacgatccaacgtggtcatcactcgaatgaaggatagaattggcactctggaaaaggaacataacgtgtttcagaacaaaattcacgtgagttaccaggaaacccaacagatgcagatgaaattccagcaggtgcgcgagcagatggaagccgagatagcgcatctcaagcaggaaaacgggattctgcgggacgccgtcagtaacaccaccaaccaactggaaagcaagcaatccgcagaactcaacaagctcagacaggactacgcccgcctggtcaacgagctgactgagaaaaccgggaaactgcagcaagaggaggtccagaagaaaaacgctgaacaggcagccacccagttgaaggtgcaattgcaagaggccgaacgcagatgggaagaggtccagagttatataaggaaaaggactgccgagcatgaagccgctcagcaagacctccagtccaaattcgtggcaaaggaaaacgaggttcagtccctgcactctaagcttacagacacactcgtgtccaagcaacagctggagcagcgcctgatgcagcttatggaaagcgagcaaaagcgtgtgaataaagaagaatcgctccagatgcaggttcaggacatcctagaacagaacgaagcactcaaagcacaaattcagcaattccacagccaaatcgccgcacagaccagcgccagtgtgctcgcggaggagttacacaaggtgatcgctgaaaaagataaacagataaagcagacagaagatagcctcgcttcagaaagggatcgcctcaccagcaaagaagaggagctgaaggacatccagaatatgaatttccttttgaaagccgaggttcagaagctccaagccctcgcaaacgagcaggctgctgctgctcacgagcttgagaagatgcagcaatcagtgtacgtgaaagacgacaagatccggctcttggaagagcagcttcagcatgaaatttcgaacaagatggaagaattcaagatcctcaacgaccaaaacaaagctctgaagagtgaagtccagaaactgcagaccctggtgagcgaacagccaaacaaagatgtggtggagcagatggagaaatgtatacaagaaaaagacgaaaaactgaagacagtggaggagcttctggagactggccttatccaagtggccacaaaggaggaggaactaaacgcgatccgcacagagaattctagtttgacgaaggaggttcaggatctgaaggcgaagcagaatgatcaggtaagcttcgccagcctagtggaagaacttaagaaggtaatccacgagaaggacggaaagatcaagtccgttgaagagctgctcgaggctgaacttctcaaggttgcaaacaaagagaaaacggtccaggatctgaaacaggagattaaagcccttaaggaggagatcggcaacgtgcagctcgaaaaagcacagcagctctcgataacaagcaaagtgcaggagctgcagaacctcttaaagggaaaggaagaacaaatgaataccatgaaggccgtgttggaagagaaggagaaagacctggctaatactggaaaatggctgcaggatcttcaggaggagaacgagtctctgaaggcccatgtccaagaggtagctcagcataatttgaaggaagcctcatccgcctcgcaatttgaagaactcgaaatcgtgttaaaggaaaaagagaatgagctcaagcgtctggaggccatgctgaaagagagagagtccgatctgagctccaagacccagctcttacaggacgtccaggacgagaataaactgtttaaatcccaaattgagcagcttaaacaacaaaactaccaacaagccagtagctttcccccacacgaggagctgctaaaggtaataagcgaacgtgaaaaagaaatctctggactgtggaacgagttggatagtctgaaggacgcagtcgaacatcaacgcaagaaaaacaacgagcgacagcagcaggtggaggcggtggaactcgaggctaaggaagttttaaaaaagctgtttcccaaagttagcgttccgagcaatctttcatatggcgagtggcttcatggctttgaaaaaaaggctaaagaatgtatggccggaacttcggggtccgaggaggtcaaggtactcgagcacaagttgaaagaggcagatgagatgcatactttgctacagctggagtgtgagaagtataaatcagtgctggccgaaaccgagggcattctccagaaactgcaacggtccgtcgagcaagaagaaaacaaatggaaagtcaaagtagacgagagtcataagaccatcaaacaaatgcaaagtagctttacatccagtgagcaagagctggaacgtctcaggagcgagaacaaagatatagaaaatcttcggcgagagagggagcacctcgagatggaactcgaaaaagccgaaatggaacgaagtacatatgtgactgaggtgagagaactgaaggcgcagctgaacgagacactgacaaagctccggaccgaacagaacgagcggcagaaagttgccggagacttgcacaaggcgcagcagagcctggaactcatccaatccaaaattgtcaaggccgccggcgacaccaccgttatcgagaatagcgacgtttcgcccgagactgaaagctctgagaaagaaacaatgagcgtttcccttaaccagaccgtcacacagttacagcaactgctgcaagctgtgaatcagcagcttactaaggaaaaggaacactaccaagtattggagtag

SEQ ID NO: 192404 - DNA, 4074 bp, synthetic construct
  misc_feature 1..4074: note = Description of Artificial Sequence: Synthetic coding sequence
  source 1..4074: mol_type = other DNA
atggagttctacgagagcgcctacttcatcgtgctgatccccagcattgtgattacagttatctttctgtttttttggctgttcatgaaggaaacactttatgatgaggtgttggcgaagcagaaacgggaacagaagcttatccctaccaagaccgacaagaagaaggctgaaaagaaaaaaaacaagaagaaggaaattcagaatggtaaccttcacgagagcgacagcgagagcgtgcctagagactttaagctgagcgacgcgctggccgttgaggacgaccaggtagctcccgtgcccctgaatgtggtggaaacttcaagctcagtgagggagagaaaaaaaaaggaaaagaagcagaagccggttctggaagagcaggtgatcaaggaatccgacgcctctaaaatcccaggtaagaaggtggaacccgtccccgtcacgaagcagcccacacccccttcagaggctgcagctagcaagaaaaagccaggccagaaaaagagtaaaaacgggtctgacgaccaggataaaaaagtagagacactaatggtgccaagcaaacgccaagaggctctgccactgcatcaagagactaagcaagagagcggctccggcaaaaagaaggcttcttcaaaaaagcagaaaacggagaacgtttttgttgacgaaccccttatccatgccactacttacatcccactgatggataacgctgactcatccccagtggtagataaacgcgaggtgatcgacctcctgaagccagaccaggtggaaggcatacaaaaatccgggaccaaaaagctgaagaccgagaccgataaggagaacgcagaggttaagtttaaagatttcctactgagcctgaaaactatgatgttctccgaggacgaggcgctttgcgtcgtggatctgctgaaggagaaaagtggagtaatacaggacgccctgaaaaagtcatcgaagggggagctgaccaccctcattcaccagctacaggagaaggacaaacttctcgcagctgtgaaagaagacgcagcagccaccaaggatcgctgcaaacagctcacacaggagatgatgaccgaaaaggagcgtagcaacgtggttatcactaggatgaaggaccggatcggcacactggagaaggagcataacgtgtttcaaaacaagatacatgtgtcctaccaggaaacacagcagatgcagatgaaattccagcaggtcagagagcagatggaagcagaaattgcacacctaaagcaggaaaacggcattctgagagacgcggtgagcaacacgacaaaccagctggagagtaagcaatcagctgaactcaataagctgcgtcaggactatgctaggctggtcaatgagctgactgagaaaaccggtaagctgcagcaggaagaagtgcagaagaaaaatgctgagcaggccgctacccaactgaaggttcagctgcaggaagccgagcgaaggtgggaagaggttcagtcctatatcagaaagcggacagctgagcatgaagccgcccagcaggacttgcaatcaaaatttgtggcaaaggagaatgaggtccagagcctccactcaaaactcacggatacgctggtgtctaagcaacagctcgagcagcggcttatgcagcttatggaatcggagcagaagcgtgtgaataaagaagagtcgctgcaaatgcaagttcaagacatattggagcaaaacgaggcattaaaggcccagatccagcagttccattcccagatagcagcccagacctcagcatccgtgctcgccgaggagctccacaaagttattgctgagaaggataagcaaattaaacagactgaagactcgctagcgtccgagcgcgatcgactgaccagcaaagaagaagagctgaaggacatacagaacatgaactttctcctcaaggcagaggtacagaagcttcaggccctggctaacgagcaagcggctgcagcccacgaactggagaaaatgcagcagagcgtgtacgtcaaagatgacaagatccgactgctagaggagcaattacagcacgagatctccaacaagatggaggaattcaaaatcctgaacgaccaaaacaaggctctgaagtctgaggtgcaaaaattgcagacgctcgtgagtgagcagccgaacaaggacgtcgttgagcagatggagaagtgcatccaggagaaggacgagaagctgaagacggtagaggagctcctcgagaccggtctcatccaagttgcaaccaaggaagaagagcttaacgctatccgtacggagaactcttcattgacaaaagaggttcaggaccttaaggctaagcagaatgatcaagtctcctttgcttctcttgtggaggagctgaagaaggtcatccacgagaaggatggcaagatcaaaagcgtggaagagttactggaggcagagttactcaaggtggctaacaaggagaagaccgttcaggatctcaaacaggagatcaaggctctgaaggaggagatcggaaacgtgcagctggagaaagcccagcaactgagtattacatcgaaggtgcaagagctgcagaaccttcttaagggaaaagaagagcagatgaacacaatgaaggctgtgctggaggagaaggaaaaggatctcgccaataccggaaaatggcttcaagaccttcaagaggagaatgaatcattgaaggcgcacgtgcaagaggtcgcccaacataacctcaaggaagcaagtagtgcaagtcaatttgaagaactggagattgtgcttaaggagaaagaaaatgagctgaagaggctggaagccatgctgaaggagagggaatctgatctgtcttccaagacccagctactccaggacgtgcaggacgaaaacaaactcttcaaaagtcaaatcgagcaactgaaacagcagaattatcagcaggcaagctcctttccaccacacgaagaactccttaaggtgatatcagagagggagaaggagattagcgggctctggaacgaactggattcactgaaggatgccgtggagcatcagcggaagaaaaacaacgatctcagggagaaaaactgggaagcaatggaggcacttgcctcaacagagaaaatgcttcaggataaggtgaataagacgagcaaggagaggcagcagcaggtagaggcagtggagctggaagcaaaggaggttctgaaaaaactgttcccgaaggtaagtgtcccatctaatctgtcctatggggagtggctacacgggttcgaaaaaaaggctaaggagtgcatggccggcacttccggctccgaggaagtgaaggtgctggagcacaaattgaaggaggctgacgaaatgcacacactcttacagctggagtgtgagaaatataagtcggtcctagccgagactgagggaattctacaaaagcttcagcggtctgtggagcaagaggaaaacaagtggaaggttaaagttgatgagagccacaaaacgatcaaacaaatgcagtcttctttcacgtccagcgagcaggagttagaacgtctgagatccgaaaacaaagatattgaaaacctgcggcgcgagcgagagcacctcgaaatggagctggagaaagccgagatggagcgtagtacctatgttacggaagtgcgtgaactcaaggacctcctgaccgaattacaaaaaaaactggatgatagttactccgaggcggtaagacagaatgaggagctgaatctcctgaaggcccagctcaatgagaccttgaccaaacttaggacggagcagaacgaacggcagaaggttgccggcgatctgcataaagcacagcaaagtctagaacttatccaatcaaagattgttaaggccgctggtgataccactgttatcgagaactctgatgttagtccagagactgagagttccgaaaaggagaccatgtccgtgagtttgaaccagaccgtgacccaactgcagcagttgctgcaggccgtcaatcagcaattgacaaaggaaaaggaacactaccaggtgttagaatag

SEQ ID NO: 192405 - DNA, 228 bp, synthetic construct
  misc_feature 1..228: note = Description of Artificial Sequence: Synthetic coding sequence
  source 1..228: mol_type = other DNA
atggagttctacgagagcgcctacttcatcgtgctgatccccagcattgtgattaccgtcatctttctgttcttctggcttttcatgaaggagaccctatacgatgaggtgctggctaaacagaaacgagaacagaagctgatccccacgaagacagacaaaaagaaggctgaaaaaaaaaaaaataagaagaaagagattcagaacggaaatttacacgaaagctag

SEQ ID NO: 192406 - DNA, 183 bp, synthetic construct
  misc_feature 1..183: note = Description of Artificial Sequence: Synthetic coding sequence
  source 1..183: mol_type = other DNA
atggagttctacgagagcgcctacttcatcgtgctgatccccagcattgtcattaccgttattttcctgttcttttggctgttcatgaaggaaactctatacgatgaggttctcgctaaacagaagcgggagcagaaactgataccaactaagaccgacaaaaaaaaagccgaaaaaaaatag

SEQ ID NO: 192407 - DNA, 3171 bp, synthetic construct
  misc_feature 1..3171: note = Description of Artificial Sequence: Synthetic coding sequence
  source 1..3171: mol_type = other DNA
atggccagccagcccaacagcagcgccaagaagaaggaggagaagggaaagaatattcaggtggtcgttcggtgcaggcccttcaacctcgccgagcgtaaggcatcagcccattcaattgttgagtgcgaccctgtccggaaggaggtgagcgtgcgcactggtggcctcgcggacaagagttctaggaagacatatacctttgacatggtgttcggggcttcaaccaaacaaattgatgtgtaccgcagtgttgtctgtccgatcctcgacgaagtgataatgggctacaattgtactatttttgcatacggacagactggcacaggaaaaactttcactatggaaggcgaacgaagtcctaacgaggaatatacatgggaggaggatcccctggctggtatcattccacggacattacatcagattttcgagaaacttacagacaatggcaccgagtttagcgtcaaggtttctttgctcgaaatttataatgaggaactatttgacctgctaaaccctagctcagacgtgagcgaaagattgcagatgttcgacgacccacgaaacaagaggggcgttatcatcaaggggttagaggagatcactgtgcataataaagacgaagtgtatcagatattagaaaagggagctgcgaagaggacaacggctgccacactgatgaacgcttattccagcagatcccattctgtattctccgtgactattcacatgaaagagactactatcgatggggaagaattggtcaagatagggaaactgaacttggtggacctggcgggatctgagaatatcgggaggtctggggcagtggataaaagagctcgagaggccgggaacattaaccagtctttgttgacgttgggaagggtgattaccgccctggtggagaggacaccacacgtcccctatcgggagagtaaattaacaagaatcctgcaagattctctgggtggacgaaccagaacctctataatcgccacaatatcacccgccagcttaaacctagaagaaacgctctcgactttggagtacgcccacagagctaagaatatcctgaataagccagaggtaaaccaaaagcttacaaaaaaagccttaattaaagagtataccgaggagatcgagcgcttaaaaagggatttggccgctgctagagagaaaaacggggtctatattagcgaggaaaattttagggtcatgtctgggaagcttaccgtacaggaagagcagatcgtggagctcatagaaaagattggcgcagtcgaagaagaattgaacagagttaccgagttgtttatggacaataaaaatgagctagaccagtgtaagtcagatttgcaaaacaagacccaagaacttgagacaacccagaagcacctgcaggagacaaagctgcaactggtgaaggaagagtacattaccagcgccttggagtccacggaggagaaacttcatgacgccgccagtaagctactgaacaccgtcgaggagacaactaaggatgtgtcgggccttcactcaaaactggataggaaaaaggcagtagaccagcacaatgcagaggcgcaggacatctttggtaagaacttaaactcactgtttaacaacatggaggaactaatcaaggacggatctagcaagcagaaggccatgttagaggttcacaaaactctctttggaaatctactgtcctctagtgtgtctgccctcgatacaattactacagtggctcttggctctctgacaagcatccccgagaatgtgtcaacccacgtgagccagatctttaacatgatcctgaaggagcagagtctcgccgcagagagcaaaacagttcttcaggagctgatcaatgttctgaaaacagaccttctgagttccttggagatgattctatctccaactgtggtatccatacttaaaatcaatagccaactcaagcatattttcaagacctccctaactgttgctgataagattgaggaccagaagaaagaactggacgggtttctgtccatactctgcaacaatctgcacgaactgcaagagaacactatatgtagcctggtggagtcgcagaaacaatgtggcaacctcaccgaggacttgaagactatcaaacagactcactctcaggagctttgcaagctgatgaatctctggacagagagattctgcgccttagaagaaaagtgcgaaaacatacagaaacccctctctagtgtacaggaaaacattcagcagaagtctaaggatatcgtgaataaaatgacattccactctcaaaaattttgtgcagattctgatggcttttctcaagaacttaggaatttcaatcaggagggtactaagctggttgaggagtctgtgaagcacagcgacaagttgaacggtaacttagaaaaaatctcacaagaaacggagcagaggtgcgagtctctcaatacacgaacggtttatttttcagagcagtgggtctcctctctcaatgaacgggaacaggaactccataacctgctggaagtagtgagtcagtgctgtgaggccagttcgagcgacatcactgaaaaatcagatggaaggaaggccgcccacgaaaaacagcacaatatcttcctggaccagatgacaatcgatgaggataagctgatcgcccaaaatctcgaacttaacgaaaccatcaaaattgggctaacgaagttgaattgcttcctcgagcaagatctcaagctcgatatccccactggcacaaccccacagaggaaaagttacctgtatccttcaactcttgttcgcacagagccaagagagcatctgctcgaccagctgaaaaggaaacaacccgagcttctaatgatgctgaattgtagcgagaacaacaaggaggagacaattcctgacgtcgatgtggaagaagccgtcctggggcagtatactgaagagcccctgtcccaggagccatcagtggatgcaggggtagactgcagcagcataggtggcgtcccgttttttcagcataaaaagtctcatgggaaggacaaagagaatagaggcattaataccttggagcggtccaaggtggaggagacaactgagcatctggttacaaagtcccggttaccccttagggcacaaataaacctgtag

SEQ ID NO: 192408 - DNA, 5418 bp, synthetic construct
  misc_feature 1..5418: note = Description of Artificial Sequence: Synthetic coding sequence
  source 1..5418: mol_type = other DNA
atgagcgacaccaaggtgaaggtggccgtgcgggtgcggcccatgaaccgaagagagctggagttgaacacgaagtgtgtagttgagatggagggcaaccagacggtactgcaccctcctcccagcaacactaaacagggcgagagaaaaccccccaaggtgtttgcttttgactattgtttttggtcaatggatgagagtaacactactaagtacgctgggcaggaagtggttttcaagtgtctgggagagggaattctcgaaaaggcctttcaaggctacaacgcctgtattttcgcttacgggcagaccgggtcaggcaaatcctttagcatgatgggccacgccgaacagcttggcttgatccccaggctgtgttgtgcactgttcaagcgcataagtctggaacagaatgaatcacaaactttcaaagtggaagtctcttacatggagatctacaacgaaaaagttcgagacctcttggacccaaaaggctcccgccagtccctgaaggtcagggagcataaggtattagggccatatgtagacgggttgagccagctggcagtgacgagtttcgaagatatcgagagcctgatgagtgagggtaataaatctaggactgtggcagcaaccaatatgaacgaagaatccagccggtcccacgccgtgtttaatatcatcatcacgcaaacattatacgatctccagagcggcaattccggagaaaaagtgtccaaagtttccctagttgatctggctgggagcgaacgagtgtccaagaccggggccgcaggggaacgtctgaaggaaggctccaacatcaataagtcactaaccaccttgggcttggtgataagctcactggcagatcaggctgcagggaagggcaaatccaagttcgtgccgtacagggatagtgtgctgacttggctcctgaaagataacctcggtggcaactcccagacatcaatgatcgctacgatctcccccgcggccgacaattacgaggaaacgctttctacactgaggtatgcagaccgcgccaaaagaatcgtcaaccacgctgttgtcaacgaggacccaaatgcaaaggtgatcagagagctgcgggaggaagttgaaaagttaagagaacagctgtcccaggctgaggctatgaaggctccagaactgaaggagaagctagaagagagcgagaaactgataaaagaattgactgtcacttgggaggagaagctccgaaagactgaggagatcgctcaggagcgacagaggcagctggaatcgatgggcatatcactggaaatgagcggaatcaaagtcggcgacgacaagtgttatttggtgaacttgaatgcagatccagcactgaatgagctgctggtgtactatttaaaagaccacaccagggtcggggcagataccagccaggacatccagcttttcggcatcggcattcagccgcagcattgtgagattgatattgcctccgacggcgacgtgacactgacaccaaaagagaacgcaaggagctgcgtgaacgggactttggtatgtagcactactcaactgtggcatggtgatcgaattttgtggggaaacaaccacttcttcaggataaacctgccaaagaggaagaggcgtgattggcttaaagacttcgaaaaggagacaggccctccggagcacgacttggatgcggcatcagaagcttcttctgagccagattataattacgaatttgcccagatggaggtgattatgaagactctcaattccaatgatcctgtccagaatgttgttcaggtgctagaaaagcaatatctcgaggagaaaaggagcgcattagaagagcaacggcttatgtacgagcgagagctggagcaactgcggcagcagttgtctccggatcggcaaccccagagctctggccctgatcgactggcgtacagcagtcagacggctcagcaaaaggtaacccagtgggccgaggaacgcgacgagctgttccgccaaagcctcgccaagctgcgcgagcagctggtaaaggccaacacactagtgcgagaggctaactttctggccgaagaaatgtcaaaactcaccgactaccaggtgactctgcagatcccagccgctaatctgtcagctaataggaagcgtggtgctatcgtttctgagccggccatccaggttcgaagaaagggcaaatcgacacaagtgtggacgatcgagaaactagagaacaagcttatagatatgcgcgacctataccaggagtggaaggagaaggtgcccgaggccaaacggctatatggaaagcgcggagatcccttctacgaggcacaggagaaccataatctcattggagtcgctaatgtgttcctggagtgcctgttctgtgacgtgaagctgcagtatgctgtgcctattatttcccagcaaggagaggtggccgggcgtttgcatgtcgaagtgatgagagtgaccggcgccgtcccagagcgcgtggttgaagatgatagctccgagaactcttctgaaagtggaagccttgaggtggtggatagtagtggcgaaatcattcaccgcgtgaagaagttaacctgcagagtcaagatcaaagaggctacggggcttcctctgaacctttctaacttcgttttctgtcagtacacattctgggatcagtgcgaatctactgtggccgcccctgtcgtggacccagaagtgccctcaccccaatccaaggatgcgcagtatactgtgacattcagccactgtaaggactatgtcgtcaatgtcacggaagaatttctggaattcatctccgatggcgctctagcgattgaagtgtggggccatcgttgtgcgggaaacggtagcagcatctgggaagtggactccctccatgcgaaaacacgaactttgcacgatcggtggaatgaggtcacccggcgtattgagatgtggatctccattcttgaattaaacgagctcggggagtacgcggccgtagagctgcatcaggcaaaagatgtcaacacaggtggtatattccagctaaggcagggccactcacggcgggtgcaagtgactgtgaagcccgtgcagcactctgggactctcccgctgatggtggaagccatcttatctgttagcattggctgtgttaccgccagaagtacaaagctccagagaggacttgatagctatcagagagacgacgaagatggagacgacatggactcatatcaggaggaggacttaaactgtgtacgagaaaggtggtctgatgctctcattaagcggcgcgaataccttgacgagcaaatcaaaaaagtaagtaataaaacagaaaaaacggaggatgacgtggagagagaggctcagctcgttgagcagtgggtgggacttacggaagaacgaaatgctgtgctcgttcctgctcccgggagtggcatcccaggcgcacccgccgactggattccccctccgggcatggagacacatattcctgtactctttctggacctcaatgctgacgacctgtctgccaacgaacagctggtgggaccacacgcttcaggcgttaatagtattttacctaaggagcacggtagccagtttttttacctgcccatcatcaagcacagcgacgacgaggtgtccgcgacagcttcctgggacagttctgttcatgacagcgtccacttaaaccgggttacccctcagaatgagagaatttatctgattgtaaaaactaccgtgcagctgtcacaccccgctgctatggaactagttctgcggaaacggatcgcagccaacatatacaacaaacagagtttcacacagagcctgaagcggaggattagcctgaaaaacatcttttacagctgcggagtcacttacgagattgtttcaaacatacccaaggccactgaagaaatagaagacagagaaaccctcgccctgctagccgcgcgcagcgaaaacgagggtactagtgacggagaaacctatatcgaaaagtatactcgcggcgtgcttcaggttgaaaacatcttgtccctggaacggttgcggcaagcggtgaccgtgaaggaggctctgtctacaaaggctcggcacatcagaaggtctctgtctacgcctaacgtacataacgtttcttccagtcggcctgacctgtctggcttcgatgaggacgacaaaggatggcccgaaaatcaattggacatgagtgactactcctcctcatatcaggacgtcgcttgttatgggaccttgccaagagactcacctcgacgaaacaaggaaggatgtacctcagagacgcctcacgccctgaccgtttccccattcaaggccttcagcccacaaccccccaagttttttaaacctcttatgccggtgaaggaagaacacaaaaaacgaatcgctttggaggccaggcccctactgtcacaggaaagcatgcctcccccccaggcccacaatccgggttgcatcgtccctagcggttcaaatggatcatccatgcctgtagagcacaattcaaaaagggagaagaaaatagactctgaggaggaggaaaatgagttggaggctatcaaccggaagcttatttcatctcaaccctacgtccctgttgagtttgctgacttctccgtctacaatgcatccctcgaaaacagagaatggttctccagcaaggtcgatctgtcaaacagcagagtgctggagaaagaggtgagtcgatcacccaccacttcatccatcacgagcgggtacttcagccactcagcctctaacgcgaccctgagcgatatggtggtaccctcatctgactcttctgaccagctggccatccaaacaaaggacgcagactcaactgaacattctactccctctctggtacacgactttaggccaagctccaataaggaattgacagaagtcgaaaagggactggtgaaagacaagatcatcgtggtgccattgaaggaaaattctgccttggcgaagggtagcccttcctcgcagagcattcccgaaaagaactcgaagtcgctgtgccgtaccggaagctgttccgaattggatgcctgcccatcaaaaatttcacaaccagctcggggattttgcccccgcgaggtgacagtagagcatacaaccaacatcctggaggatcattctttcacagaattcatgggggtttccgaaggtaaggacttcgacgggttaaccgattcttcagcaggcgaactttcaagcaggcggagtctgcctaataagacaggcgggaagactgtctccgacggcttgcatcatccctctcaactgcactctaaactggaaaatgatcaggtcatcattcctgaggcagctttctgggttctgtgctgccagtag

SEQ ID NO: 192409 - DNA, 5250 bp, synthetic construct
  misc_feature 1..5250: note = Description of Artificial Sequence: Synthetic coding sequence
  source 1..5250: mol_type = other DNA
atgagcgacaccaaggtgaaggtggccgtgcgggtgcggcccatgaaccggagagagctggagctcaatactaaatgtgtggttgagatggagggtaatcagacagtcctgcaccccccgccttcgaatacaaaacagggggagcgcaagccacccaaagtgtttgccttcgattactgcttttggtccatggatgagtctaacactactaagtatgccggacaggaagttgtgttcaaatgcctaggggagggaatacttgagaaggctttccagggctataacgcatgtatttttgcatacggccaaaccggtagtggaaagagcttttcaatgatgggacatgctgaacagttagggctgataccacgcttatgctgtgctttgtttaaacgaatttctctggaacagaatgagtcgcagacattcaaagtagaggtgagctacatggagatatataatgaaaaggtccgcgacctcctggatcccaaagggtctcggcagtccttgaaggtcagagaacacaaggtgctgggcccatacgtggatggtttgagccagctcgctgtcacctccttcgaggatattgagtccctgatgagcgaggggaacaagagtaggacggtcgctgccaccaatatgaacgaagagagctcccggtcgcacgcagtgttcaacataataatcacacagaccctgtatgacttacagagcgggaattccggcgagaaagtgtcgaaggtcagtctggtggaccttgcaggatccgaacgagtcagcaagactggagccgctggcgaaaggttaaaggagggcagcaatataaacaagtcccttaccactcttggactcgtgattagctccttagctgaccaggcggccgggaagggaaagagcaagtttgtaccatatcgtgattcagtgttaacttggttgctcaaggacaatttaggcggcaactctcagacatctatgatcgcgacgatctcccccgctgccgacaattatgaagagacactgtcaactttgcggtacgccgacagagccaaacgcattgttaaccacgcggttgtaaacgaagatcctaacgcaaaggtcatccgagagcttagggaggaagtggagaaattgcgtgagcaattgtcccaagcagaggccatgaaggccccagagctgaaagagaagctggaagagagtgagaagctgattaaggagctcacagtgacctgggaagagaaactccgcaagaccgaagaaatcgcacaggagcgccagagacagctggaaagtatgggcatttccctggaaatgtccggcattaaggtaggcgacgataaatgctatttggtaaacctcaacgctgaccctgcactgaacgaactgctggtgtactatctcaaagaccatacacgggtgggcgctgacacatcccaggatatccagcttttcggaatcggcatccaacctcagcactgtgaaattgacattgcttcagacggggacgtgaccttgaccccaaaagagaacgcccggtcctgtgtaaatggcacactagtgtgcagcaccacgcagctgtggcatggcgaccggatcctgtggggtaacaaccacttcttccgaatcaatctgccaaagaggaagaggcgggactggctgaaggatttcgaaaaggagacaggccctcctgagcacgacctagatgctgcgtcagaagcgtcttctgaaccagattataactatgagttcgcccagatggaagtgataatgaagactctgaatagcaacgatcctgtacagaatgtggtccaggtgcttgaaaaacaatatttagaggagaagagaagcgctctcgaggagcaaaggctgatgtatgagcgggagttagaacagttgagacagcagctctcccctgacagacaaccgcaaagctccggacccgacaggctggcttacagctcacagaccgcccaacagaaagtgactcagtgggctgaagaacgcgatgaactgtttaggcagtctttggcaaagctgagagagcagctggtcaaggccaatacgttggtacgagaggcaaacttcctggccgaagagatgagcaaattgacagattatcaggtcaccctacaaataccagccgctaatctgagtgctaaccgcaaaagaggggcgatcgtgtctgagcccgccatccaggtgcgccgaaagggcaagtcgactcaggtgtggactattgagaaactcgaaaacaaattaatcgacatgagagatctgtatcaggagtggaaagagaaggtacctgaagccaagcgtctctatggtaagcgtggggatcctttttacgaagcccaggagaaccacaatcttatcggtgtggctaatgtgtttttagagtgtctcttctgtgacgtgaagctccaatacgcggtgcctataatctctcagcagggcgaggtggccggccggctgcacgtggaagttatgcgcgtgaccggagctgtcccggagcgggttgtcgaggatgactcaagcgagaattccagtgagtctggttctctggaggtcgtagactcttccggtgagataatccacagagtaaagaaactcacttgtcgggttaaaattaaggaggccacaggcctccctttaaatctctctaactttgtattctgtcaatataccttctgggatcagtgtgagtcaactgtggccgcacccgtcgtggaccccgaagttccctcaccacagtctaaggacgcgcagtacaccgtgactttctcacactgtaaggattatgtggttaacgtgaccgaagagtttctcgagttcatttctgacggcgctctggctattgaagtatgggggcatcgctgcgctgggaatggatctagcatctgggaggtggacagtctgcacgctaaaacaaggaccctccacgatcggtggaacgaggtgacccgaaggatagagatgtggatcagcatcttggagctgaatgaattaggagagtacgctgctgtcgagctacaccaagcaaaagatgtgaacaccgggggtattttccaacttcgacaggggcacagtagacgcgtacaggtcactgtgaaacccgtgcagcactcagggactctgccactcatggtagaggctattctgtctgtcagtataggctgcgtgactgcgcgcagtacaaaattacagaggggactggactcctatcaagaggaggatttgaattgcgtgcgggagcggtggtccgatgctcttatcaaaaggagggaatatctggacgagcagattaaaaaagttagcaacaagactgagaaaactgaagacgacgtggagcgggaagcgcagctggtggaacagtgggtcggacttacagaagaaaggaacgccgtgctagtgcctgcccctgggagtgggattccgggcgctcccgctgactggatacctccacctggaatggaaacccacattcccgtactatttctcgacctgaacgcagacgacctgagcgcgaacgagcagctcgttggcccacatgcaagcggggtgaattctatactgcctaaagagcacggttctcagttcttttacctccctataattaagcactcagacgacgaagtcagcgccacagcttcatgggacagcagtgtacatgattctgtacatttaaacagagtgacccctcaaaacgagcggatttacctgatagtgaagacgacagtccaactgtcacacccagctgccatggagctggtcctgcggaaacgtatcgccgcaaacatctataacaagcaaagcttcacacagagtcttaagaggcgcatctccctaaagaacatcttttactcctgtggagtaacatacgagatcgtgtccaacatacctaaggcaacagaagaaattgaggacagagaaaccctggccctgctggcagcgcgctcggagaacgagggaacctcagatggagagacttatattgaaaaatacactagaggcgtattgcaggtcgaaaatattctttcactggaaaggttgcgtcaggctgtgactgtgaaagaagccctgtcaactaaggcgcggcacatacggcggagcctgtccaccccaaacgtgcataacgtgagtagctcaagacctgacttgtccggcttcgatgaggacgataaggggtggcccgaaaatcaactggacatgtctgattactcttcctcctaccaagacgtggcctgttacggcaccctgccaagagatagtccccgacgcaacaaagaagggtgcactagcgagacgccgcatgctctaacagttagtccttttaaggcattctccccacagccaccgaagttttttaaacccctaatgcctgtgaaggaggaacacaagaagcgaatagctctcgaggctcgccctttgctgtcccaagaagattcagaggaggaggagaacgagctggaggcaattaacagaaagctgatatccagtcagccttacgtccccgtagagtttgctgacttcagcgtgtataatgcatccctggaaaaccgcgaatggttcagctctaaggtggatctatccaattcgagagtgctggaaaaggaagtgagccgatcacccacaacttcctctattacaagtggttattttagccactccgcaagcaatgctacactgtctgacatggtcgtccccagtagcgacagctcagaccagctcgctatccaaaccaaagatgcggattccacagagcactcaacgccctcgctggtccacgatttcagaccatcatccaacaaagagctgaccgaggtggagaagggcctagtgaaggacaaaatcattgttgttcccctgaaagaaaatagtgctctcgcaaagggctcaccatcctctcagtccatccccgaaaagaactcaaagtctctgtgcaggacaggaagctgttctgagctggatgcatgcccttctaaaattagccagcccgcacgcggattctgccctagagaggtgaccgtggaacacactactaacattctcgaggaccatagcttcactgaattcatgggagttagtgaaggcaaggattttgacggactcaccgattcatcagctggggaactgagctcccgcaggagccttcctaacaaaacaggcgggaaaaccgtgtctgacggactgcaccatccatcccaacttcatagcaagcttgaaaatgaccagggagggacaacttccaggtag

SEQ ID NO: 192410 - DNA, 5313 bp, synthetic construct
  misc_feature 1..5313: note = Description of Artificial Sequence: Synthetic coding sequence
  source 1..5313: mol_type = other DNA
atgagcgacaccaaggtgaaggtggccgtgcgggtgcggcccatgaaccgcagagaactggagctgaacactaagtgcgttgtggaaatggagggtaatcagaccgtcctgcacccaccgccatcgaacactaagcaaggcgaacggaggccatctcaagtgttcgctttcgactactgtttctggtcgatggacgagtccaacaccacgaaatacgctggccaagaggtcgtcttcaagtgtctgggggaaggaattctcgaaaaagcctttcaagggtataatgcctgtattttcgcatatggccagactgggtctggaaagagtttctcgatgatgggccacgccgagcagttgggccttattccaagactgtgttgcgctctgtttaaacgcatcagtttagagcaaaacgaatcccaaacattcaaggtggaagtttcttatatggagatatataatgagaaggtgcgggatctattggacccgaagggatcacgccagagtctcaaagtgcgggagcacaaggtcttgggaccctacgtggacggcctgtcgcagcttgctgtgacctcattcgaggacatagagtcactgatgtcagaggggaacaaatccagaaccgtggccgcgacgaatatgaacgaagaatcttctcgctctcacgctgtgtttaatatcataattacccagacgctgtatgacctccagtcaggaaactctggcgaaaaggttagcaaggtatctctggttgatttggccgggtccgaacgggtctctaaaaccggagctgccggcgagaggctgaaagaaggtagcaatattaataaatcgcttaccacacttggtcttgttataagttctctcgccgatcaggcagcaggaaagggcaaatcaaagtttgttccttatcgggactctgtacttacctggctcctgaaggataatcttgggggaaatagtcagacgtccatgattgccaccattagccctgccgcggacaattacgaggaaaccttgtcaacactgaggtatgcagaccgggccaagcggattgtgaatcatgcagtagtaaatgaagatccaaacgccaaggtgattagggaactaagggaggaggtggagaagcttcgggagcagctatcacaagccgaggccatgaaggcccccgagctaaaggagaaactggaagagtccgagaagctcatcaaggagcttacagtgacctgggaagagaagctgcgcaagacagaggagatcgctcaggagcgccagaggcagttagagagcatgggcatcagcctggagatgagtggtataaaggtcggggatgataaatgttatcttgtcaatctgaacgcggatcccgctttgaatgagctgttggtatactaccttaaagatcatacaagagtgggcgctgatacctcccaagatattcagctgttcgggatagggatccaaccccaacattgcgaaattgatatcgcttcagatggagatgtgaccttgacccccaaagaaaatgctaggtcctgcgtcaacggaacgctggtatgttcaacaactcagctgtggcatggggacaggatcctctgggggaataaccatttctttcggatcaacctacccaagcgtaaacgcagagattggttaaaggacttcgaaaaagaaacgggtcctcccgaacatgacttggacgctgctagcgaagcctctagtgaacccgattacaattacgagtttgcgcagatggaggtcatcatgaagacattgaattcaaatgatccagtccagaacgtcgttcaggtcctggaaaagcaatacctggaagagaaacgcagcgctctggaagaacaacggctaatgtatgaacgggagctcgaacagctcaggcagcagctgtctcctgaccgccagccccagagctctggtcctgaccgcctcgcgtatagctcccagacagctcagcagaaggttacacaatgggcggaggagcgcgatgagcttttccgtcagtctttggccaagttacgggaacagctggtcaaggccaacacattagtacgggaagccaactttctcgcagaggaaatgagcaaactcaccgattatcaggttacactgcaaatccctgcagccaatctgagcgcgaataggaaacgcggagcgattgtctcagagcccgcaatccaagtgcggagaaagggcaagtcaacccaggtgtggacaattgaaaagttagagaacaagctcatagacatgagagacctgtaccaggagtggaaggagaaggtacccgaggctaaacgtttgtacggcaagaggggggatcccttttacgaggcccaggaaaaccacaacttgatcggcgtggcaaacgtgtttctggagtgtcttttctgcgacgtgaaactgcagtacgccgtgcctatcattagccagcagggcgaagtggccgggcggctgcatgtggaagtgatgcgggtcaccggagcagtgcctgaacgcgtggtggaggacgattccagcgaaaactcttccgagtcaggatccttggaggttgtggatagctccggagaaatcatccaccgggtcaaaaaactgacctgtagggtgaagatcaaagaagccaccggcctgccgcttaacttgagcaactttgttttctgtcagtataccttctgggatcagtgtgaatctaccgttgcagcgcctgtggtggatcccgaggtgcccagtccccagtctaaagacgcacagtacacagtgacttttagtcactgtaaggattatgtcgtgaatgtcaccgaagaattcctggagtttattagtgatggcgcacttgccattgaggtgtggggccacagatgcgccggaaacgggagttcaatatgggaagtggacagcctccacgccaaaacgcgcactcttcacgatagatggaatgaagtgacccggcgtatcgagatgtggattagtatactggagctgaatgaactgggggaatacgctgccgtcgagctgcatcaagccaaagatgtgaatacaggagggatctttcaactgcgccagggccacagccgacgcgtccaagttactgttaagccagtgcagcattcaggaaccttgcctctgatggtggaggctatcctgagtgtttctatcggatgcgtgaccgcccggtctaccaaactccagcgtggattggactcttaccagcgagatgatgaggacggggatgacatggatagctaccaggaggaggacctgaattgtgtgcgcgagcgctggtctgatgcgctaattaaacggagggaatatctggatgagcagatcaaaaaagtgagcaacaaaaccgagaagaccgaggatgacgtagagagggaagcccagctcgtggaacaatgggtgggccttaccgaagaaaggaatgcagtcctcgtgccggctcctggctctggtatccccggcgcgccagctgactggattccgccccccgggatggaaacccatatccctgttctcttcctcgacctgaacgctgatgatttaagtgccaacgagcagctggtgggtcctcacgctagcggcgtcaacagtattcttccaaaggaacacggtagtcaatttttctatttgcctattattaaacattctgatgacgaagtgtccgccaccgctagttgggacagcagcgtgcacgatagtgtacacctgaatagggtcacccctcagaacgaaaggatttatctgatagttaagactaccgtccagctgtctcatcccgcggccatggaactggtgctgcgcaaacgcatcgcggccaatatctataacaagcagagctttacccaaagcctgaagcggcgtatcagtctgaagaacattttctattcctgcggcgtcacctacgagatcgtctcaaacattcccaaagcaacagaggaaatagaggacagggaaacactcgccctgctcgctgccaggagcgaaaacgaaggtacctcagatggagagacctatatagagaagtacaccagaggggttctgcaggtcgaaaacattttgtcccttgaacggttgcgccaggccgtcaccgtgaaagaggcactttccacgaaagcaaggcacattcgaagaagcctaagcactccaaatgttcacaatgtctcctcttctcgccccgatctgtctggctttgatgaagatgacaagggatggccggaaaaccagctcgatatgtctgattactctagcagctaccaagacgtggcatgttatggaaccctacctcgggattccccgcgtaggaacaaagaaggctgtaccagtgaaactcctcatgcactgaccgtttcaccgtttaaggctttcagcccccagccgccaaaattcttcaaaccgctcatgccagtgaaagaggagcataagaaacggattgctctggaagccagaccactcctgtctcaggaggattctgaagaagaagagaatgaactcgaagcaatcaaccggaagttgatcagctcacaaccctacgtccctgtcgagtttgccgatttttcagtatataacgcctctcttgaaaatcgcgaatggtttagctcaaaggtagatctgtcaaactctcgagtacttgaaaaggaggtgtcccgctctcctaccaccagctccatcacctccggatattttagccacagcgcctctaacgcaacccttagtgatatggtcgtgccatcgtctgattctagtgatcagctggcaattcagacaaaagacgccgactcaacagagcactccacaccgtctctagtacacgactttaggccttcctcaaacaaagagttgactgaggtggagaaggggctggtcaaggacaagataattgtcgtacctctaaaagagaattctgccctggccaagggctcgccctctagtcagagtattcccgagaaaaattccaagtctttgtgtagaacagggagttgctcagagctggacgcttgcccctcgaagatctcgcagcccgcacgcggtttctgtcctcgcgaggtcaccgttgaacatactaccaacattcttgaagaccatagttttaccgagttcatgggagtgagcgagggcaaagatttcgatgggctcaccgattcgagcgcaggggaactgtctagccgccggtctcttcccaataaaacgggcggcaagaccgtatcagatggccttcaccatcccagccaattgcattctaagctcgagaatgatcaggtgatcataccagaggcagcattctgggtgctgtgctgtcagtag

SEQ ID NO: 192411 - DNA, 5313 bp, synthetic construct
  misc_feature 1..5313: note = Description of Artificial Sequence: Synthetic coding sequence
  source 1..5313: mol_type = other DNA
atgagcgacaccaaggtgaaggtggccgtgcgggtgcggcccatgaataggagggaactcgagcttaacaccaagtgcgtggtcgagatggagggcaaccagaccgtactgcacccacccccttccaatactaaacagggcgaaaggaagcctccaaaggtgtttgcattcgactactgcttctggtctatggatgagtcaaatacaactaaatacgcgggccaggaggtggttttcaagtgcctaggcgaaggaattctggaaaaggctttccagggctacaacgcctgcatctttgcgtatgggcaaacaggatcaggtaagagcttttccatgatgggccacgccgagcagctgggactgattcccagactgtgttgcgctcttttcaagcgcataagcctggagcagaatgagtcacaaacctttaaagtagaggtgtcatacatggagatatacaatgaaaaagtgagggatcttctggacccaaaaggatcacgtcagtccctcaaggtcagggagcacaaggtcctcggcccttatgtggacggcctttcacagttggctgtgacttcattcgaggacattgagtcactgatgtcggaaggcaacaaatctcgaactgtcgccgcgaccaacatgaatgaagaatcatctcgctcccacgccgtcttcaatatcattattactcagacgttgtatgacctgcaatccggtaattcaggtgaaaaagtgtccaaggtctctttggtcgatctagcaggttctgagagggtcagtaagacaggcgccgccggtgagagactgaaggagggatcaaatatcaataagagtctaaccacactcggattagttatcagcagcctagccgaccaggcggccggcaaggggaagtccaaatttgtcccataccgtgattccgttctaacttggctcctcaaggacaatctcggggggaactcccagactagcatgatagctactataagccctgcagcagacaactatgaagaaacactgagtaccctgcggtacgccgatcgtgcaaagcgcattgtgaatcacgcggtagtaaatgaggatcctaacgcaaaagtgattagggagctgagggaggaagtggagaaactccgcgagcagttatctcaggcggaggcgatgaaagcaccagaactcaaggagaaattagaggagagcgagaagctgatcaaagagttgaccgtgacatgggaagagaagctgcgcaagacagaggagattgcacaggagcgccagcgacagctggaatccatggggatttctcttgagatgtcgggcattaaggtaggtgatgataaatgttatcttgtaaatctaaacgcagatcctgcccttaacgagcttttggtgtattatctgaaggatcatacacgtgtgggggctgacacatcacaggacatccagctgttcggtatcggaatccagccccagcattgcgagatcgacatcgcctccgatggtgatgtgaccctcactccgaaagagaacgccaggtcctgcgtgaacgggaccctcgtgtgcagtaccacgcagttatggcacggcgaccggatcctctggggcaataaccacttctttcgaataaacctccctaaacgtaagagacgcgactggctgaaggactttgagaaagaaactgggcccccagagcacgacctggatgccgctagcgaggcgagttccgagcccgattacaactacgagtttgcccagatggaggtgatcatgaagaccctgaattcgaacgacccagtacagaacgttgttcaagttctagagaagcaatacctggaggagaagcgctccgccctcgaggagcaacgccttatgtacgagagggaactagagcagttacgacagcagttgtctcccgaccgccaaccacagtcttctggaccagacaggttggcttactcctctcagacagctcagcagaaagtaacccagtgggccgaagaacgggacgagcttttcaggcagtctctcgctaaattgagagaacagctagtgaaggctaacaccttggtgagggaggccaacttcctggcggaagaaatgagcaaactgaccgactatcaagttacgctgcaaatcccagctgccaacttgagtgccaatagaaagaggggagctatcgtgtccgaacccgctattcaagtgcgacggaagggcaagtcaactcaggtgtggactattgagaaactggaaaataagctgattgacatgcgcgatctctaccaggagtggaaagagaaggtgcccgaggcaaaacgcctttacggaaagcggggggacccattttacgaagcgcaggaaaatcataaccttatcggtgtcgccaatgtgttcctggagtgtctgttttgtgacgtaaagttgcaatatgcagtccccattatttcccaacagggcgaggtggctggccggcttcatgtggaggtgatgagagttacaggagctgtgcccgagcgagtggtcgaggacgatagcagtgagaattcttccgagtccggctctttggaggtggtcgattcttccggcgagattatccatcgcgtgaaaaaactcacgtgtagagtgaaaattaaggaggctaccgggctgccactaaacctctcgaacttcgtgttctgtcagtataccttctgggaccaatgtgagtccaccgtggcagccccagtggtggaccccgaggtcccatcaccacagtcgaaagacgcccagtacactgtcacattctcacactgtaaagactacgtcgtcaatgttaccgaggaatttctggaatttatctctgacggtgccctggccattgaagtgtggggccacaggtgtgccgggaacgggagctctatttgggaagtggattctcttcacgcaaagacccgtactctgcacgacaggtggaatgaggtgacccgcaggattgagatgtggatcagtattctcgagcttaacgagctgggcgagtacgctgccgttgagttgcaccaagctaaggacgttaacaccggcggcatattccagttgcgccaagggcactctcgtagggtccaggtgaccgtgaaaccagtccagcattccggaacccttcccctgatggtggaggcgatactctccgtgagcatcggctgcgtgactgcaagatctaccaaactgcaacggggacttgactcataccagcgcgatgacgaggacggcgacgacatggatagctatcaagaagaagacctgaactgtgtgagagagcggtggagtgacgccctaatcaagagaagagaatatctggatgaacagattaaaaaggtttctaataagacagagaagaccgaagatgatgtcgagcgggaagcccagctggtggagcagtgggtggggctcaccgaagaaagaaatgctgtcctagtaccggcccccgggagtgggatccccggagcaccagccgactggattcctccccctggaatggaaacacacatcccggtgctgttcctggaccttaacgctgacgatcttagcgccaatgaacaactcgtaggccctcatgcttcgggggtgaactccatactgcctaaagagcacggaagtcagtttttctacctgcctattatcaagcattccgatgatgaagtgagcgcaacggcatcctgggattcgagtgtgcatgactcagttcatctgaaccgcgtgactccacagaacgagagaatctatctgattgtgaagacaacagtgcagctctcccaccccgctgcaatggaattggtccttaggaagcgaatcgccgccaatatctataacaagcagagttttacccagtctctcaagcggcgcatttcattaaagaatattttctactcctgcggagtgacatatgaaattgtctccaatatccccaaagccactgaagaaattgaggatcgggagactctggctttattggccgcgcgctccgaaaatgaggggaccagcgacggtgaaacttacattgaaaagtatactaggggagtgctgcaggtcgagaacatcctgtctttagaacgcttgaggcaagccgtgacggtgaaagaggccctatctacaaaagctaggcacatacgacgctcactcagtacacctaacgtccataacgtctcctcatccagacctgacctttcaggatttgacgaggacgataaaggttggccagagaatcagttggacatgtctgattatagcagctcttatcaggacgtggcttgctacggcaccctgcctcgtgactcccctaggcgcaacaaggagggctgcacgagtgagactcctcacgcattgaccgtatcgccgtttaaagcattttcaccacagccacccaagttctttaaacccctgatgccagtgaaagaggaacacaaaaagagaattgcactggaggctagacccctcctaagccaggaggattcagaagaggaggagaacgagctggaggccatcaatcggaagttgatctcaagccagccttatgttccggtcgaatttgctgatttcagtgtttacaacgccagcctggaaaatagggaatggttcagttccaaggtagatctgtccaattccagagttttggagaaggaggtcagcaggtctcctaccacatcgagcataacaagtggatatttctcccacagtgcttcaaatgctacgttatcagacatggtcgtgcccagctcagattcgagtgaccagctggctatacagacaaaagatgctgattccacagagcactccaccccatctttggtgcacgatttccgcccttcaagcaataaggagctcacagaggtcgagaaaggtctggtgaaagataaaatcatcgttgttccgctgaaggaaaattccgcccttgctaaaggatcccctagttctcaatctattcctgaaaagaatagcaagtccctgtgtagaaccgggtcttgctccgagctggacgcatgccccagcaagatctcacagccagctaggggtttctgtcctcgggaggtgaccgtcgagcatacaaccaacatactggaggaccacagcttcaccgaatttatgggtgtcagcgaggggaaagactttgacggcctcacagatagcagcgctggagaattgtctagcagaagatctctacctaataagactgggggaaagacagtctctgacggtcttcaccacccctcacagttgcatagtaagcttgaaaacgaccaggtgatcattccagaagccgccttctgggtgttatgctgccaatag

SEQ ID NO: 192412 - DNA, 5274 bp, synthetic construct
  misc_feature 1..5274: note = Description of Artificial Sequence: Synthetic coding sequence
  source 1..5274: mol_type = other DNA
atgagcgacaccaaggtgaaggtggccgtgcgggtgcggcccatgaatagaagggagctcgagctcaatactaaatgcgtagtggaaatggagggaaatcagaccgtgctccatccccctccatccaacactaagcaaggagagaggaaaccccctaaagtgttcgcgtttgattattgtttctggagcatggatgagagcaacaccaccaagtacgccgggcaggaagtcgtttttaaatgcttgggcgagggaatattagaaaaggcctttcagggatataacgcctgtatcttcgcatacggacagacaggtagtggcaagtccttcagtatgatgggtcacgcagagcagctggggctaatcccaaggctctgttgtgccctgttcaaaagaatctccctggaacagaatgagagccaaaccttcaaagttgaggtgagctacatggagatctacaatgagaaagttcgtgatctcttggaccccaagggctcccgacagagccttaaggttcgcgaacataaggtgttaggcccctatgtggacggtcttagccagcttgcagtcacctcctttgaagacatcgaaagtctgatgtcagagggcaataaaagtcgcaccgtggcagccactaacatgaacgaggagagcagccggtcccatgccgtgtttaacattattataacccagaccttatatgaccttcaatccggcaacagcggagaaaaggtgtccaaggtgtccctagtggacctggccgggtcagaacgagtgagtaagaccggcgcagcaggagagcgcctgaaggaggggagcaatatcaataagagccttacaactctggggttggtcatttctagtttggccgatcaggccgccggcaagggcaaatctaagtttgtgccgtatagggacagtgtgttaacctggctcctgaaggataacttgggcggcaactcgcaaacatcaatgatcgctacaatcagcccagctgcagacaattatgaggaaaccttgtctacgctccgctacgccgatcgggccaaacgcattgtaaaccacgctgtagtcaacgaggatccgaatgctaaggtaatccgcgagctgcgcgaagaagtggagaagcttcgtgaacagctgtcgcaggctgaagcgatgaaggcccctgaacttaaggaaaagctggaggaaagcgagaagctcattaaggaactaaccgtaacatgggaagagaagctgagaaagactgaagagattgctcaggaacgccagcgccagttggagagtatgggtataagtcttgagatgtccgggattaaggttggcgacgacaagtgctacttagtgaacctgaacgccgaccccgcattgaatgagctcctcgtatactatttaaaagaccatactcgagtaggagcagataccagtcaggatattcaacttttcggtattggtatccagccacagcactgcgagattgatatagcttctgatggggacgttaccctgacccccaaagagaacgctcgcagctgcgtcaacggcaccctcgtttgtagtacaacacagctgtggcatggtgatcgaatcctctggggcaataatcactttttccggatcaacctcccgaaacgcaagaggcgtgattggctgaaggacttcgaaaaggagacaggccctcctgaacacgacctggatgctgctagtgaggccagcagcgagcccgattacaattatgaattcgcccagatggaagtaataatgaaaacgctgaactctaacgatccagtccagaacgtggtgcaggtgctggagaaacagtacctggaggagaaacgcagcgcgttggaggaacagcggttaatgtacgagcgggagttagagcaacttcggcagcagctcagccctgacaggcaaccccagtcatccggtccagaccgcctagcgtatagtagtcagaccgcccagcagaaggtgacccagtgggccgaagagagggacgagctatttcgccagagcctggctaaactccgggaacagctagttaaggccaatactttggtcagagaagcaaattttctggccgaggagatgagtaaactaaccgactaccaggtcacattacagataccagccgcaaacctcagcgcaaacagaaagcggggtgctatcgtaagcgaacctgccatccaggtgaggaggaaaggcaaatctacccaggtgtggacgatcgagaagctcgaaaacaagctgatagacatgagggacctctatcaagaatggaaggagaaggttcctgaagcgaagaggctgtacggtaaacgaggagatcctttctacgaggcccaggagaatcataatcttatcggcgtcgccaatgtttttttggaatgtctattttgcgacgtgaagctgcagtatgccgtgccaatcatctcccaacagggggaggtggccggcagattacatgtggaagtgatgcgggttaccggcgccgtccctgagcgggtggttgaggatgactccagcgaaaactcgtctgagagcggatctttggaggttgtggattcctcaggcgagataatacaccgggtgaaaaaattgacatgccgagtaaagattaaagaggcaaccggactgcccctgaatctttctaacttcgtgttttgtcagtatactttttgggaccaatgcgaatctaccgtggctgcacctgtcgtcgaccccgaagtcccatcccctcagtccaaggacgcgcagtacacagtgacttttagccactgtaaggactatgtggtcaatgtaaccgaggagttcttggagttcatatctgatggggctcttgcaattgaggtgtggggtcaccggtgtgctggcaacggcagttctatttgggaggtggactcacttcacgccaagactcggaccttacacgaccgttggaacgaagtgaccagacggattgagatgtggatctccatactggaactgaatgagctgggcgaatacgccgcagtcgaactgcaccaggcaaaggacgtcaatactgggggcatcttccaattaagacaaggacactctaggagagtccaagtgacagtgaaaccggtacagcatagcggcaccctgccgttaatggttgaggccatcctctcagtgagcatcggctgtgttacggcgaggagcacaaagttgcaaagagggttggactcctatcaggaagaagacctcaattgtgtcagagagaggtggtccgacgcgctcataaagcgtcgggagtacctcgacgaacagataaaaaaagtctccaacaagaccgagaagacggaggacgacgtcgagagagaggcgcaacttgtggagcagtgggtgggattgactgaagagaggaatgcagtgctcgtaccagctcctggctctgggataccaggggcacccgccgactggatccctcctccaggcatggaaacacacatacccgtgctttttctagatctcaacgctgatgacctgtctgccaacgagcagctggtgggtccgcatgcttccggagtgaattcaattctccctaaggaacatgggtctcaatttttctacctgccaattattaagcacagcgacgacgaggtgtccgccacagcctcgtgggattcatccgttcatgattccgttcatttaaacagggtgaccccccagaacgagcgaatctatttgatagtaaagactaccgtacagctttcccaccctgcggcgatggagctggtgctgcggaagcgaatcgcggccaacatctataacaagcaatcgttcacacaaagcctcaagcgtcggattagcttgaagaacatcttctattcttgcggtgttacttacgaaatcgtgtctaatataccaaaggccacagaggaaatcgaggaccgggagacccttgctctgctggccgctcggagcgagaatgagggcacatcagacggggaaacatacatcgaaaagtacactcggggggtgcttcaggtagaaaacatactgagtctcgaacggttacgtcaggctgttactgtcaaggaggccctcagcactaaggcccgccatattcgaagatctctcagcactccgaacgtacataacgtaagcagcagccggcccgacctgtcaggcttcgatgaggatgataaagggtggcctgaaaatcagttagacatgtctgattattccagcagttaccaagacgtcgcctgctacgggaccttaccaagagattcccctagacggaacaaggagggttgcacctccgaaacccctcatgctctaacagtgtctccgtttaaggcattctctccccagccccccaagttcttcaaacccttaatgcccgttaaagaggaacacaagaaacgcatcgccctggaggcacgaccactgctctcccaggaagattcagaagaggaggaaaacgagttagaggccatcaataggaaactgatcagctctcaaccgtatgttccggttgaatttgccgatttttcagtgtacaatgcatcattggaaaacagggaatggttctcgtcaaaagtggacctgtctaatagcagagtcctggagaaagaagtgtccaggtcccctaccactagtagcattacatctggctatttttcccactcagcttccaatgcaacactttcagatatggttgtccccagtagtgactcctcagatcagcttgccatccagacaaaagatgccgatagtacagagcatagtacccctagcctggtgcatgatttccgccccagctctaacaaggaacttactgaggtggagaagggcctagttaaagacaagatcatcgtggttccgctcaaagaaaattcagccttggctaagggttctccctccagtcagagcattccagaaaagaactctaaatcactgtgcaggacgggcagttgctctgagttggatgcttgcccctccaaaattagtcaaccggcgcgaggattctgtccgcgtgaagttaccgtcgagcacacgaccaatatcctggaggaccactcctttaccgagttcatgggtgtctctgagggcaaagatttcgatggtctgacggattcttccgctggcgagttaagttctaggagatccctaccaaataagaccggaggaaagacagtgtccgatggcttgcatcacccatctcagctccacagcaaactggagaatgatcaagtgatcattccggaagccgctttctgggttttatgctgtcagtag

SEQ ID NO: 192413 - DNA, 213 bp, synthetic construct
  misc_feature 1..213: note = Description of Artificial Sequence: Synthetic coding sequence
  source 1..213: mol_type = other DNA
atgagcgacaccaaggtgaaggtggccgtgcgggtgcggcccatgaatcgcagagagcttgagctgaacacaaaatgtgttgtggaaatggagggcaatcaaacagtgcttcacccgcccccatcaaacaccaagcagggtgaaagattagtgacagtggcacacatctcgaactcctccaccctcggcgggcaaggtaagagaatcacttag

SEQ ID NO: 192414 - DNA, 1038 bp, synthetic construct
  misc_feature 1..1038: note = Description of Artificial Sequence: Synthetic coding sequence
  source 1..1038: mol_type = other DNA
atgcccaagctgctgaagagcctgttccccgtgcgggacgagaagagaggaaagcggccaagccccctggcccaccaggcccaacccgagatgggccccgatgtccttgtccagacaatgggcgcaccagctttgaagatctgcgacaagccagccaaggtaccctcgccgcctcccgtgatcgccgtgacagccgttacgcccgcgcccgaagctcaggacggaccaccgtcgcccctgtcagaagccagttctggctatttcagccactccgtttccacagccacgctatcagatgccctgggacccggcctcgacgccgcagccccaccaggttcaatgcctacagcccccgaggctgaaccggaagcgcccatctcccatccccctcccccaacagctgttcccgcggaagaaccaccggggccgcaacagctggtttccccaggcagagagagacctgacctcgaagctcccgcccccgggtcacccttccgcgtacggcgcgtgcgtgcctcagaactgcgaagcttttctaggatgctggccggcgaccctggatgttcacccggggccgaaggtaatgcaccagcacctggggccgggggacaagcactggcaagtgactctgaagaagctgatgaggtccccgaatggttgcgcgaaggcgaattcgtgactgttggggcccacaagacaggggtagtgaggtacgttgggcccgccgactttcaggagggaacctgggtgggagtcgagttagacctgccttcgggcaaaaatgacggctccatcggaggaaagcaatacttccggtgcaaccctggctacgggctgcttgtgagacctagcagagtgcgcagggcaactggcccagttaggaggaggtcgacaggtctgcgcttgggggctccggaagccaggcggtcagcgacacttagcggatctgccactaatctggcttcactcaccgcggccctggctaaagcggacagatcccacaaaaaccccgaaaaccgtaaatcttgggcatcttag

SEQ ID NO: 192415 - DNA, 5481 bp, synthetic construct
  misc_feature 1..5481: note = Description of Artificial Sequence: Synthetic coding sequence
  source 1..5481: mol_type = other DNA
atgggcgacagcaaggtgaaggtggccgtgcggatccggcccatgaaccgcagggaaactgacctgcacacaaagtgcgtagtggatgtcgacgctaacaaagtgatactgaacccagtgaacacgaatctgtccaaaggcgatgccaggggccagccaaaagtgttcgcctatgaccactgcttctggtctatggacgagagcgtgaaagagaagtacgcaggccaggacatcgtgttcaagtgccttggtgagaatatactgcagaacgccttcgatggatacaatgcttgcattttcgcctatggacaaaccggtagcggcaagtcatatactatgatgggaaccgctgaccagcctggcctcatcccccggctatgttcaggcctgttcgagcgaacacaaaaggaggagaatgaggaacagtcctttaaggttgaggtcagctatatggaaatctacaatgagaaggtgagggatctcctggaccccaagggcagtaggcagacacttaaagtacgggagcactccgtcctggggccttacgtggatggattgtccaaactggccgtaacaagctacaaggacattgagtctcttatgtccgaaggtaacaaaagtcgtacagttgcggcgactaacatgaatgaagagagttccaggtcacacgctgtgtttaagattaccttgacccataccctctacgatgtgaagagcggcactagtggcgaaaaggttgggaaactgtctctggtggatctggcgggaagcgagagggccacaaagacaggcgcagcaggagatcggttaaaggaaggaagtaatattaataagtctctcaccactctaggcttggttatatctgctctcgccgatcagtccgcaggaaagaataagaacaaatttgtgccctaccgtgattcagtcctgacatggcttctgaaagactccctgggcggaaacagcaaaaccgctatggttgcaactgtttcccccgccgctgacaattatgacgagacgcttagcacactgaggtacgccgatagagcaaaacatatcgtcaaccatgccgtggtgaacgaggatcctaacgctagaatcataagagacctccgggaggaggtcgagaagctgagagagcagttgaccaaggcggaggctatgaagtccccagagctgaaagatcgcctggaagaatccgaaaaactgattcaagagatgaccgtgacctgggaggagaagctgagaaaaaccgaagaaattgcacaggaacgccagaaacagctggaaagccttggcataagcctgcagtctagcggtattaaggtgggtgacgacaaatgcttcctcgtgaatttgaacgcagatccagccttgaacgaactactggtttactacttgaaggagcataccctcatagggagtgcaaacagccaagacatccagctttgcgggatgggtatcttgcctgagcattgcattatcgacattacatcagaggggcaggttatgctcaccccccagaagaatacacggactttcgtgaatggctcctccgtgagctcgcccattcagctgcatcacggcgaccgtatcctttgggggaacaatcacttctttcggctaaacctgccaaagaagaagaaaaaggctgagagggaagacgaagatcaagaccctagcatgaagaatgaaaactcttccgaacaattagatgtcgatggagactcaagctctgaggtctcatctgaggtcaacttcaattatgaatacgcccaaatggaggtgaccatgaaggcattgggatccaacgatccaatgcagtctatactgaattcactggagcagcagcatgaagaggagaagcgtagtgctcttgagaggcagcgattgatgtacgaacacgaactggagcaactccgcagacggctgtcacccgaaaagcagaactgccggtcaatggatcggtttagcttccattccccatccgctcaacagcggctgcggcaatgggcagaagagagggaggccacactgaataactccctgatgaggctgagggagcagatcgtgaaggccaacctgctggtgcgggaggccaattacatcgctgaagaacttgataagcgcaccgaatacaaagttaccttgcagatacccgcctctagtctggatgctaacagaaagcgcggatcccttctgtcggagccggcaatccaggttaggcggaaagggaagggtaagcagatctggagcctcgaaaagctcgacaatcgcctgcttgatatgcgcgacctgtatcaagaatggaaagaatgtgaggaggataaccccgttatccgctcttattttaagagggccgaccccttctatgacgagcaagagaatcactctttaataggagtggccaatgtgttcctggaatcactcttttacgacgtcaaattgcagtacgcagtgcctatcataaaccagaaaggggaggtggccggtaggctacacgtggaagtcatgaggttgagtggcgatgtgggggagcggattgccgggggagacgaagtcgccgaagtgtccttcgagaaggaaactcaggaaaacaagctcgtgtgcatggtaaagatcctgcaagctacgggcctaccacaacacttgtcccacttcgtgttttgtaaatattctttttgggaccagcaggagccggtgattgttgctcccgaagtagatacaagcagttcttccgtctctaaagaaccccactgtatggtggtgtttgatcattgcaatgaattctcagtcaatatcacggaagatttcatcgaacatttaagcgagggggccctagccatcgaagtctacgggcacaaaataaatgaccccaggaagaacccagccttgtgggacttgggaataatccaggcaaaaactaggtccttgcgcgaccggtggtctgaagtcacccgcaagcttgagttttgggtgcagatcctggaacagaacgaaaatggagagtactgccctgtagaagtcatctctgctaaggatgtgcctactggaggcatctttcagttgaggcaggggcaatccagaagagtgcaggtcgaagtgaaatctgttcaagaaagcgggacgctgccactcatggaggagtgtatactgagtgttgggattggatgtgtgaaggtgaggcctcttcgtgcacctagaactcacgagacattccatgaagaggaagaagatatggatagttaccaggatagagatctagagcgcttacggagaaaatggttgaatgccctgacaaaacggcaggagtacctggaccagcagcttcaaaaattggttagcaagcgcgataaaacagaggacgacgctgaccgggaggcacagctgctggagatgcggctgaccttaaccgaagaaagaaatgccgtgatggtgccgtccgcaggtagtggtatcccaggtgctcctgccgagtggactcctgtgcctggtatggagactcatattccagtgatcttcctggacctgaatgctgatgattttagtagtcaggacaacttggatgatcctgaggcaggggggtgggacgcaacgcttactggggaggaggaagaggaattttttgaactgcaaatcgtgaagcaacacgatggcgaagttaaggcagaggccagctgggattcggctgtgcacggttgcccccaattgtcgagaggtacacccgtggacgagagattatttcttattgttagggtcaccgttcagttgtcccaccctgcagatatgcagcttgtcttgaggaagaggatttgtgtcaatgtgcatggaagacagggattcgcacaaagcctgctaaaaaagatgagtcaccggagctctattccgggttgcggggtgacatttgaaatcgtctctaatatacctgaggacgcccagggtgtcgaggaacgagaggccttggcccgaatggctgccaatgtggagaaccccgcctccgcagattccgaggcctacattgagaaatacctgaggtccgtgctggctgttgagaacctcctgaccctggacagattgcgccaagaggtggcagtaaaggagcaattgaccggaaaaggtaaacttagccggaggtccatcagcagcccaaatgtcaataggctgtccggttcacggcaggatttgattccaagttactccctcggaagtaataaagggcgctgggagtctcagcaggatgtgagtcagactacagtgtcccgtgggattgcccccgctcccgccctgtccgtcagtcctcagaacaatcattctcctgatccgggcctgagcaatcttgccgcatcatatctcaatcccgttaaatctttcgtcccacaaatgcctaagctactgaaatcgctgttcccagtgagggacgaaaagaggggaaagcggccatctcccctcgcccaccagcccgttccccggatcatggtgcagagcgcctcaccagatatccgtgtgacccgcatggaagaagcccagcccgaaatggggcccgacgtgctcgtgcagaccatgggcgcccctgcactcaaaatctgtgataagcccgcaaaagtcccaagtccgcctccagttattgccgttactgctgtgacacctgcacctgaagcccaggatggtccacccagtcctcttagcgaagcatcatctggatacttctcacattccgtaagtacggcgacactgtcagatgctctgggtccggggctggatgccgcagctccacccggaagcatgcccacggcacctgaggccgaacccgaagctcctatctctcatccacctccaccgacggccgttccagcagaggaaccacccgggccccagcagttagtgtctccgggacgcgaacgtcccgacctggaagctcctgcacccgggtcccctttccgagtgcggagagtcagagcctccgagctgaggtccttttctcgtatgctcgcaggcgaccctggctgctctcctggagcagagggcaatgcccccgctccaggcgctggagggcaggccctcgcttctgactccgaggaagcggatgaggtgcccgagtggttgcgggaaggggaatttgtgactgtcggggcacataagaccggtgtagtgcgctatgtcgggccagccgatttccaggaaggcacgtgggtgggtgtcgagttggacttgccaagtggcaaaaatgacggtagcatagggggcaagcagtatttcagatgtaaccctggatatgggctgctggtgagacctagccgcgtgagaagggccacagggccagtgaggcgccggtcgactggactgcgccttggtgcacccgaagcacggcggagcgccaccctctccggcagtgctaccaatctcgcaagcctgacagccgccctagccaaagccgaccggagccataaaaatcctgaaaacagaaagagctgggcctcctag

SEQ ID NO: 192416 - DNA, 4947 bp, synthetic construct
  misc_feature 1..4947: note = Description of Artificial Sequence: Synthetic coding sequence
  source 1..4947: mol_type = other DNA
atgagcctgcacagcacccacaaccggaacaacagcggcgacatcctggacatccctagcagccagaactctagcagcttgaatgctttgacacactcctcccgcctcaaactccacctgaagtctgacatgagtgaatgtgagaacgatgacccactgctgagaagcgctggtaaggttcgggatattaaccgtacatatgtgatctctgcctcccgcaagacagcagacatgccgctgacaccaaaccccgtgggacgccttgctctgcaaagacgaacaacacggaacaaagaatcctctctgctcgttagcgaactggaagacaccaccgagaagaccgccgagacacgtctgaccctacagcgacgcgccaaaaccgactcagccgagaagtggaagaccgccgagattgatagcgtgaaaatgacactcaacgtcggcggtgagacggagaacaatggggtcagtaaggaaagcaggactaacgtgcgaattgtgaacaacgctaaaaatagcttcgtggcaagctctgtacctctagatgaagacccacaagtcatcgagatgatggctgataaaaaatacaaggagacttttagcgcacccagccgagcgaatgaaaatgtggctctgaaatattctagcaatcgccctcctatagcctcactctctcagacggaggtggtaagaagcggccatctgactactaagcccactcagtccaagctggacattaaagtccttgggactggaaacctttaccaccggtctatcggcaaagagattgctaagaccagtaataagtttggtagcttggaaaaacgaacccctaccaagtgtaccaccgaacacaagctgaccacaaaatgctcactaccacaactgaaaagccctgccccctccattctgaagaatcggatgtccaacctccaggttaagcagcgcccaaagtcgagctttctggccaacaaacaggaacgctctgcagagaatactatccttcccgaggaggaaactgtggtccagaacaccagcgcaggcaaagatcccctgaaagtggaaaattcccaggtcactgtggccgtgagggttaggcctttcactaagagagagaaaattgaaaaggccagtcaagtagtttttatgagcgggaaggagatcaccgtggaacaccccgatacgaagcaggtgtacaatttcatttacgacgtatctttctggtccttcgacgaatgccaccctcactatgccagtcaaactaccgtctacgagaagctggccgcaccactcctcgagcgggcattcgaaggatttaatacatgtctcttcgcatatgggcagacgggctccggcaagagttacactatgatgggtttttctgaggaacctggaattattccccggttttgcgaagatctgttttctcaggtcgcacggaagcagacccaggaagtgtcttatcatattgagatgagtttctttgaggtgtacaatgaaaaaatacacgatctgctggtatgcaaggacgaaaacggccagcgaaaacagccactgcgggtgagggaacaccctgtatacggaccctatgtggaagctctttcaatgaacatagtctcatcttatgctgatatccagagttggctcgagctcggcaacaagcagcgcgcaactgccgctacagggatgaatgacaaaagcagccggtcacatagcgtgttcactctagttatgacacaaacgaaaacagagttcgtggaaggagaagaacatgatcaccggatcacatcgaggattaacttgatcgatctggcaggatccgaaaggtgcagtactgcccacacgaatggagatcgcctcaaagaaggtgtctctatcaataaatctctgctgaccctcggcaaggttattagcgccctaagcgaacaggcaaaccagagatcagtgttcattccttaccgggagagcgtcttgacttggcttctgaaggagtctcttggtgggaacagtaaaacggctatgatagccacaatatccccagcagcgtcaaacatcgaagagaccctctctactctcagatatgctaatcaggccaggcttatcgtcaatattgcaaaggttaatgaagatatgaatgcgaaactgattcgggagttgaaggcagagatcgcaaaattaaaagcagcccaacggaattctaggaacatcgatccagagcgctaccgactttgtcggcaagagataacctctctcagaatgaagctgcaccagcaggagagggatatggcagagatgcagcgggtgtggaaggaaaagtttgaacaggccgagaagagaaagctacaagagaccaaagaacttcagaaagccggaatcatgttccaaatggataaccatctgcccaacctggtcaatctgaatgaagatccccagctcagcgagatgctgttatatatgatcaaggaaggcactacaaccgtcggcaagtacaaacctaactccagccacgatatccagttgagcggggtgttgattgcggatgaccattgtacgattaaaaacttcggtggcaccgttagcatcatcccagtgggagaggctaagacatatgtcaacggaaaacatatcctggagatcactgtcctacgtcacggcgatagggtcattcttggaggggaccactactttcggtttaaccatcctgtcgaagtgcagaaggggaagcgccctagtggacgggacacaccaatatctgagggccctaaagacttcgaatttgctaagaacgaactcctgatggcgcaacgcagccagctggaggccgagatcaaagaagcacaattgaaggcgaaggaggagatgatgcagggcatacagatcgcgaaagagatggctcagcaggaactatcttcacagaaggcggcttatgaatccaagatcaaagccctggaagcggaactcagagaggaaagtcaacgtaagaagatgcaggagatcaataatcaaaaagcgaaccacaaaattgaggagttagaaaaggccaagcaacatctggagcaggaaatatatgttaataaaaaaaggctcgaaatggaaacgcttgctaccaagcaagccctggaggatcattctatccgacacgccagaattctggaggctctggaaacggaaaagcagaaaatagcgaaggaagtccagatcttgcaacagaacagaaacaatagagacaagacgttcacagtgcaaaccacctggagctcaatgaagctgtctatgatgattcaggaagccaatgccatcagtagtaagctgaagacatactacgtctttgggcgccacgacatttcagataagtcttctagcgatacttccattagagtccgaaacctgaaactgggcatctcaaccttttggtccctcgaaaagtttgagtccaagcttgctgccatgaaggagttgtacgagtccaatgggagcaaccgtggtgaggatgctttttgcgaccccgaggacgagtgggagcccgacattaccgacgcccccgtttcaagcctgagccggaggcgctccaggtccttaatgaagaatcgcagaatctcaggctgtctgcatgatatacaagtacatccaatcaagaatctgcactcctctcatagctcaggccttatggataagtcttccacgatttattctaacagcgccgagtctttcctgcctggcatttgcaaggaacttatcgggagtagcctcgactttttcggccagtcatacgatgaggaacgcacaatagccgactccctgatcaatagctttttaaagatttacaatggactgttcgctatctcgaaggcgcacgaggaacaagacgaggagtcccaagataacctcttctctagtgaccgtgctatccagtcactcacaattcagaccgcatgcgctttcgagcaactggttgtgctaatgaagcattggttatcggatctcctcccatgcaccaacatcgccaggcttgaagatgagctgcgccaggaagtaaagaagttgggtggctatctccagttgtttctgcagggatgctgcctggatatcagctcaatgataaaagaagctcaaaagaatgccattcagatcgtgcagcaggccgttaagtatgtcggacaactggcagtgttaaagggcagtaaactgcactttctggagaacggtaataacaaggctgctagcgtacaggaggaattcatggacgcagtatgcgatggagtgggccttgggatgaaaatcctgcttgactctggactggagaaagccaaggagctgcagcatgagctcttccgccagtgcactaaaaacgaagttacaaaagaaatgaagacgaatgctatggggcttatacggagcctggagaacatcttcgctgaatctaaaatcaagagcttcaggcgtcaagtccaggaagaaaacttcgaatatcaagatttcaaacggatggtcaacagggcaccagaattccttaaactaaaacattgcctggagaaagcaattgagattatcatcagtgcccttaagggttgtcacagtgacatcaatttgttgcaaacctgcgtggagtcgatacgcaacctcgcttcagatttttatagtgacttcagtgtgccaagcacttcggtgggtagttatgagagccgggtgacacatatcgttcaccaggagctcgaaagcctggccaagtctttgttattttgtttcgagtcagaggagtcacccgatctgctcaagccttgggagacctataaccaaaacaccaaggaagagcaccagcagtccaaaagcagcgggatagacggcagcaagaataagggcgttcccaaacgggtgtatgagctacacggttctagcccagctgtgtcctcggaggagtgcaccccatctaggatccagtgggtttag

SEQ ID NO: 192417 - DNA, 5073 bp, synthetic construct
  misc_feature 1..5073: note = Description of Artificial Sequence: Synthetic coding sequence
  source 1..5073: mol_type = other DNA
atggccggcgccagcgtgaaggtggccgtgcgggtgcggcccttcaatagccgcgaaatgtctcgcgactccaaatgtatcatccagatgtctggctctaccactaccatcgttaatccaaaacagcccaaagaaacgccaaaatctttctcctttgattactcctactggtcccacactagtccggaggatatcaattacgcctcacaaaaacaagtgtacagagacattggcgaagaaatgctccaacacgcattcgagggttacaacgtgtgcatatttgcctatggccagacaggagccggaaaaagctacaccatgatgggcaaacaggagaaggaccagcaaggaataatcccacagctgtgcgaggatctcttctcgagaatcaacgacaccacaaatgataacatgtcttactccgtggaggtctcctatatggagatttattgtgagcgtgtgcgtgatctcttgaatcctaagaacaaagggaatctcagggtgcgggagcaccccttactagggccctatgtggaggatctgtctaagttagccgtgacatcttacaatgatatccaagacttaatggattccggaaataaggccagaacagttgctgccacgaatatgaatgaaaccagcagtaggtcacatgccgtgttcaacataatctttactcaaaaaaggcacgatgccgagaccaacatcacaaccgagaaggtatcgaagatttcccttgtggatctggccggcagcgaaagagctgattcgaccggtgcgaaaggaacacgcttgaaggagggcgccaatattaataagagcctgaccaccctggggaaggtcattagcgccctggccgagatggattccgggccgaacaaaaacaaaaaaaaaaagaagacagactttatcccctatcgcgactccgtgctgacttggctacttagagagaacctgggtgggaacagccggacagccatggtagcagctctgagccccgccgacattaattacgatgaaactctgagcacactgcgctacgccgaccgggccaagcaaatcagatgcaatgctgtgataaacgaggatccaaacaataaacttatacgcgagttaaaagatgaggtgacccggcttcgggacttactgtacgctcagggcctgggggatatcacggatatgacaaacgccctcgtaggtatgtcaccctcatcctcactgagcgccctctctagccgcgctgccagtgtcagttctctccacgaaagaatcctgtttgcacctggatccgaagaagccatcgagcgcctcaaggagacagagaagattattgctgaactgaatgagacatgggaggagaagctacgaagaactgaggctataagaatggagcgtgaagcgctcctggctgagatgggggttgccatgcgggaagacggagggaccctcggcgtattctccccaaagaagacaccccacttagtcaacctgaacgaggatcctctgatgtctgagtgtctgctctactatattaaagatggcattacccgcgtgggtagggaagatggggaaagaaggcaggacatagttttgtctggtcacttcatcaaagaggaacattgtgtttttaggtcagactcccgcggaggcagtgaggcggtggtaaccttggagccatgtgaaggggctgacacgtatgtgaatggtaagaaagttacagagccctcaatcctccggagtggaaatagaatcattatgggcaagagccacgtgtttcgcttcaaccatccagagcaggcccggcaggagcgcgaacgcaccccctgcgccgagacacctgccgaaccggtcgactgggcattcgcccagagagagctcctggaaaaacagggaatagatatgaaacaagagatggaacagagactgcaggaactggaggaccaatataggcgcgagcgagaggaggctacctacctgctggaacagcagcggttggactacgagagcaaactggaggcactgcaaaaacaaatggacagcaggtactatccagaggttaatgaggaggaagaggagccagaggatgaggtgcagtggactgaaagggaatgtgaattggcactttgggcctttcggaagtggaaatggtatcagtttacatctctgagagatcttttatggggcaacgccatctttcttaaagaagccaacgctatttctgtggagcttaaaaaaaaggtgcagtttcaattcgtgttacttactgatacgctatactccccacttcctcctgatcttttaccccccgaagccgctaaggatagggaaacgcggccttttcccaggaccatcgtggccgttgaagtgcaggaccagaagaacggagcaactcattattggactctggaaaagttaaggcaaaggctagatcttatgagagagatgtacgacagagcagctgaggtgcccagctctgttatcgaggattgtgacaacgtcgtgactggaggcgaccccttttacgatcggttcccttggttccgactggtcgggcgtgcctttgtatacctctctaatctgttatacccagtgcccctggtccaccgtgtggctattgtgagcgagaagggggaggtgaagggctttctgcgcgtggccgtgcaggcaataagcgctgatgaggaggcacccgattatggtagtggcgttcggcagtctggtacagccaaaatctctttcgacgaccagcattttgaaaagtttcaatctgaaagctgtcccgtcgttggaatgtcacggtccggcacatctcaggaagagttgcggattgtcgaaggccaggggcaaggtgccgatgttggcccatcggccgatgaagtgaacaacaatacctgctctgcagtacccccagagggtcttctgctggactctagcgagaaggcagctttagacgggcccctagacgcagcactggatcatctccgcctcggaaatacttttaccttccgggtgactgtcctacaggccagctcaattagcgcggagtatgctgatattttttgtcagtttaacttcatccaccgacacgatgaagcgttctcgaccgaaccactaaagaacacgggcaggggtcctccattggggttctaccatgtccaaaatattgctgtcgaggtgaccaaatcttttatcgaatatatcaagtcgcagccaatagtatttgaggtcttcggtcattatcagcaacacccgttcccccctctttgcaaagacgtgctcagtcccttgagaccaagtcgaagacactttccccgggtgatgccgcttagcaagccggtgccggcaaccaagttgagtaccctgacaagaccatgccccgggccctgccactgcaagtacgacctcctggtttatttcgagatctgtgagcttgaggccaacggtgattacatccctgctgttgtggaccaccgcggaggcatgccatgcatgggtacctttctcctccaccaaggaatacagaggagaatcaccgttaccttactgcacgagactggatcacatattcgctggaaggaagtgcgtgaactagtcgtggggcgcatcagaaatacacccgaaacagacgagtctctgatcgatccaaacatcctgtctcttaatattctatcctctggttacattcacccagctcaggatgatcgcactttctaccagttcgaagctgcgtgggactcttcaatgcataactcgcttctgttaaacagggtgaccccttatcgcgagaagatctacatgaccctttcagcctatatcgagatggagaactgtacacagcccgccgtcgtcacgaaagacttctgcatggtgttttattctagggatgccaagctccccgcatctcgctccattaggaacctgttcggcagcggctccctgcgggccagtgaatcgaaccgcgtgactggcgtttacgagctttctctgtgtcacgtggccgacgcggggagcccaggaatgcaacgcaggagacgacgagtgctggacactagtgtggcctatgtgcgcggagaagagaacttagccgggtggaggccccgcagtgactctttaattctggatcaccagtgggagctcgaaaaactgagccttctccaagaggtcgagaaaactcgtcattacctgcttcttcgggaaaagctggaaaccgcccagaggcctgttccagaagcattgtcccctgcgttctctgaagattccgagtctcacggatctagtagtgcctcatcccctttgtccgcggaaggaagaccgtccccacttgaggccccaaatgaacgccagcgagagctggctgtgaaatgcctgaggctgttaacacatacatttaatcgtgagtacacgcattcccatgtctgtgtgtctgcatctgagtctaagctatcggaaatgtctgtcactttgctgcgggaccccagcatgtcccccctaggcgtcgccactctcaccccctccagcacatgtcccagccttgtcgaagggcggtatggcgccacagatctgcggactccccagccatgctctcgccctgcaagccccgagcccgagcttctgcccgaagccgactctaagaaattgcccagtcctgcccgtgctacagagaccgacaaggaaccacaacgcctgctggtgcccgacattcaggaaataagggtgagtcctattgtttcaaagaagggctacctccatttcctggagcctcacacgtccggctgggcgagaagattcgtggtggtgcgccggccatacgcctacatgtacaattctgataaggatactgtggagcggtttgtactgaacttagcgaccgcccaggtggagtactctgaggaccagcaggcaatgttgaagacacccaacacatttgcagtctgtactgagcaccggggcatccttcttcaggctgcttcagataaagacatgcacgattggctgtatgcctttaatcccctgctcgctggtacaattaggagtaaactctcacgccgccggagcgcacagatgagggtctag

SEQ ID NO: 192418 - DNA, 5400 bp, synthetic construct
  misc_feature 1..5400: note = Description of Artificial Sequence: Synthetic coding sequence
  source 1..5400: mol_type = other DNA
atggccggcgccagcgtgaaggtggccgtgcgggtgcggcccttcaacagcagagagatgagccgagacagcaagtgtattatccagatgagtgggtctaccacaactattgtcaaccccaaacagcctaaggaaacgcccaaatcttttagttttgattattcttactggtcacacacttcccccgaggacatcaactacgcaagtcagaagcaggtgtacagagatatcggcgaagagatgctgcagcacgctttcgagggctacaacgtgtgcatcttcgcttacggacaaactggggctggcaaatcctatacaatgatgggcaaacaggagaaggaccaacagggcattatccctcagttgtgcgaggatctgttcagtcgtatcaacgatacaacaaacgacaacatgtcttacagtgtggaagtgtcctacatggaaatttattgcgaaagggttagggatctgctcaacccaaagaacaaggggaacctgagggtgcgtgaacacccgcttcttgggccatatgtggaagaccttagtaaactagcagtgacctcctacaacgatatccaggatctgatggattctggcaacaaggctagaacagtggctgctacaaatatgaatgagacttcctcacggtctcacgccgttttcaacatcatctttacgcagaagcgccatgatgctgagacaaatattacaactgagaaggtgtccaagatcagtctagtcgatctggccggaagcgaacgcgccgattctacgggcgctaagggtacacgactgaaggaaggtgctaacattaacaagtcactcactactcttggaaaggtcatcagcgcgttggctgagatggttagcggccctgccagaaacaagaaaaagaaaaaaaccgatttcatcccttacagggactctgttctaacctggctgcttagggagaatttgggtggcaacagcaggaccgctatggtggccgccctttctcctgccgacattaattacgacgagactttatcaacactccgatatgctgatcgggccaagcagatccggtgtaatgcggttatcaatgaggatcctaataacaaactaatccgcgagctgaaggacgaggtaacaagactccgggaccttctgtacgcccaggggctgggcgacatcacagacacaaatactgtgccgggcggccccaagcttaccaacgctctggtggggatgagtccttcctcctcactctcggcgttgtccagtcgtgcggccagtgtctcatcactgcacgaacgcatcctgttcgcccccggctctgaggaggccattgaaaggctaaaggagacagaaaaaatcatagcggaactcaacgaaacatgggaggagaaacttcgtcggacagaggcaatcaggatggagcgagaggccctgctggccgaaatgggcgtcgccatgcgagaggacggaggaaccctgggagttttcagtcctaaaaaaacacctcacttagtcaacttgaacgaggatccactaatgagcgagtgtcttctgtactatatcaaagacggcatcacacgggttggtagggaggacggcgaacgccgccaggatattgtgctgtctggacattttatcaaggaggagcactgtgtcttcagatcggatagcaggggtggatctgaggctgttgttacattagagccctgcgagggcgcagacacatatgtaaacggcaaaaaggtcactgagcccagcatcctgcgatcaggcaacaggatcatcatgggcaagtcccacgtcttccgatttaatcatcccgagcaggcgagacaagaacgtgaaaggaccccttgcgccgaaaccccggcggagcctgtggactgggccttcgcacagcgtgaactgctggaaaaacagggcatcgacatgaaacaggagatggaacagaggctccaagagctggaggaccagtaccgccgcgagcgtgaagaggcaacttatctcctggagcagcagagactggactatgaaagcaaattggaggctctgcagaagcagatggactcacgttactatcccgaggtgaatgaggaagaagaggaacctgaagacgaggttcaatggacagaaagagaatgtgaacttgcgctgtgggcctttaggaagtggaaatggtatcagttcacctctctgagagacctactgtggggtaatgccatttttctaaaagaagccaatgctatctccgtggagctgaagaagaaagtccagtttcaattcgtcctgctgacggatactttatatagccctttgccacctgatttactgccccctgaagccgccaaagatcgggaaactcggccatttccaaggactatcgtcgcagtggaggttcaggaccagaagaacggcgctacgcactactggactttggagaaattgcgccaaagattagatctcatgcgagagatgtacgatcgtgctgcagaggtgccttcaagtgtgattgaggattgtgataatgtagtgaccgggggtgatcctttctacgaccggttcccctggtttcggctggtcggctcctctgctatatcaggatgtaattcatacccccttctgaacacctgcatgtcagagagaatggctgcactgaccccgtctcccaccttcagctcccctgactcagatgccaccgagcccgcggaggaacaaagtgttggagaggaggaagaggaggaggaagaggaggaagatgaagaggaagaagacctcgaagacgatgtcttcccggagcacgcactgtgcgacggaagggatccattctacgatagaccaccactcttcagtctcgtgggaagagcgtttgtgtacctaagcaatctgctttacccggtgccactggtgcaccgagtggcgatcgtgtccgagaagggggaggtcaagggatttttgcgcgtcgcggtacaggctattagcgccgatgaggaggctcctgactacgggagcggtgtacgacaaagcggaaccgccaagatcagcttcgatgatcagcactttgaaaaatttcagtctgagagttgccccgtcgtggggatgagcagatccggcacctctcaggaagaactccgcatcgtggagggccagggacagggtgcagacgtgggcccatccgctgacgaggtgaataacaatacctgctcagcagttcccccagagggcctgcttcttgactctagcgaaaaggctgccttggacggacccttggatgcagctctggatcatctgcgcctgggcaacacctttacatttagagtcacagttttacaggccagctccatttccgccgagtacgccgatattttttgccagttcaacttcattcatcggcacgatgaagccttctccaccgagcctctcaagaatacaggacggggacccccactggggttctatcacgtgcagaatatcgcagtggaggttactaaatccttcatagagtacatcaaatcgcagcccatagtgtttgaagtctttggccactaccagcaacacccatttccacccctatgtaaggacgtccttagccccttgagaccgtcaaggcgacacttcccaagagttatgccactgtctaagcctgttccagctacaaaactgtctaccctcacacggccgtgccctgggccttgccattgtaaatacgatctgctcgtgtacttcgaaatttgtgagctggaggctaatggagactatatacctgctgtggtagatcataggggcggcatgccctgtatgggaacttttctgctacaccagggaatacagagacgtattacagtgaccctcctgcatgaaacagggtctcacattcggtggaaagaggtgcgcgagcttgtggtaggccgaatcagaaacactcctgagactgatgaatctctcatcgacccaaatatcctgtcacttaacatcttatctagcggctacatccacccggctcaggacgacagagtatccttgggcaacgacacccgtacattttatcagtttgaggctgcctgggacagctcgatgcacaactctctactgctgaaccgcgtcaccccctaccgagagaaaatctatatgactctctcagcatacatagaaatggagaactgtacgcagccggccgtggttacgaaggatttttgcatggtgttctatagcagggacgctaagctaccggcctcccggtccatcaggaacttgtttgggagcggatctctgcgcgcaagcgagtcaaatagagtgactggcgtctatgaactgagcctgtgtcatgtggccgatgcaggaagcccaggtatgcagaggcggagacgcagggttttggatacaagtgttgcgtacgttcggggagaagaaaatctggccggctggcgccctcgaagcgacagcctcattttagatcaccagtgggagctagagaaactctctctcctgcaggaagtcgaaaaaacccgtcactaccttctgttgagggagaagctagaaaccgcccagagaccagttcctgaggcgctgtcgccagcattctctgaagactcagaatcacatggatcaagttctgcctcatcgcccttgagtgccgaaggtagaccctcgcctctggaagctcccaacgaaaggcagagagaacttgcagttaaatgcctacggcttctgacacacacgttcaatcgagagtacacacactcccacgtgtgtgtgtcagcttcggaatccaaactctccgagatgagcgtaaccctgctgcgggatccctccatgtctcctctgggtgttgccactctgactcctagcagcacttgccctagtctggtggaggggcgttatggcgcaactgacctcaggacaccccagccatgtagccggcctgcgtctccagagcccgaattgctgcctgaggctgattctaagaagcttcccagcccagctcgcgccactgagactgacaaggaacctcagagattgctggtgcccgatatccaggaaatacgggtgagtccgatagtatccaagaaaggctacctccacttcttagagccacatacaagtgggtgggccaggaggttcgtggttgttcgtcggccttatgcttatatgtataattctgacaaagacaccgtggagcgctttgtccttaatctggccacagcgcaggtcgaatactccgaggaccaacaggcaatgttgaagacccctaacaccttcgccgtgtgtacggaacaccgcggaattcttctgcaggcagcttccgacaaggatatgcacgactggctgtacgcttttaatccactgctggcagggaccatccggagtaagctgtctaggaggcggtctgcacagatgcgtgtctag

SEQ ID NO: 192419 - DNA, 117 bp, synthetic construct
  misc_feature 1..117: note = Description of Artificial Sequence: Synthetic coding sequence
  source 1..117: mol_type = other DNA
atggccggcgccagcgtgaaggtggccgtgcgggtgcggcccttcaattctagagaaatgtctcgcgatagcaagtgtatcatccagatgtccggttctaccaccactatcgtgtag

SEQ ID NO: 192420 - DNA, 5376 bp, synthetic construct
  misc_feature 1..5376: note = Description of Artificial Sequence: Synthetic coding sequence
  source 1..5376: mol_type = other DNA
atggccggcgccagcgtgaaggtggccgtgcgggtgcggcccttcaacagtagagaaatgagccgcgactctaagtgcatcattcagatgtctgggagcacaacgactatcgttaatcccaagcagcctaaagaaacaccaaaatccttcagctttgattactcatattggtcccacacctcccctgaggatattaattacgctagccaaaagcaggtgtatagggacatcggtgaggagatgctacagcatgcgtttgaggggtataacgtgtgtattttcgcgtacgggcagactggcgctggtaagtcctatactatgatggggaaacaggaaaaggatcaacagggaatcattccacagctgtgtgaggacctgttcagcaggatcaacgatacgacaaacgacaacatgtcttactctgttgaggtatcgtatatggagatttactgtgaaagggtgagagacctcctgaatcctaaaaacaagggtaatctgcgggtgagggaacatcccctgcttggcccttatgtcgaagatttgtccaaactggcggtgacgagctataatgacattcaggacctcatggactctggcaacaaagcccgaacggtggcagccaccaacatgaatgagacctccagcagaagccacgccgtgttcaatataattttcactcagaaacgccacgatgctgagacgaatataacaaccgagaaagtttcaaaaatctcccttgtggacctcgctgggagtgagagagctgactctacaggggcaaaaggcactcgcttgaaagaaggcgcaaacattaacaagagcctgaccacactggggaaagtgatctcggctctcgccgaaatggacagtgggccgaacaagaataagaaaaagaaaaaaacggattttatcccatatagagattccgtgctgacctggctcctgcgcgagaacctgggtggtaattcccgcaccgctatggttgccgcattatctccagcagatatcaattacgacgaaacccttagcacactcaggtatgcagatcgcgccaagcagattagatgcaatgcagtaattaacgaggatccaaacaacaagctaatacgcgaactgaaggacgaggtgacgcgcttgagagatcttctgtatgctcaggggttgggcgatatcaccgatactaacaccgtgcctgggggaccgaaactcacgaatgctctcgtcggcatgtcacccagcagctcattgagtgccctcagctcccgcgccgcatccgtgtcctctctccatgagcggattctgttcgcacccggcagcgaagaagctatcgagagactcaaagaaaccgagaagatcattgcggagttgaatgagacttgggaggagaagttgcgacggacagaggcgattcgcatggagcgggaggccctgcttgccgagatgggcgtggccatgagagaggacgggggaacattgggcgtcttctctccaaaaaagacacctcacctcgtcaacctcaatgaagacccgttaatgtctgaatgtctcctgtactatatcaaggacggcattacccgggttggcagggaggacggcgaacggcgccaggatatagtcctctccggtcacttcatcaaagaagaacattgtgttttccgcagcgacagccgcgggggaagcgaggccgtcgtaactctcgagccgtgtgaaggggcggacacctatgtgaacggtaaaaaagtcactgaaccttccatactgaggtccggcaatcgaatcataatgggaaagtctcatgttttccgctttaaccaccccgagcaggcccggcaggagcgcgagcgtaccccatgcgcagagaccccagcagagcccgtggactgggcttttgctcagcgggagctcctcgagaaacaaggaatcgatatgaaacaggagatggaacagcggctgcaggaactggaggaccaatacaggcgtgaacgagaggaggccacgtaccttcttgagcagcagcggctcgactacgagtctaagcttgaagctctgcagaaacagatggacagccggtattacccagaagtgaacgaagaggaggaagagccagaggacgaggtgcagtggacagagagggagtgtgaattagctctatgggctttcaggaaatggaaatggtatcagtttacctctctacgcgatctgttgtggggcaatgccattttcttaaaagaggccaacgccatctccgtggaactgaagaagaaggtgcagtttcagtttgtcctcctaacagatacactgtacagcccactgccacccgacttgctgccccctgaggctgccaaggatagggagactaggccctttccgaggacaattgttgctgtcgaggtgcaagatcagaagaacggggctacacactattggaccctggaaaaattacgccagcggctggatctcatgcgagaaatgtacgatcgagccgcagaggtgccctcgagcgttatcgaagattgcgataacgtggtaacgggtggtgatccattttatgatcggttcccctggtttagattggtggggagtagcgccatttctggttgtaactcttacccattgctcaacacctgtatgagcgagagaatggcggctctgaccccgagtccaactttcagcagcccagatagcgatgccactgagcccgccgaggagcagagtgttggagaggaagaggaggaggaggaagaggaggaggatgaggaagaggaggatctggaggatgatgtttttccagagcatgctctctgtgatgggagagacccattctatgaccgcccgccactgttcagtctggttggcagggcctttgtctatctcagcaatttactctacccggttccccttgtgcaccgtgtggcaattgtgagcgagaagggtgaggtaaaagggttcctgagagtggccgttcaggctatatctgccgatgaagaggctcctgattatggtagtggtgtgcggcagtccgggacggctaaaatttcctttgacgatcaacacttcgagaagtttcagtccgaatcctgccccgtggtgggaatgagccggtccggcacgagccaggaggaactgagaatagtggaaggacagggccagggcgcagatgtaggcccctctgccgacgaagtgaacaataacacctgctcggcagttccccccgaaggcttgcttttagactccagcgagaaggcggccctggatggtcccctggacgccgccctggatcacctaagactggggaatacatttacatttagagtgaccgtcctccaggcatcaagcatcagtgccgagtatgccgacattttctgtcagttcaatttcatccaccgccatgacgaggcttttagtacagagccattaaaaaacactggccgcggacccccgctcggtttctatcatgttcagaacattgctgttgaagtcacaaaatcattcatagagtatattaagagtcagcctatcgtattcgaagtgttcggccactatcagcaacacccgttccctcccctctgcaaagacgttctgtccccgctgaggccgagtagacgccacttccccagagtgatgccgctgagcaagcccgtccccgcaacgaagctttctactctgacaaggccatgccccggaccatgccattgtaaatacgacctgttagtttactttgaaatctgtgagctggaggcaaacggggattacatcccggctgtggttgatcatagggggggtatgccatgcatggggacattcttgctacaccaggggatccagcgcaggatcaccgtgactctgctccacgaaactggcagccacattaggtggaaggaggtgcgtgagctagtggttgggcgaatacgaaacacgcccgagactgacgagagtttaatagaccctaacatcctctcactgaacattctgtcttctggctacatacacccagcccaagatgatagaactttctaccagttcgaggcggcctgggatagcagcatgcacaactctttactgctgaaccgcgtcacgccttaccgcgagaaaatttacatgaccctgtccgcttatatcgaaatggaaaattgtactcagcctgcggtagtgactaaggatttttgcatggttttctacagccgggacgccaagctgccagctagtcgctccatccggaacctcttcggcagcggttctttgcgggcgtctgaaagcaatcgcgtaaccggagtttacgagttgtctctttgccatgtggccgatgccggcagccccggaatgcaaagacgcagaagacgcgtgcttgacacctctgtggcttatgtgaggggtgaggaaaacctggccggctggagacctcggagcgactcccttattctggaccatcaatgggagctggagaagctaagtctcttgcaagaggtggaaaagaccagacactatctcttgctccgcgagaaactggaaaccgctcaaaggcccgtacctgaagcactcagtcccgcattctctgaagactctgaatcccacggctcatcctcagcaagcagccccctgtctgctgagggccgccctagcccgttggaagctcccaatgaaaggcagagggagctagccgtgaaatgcctccgacttttaacacacacttttaatagagagtatacccatagtcacgtatgcgtgagcgccagcgagagcaagctttccgagatgtccgttaccctattgcgcgacccttcaatgtcaccccttggtgttgccactctgaccccttctagcacatgtccttctctggtggagggacgctatggtgcaactgatctgcggactcctcagccgtgtagtaggccggcctcccccgagccagagctgctccctgaggcagacagcaaaaaactgcctagccccgcccgagccactgagaccgataaagagcctcagcgcctgttagttcctgacatacaggagattcgggtaagccctattgttagtaaaaaggggtacctgcatttcctagagcctcacacctcggggtgggcacgccgcttcgtggtggttcgacgtccttatgcatatatgtacaactctgataaggatacggtcgagagattcgtgttgaacctggcgactgcgcaggtggaatactcagaagaccaacaagccatgttgaagacacctaacactttcgctgtctgcactgaacaccggggcattctgctccaggctgccagcgataaggacatgcacgactggctgtacgcattcaaccccctgctggctggtacaatcaggtctaagctcagcaggcggcggtctgcccaaatgcgggtctag

SEQ ID NO: 192421 - DNA, 5313 bp, synthetic construct
  misc_feature 1..5313: note = Description of Artificial Sequence: Synthetic coding sequence
  source 1..5313: mol_type = other DNA
atgagcggcgccagcgtgaaggtggccgtgcgggtgcggcccttcaactcccgtgagacctctaaagagagcaaatgtatcatccagatgcaggggaatagcacatctattattaatcccaagaacccaaaagaggcaccgaagagctttagtttcgattacagctactggtctcatacctcaccagaggacccatgcttcgcttcccagaacagggtctacaacgacattggaaaggaaatgcttctgcatgcgttcgagggttacaatgtttgtatattcgcctatggccagaccggcgccgggaagtcctacacaatgatgggtaaacaggaagaatctcaggctggaattatcccccagctgtgcgaggaactgtttgaaaagattaacgacaactgtaatgaggagatgagctattccgtggaggtgagctatatggaaatatattgtgagcgagtgagagacttactcaacccaaaaaacaaagggaaccttcgcgtgagagaacacccactgctcggcccctacgtagaagacctgtctaagctggctgttacttcctatactgacattgcagaccttatggatgctggtaacaaggcgcggactgtggccgcaactaacatgaacgaaactagctcgcgtagccacgcagtatttaccattgtattcacacaaaaaaagcacgataacgagaccaatttaagcacggaaaaagtttcgaagatctctctggtggacttagcgggatcagaaagggccgattctacaggcgctaagggaacccggttaaaggagggcgcgaacattaacaaaagcctgacaacactgggaaaggtcatatccgccctggcagaggtgagtaagaagaaaaaaaaaaccgactttattccttacagggattcggttttgacttggctcctgagagagaacctaggcggaaattccaggactgcaatggtggccgcactgagccctgcagacatcaactacgatgaaacactctcaaccttgcggtatgccgatcgggccaaacagatcaaatgtaacgcagtgattaatgaggaccctaacgccaaactggtccgcgaactcaaggaagaggtgacgaggctgaaggacctgctgcgcgcacagggcctcggtgacatcattgacaccagcatgggctctcttacgagctctcccagcagctgcagcctgtcttctcaggtcgggctgactagtgttactagtatccaggaacgaatcatgtccacccctggtggggaggaagctattgagaggctcaaggaatccgagaaaattatcgctgagctgaatgagacctgggaagagaaattaagaaagactgaggcaataagaatggaacgggaagctctgttggctgaaatgggggttgcgattcgagaggacggggggacacttggggtttttagtcccaagaaaaccccacacttggtcaacctgaatgaagacccattaatgtcggaatgtttgctttactacattaaggacggaatcactagagtggggcaggccgacgccgagaggagacaagatatagttctatccggagcccatattaaggaggagcactgcatctttagatctgaacgaagcaattcgggcgaggttatcgtcacactggagccatgtgaaagatctgagacttacgtgaatggtaagagagttagccagcccgtgcagttaaggagcggaaacaggatcattatgggcaaaaatcatgtttttcgctttaatcaccctgaacaggctagagcagagcgggaaaagaccccgtctgccgagacaccgtcagagcctgtggactggacattcgcccagcgagaattgctggaaaagcagggaattgacatgaaacaagaaatggaaaaacgccttcaagagatggagattttgtataagaaagaaaaagaagaagctgatcttctgttagagcaacagcggttggactacgagagcaagctccaggccctgcagaaacaggtggaaacacgctccctggccgcagaaacgacggaagaagaggaggaggaagaagaagtgccctggactcagcacgagttcgagctagcccaatgggcttttaggaagtggaaaagccatcaatttacttctcttcgcgatctcctttggggcaacgcagtgtatctgaaagaggctaacgccatcagcgtggagctgaaaaaaaaagtacagttccagttcgtgctattgaccgacacactctatagccccttgccccccgaactcctcccaactgaaatggaaaagactcacgaagaccggcctttcccaaggaccgtagtggctgtggaggtgcaggaccttaaaaatggggccacacattattggtctcttgagaaacttaaacagcggctcgaccttatgcgcgaaatgtatgacagggccggggaaatggcttccagcgcccaagacgaatctgagacaacagttactggctccgaccccttctacgaccgtttccactggttcaagcttgtcggcagtagtcccatcttccacggttgcgttaacgagaggctcgccgatcgaaccccctccccaacattcagtaccgccgacagcgatattacggagctggccgatgagcagcaggatgagatggaagacttcgacgacgaggcctttgttgacgacgctggcagcgatgctggcaccgaggagggctctgatctattctctgacggacatgatcccttctacgatagatcaccgtggtttatcttagtcggcagagccttcgtgtacctgtctaatctcttatatcccgtcccattgatccatagagtggccatcgtgagcgaaaagggagaggtgaggggcttcctgagggtggccgtgcaggccattgcggctgacgaagaagccccagactatggatctggcatccgacagagtggcaccgcaaaaatctctttcgacaacgaatacttcaaccagtccgacttctcgtcagtggctatgacccggtcaggcctgtctctcgaagaactccgtatcgtcgaaggtcagggccaaagctccgaggtgattaccccgccagaggagatttctcgcatcaatgacctcgatctgaaaagttcaaccctactcgatgggaaaatggtgatggagggattttcagaggagattggcaatcacctgaaactggggagtgcttttacgtttagagtgaccgtgctgcaagccagtggcatcctgcctgagtacgcagacatcttctgccagtttaacttcctgcatcgccatgatgaagctttcagcaccgagcccttgaaaaataatggccgggggtcccctctggccttttatcatgtacagaacatagcagtggagattaccgaaagcttcgttgactacatcaagacaaagccaattgtgtttgaagtgttcggccactaccagcagcatccactgcatctgcaaggccaggagctgaactcgcccccacagccctgccgcagattcttcccaccccccatgccactttcgaagccggtacctgcgaccaaattaaatactatgagtaagaccagtctggggcagtccatgagcaagtatgatctcctcgtgtggttcgagattagcgaactggaacccacgggcgagtatataccagcagtggtggaccatacagcgggcctgccttgtcaaggcacgttcctgctccaccagggcatccagaggcgcataactgtgaccatcatccacgagaagggctcagaattacattggaaggacgtgcgcgaactcgtagtcggccggatacgcaataagcctgaagtggatgaagcggcagtcgacgctatcctgtcactgaatattatctcagccaagtacttaaagagttcgcataattcaagcagaacgttctacaggtttgaggctgtgtgggactcctcccttcacaattctctcctgctgaatcgggtgaccccatacggcgagaaaatctacatgactttgtcggcctacctcgaactcgaccactgcatccaacctgcagtgataactaaggacgtgtgcatggtgttttacagcagagacgcaaaaatctctccaccgaggtccctcagatccttgttcggctctggatactcaaaaagcccagacagtaaccgcgtcacaggaatctacgagctcagcctgtgcaagatgtccgacaccgggagccctggtatgcaacggaggagacggaaaatccttgatacgagtgtcgcctacgttagaggggaggagaatttggccggttggcgacctaggggtgattcactaattctcgaacaccagtgggagctcgagaaattggaacttttgcacgaggtggagaaaacacggcatttcctcctccttcgagaacgactgggcgacagtatccctaagtccctctcggactcactgtctcctagcctatcctccggcacactcagcacctcaaccagcatctcatcacagatcagtactactacattcgagtctgcaattactccttcagagtcaagcggttatgattctggtgatatcgaatcactggtggaccgagaaaaagaactggctaccaaatgcctgcagctattgacacacacttttaatcgagaattcagtcaagtgcatggctccgtgagcgactgcaaactgtccgacataagtcccataggccgagatccaagtgaatcatccttctcatccgcgaccctgaccccatcaagtacatgtccctcactcgtggacagcagatctaactccctcgaccagaaaacacccgaagctaattccagggctagcagtccctgccctgagtttgagcaattccagattgttcccgcagtggaaaccccttacctagcccgggcgggcaaaaacgagttcttgaatctagttcctgacattgaagagatccgtccctcgtctgtcgtttccaaaaaagggtatctccatttcaaagaacccctctactccaactgggcaaagcacttcgtagtggtccgccgtccctatgtatttatctataacagtgataaggatccagtcgaacgtggtattatcaacctgagcacggctcaggttgaatattccgaggatcaacaggccatggttaagacccccaacacttttgcggtatgcactaaacaccgtggcgtgctgcttcaagcattaaacgacaaagacatgaacgattggttgtacgccttcaacccgctgttggccggaacaattcggtctaagctctccagaaggtgccccagccagtctaaatactag

SEQ ID NO: 192422 - DNA, 5472 bp, synthetic construct
  misc_feature 1..5472: note = Description of Artificial Sequence: Synthetic coding sequence
  source 1..5472: mol_type = other DNA
atgagcggcgccagcgtgaaggtggccgtgcgggtgcggcccttcaactcgagggagacatccaaagagagcaagtgtattattcagatgcaaggtaactctacatccatcattaaccctaaaaatccaaaagaagcccccaaaagcttttctttcgattactcctattggagccacacttctccagaggatccctgcttcgcctctcagaatcgtgtctataatgacatcggaaaagagatgctcttacacgcctttgagggctataatgtctgcatctttgcatacggccagaccggagcaggaaaaagctatacaatgatggggaaacaggaagagtcccaggcaggtattataccgcaactgtgtgaggagttattcgaaaagatcaacgataattgcaatgaggaaatgtcatactccgttgaggtgtcctatatggagatctactgtgaaagggttagggacctgctaaatcctaaaaacaagggcaatctgcgggtgcgtgaacaccctttgctgggcccttatgtagaggatctgagcaagctggccgttacttcctatactgacatcgcagatcttatggacgcgggtaataaagcccgaacagttgctgccacaaacatgaacgagacaagctccagatctcatgccgtgtttacgatcgtgttcacccagaaaaaacacgataatgaaaccaatttaagcaccgaaaaggttagcaaaataagcctcgtggatctcgccggaagcgagcgtgccgattctacaggcgcgaaggggaccaggctgaaggaaggagctaatattaataaaagcctgaccaccctcggaaaagtgatctccgccctggcggaagtggataccagcaaaaaaaagagcaagaaaaagaaaaaaactgacttcattccttatagagactcagttctgacatggctgctacgggagaatcttggcggcaactctcggacagccatggttgctgcactgtccccagccgatatcaattacgacgaaacattatccactctgcgatatgctgacagggccaagcagatcaagtgtaatgcagtgatcaatgaggatcccaacgcgaagctggtgcgagaacttaaagaagaggtcacccgtctgaaagaccttcttagggcacaagggctgggagatatcattgacatcgaccctctgattgacgactatagcggcagcggatcaaaatatctcaaggacttccaaaacaataaacataggtatttgttagcatccgagaaccagagacccgggcactttagcactgcatccatggggtccttgacttcaagcccatcttcttgcagcctgagttcccaagttggtctaacctcagtaacaagtatacaggagcgcatcatgtcgacaccaggcggcgaggaagctatcgaaaggctcaaagaatccgagaaaattatcgccgagttgaatgaaacatgggaggagaagttgagaaagaccgaggcgatcagaatggagcgggaagctctcctggccgaaatgggagtggccattcgtgaagacgggggcaccctcggggtattctcccccaaaaaaacaccacatcttgtcaacctgaacgaggaccctctgatgtccgaatgcttactttattacatcaaagacggcattactagggtgggccaagctgacgctgagcggaggcaggacattgtcctatcgggagcccacattaaagaggaacactgtattttcaggtccgagcggtctaacagcggagaggtcatcgtgactctagaaccctgtgagcgaagtgaaacctacgtgaacggtaaacgggtttcccagccggtgcagctgagaagcggcaaccgcatcatcatgggaaaaaaccacgtcttccgcttcaaccacccagaacaggccagggccgagcgtgaaaagaccccttccgctgagaccccctctgagccagtggactggaccttcgcccaacgggagctcttggaaaaacaaggaatcgatatgaagcaagagatggagaagcgcctgcaagagatggagatactgtataagaaagagaaggaggaggctgacctccttctcgaacagcagaggttggattatgagagcaagttgcaagcccttcaaaaacaggtggagacacgttcactggcagcggaaactacggaagaagaggaagaggaggaggaagtgccctggacccagcacgagtttgagctagcccagtgggcatttcgcaagtggaaatcccaccaattcacctccctgagggacctactctgggggaatgccgtttacctgaaggaggcaaatgcaatttcagtagaattaaaaaaaaaggtgcaatttcagttcgtacttcttacagatactctgtacagtccattgccgcccgagctgctgcccaccgaaatggagaagactcacgaggacagaccgtttccgcgcacagtcgttgccgttgaagtgcaggatttgaaaaatggggccactcactactggtcactggaaaaactgaaacagagactcgaccttatgagagagatgtatgatagagccggggagatggctagtagcgctcaggatgaatccgaaaccacggtgacaggcagcgaccctttttacgatcgcttccattggttcaaactcgtgggctcctcgcccatcttccacggttgtgttaacgaaaggttggcagaccgcacacctagcccaaccttctctactgcagatagcgacatcaccgagctcgccgacgaacaacaggatgaaatggaagacttcgacgatgaggccttcgtcgatgacgccggttctgatgctggaacagaggagggctcagacttgtttagtgatggacacgacccattttacgatcggagcccttggttcattctcgtggggcgcgccttcgtgtacctgtccaacttactctaccccgtcccgctgatacatcgcgtggctattgtgagtgagaagggcgaagtccgaggtttcctccgtgtcgccgtgcaagcaatcgccgccgatgaagaagcgcctgattacgggtctggcattagacaatcgggaacagctaagatttcgttcgacaatgagtatttcaaccagtccgacttcagttccgttgccatgactaggtctgggctgtccttggaggagctgcgcattgtggagggccaaggccaatctagtgaagtaatcacccccccagaggagataagtcgcattaatgacttggacctgaaatccagtactttgctggatggcaagatggttatggaggggttctctgaagagattgggaaccacttgaaacttggctctgccttcacattccgggttaccgtgctgcaggccagtgggatactccccgaatacgccgatatattctgccagtttaattttctccatcgtcatgatgaagccttttccaccgagccactgaaaaataatggtagaggatcccccctggccttctatcacgtgcaaaacattgctgtcgagatcaccgaaagctttgtggactacatcaagacaaaacccattgttttcgaagtgtttggtcattaccagcagcaccctcttcacctgcaggggcaggaactgaatagccctccccagccctgccgaagattctttccaccacccatgccactgtctaaacctgtgcctgccacaaagttgaatacaatgtccaagaccagccttggacaatccatgtctaaatacgatctccttgtgtggttcgagatttccgagttagagcccactggcgaatacatccccgccgtcgtcgaccatactgccggtttgccatgtcagggcacatttctactgcaccaagggatccagcggcgcatcactgtgacaatcatccacgaaaaaggttccgagcttcattggaaggatgtgcgtgaactagtggtgggccggattagaaataaacccgaggtggatgaagctgcagtcgatgccattctgagcctgaatataatctcagccaagtatttgaagtctagccataacagcagtcggacattctaccggtttgaagccgtgtgggattcaagtttgcacaacagcttactgttaaacagggtaaccccttacggtgagaagatctacatgactctgtccgcttatctggaactagatcattgcatccaacctgcagtaattactaaggacgtctgtatggtgttctatagcagagatgctaaaatctctcctccccggtctctccggtctctattcggctccggctattctaaatctcctgactccaacagggtgaccgggatctatgagctttctctctgcaaaatgtcagataccgggtcacccggaatgcaacgcagaaggcggaagatacttgataccagcgtggcttacgtgcgcggagaggaaaacctggctggttggcggccaagaggggatagtctgatactggaacaccagtgggagctcgagaaactggaactccttcatgaagttgaaaagacacgacacttcctgctgttacgggagagactgggagacagcatacccaagtccctgtccgactctctgtcaccgtctctgtccagtggaaccctctctacgagtacaagcatttcctctcagatctctactaccacctttgagtctgccatcaccccctcagaatccagtggatatgattccggggacatcgaatcactcgtagacagagagaaagaactggcaacaaaatgccttcaactcctgactcacacctttaaccgcgaattcagccaggtgcatggaagtgtctctgattgcaagctatctgacatctcacctattggccgagatcctagcgagtccagtttttcttccgctacactcaccccttctagcacttgtccctctcttgtagattcacggtcaaatagcctggaccagaagactccggaggcaaacagtcgtgccagcagtccctgccctgagtttgaacaatttcaaattgtcccagcagttgagactccataccttgcccgggcgggcaagaatgaatttcttaacttagttccagacatagaggagatacggccctcttcagttgtctccaagaagggctacttacacttcaaggagccactgtacagcaattgggccaagcatttcgtcgtggtgcgtagaccatacgtgtttatctacaattccgataaagatcctgtcgaacgtggcatcatcaacctttccacggcgcaggtcgagtattccgaggaccagcaggcgatggttaaaactcccaacacatttgcggtgtgtacaaagcaccgcggggtgctgcttcaggccctgaacgacaaggatatgaacgattggttgtatgcctttaacccactcttagccggcacaatccggccaggtcacctggcttcagaaatcatacgggaggataagagcgtgagtttttcttgtcagtag

SEQ ID NO: 192423 - DNA, 5472 bp, synthetic construct
  misc_feature 1..5472: note = Description of Artificial Sequence: Synthetic coding sequence
  source 1..5472: mol_type = other DNA
atgagcggcgccagcgtgaaggtggccgtgcgggtgcggcccttcaattcccgggagacatctaaagagtccaagtgcattattcagatgcaggggaatagtacgtcaatcataaatcccaagaaccctaaagaggcccctaagagcttttcttttgattactcctactggtcgcatacaagccccgaggatccctgttttgcttctcagaaccgcgtttacaatgatattggtaaagagatgctgcttcatgcctttgaaggctataacgtctgcatttttgcatatggccaaacaggagccgggaaatcttatactatgatggggaaacaagaggagtcccaggccgggatcattccacagctctgcgaggaactgttcgagaagatcaatgacaactgcaacgaagagatgagctactcagtagaagtgtcatatatggagatctattgcgagcgtgtgagagacctgctgaatcctaagaacaaggggaacctgcgcgtcagagagcatccactgctgggtccctacgtggaggacttatcgaagctggctgtcaccagctacactgacatcgctgatttgatggacgctgggaacaaggccagaactgtcgctgccacaaacatgaacgagacctcttcacgctcccacgccgtgtttaccattgtgttcactcagaagaagcacgacaacgagacaaatctctccacagagaaggttagtaagattagtctggtggatctggccgggagcgaaagagccgatagcactggcgctaaaggcactcggctgaaagagggggccaacatcaataaatctctcaccacactgggaaaagtcatctctgctctggccgaagtggacaactgcacctcaaagagtaaaaagaaaaagaaaacggattttatcccgtatcgtgactccgtcttaacctggctcctgagagagaatcttggtgggaactcccgcactgccatggtagccgcactgtctccggcagatatcaactatgacgagaccctctcgactctgcggtacgccgaccgggcgaagcaaatcaagtgtaacgcagtcatcaacgaggacccaaacgctaagctcgtgcgagagctgaaagaggaagtaaccagactgaaagacctgcttagagcccagggactgggcgacatcatagacatcgacccattgatcgacgactactcaggttctggatcaaagtatctgaaggactttcagaataataaacaccggtaccttcttgcctctgagaatcaacgacccgggcacttctctaccgcgagtatgggttccctgacgtcctctccaagcagttgtagtttgtcctctcaggtaggtctgactagcgtgaccagcatccaggagaggattatgtctacacctggcggcgaagaggccattgagcggctgaaggagtcagaaaagatcatcgccgagcttaatgagacatgggaggagaagctgagaaaaactgaggccatccggatggagagagaagccctcttggctgaaatgggcgtggccatccgtgaggacggggggaccctcggagtattctctccaaaaaagacaccacacctggtgaacttgaatgaggacccccttatgtctgagtgcttgctgtactatattaaggatggcataactagagtaggccaagccgatgccgagagaagacaggacatagttctgtctggtgcacatattaaggaagagcactgtatttttagaagcgaacgatccaacagtggagaggtgatcgtgaccctggaaccctgcgagcgcagcgaaacttacgtcaatggaaagcgtgtgagtcagcctgtccagttgaggtctggtaatcgtatcatcatggggaaaaatcacgtattccgcttcaatcatcccgaacaggcgcgcgctgagagagaaaaaacgccctcagctgaaacacccagcgagcctgtcgattggacattcgcccaacgggaattgcttgaaaagcaaggcattgacatgaagcaggagatggagaaaagattgcaagaaatggaaatcctgtacaagaaggaaaaggaggaagccgaccttctactcgagcaacaacgccttgactatgagagcaaacttcaggcccttcaaaagcaggttgagactcggtccctcgccgcagagacaaccgaggaggaggaggaagaagaagaagtgccttggacacagcatgaattcgagctcgctcaatgggcatttcggaagtggaaatctcaccagtttacctcgctccgagacctcctctgggggaacgcagtgtatttaaaggaagcgaacgccataagtgtggaactcaagaagaaggtgcaattccaattcgtgctgctgaccgacaccctgtactcgcctctgcctcctgagctcttgcctacagaaatggagaaaacacacgaagaccgaccttttcctcgaacagtcgtcgccgtagaggtgcaggatctgaagaatggcgctacccattactggtctctagaaaagcttaaacaaaggctggatctgatgagggaaatgtatgaccgcgctggtgagatggccagctccgcccaagatgaaagcgaaaccacagttacagggtcagaccctttctacgatcgcttccattggtttaaactcgtaggcagctctccgattttccacgggtgtgttaacgagcgactggcggaccgcaccccttcacctacattttctacagcggactcggatattactgagttggccgatgaacaacaggacgaaatggaagacttcgatgacgaagcgttcgttgacgatgccgggtccgatgccgggaccgaggagggttccgatcttttcagtgacggccatgacccattttacgaccgttcaccttggtttatcttggtaggtagggctttcgtatatctgagcaacctgctctatcctgtgccactcatacacagggtggccattgtctccgagaagggggaggtccggggatttctaagagttgccgtccaagctatcgccgcagatgaggaggcccctgattatgggtccggaattaggcagagtgggaccgcaaaaatcagcttcgataatgagtacttcaatcaaagtgatttttcatctgtcgctatgacgcgttctggtctcagcctggaagagctacgcattgtggagggacaagggcagtcttccgaggtgattactcccccagaggaaataagccgcattaatgacctagacttgaaatctagcactctgttagacgggaaaatggtgatggagggcttcagcgaggagataggaaaccatcttaaactgggcagtgccttcaccttcagggtgaccgttctgcaggccagcggcatcttgcccgagtatgcagacattttctgccagtttaattttttgcatcgacatgacgaggccttttcaacagagcctctgaaaaataatggaagagggtcacctctggccttttatcatgttcagaacattgctgtggagataacagaaagctttgttgattatatcaagacaaagccaatcgttttcgaagttttcggtcactaccagcagcaccctctccaccttcagggtcaagagctgaatagtcccccgcaaccctgtcggaggtttttcccaccaccaatgccactgtcaaaacctgtgcctgccacaaagcttaatactatgagcaagacctctcttgggcagtcaatgtctaagtacgatttgttggtatggtttgagatatctgagcttgaaccaacgggcgaatatattccagctgtcgttgatcacacagctggtctgccctgccaggggacttttctgctgcaccaggggatacaaagaagaatcacagtgacgatcatccatgaaaaggggtctgaactccactggaaagacgtgcgggagttggttgtgggccgcatacgaaataagcctgaagtcgacgaggccgccgtcgatgcaatcctcagtctcaacatcatctcagccaaatacctgaagagcagccataattcttcacggaccttctataggtttgaggcagtatgggatagctccctccataatagcctgctcctgaaccgtgtgactccctatggtgaaaagatctacatgacactttccgcatatctcgagctcgatcactgcattcagccagccgtgatcactaaagacgtttgcatggtattctacagccgagatgctaaaatctcacctcctagatcactgcggagcctgtttggttccgggtactcaaaaagccctgacagcaatagggtgactggcatctatgaattatcgctctgcaagatgtcagacacgggaagcccaggcatgcagaggagacggcggaagattctggatacgtctgtcgcctacgtccgaggcgaagagaatctggctgggtggcgcccacggggagattccctgatcttagaacaccagtgggagttggaaaaactcgagttgctccacgaagttgagaaaacacgtcacttcttgctgctgcgagagcgacttggcgatagtattccaaagtcgttgtctgactctctgagcccttccctctcatccggtacactgtcaacatctacatcaattagttctcagatcagtactacaacctttgagagtgccatcacccccagcgagagttcgggatacgactctggagatatcgaaagcctcgtggatagagaaaaagaactcgccaccaagtgcctgcagcttctgacgcatacattcaaccgggagttcagccaggtgcacgggtcggtctccgactgtaaactctcagatatcagccccatcggacgcgatccaagcgagtcctcatttagctccgctacactcacaccatcatcaacgtgcccgtcgttggtggattcccgctcaaattccttggaccagaagactccggaggccaacagccgagcttcgtccccttgtccagaatttgagcaattccagattgtgccagcagtcgagaccccgtacctcgcacgcgccggtaaaaatgaatttttgaacctagtccctgatatcgaggagattagacccagcagcgtagtgtccaagaagggttatttacactttaaggaaccgctctacagcaactgggctaaacatttcgtggtagtacggagaccttacgtctttatctacaactccgataaggaccctgttgagcgggggattattaacttgtcgacagcccaggtggagtactctgaggatcagcaggcaatggtgaaaacccccaatacgttcgccgtttgcacaaaacatcggggcgtcctgctgcaagccctaaatgacaaggacatgaacgattggctgtacgcatttaacccactgctcgcaggaacgattcgtcccggacatttggcctctgagataatcagggaggacaagtcagtttctttttcttgccagtag

SEQ ID NO: 192424 - DNA, 3462 bp, synthetic construct
  misc_feature 1..3462: note = Description of Artificial Sequence: Synthetic coding sequence
  source 1..3462: mol_type = other DNA
atgagcggcgccagcgtgaaggtggccgtgcgggtgcggcccttcaacagcagggagactagtaaggagagcaaatgcattatacagatgcaaggcaactctacttcaatcataaatccaaaaaaccccaaggaggctcccaagagcttcagcttcgactattcttattggtcacatacaagccccgaggacccctgcttcgcgtctcaaaacagagtgtacaacgacataggcaaggaaatgctgctccacgctttcgagggatacaatgtgtgtatcttcgcatacggccaaacaggggccggcaaaagctacactatgatgggcaagcaggaagaatctcaggcaggaatcataccccagctgtgcgaggaactgtttgaaaagataaatgacaactgtaatgaggagatgagttacagcgttgaagtgagctacatggagatctattgcgagagagtccgagaccttctgaatcccaaaaacaaaggcaacctgagagttcgagagcatcccctacttggtccttacgtggaggatctcagcaaactggcagtgacaagctacaccgacatcgcagacctaatggacgcaggcaacaaggcaagaaccgtcgccgctactaacatgaacgagacctcctcccgctctcacgcagtgttcaccattgtgttcacacaaaagaagcacgacaacgagacaaatttgtccacagaaaaggtcagcaagatctccctagtggacctggccggcagtgaacgggcggattcaaccggcgcaaaaggaacccgtttgaaggagggagcaaacatcaataaatcattgaccaccctcggtaaagttattagcgctcttgcagaggtgagcaaaaagaaaaaaaaaaccgacttcattccctatcgggatagtgttctgacgtggttgctgcgagaaaatttaggcgggaatagtcggaccgccatggtggccgcgttatcaccagccgacattaactatgacgagacactgtccactctccggtatgccgatcgggccaagcaaatcaagtgtaacgctgttattaacgaagatcccaatgcaaaacttgtccgggaactgaaggaggaagtaacgagactgaaagacttgctgagggcgcagggcctcggtgatataatagacactagtatggggtcactgactagctctcccagttcctgctcactctcttcccaggtgggtctgacatctgtcaccagtattcaagaacgtatcatgagcactcctggcggcgaggaagccatagagcgcttgaaagaaagtgaaaaaatcatcgcagagctcaacgagacgtgggaggaaaaactgaggaagactgaagctattaggatggagagggaagctctattggctgagatgggggtggcaattcgagaggatgggggtacgctgggggtgttctcacccaaaaaaaccccccacctcgtgaatctgaatgaggatcctctcatgtctgagtgcctcctctattatattaaggatggcattaccagagtgggacaagcggatgcagagcgaagacaagatatcgttttaagtggtgcccacattaaggaggagcactgtatctttaggagtgagaggagcaactccggggaggtgatagtgacgctagaaccttgtgagcgatccgaaacctatgtgaatggcaaaagagtcagccagcccgtgcagctccggtcaggtaaccgcattatcatgggcaagaatcacgtgtttcgcttcaaccacccagagcaagctagagccgagagagaaaagaccccatccgcagaaaccccgagtgagccggttgactggacctttgctcagcgggagctcctggaaaaacagggtatagatatgaaacaagagatggagaagcggctgcaggagatggaaatcctatacaagaaagagaaggaggaggcagacctcctcctagagcagcagcgtttggatgccgactcggattccggtgacgactccgataagagatcatgcgaggaatcttggaagctgatcacctcattgagggagaagctcccaccatctaagctgcagacaatagtgaagaagtgtggtttgccttcaagcggcaagaaacgggaacctatcaaaatgtaccagattccacagagacgacggctgagtaaagactcaaaatgggtgacaatcagtgacttgaaaattcaagccgtcaaggagatttgctacgaagtcgccttgaacgatttccgtcattctcgccaggagattgaagctctcgctattgtaaagatgaaagagttatgcgccatgtacggaaagaaggacccaaacgaaagagacagttggcgagcggttgctcgagatgtttgggacactgttggggtgggtgacgaaaagattgaggacgttatggccaccggtaagggctccaccgacgtggacgatctgaaggtgcatatcgacaaactggaggacattttgcaagaggtgaaaaagcagaataatatgaaggatgaggagatcaaggtcctgcgcaacaagatgctaaaaatggaaaaggtgctgcctctcatagggagccaagagcagaaatctccaggcagccacaaggcaaaagaacctgtgggggctggcgtgagcagcaccagcgagaacaatgtctcgaaaggcgacaatggggaattggccaaagaagagcgagtatctcagttgatgaatggggatccggcctttcggagaggtcgcctcaggtggatgcggcaggaacagatccgattcaaaaatctgcagcagcaggagattaccaaacagctgagacgccagaacgtgcctcacaggtttatcccaccagagaacaggaaaccaaggtttcctttcaaatctaatcccaaacacagaaacagctggtctcccggcactcacatcatcataacagaggacgaggttatcgagctgagaattccgaaggacgacgaggcgcgcaaaggcaacaaggaggagagtcaggaaaaggggggcaagggcgccttcaaggatccccagttcccatggggctcccaggggatgcgatcccaggaccacatccaggtgtctaagcagcatatcaacaaccagcagcaacctccccagcttcggtggaggagcaacagcttgaataacggacaacctaaatccacaaggtgccaggcatctgctagtgcggaatctttaaattcacattctggccacccgacagccgatgtgcagacatttcaagctaagagacatatccaccaacatagacaatcgtattgcaattacaacactggcggtcagctggagggcaatgctgccacgtcctaccagaagcagactgacaagccttcgcattgcagccagttcgttacacctccaagaatgcgtcgacaattcagcgcccccaacctcaaagccggaagagagactacggtatag

SEQ ID NO: 192425 - DNA, 5451 bp, synthetic construct
  misc_feature 1..5451: note = Description of Artificial Sequence: Synthetic coding sequence
  source 1..5451: mol_type = other DNA
atgagcggcgccagcgtgaaggtggccgtgcgggtgcggcccttcaattcacgcgaaacatccaaggagtcaaaatgcatcattcagatgcaggggaatagtacttcaattatcaatccgaaaaacccgaaagaagctccaaagagcttttcttttgattacagttactggagtcacactagccccgaggacccttgtttcgcctctcaaaaccgcgtgtataacgatattggtaaagagatgctcctacatgcgttcgagggctataacgtgtgcatatttgcatatggacagactggagccggcaaaagctatacaatgatgggcaaacaagaggagagtcaagctggcatcatcccacagctatgcgaggagctcttcgagaagattaatgataactgcaatgaggagatgtcatatagcgtggaggttagctacatggagatttactgcgagagagtacgcgatctcctgaatccaaaaaataaaggaaacctgcgggtccgtgaacatcccttgttgggtccttatgtggaagatttgtccaagctggcagtgacctcttacactgacatcgcagacctgatggacgccggcaacaaggcacgcaccgtggcagctactaacatgaacgagacatcctctcgctcccacgccgtcttcacgattgtattcacacagaagaaacacgataatgagacgaatctgagtaccgagaaggtctcaaagattagcttggtggacctggcaggaagcgagagagctgattcaaccggagccaagggcacccgattgaaggagggagctaatatcaacaagagtctgacgaccctcggaaaggtgatttccgcactggcggaagtcgataattgtacatccaagtccaaaaaaaagaagaaaactgacttcatcccatatcgtgattccgtcctcacgtggctgttgcgagagaatctcgggggaaatagcaggaccgcgatggtggccgccttaagccctgccgatattaattacgacgaaaccctgtcgacactgagatatgctgatagagcaaagcaaatcaaatgcaatgctgtcattaacgaagacccgaatgctaaattggtgcgggaactgaaagaagaagtgactaggttgaaggatctactccgggctcaggggctgggagacatcatagatatcgatcctttgatagacgactacagcgggtctggaagcaaatacctcaaggatttccaaaataacaaacaccggtacttgctcgcatctgagaaccaacgtcctggacacttcagtaccgctagcatgggcagcctgacctctagtccaagcagttgctccctgtcatctcaagttggtttgactagtgttacctccattcaggaacggataatgtctacgcctggaggggaagaggcgatagaacgtctgaaagaaagcgaaaagatcatcgctgagttaaatgagacctgggaagaaaagctgaggaaaacggaggcaatccggatggaaagagaagcccttttggcagagatgggtgtcgctatccgagaggatggtggaacccttggggtgttctctccaaagaagaccccacatctagttaatttgaacgaggaccctttgatgagcgaatgtcttctgtactacatcaaagatggcatcactcgtgttggacaggcggatgcagaacgccgccaggatattgtgctgagcggggcccatataaaggaagaacattgcatcttccgctctgaacggtccaacagcggagaagtgatcgtgacgctggaaccttgtgagcggtccgagacctatgtgaatgggaaaagagtttcccagcctgttcagctccggtcaggtaaccgtattattatgggcaagaaccatgtctttcgctttaatcaccctgagcaggcccgagctgagagggaaaagaccccatccgccgagactccaagtgagcccgtggattggacattcgctcagcgggaactcctcgagaagcaagggattgatatgaagcaggaaatggagaagagactccaagagatggaaatcttgtacaagaaggagaaggaggaagctgacctcctattggagcaacagcgcttagactacgaatccaaactgcaggcactgcagaaacaggtagaaacaagatcactggctgccgaaacgactgaggaggaggaggaggaggaggaggtcccttggactcagcacgagtttgaacttgctcagtgggcatttaggaaatggaagtctcatcagtttacttctttaagagatctgttgtggggcaacgccgtttacttgaaggaagctaatgctatatccgtggaattgaagaaaaaagtgcagttccagttcgttctgctcacagacaccctgtactccccattgccccctgagcttttgccgacagagatggagaagactcatgaagaccgaccttttcctcggaccgtcgtggcggtggaggttcaagacctgaagaacggtgctacgcattattggtcactcgagaaattgaagcagcgcttagatctgatgcgcgagatgtacgaccgggctggggaaatggcatcctctgctcaggacgagtccgaaactactgtgaccggcagcgatcctttttacgaccggtttcattggtttaaactcgtcggcagtagtcctatcttccacggctgcgtgaacgagcggcttgccgatcggacaccttcccccaccttcagcacagcggattccgacattaccgaactggcagacgaacagcaggacgaaatggaggattttgatgacgaagcctttgtcgatgacgccggcagcgatgcaggcacagaggaaggctccgacctattctccgacggtcatgatccattctacgacaggtctccctggtttatcctcgtgggccgggcatttgtctacctgtctaaccttctctacccagttcccttgattcaccgcgtcgctatcgtgagtgagaaaggagaggtgcggggtttcctcagagtcgctgttcaggcgattgccgctgacgaggaggctcctgattatgggagtggaattcggcagtccggaaccgcaaagattagttttgacaatgaatatttcaatcagtcagacttcagtagcgtcgccatgaccaggtcagggctatctcttgaggagctgagaatagtagagggacaagggcagtcgtcagaagtcattactccgccagaggagatttctcgaattaacgacctagacctaaaaagtagcacccttttagatggcaaaatggtcatggaaggtttcagcgaagaaatagggaatcatctcaagctgggcagcgcctttactttcagagtaactgtgctccaggcctctggcatactaccggagtacgcagatatcttttgccaatttaatttccttcacaggcacgacgaggccttctctacggagccgttgaagaacaacggtcgcggctccccactggctttctaccacgtccagaacatcgcagtagaaatcacggagagctttgtggactatattaagacaaaacccatcgttttcgaagtcttcgggcactatcagcagcaccccctccaccttcagggacaggagctcaatagcccaccccagccttgccgaagattctttccaccccccatgccgctaagcaagccggtccccgcaacgaagcttaataccatgtccaagacttcattggggcagtctatgagcaaatatgacctgttggtgtggttcgagatctccgaacttgaacccactggggaatatataccagccgtggtggaccatactgcaggcctgccctgccagggtacgttcttactgcatcagggcatccaaaggcgtattacagtcacaataatccatgagaagggaagcgagttacactggaaggacgttcgcgaactcgtggtgggtcgaatccgaaacaaacccgaagtggatgaggcagctgttgacgccatcctaagcctgaacattatcagtgccaagtatctgaagagcagccataactcctcacgcactttctatagatttgaggccgtttgggactcttccctgcacaatagcctgctgctgaatagagttaccccatacggagaaaagatctacatgacactctcagcgtatctcgaactggaccactgtattcagcccgctgtcataaccaaggacgtgtgtatggttttctattcccgggacgccaagatcagtccaccccgcagcctgaggtccctgtttgggtctggatactccaagagcccggactcgaatcgagtcaccgggatatatgagctctcactttgtaagatgagtgatactggatccccaggaatgcagcgtaggcggcgtaaaattttggacacttccgtggcttatgtcagaggtgaggaaaacctcgccggatggcgcccacggggggactcattaattctcgaacatcagtgggagctcgagaagctggaactactgcacgaagtggagaagaccaggcatttcttattactgagggagcgcctgggcgattcgattcctaagtccctatcagatagcctatcgccctccttgtcttcaggcacactctcaacttcgacaagcatctcaagccaaattagcaccacgaccttcgaatccgccatcactcctagtgagtcgtccggctatgactcaggagacattgaatctctggtggacagagaaaaggagttggctactaaatgcctccagttactgacacatactttcaaccgggaattttcacaggtgcatgggtcagtgagtgactgtaaactcagtgatatctctcctattgggagggacccatccgagtctagctttagtagcgcaacactgactccttcatcaacgtgcccatccctcgttgatagtaggtctaattcgctggatcagaagacaccggaggccaactcgcgcgcaagtagcccctgcccagagtttgagcaattccagattgtcccagctgtggaaaccccttacctggcacgggccggaaaaaatgagtttctgaatctcgtccccgacatcgaggagataagaccatcatctgtcgtgtccaagaaaggatacctgcatttcaaagaacccctgtattcaaactgggctaagcactttgtggttgtgaggaggccctacgtgttcatctacaacagcgacaaggacccagtggagcgagggatcattaacttaagtacagcccaagttgaatattccgaggatcagcaggccatggtcaaaactccaaacaccttcgccgtatgcactaaacatcggggagttctgctgcaggctctcaacgataaagacatgaatgattggctgtatgcgtttaaccctctgctcgccggtacaatcagatctaagttgagcaggcgctgcccttctcagtccaaatactag

SEQ ID NO: 192426 - DNA, 3462 bp, synthetic construct
  misc_feature 1..3462: note = Description of Artificial Sequence: Synthetic coding sequence
  source 1..3462: mol_type = other DNA
atgagcggcgccagcgtgaaggtggccgtgcgggtgcggcccttcaattcccgcgaaaccagcaaggagtcaaagtgcatcattcagatgcaaggcaactcgacgtccataattaaccccaagaatcccaaggaggcccccaagagcttcagctttgattactcttattggtcacacacatctcccgaagacccctgcttcgctagtcagaacagggtctataacgacatcggcaaagagatgctgctgcatgcatttgaagggtataacgtatgcatctttgcctacggtcaaaccggagctggcaagtcatacacgatgatgggaaaacaggaagagtcacaagcgggcatcataccacagctctgcgaggagctgttcgaaaaaatcaatgataattgcaacgaagagatgtcttactcagtagaggttagctatatggagatctactgtgaacgggtgagggatcttctgaatccaaaaaataagggcaaccttcgagttagggagcatcctctgttggggccttacgttgaagacttgtcaaaactggcagtcacctcttatacagatatagcagatctaatggacgctggaaacaaagctcgaacagtcgcagctacgaatatgaacgaaactagcagtaggagtcatgcggttttcacaatagtattcacacagaaaaaacatgacaacgagactaatctgtcgaccgagaaagtctccaagatttcattagtcgatctggccggctctgaacgagccgactctaccggtgccaaggggacaaggctgaaagagggagccaatattaacaaaagccttaccacgctgggtaaggtgatctcagcgttggccgaagtgagcaaaaaaaagaaaaaaactgactttattccttatagagatagcgtcctgacctggctgctaagagaaaatctggggggaaactctcggacggccatggtagccgcactgagtccagctgatattaattatgatgagacactcagcactttacgttatgccgatagggccaagcagattaagtgtaatgccgtaatcaacgaagatccaaatgccaaattggtaagggagcttaaagaagaggtcaccaggttgaaggacctgctgcgggcccagggcttgggcgatatcatcgacacttctatggggagtctcaccagttcaccttcaagctgctctctatcctcccaggtaggactgacgtctgtgacttccatccaggaaagaatcatgagcacccctggaggagaggaagcaatcgagcgactgaaggaatcagagaagattattgcagagttgaatgagacatgggaagagaaactaaggaagaccgaggctatccgcatggagagagaggcactcctggccgagatgggggtcgcgatccgcgaggacggaggcaccctgggcgtgttctctccgaaaaaaacacctcacctggtgaatctgaatgaggaccccctgatgtctgaatgtcttctgtattatatcaaggatggcatcacccgggtcgggcaagctgatgcagagaggcgccaggacatcgtactttctggagcacatataaaggaagaacactgtatcttcaggtcagagcgcagcaactctggcgaagtcattgtcacattggaaccatgcgagagatccgaaacttatgtgaatgggaaacgcgttagccagcctgtccagctcaggagcggaaatcgcatcatcatgggaaagaatcatgtatttcggttcaatcacccagagcaagccagggctgaaagagagaagacccccagcgcagagacgccttccgaacccgttgattggacgtttgcacagcgggaactgctggaaaaacagggtatcgacatgaaacaagagatggaaaaaaggctgcaggagatggaaatactgtacaagaaggagaaagaagaagcagacttgctgctcgagcagcaacgcctggacgctgactctgacagcggtgatgacagcgataagaggtcctgcgaagaaagctggaaactaattacatctctgcgcgagaaactccccccaagcaaactacagacaattgtgaagaaatgtggactgccttcaagcggcaagaagcgggaacctattaaaatgtatcagattccccagcgccgccggctttctaaagatagcaaatgggtaacaatctcagatttaaaaatccaagccgtgaaagagatatgttacgaagtggctttaaatgatttccgccacagccgtcaggagatcgaagcactggcaattgtgaagatgaaggaactgtgtgctatgtatggcaaaaaggaccctaacgagagggatagctggagggcagtcgctagagacgtgtgggacacagttggtgtgggcgatgagaaaatcgaggatgtgatggccaccggcaagggatcaacagacgttgatgacctcaaggtgcacattgataagttggaagatattctccaggaggtcaaaaagcagaacaatatgaaagacgaggaaatcaaagttctacggaataagatgctcaagatggagaaagtcctgcctctgattggctctcaggagcaaaaatcacccgggagccacaaggctaaggaacccgtaggggcaggtgtgagtagtacgtcagaaaacaacgtttcaaaaggggacaacggcgagctagccaaggaggaacgcgtgtcccaactgatgaacggagatccggcgttccgtcgcggtagattaagatggatgaggcaagagcagatccgctttaagaatttacagcagcaggaaatcaccaagcagctgcggcgccagaacgtccctcataggtttatcccaccagagaataggaagccccgattcccttttaaaagtaaccccaaacacagaaacagctggtcccccgggacgcacatcattattacagaggatgaggtgatcgagctgcggatcccaaaggatgatgaagcccggaaggggaacaaagaggagagccaagagaagggtgggaagggtgcgttcaaggacccgcagttcccttgggggagccagggcatgaggtctcaggatcacatacaagtctctaagcagcatattaacaaccagcagcaacccccccagctgcggtggcgctctaatagcctgaacaatggacagccgaagagcacacggtgtcaggccagcgcgagcgcagaaagtctgaattctcactcggggcatccaaccgctgatgttcagacgttccaggcaaagcgtcacatacatcagcaccgccagtcctactgcaactataatacagggggtcaattggagggcaatgccgctacttcataccagaaacaaactgacaagccctcccattgttcacagtttgtaacgcccccgagaatgcgccggcagttctcagccccaaatttgaaagccgggagagagacaaccgtgtag

SEQ ID NO: 192427 - DNA, 2673 bp, synthetic construct
  misc_feature 1..2673: note = Description of Artificial Sequence: Synthetic coding sequence
  source 1..2673: mol_type = other DNA
atgagccagggcatcctgagcccccccgccggcctgctgagcgacgacgacgtggttgtgagtcctatgtttgaatcaaccgccgcggacctggggagcgtggttcgcaaaaatttgctctccgattgttccgtagttagtacatccctggaggataagcaacaggtgccctcggaggactccatggagaaggtaaaggtgtacctgagagtccgaccgcttctaccttccgagctcgaacgtcaggaggatcagggatgtgtgagaattgaaaatgtagagaccctggtgctgcaggcacctaaggattcttttgctttaaagagcaatgagcggggcataggtcaggctacacataggttcacattttcacaaatctttggccctgaagtggggcaggcttcattttttaatcttactgtcaaggagatggtgaaagacgtccttaagggtcagaattggctgatttatacctatggagtaactaatagtgggaaaacacataccatccagggcacaatcaaagatggggggattctccccaggtcactggccctgatatttaactcactgcagggacagctgcaccctacacccgacctgaaaccgctgctctccaatgaagtgatctggctcgatagcaagcagatccggcaggaagaaatgaaaaagctgagtctgctgaacggcggcctgcaggaagaagagcttagcacatccctcaagcggagcgtttacatcgagagccggatcggcacctccacttccttcgactctggcattgccggattaagtagtatatcccagtgcacatcatcttcgcaactggatgagacttcacacaggtgggcccagcccgataccgctcccctccccgttccagctaatatcaggttctctatatggatcagtttcttcgaaatttataacgagttgttgtatgacctcctggaacccccctcacaacaacggaagcgccagacacttcggctctgcgaggaccagaatggaaacccctacgtgaaagacttaaattggatccatgtgcaggacgccgaagaggcttggaagctccttaaggtgggaagaaagaaccaaagctttgcgtccacacacctgaatcagaattcaagccgatcccacagtatcttcagcatccgtatccttcacctacagggtgagggcgatatcgtgcctaaaatcagcgagcttagcctgtgcgacctggcaggatctgagaggtgcaaggaccaaaaaagtggagagcggctgaaggaagcgggaaatataaatactagcttgcatactttaggtagatgtattgccgcgttaagacagaatcagcaaaaccgctccaaacagaatctggtgccgtttcgcgattctaaactgacccgggtctttcaaggatttttcacaggccggggaaggtcgtgcatgatcgtgaatgttaacccctgtgccagcacttacgacgaaaccctccatgtggctaaattttctgcgatcgcatctcagttggtgcatgcaccacccatgcagttgggatttccgtccctacactcctttatcaaagaacactcactgcaggtaagtccgtctcttgagaaaggtgccaaggccgataccggcctggatgacgatattgagaacgaggctgatatcagcatgtatggcaaagaggagcttctgcaggtggttgaggctatgaagactctgcttctaaaggaaagacaggagaagctgcagctcgagatgcacctgagggatgaaatctgtaacgaaatggtggagcagatgcagcagagagagcagtggtgcagcgagcacttagacacccagaaggaactgcttgaagaaatgtatgaggagaagctgaatattctgaaggaatcactgacaagcttttaccaggaagagatccaggaacgggacgagaaaatagaagaactcgaggcgcttttgcaggaagctagacagcaatctgtcgctcatcagcagtctggatcagagctcgccttacgcagatcacaacggctggcagcctcagcttccacacagcagctccaggaggtgaaagccaagctgcagcagtgcaaagctgagctgaatagcaccacagaagagctacacaagtaccagaaaatgctggagccacccccctctgccaaaccgttcaccattgatgtggacaagaagctggaagaggggcaaaagaatatccgtttactgaggacagagctccagaaacttggggagtctctccagtccgcggaacgagcatgctgccactctaccggagcaggaaaactgaggcaagccttgactacttgcgatgacatcctcattaaacaggatcagacactggcagagctgcagaataacatggtgcttgtgaaacttgacctgaggaagaaagccgcgtgcatagccgaacaataccataccgttctgaagttgcagggccaggtctctgccaagaaacgcttgggcactaaccaggagaaccagcagcctaatcaacagccacctgggaaaaaaccctttctgcgcaatctcttgccgaggacccctacctgtcagagttccactgattgctcaccttacgcacggattctgaggtctcggcgctctccgctgctgaagtccggccctttcggaaaaaaatactag

SEQ ID NO: 192428 - DNA, 678 bp, synthetic construct
  misc_feature 1..678: note = Description of Artificial Sequence: Synthetic coding sequence
  source 1..678: mol_type = other DNA
atgagccagggcatcctgagcccccccgccggcctgctgagcgacgacgatgtggttgtctctcccatgtttgaaagcactgcagccgacctaggatctgtagttcggaagaacctgctttctgactgctcagtggtaagcacatctctcgaagataagcaacaggttccctctgaagatagtatggaaaaggtcaaggtctatctgagagttagacctctcctcccctcagagctggagagacaggaggatcagggttgtgtgaggattgagaacgtcgagaccctggtcctgcaagcaccaaaagacagctttgccttgaagagcaatgagaggggtattggacaggcaacacaccgcttcaccttctctcagattttcggacctgaagtgggtcaggctagctttttcaatctgaccgtgaaagagatggttaaagacgtgctgaaggggcagaattggctcatatatacctacggagttaccaactctggaaaaactcacacaatccagggaaccatcaaagacggtgggattcttccccgatctctcgctctgatcttcaattccttgcagggccagctgcacccaacaccggatctgaagcctctgttatccaacgaggtgatttggctggatagcaaacagataagacaggaagaaatgaaaaagctgtag

SEQ ID NO: 192429 - DNA, 2619 bp, synthetic construct
  misc_feature 1..2619: note = Description of Artificial Sequence: Synthetic coding sequence
  source 1..2619: mol_type = other DNA
atgagccagggcatcctgagcccccccgccggcctgctgagcgacgacgacgtagtagtctctccaatgttcgaatctactgccgccgatctggggagcgtggtccgaaagaatttgcttagtgattgctcagtggtgtcaacctcattggaagacaaacagcaggtcccaagcgaggattcaatggaaaaggaggatcaggggtgtgtgcggatcgaaaacgttgaaaccctcgtccttcaagcccctaaggactcatttgcccttaagagcaatgagcgaggaatcggacaggccacacatagattcactttttcacagatatttggtcctgaagtgggccaggcctcttttttcaatctgactgtcaaggaaatggtaaaggatgtgctgaaaggacagaactggctgatttacacatatggggtgacaaactccgggaaaacacacacaattcagggcactatcaaagatggcggtatcctgcccagatctctcgcgctgattttcaattctctgcagggtcagctccaccccactccagatcttaaacctctcctttctaacgaggttatatggctggactccaaacagatcaggcaggaagagatgaaaaaattgtctttattaaacggcggccttcaggaggaggagctgagcacttccctcaagcgcagcgtttacatcgagagtaggatcggaacttctactagtttcgattctggcatcgcagggctctcgtctatatcccagtgtacaagtagctcacagctagatgaaacatcccatcggtgggctcagccagacacagcaccactgccagtgccagctaacatccggttttcgatttggatttcattttttgaaatctataatgagctgctgtatgaccttcttgagcccccctcacaacagaggaagcgtcagaccttgaggctgtgtgaggaccagaacggaaatccctacgtgaaggacctgaactggattcacgtccaggacgccgaggaggcttggaagttgttaaaggtggggagaaaaaatcagtcctttgcttctacacacctcaaccagaactcatcaagatcccactccattttttcaatacgcatactgcatcttcagggagagggggatattgttcctaaaatcagcgaactgagcctttgcgacctggctggatcagagcgatgtaaggaccagaaatccggcgagcggctaaaagaggccggcaacatcaatacctcgctgcacactcttggaaggtgcatagccgcactgagacagaatcagcaaaaccgatctaaacagaatttggtgccctttagagactcaaagctgactagagttttccagggattctttacaggccgggggagaagctgcatgatagtgaacgtgaatccttgtgccagtacatacgacgagactcttcacgtggctaaattttccgccatcgcgagtcagttagtgcacgctcctcccatgcaacttggatttccttccctccattccttcataaaagagcacagcctgcaggtgtctccatccctggaaaaaggggccaaagcagatacggggctggatgatgatatagagaacgaggccgacatttcaatgtatggtaaagaggagctcttgcaggttgtcgaagcaatgaaaacccttctcttaaaagaaaggcaggagaagctccaactggaaatgcacttacgcgacgagatctgtaatgaaatggtggaacagatgcagcaacgcgaacaatggtgtagtgagcacttagacactcagaaagagctcctggaagagatgtacgaagagaaacttaatattcttaaggagtcacttacctccttttatcaggaggagatccaggaaagagatgaaaagattgaggaactggaagcccttttacaggaagcccgacaacagagtgttgctcaccagcagagtggatcagagctggcccttcgaagatcgcaaaggctggcagccagtgccagcacccagcagttacaagaagtcaaagcgaagttgcagcagtgcaaggctgagcttaactccacaaccgaagaactccataagtaccaaaagatgctggagcccccgcctagcgctaaacctttcaccattgacgtggataagaaattggaagaagggcagaagaatataagactacttcggactgagctgcagaaactaggcgaatcactgcaatccgccgagagagcgtgctgccactccacgggcgcgggaaaactgcgccaggccttgactacatgcgatgacatcctcatcaaacaggatcagacactggcagaacttcagaataatatggtgcttgtgaagctggatctccgtaagaaggccgcctgcattgccgagcagtatcatacggtcctgaagttacaagggcaagtgtcagccaaaaagagattgggaactaatcaggagaatcagcagcctaaccagcaacctccaggtaaaaaaccattcttaagaaacttgctgcctaggactcctacgtgccagtcatcaacagactgttctccatacgcacggatcctcagatcacggcgctcaccactgctgaagtcaggcccctttggaaagaaatactag

SEQ ID NO: 192430 - DNA, 480 bp, synthetic construct
  misc_feature 1..480: note = Description of Artificial Sequence: Synthetic coding sequence
  source 1..480: mol_type = other DNA
atgagccagggcatcctgagcccccccgccggcctgctgagcgacgacgacgtcgtcgtaagccctatgttcgagagcactgcggccgatcttggatcagtggttcgtaagaatctattatctgactgcagtgttgtaagtacatccctcgaggataaacagcaggtgccctccgaagacagcatggagaaggtcaaggtatacctgcgtgtgcggcccttgctgccttcagaactcgaaaggcaggaggaccaggggtgcgtccggatagagaacgtggagacactggtgctgcaggctcccaaagatagctttgcccttaagagcaatgaaagaggcatcggccaggcaactcaccggtttaccttctcacagatttttggtcccgaagtgggacaggcttccttttttaacctcaccgttaaagagatggtgaaggatgtcttaaaagggcaaaattggctgatatacacttactag

SEQ ID NO: 192431 - DNA, 4884 bp, synthetic construct
  misc_feature 1..4884: note = Description of Artificial Sequence: Synthetic coding sequence
  source 1..4884: mol_type = other DNA
atgctgggcgcccccgacgagagcagcgtgcgggtggccgtgcggatccggccacagcttgctaaagagaagatagagggttgccacatatgtacttcagtgacacccggcgagccgcaagtgtttcttgggaaagataaagcattcacattcgactacgtctttgacatcgattctcagcaagaacagatctatatacaatgcattgaaaaattgatagagggctgctttgaaggatacaatgcaacagttttcgcatatggacagaccggtgccggaaagacttacaccatgggtacggggttcgacgtgaacattgtcgaagaagaactcggtattatctcgagagcagtgaaacacctcttcaaatcaattgaggagaagaaacacatcgccattaaaaacggcttgcctgccccagacttcaaggtcaatgcgcagtttttggagctgtataacgaggaggttctggatttgttcgatacaacacgcgatatcgacgcaaaatccaagaagtcaaacattcgtatccacgaggacagcaccggcggaatttatacggtaggtgtgaccacaaggactgtaaacaccgagtctgaaatgatgcagtgtctgaagttgggagctctgagcaggacaaccgcctcaacgcagatgaacgtgcagagttcgagaagtcacgcgatcttcacaatacatgtttgtcagactcgggtctgcccacagattgacgctgacaacgcaactgataataagatcatttctgagtccgcccagatgaatgagtttgaaaccctgactgccaaatttcacttcgtagaccttgctggctctgaaaggttaaaaagaacgggtgccaccggcgaacgcgctaaagagggaatttctatcaattgcgggttgcttgccctgggcaatgtgatttctgcactaggcgacaaatcaaagcgcgccacacacgtgccctaccgggatagcaagctgaccagactgctccaggactccctgggcggaaacagtcagacaatcatgattgcatgtgtctccccttccgaccgcgatttcatggagaccctcaacacccttaagtacgcgaaccgagcacggaatattaagaacaaggtgatggtcaaccaggacagagctagtcaacagataaacgctctgcgcagcgagatcacccgacttcaaatggaattgatggaatataaaaccgggaagagaatcattgatgaggaaggagtcgaaagtattaacgacatgtttcacgagaatgccatgctgcagacagaaaataataatctgagggtaagaattaaagccatgcaagagacggtcgatgccctcaggtctcgcatcacacagctggtcagtgaccaggcgaaccatgtactggcgcgcgcgggggaagggaacgaagagatctccaacatgattcactcgtatatcaaggaaatcgaggacctcagagcgaaactgttagagtccgaggcagtcaacgagaacctgcgcaaaaatctgactagggctactgcgcgtgcaccatacttttctgggtcctctacatttagccctacaatcctgtcctctgacaaggaaaccatcgagatcattgacctggccaagaaggacctcgaaaaactcaaacggaaggaaaagcggaagaagaagcggttacagaagcttgaggaaagtaatcgagaggagcggtccgtcgccggcaaagaggacaacacagacactgatcaagagaagaaagaagagaagggcgtctccgagcgcgaaaacaatgagcttgaagtggaagagagccaagaggtctcagaccacgaagatgaggaagaggaggaggaggaagaagaagacgacattgatgggggggagtcctcagatgagtctgattccgagagcgacgagaaggcgaattaccaggcagacttggccaatattacctgcgaaattgccatcaagcagaagctcattgatgagctggagaacagccaaaagcgactgcagaccctgaaaaagcagtatgaggagaaactgatgatgctgcagcataaaattcgtgatacgcagttggaaagggatcaggtattacaaaacctcggctccgtcgaatcctattctgaagaaaaggctaagaaggtaagatccgagtacgaaaaaaaactgcaggctatgaacaaggagctccagcggctgcaggccgcacagaaggaacacgccaggttgctcaaaaatcaaagccagtatgagaaacagctcaaaaaattgcagcaggatgtgatggagatgaaaaagacaaaggtacgcctcatgaagcagatgaaggaggagcaggagaaggcacgactgacagaaagccgtcggaacagggaaattgcccagctaaagaaggatcagcgcaaaagagaccaccagctccggcttcttgaggcccagaaaaggaaccaggaggttgtcttgagacgtaagactgaagaggtgaccgctcttcgccgacaggtcagaccaatgtctgacaaggtcgcggggaaggtgacacgaaaactgtcttcttccgacgctcctgctcaggataccggcagttcagctgcagcagtggaaactgatgcgagcaggaccggcgcacagcagaaaatgcgcatccctgtggcccgtgtccaggccctgcccacccccgctacgaacgggaataggaagaagtaccaacggaaaggcctgaccggtagagtgttcatttctaaaaccgctcgaatgaagtggcaactgctcgaacgacgtgtaaccgatattataatgcagaagatgactatcagcaatatggaggcagatatgaatcggctgttaaagcagcgggaggaactgactaaacgtagagagaaactgtcaaaacggagggagaagattgtgaaagaaaacggtgaaggggataagaacgtggctaacattaacgaggagatggaatctctaacggccaatattgattacattaacgatagcatatctgactgtcaagccaacattatgcagatggaagaggccaaagaagaaggggagaccctggatgtgacagctgtcattaacgcttgcaccctcactgaggctaggtatctacttgaccactttctgagcatgggaatcaacaaggggttgcaggctgcacagaaagaagcacagatcaaggttctggagggcaggctcaaacagaccgagatcacttctgctacacagaatcagcttctgttccatatgcttaaagagaaggccgagctaaacccagagctcgatgcgctacttggacatgctctccaagacttcaagcacttcttcgtagaaaatgtggaggactcaacggatgaagacgcacctttgaattctcccgggtctgagggcagcaccctgagttccgatctaatgaaactgtgtggggaagtgaagccaaaaaataaggcccggcggaggacgactacacagatggagcttctgtacgccgatagttccgagcttgcttcagatacttccaccggcgacgcctctctccccggcccactgacccccgtagccgaggggcaagaaatcggaatgaacaccgaaacctctggtacctccgccagagaaaaagagctgtcaccgcccccagggctcccctccaagatcggtagtatctccaggcagtctagtctcagcgaaaaaaaaattcccgaacccagccctgtgacgaggcgcaaagcttatgagaaggccgagaaaagcaaggccaaggaacaaaaacagtcagatgaatccgattcaagcctttcagaggtacaccggggcatcattaaccccttccctgcaagcaaggggattcgggcatttcctttacaatgcatacatatcgcagaaggtcacactaaagctgttctgtgcgtggactctacagacgaccttctcttcacgggctccaaagatcggacatgcaaggtctggaacctggtgacaggtcaggaaatcatgtctcttggtgggcatccaaacaatgtcgtgtcggtcaaatactgtaattacacaagccttgtttttacagtgtcaacctcatatattaaggtgtgggacataagggacagtgccaagtgcattcgaacactgacaagcagcggtcaggtgaccttgggggatgcatgttccgcaagtacctcaaggacagttgctatcccttcaggagagaaccaaattaaccagattgctctcaatcctaccggcacattcctatacgctgcctccggcaatgctgttcgcatgtgggatctgaagcgtttccagagcacaggcaagctgacaggccacctggggcccgttatgtgcctgaccgtggatcagatcagttcgggacaggatctgattataaccggcagcaaggaccattatatcaaaatgtttgacgtgacagagggggccctggggacagtgtcccccactcacaacttcgagccaccccactacgacggaattgaagccctgacgattcagggagacaatctattttcagggtcacgtgataacggcatcaaaaaatgggacttaacacaaaaggatctcctgcaacaggtgcctaatgcccataaagattgggtgtgcgctctcggagtcgtgccagaccatcctgtgctgctctcaggttgccggggcggcatcttaaaagtatggaatatggacacatttatgccagtgggggaaatgaaaggccatgactccccaatcaacgccatctgcgttaacagcactcacatctttactgccgcagatgatcgtactgtgcgtatctggaaagcccgcaacttgcaggatggtcagatctctgatactggggaccttggcgaagacatagcctccaactag

SEQ ID NO: 192432 - DNA, 5025 bp, synthetic construct
  misc_feature 1..5025: note = Description of Artificial Sequence: Synthetic coding sequence
  source 1..5025: mol_type = other DNA
atgctgggcgcccccgacgagagcagcgtgcgggtggccgtgcggatcaggccacaattggctaaagagaagattgagggctgccatatctgtacgagtgtcacccccggggagccccaggtctttctcggcaaggacaaggccttcaccttcgactatgtctttgatattgactcacagcaggaacaaatatacatccagtgtattgagaaattgattgagggttgtttcgaaggctacaacgccacagtgttcgcctatgggcagactggcgcaggaaagacctatacgatggggactgggttcgacgtgaatattgtcgaagaagaacttgggattattagtagagcagtcaaacacctgtttaagtctatcgaggagaaaaagcacatcgccatcaagaacggcctccccgcacctgattttaaggtgaacgctcaatttctcgagctgtacaacgaagaagtcctcgatctgttcgacacaacccgcgacattgacgcgaaatcgaagaagagcaatattcgcatccacgaggacagcaccgggggcatttatacagtgggcgtcaccactagaacggttaataccgagtccgagatgatgcagtgccttaagctgggcgctctctcacgcaccactgcgtcaacccagatgaatgtccaaagttcacgcagtcacgctatttttaccatccacgtatgccagaccagagtttgtccccaaatcgatgccgataatgcgaccgataataaaattatttccgagagcgcgcagatgaatgagtttgaaacactgacagcaaagtttcactttgttgatcttgcagggagcgaaagactgaagagaaccggagccaccggcgaacgcgccaaggaaggcatctcgattaactgcggtctcctggcactggggaacgtgataagcgccctcggcgacaagtcgaagcgtgccacccatgtgccctatagggactctaagcttacccgtctcctgcaggatagcctgggtggcaacagccaaaccatcatgatcgcttgcgttagtccatccgaccgggatttcatggagacactaaatacgttgaagtatgctaacagggcacggaacatcaaaaacaaggttatggtgaaccaggaccgggccagtcaacaaatcaacgccctgaggtctgagattacacgcctccagatggagcttatggaatataagacgggaaagcgtataatcgacgaagaaggtgttgagtctataaacgacatgtttcacgaaaacgcgatgcttcagaccgaaaacaacaacctgagggtccgaatcaaggcaatgcaggagacagtggatgcgctgcgatcccgcatcactcagttagttagtgaccaggccaatcatgtgcttgcaagagcgggcgagggcaatgaagagatttcaaatatgattcattcatacattaaggaaattgaggaccttcgcgccaagctcctggaatctgaagcggtgaacgagaacctgcgtaagaacctcactcgggctaccgcgcgcgctccatattttagtggttcctcgaccttctcacctactattttgagctccgacaaagaaacaattgagattatagatcttgctaaaaaggatctggagaaattgaaaagaaaggagaagaggaagaaaaaacgactgcagaaactggaagagtcgaatagagaggagagaagtgtggcaggcaaagaagacaacacagatacagatcaggagaaaaaggaagaaaaaggagtcagcgagagggaaaataatgagctggaagtcgaggagtcgcaagaggtttctgatcatgaagacgaggaagaggaggaagaggaggaggaggacgatatagacggcggtgagtcatcagatgaatcagactctgagagtgacgaaaaagcaaattatcaggcagatcttgctaatattacttgtgaaatcgccataaagcaaaagctgatcgacgaactcgagaatagccagaaaaggctccagacgctcaaaaaacagtacgaagagaaactgatgatgctgcaacataagatcagagacacacagctggaacgggatcaggtactccagaacctgggatcagtagagagctactctgaagagaaagcaaaaaaggtacgctccgagtatgagaagaagctgcaagctatgaacaaggaactgcagcggctgcaggccgcccaaaaagagcatgcacgactgctgaagaatcagtctcagtacgaaaagcagttaaaaaaattgcaacaagatgtaatggagatgaaaaagacaaaagtcagactgatgaaacagatgaaggaagaacaggaaaaggcacgcctcactgagagccggaggaaccgggaaatcgcacaactgaagaaggaccagagaaagcgggaccatcagcttcggctactcgaagctcaaaaacgcaatcaagaggtcgtgttaagacgcaagacggaagaggtcactgctctgcggaggcaggtgcggcctatgtccgataaagttgctggaaaggtgacccggaagctgagtagttctgacgccccagcccaagacacaggaagcagcgccgcagctgttgagacggatgcaagccggacaggcgcacagcagaaaatgcgaatccctgtggccagggtgcaggccttacctacacctgctactaatgggaacagaaaaaagtaccagagaaagggcctgacgggtagggtttttatctcaaaaaccgccagaatgaagtggcagctgctggagcgtagagtgacagatatcatcatgcagaagatgaccatctctaacatggaagctgatatgaaccgtctgctgaagcagcgagaagagttgactaagcgtcgagaaaagctatccaaacgaagagaaaaaattgttaaggagaatggcgagggtgataagaatgttgcaaacatcaatgaggagatggaatcgctgaccgcaaatattgactacataaacgattccatctctgattgtcaggcaaatattatgcagatggaggaagcgaaggaagagggcgaaacactcgatgttaccgcagtgattaacgcctgcacactgactgaggcacgttaccttctggaccactttctgagcatggggatcaacaaggggcttcaggctgcgcagaaggaagcccagattaaggtcttggagggaaggttgaagcagacagagatcactagcgccacccagaatcaactgctctttcatatgttaaaggaaaaggcggagttaaaccctgaactggatgcgctcttggggcacgctcttcaggacttggactctgtaccgttagaaaatgtggaggacagcaccgacgaggacgctccattgaacagccctgggtccgagggttcaactttgagctctgacctcatgaagttatgcggcgaggtgaaacccaagaacaaagcccggaggcgtactactacacagatggagctgctctacgcagattcttctgagctggcaagcgatactagtactggcgatgccagcctcccggggcctttgaccccagtcgctgaaggccaagaaatcggaatgaataccgagacatctggcacttcagctagggaaaaggagcttagtcccccaccagggttgccttctaaaattggctctattagcaggcagtccagtctgtctgagaagaaaatacccgagccaagccctgtcacccggagaaaggcctacgagaaagccgaaaaatctaaggctaaagaacagaagcatagcgactccggtacctctgaagcctctttatcccctccctcgtcaccgccttccaggcccagaaacgagctgaacgttttcaacaggttgacagtgtcacaaggcaatacttcagtgcagcaggacaagtctgatgagtccgactcgagcttgtcagaggtgcatcgcagctcaaggagaggaattattaatccgtttccggcaagtaaggggatccgggcttttcctcttcagtgtatccacatcgccgaagggcacacaaaggcagtgctgtgcgtggacagcactgacgacctgctctttacaggctccaaagatcgcacatgcaaagtctggaatttggtgactggtcaggagattatgtccctcggaggacatccaaataacgttgtgtccgtgaagtattgcaactatacgtctttggtgttcactgtatccacgtcttatatcaaggtgtgggatatccgcgatagtgccaaatgcattaggaccctgaccagttctgggcaggtgacccttggtgacgcatgttctgccagtaccagccggaccgtggcaatccctagtggggagaaccagatcaaccaaatcgctcttaatccaacgggtacttttctgtacgctgcatcgggtaacgcagtgagaatgtgggacctgaagcgattccagtcaacagggaaacttacaggtcatctggggcctgtgatgtgccttacagttgaccagataagcagtgggcaagatctgataattactggttccaaggaccactacatcaagatgtttgatgtgacggagggcgccctaggtacggtttctcccacacataactttgagccacctcactatgacggaatcgaggccctgaccattcaaggcgataatctttttagtgggtctcgggacaatggcatcaaaaaatgggaccttacccagaaagacttgttgcagcaggttcccaacgcccataaagactgggtctgtgctctgggtgtggtccctgatcatccagtactgttgtcaggctgcagaggggggatccttaaggtctggaacatggatacgttcatgccggtgggggagatgaaggggcacgattcccccattaatgcgatctgcgtgaatagcacccacatcttcaccgcagctgacgaccgaaccgttcgaatatggaaagccagaaatctgcaggatggccaaatctccgacacgggcgacttgggagaggacatcgccagcaattag

SEQ ID NO: 192433 - DNA, 4986 bp, synthetic construct
  misc_feature 1..4986: note = Description of Artificial Sequence: Synthetic coding sequence
  source 1..4986: mol_type = other DNA
atgctgggcgcccccgacgagagcagcgtgcgggtggccgtgcggatccgtccccaacttgccaaggagaagatcgaaggatgtcatatctgcacctctgtaactcctggcgagccgcaggtgttcctaggcaaagacaaggcttttaccttcgattacgtgttcgatatcgacagtcagcaagagcagatctatatccagtgtatcgagaaactaatcgaagggtgttttgaagggtataacgcaaccgtgtttgcgtacggacagacgggtgcggggaaaacttatacgatgggcacaggattcgacgttaacatcgttgaggaagaactgggaatcatctctagggccgtaaaacatctgtttaaaagcatcgaagaaaagaagcatattgcaataaagaacgggctccccgctcctgattttaaagttaacgcccagttcttggagctgtacaacgaagaagtgcttgatctttttgacacaacccgcgacattgacgccaagtctaaaaaatcaaatatacggattcacgaggactctactggagggatctacacagtcggagtcaccactaggacggtgaataccgagtcagaaatgatgcagtgtctgaagctgggtgctctgagcagaacaactgctagcactcagatgaacgtccaaagcagccgcagtcatgccatcttcaccattcatgtctgccaaactcgggtctgtccgcagatcgacgctgataatgcgacggacaacaaaattatcagcgagtccgcacagatgaatgaatttgagactctaaccgcaaagtttcattttgttgacctggccggcagtgagcgactaaaaagaacaggcgccactggggaacgggcaaaggagggaatcagcatcaattgcggcctgttggccctcggtaatgtaatctccgccctcggcgacaaaagcaagagggccactcacgtcccatatagagactccaagctcacacgtctgctgcaagattcattaggaggaaactcacagaccatcatgatagcctgtgtctcgcccagcgatcgcgatttcatggagaccctcaataccctgaagtacgctaaccgggcacggaacatcaaaaataaggttatggtgaatcaggaccgggccagccagcaaattaatgcacttcgatctgaaattaccaggttgcaaatggagctgatggagtataagactggaaaacggatcattgatgaggaaggagtcgagtctatcaacgacatgtttcatgagaacgcaatgctccagaccgaaaacaataatcttcgggttagaatcaaggcaatgcaggagacagtggatgccctaaggtccagaattacacagctggtcagcgatcaggccaaccatgttctggcgagggcaggggaaggcaatgaagagatcagtaacatgatccactcctacattaaggaaattgaggacctgagagccaaacttctggaatctgaggcagtgaacgaaaacctacgaaagaacctgacccgtgctactgcaagagctccctacttctctggatcctcaactttcagccccacaatcctgagcagcgacaaggaaaccatcgagattattgacctggcaaagaaagacctggaaaagcttaaaagaaaagaaaaaagaaagaaaaagagcgtggctggaaaggaggacaacaccgacaccgatcaagagaaaaaggaagagaagggggttagtgagagggaaaataacgaattggaagttgaggagagccaggaagttagcgaccatgaagacgaagaagaggaggaggaggaggaggaagatgacatcgacggaggggaatcaagtgacgagtctgattctgaatctgacgagaaggccaattatcaggcagacctcgctaatatcacttgcgaaattgcaatcaagcagaagctaatcgatgaactcgaaaattctcagaaacggctgcagaccctgaaaaaacaatatgaggaaaagctgatgatgcttcagcacaaaataagggacacccagctggaacgagaccaggtgctccagaatctggggagtgtggagagctactccgaagagaaggctaaaaaggtgcgctccgaatacgagaagaaattacaggctatgaataaggaactgcaaagattgcaggcagcacagaaagaacacgctaggcttcttaagaatcaatcacagtatgaaaagcagctgaaaaagctacaacaggacgttatggaaatgaagaagaccaaagttcggttgatgaagcaaatgaaggaagaacaggaaaaggcgaggctgacagaaagccgtcggaaccgagagatcgctcaattaaaaaaggatcagaggaagcgggaccaccagctccggctgctggaagcacagaagcggaaccaggaggtagtgctaaggcgcaagacggaggaagtgactgctcttaggagacaggtccgcccaatgtccgacaaggtggctggaaaggtgactaggaaattgagctcctctgatgcccccgcgcaggacacaggaagttccgccgctgctgtggaaacagatgcatcccgaaccggcgctcagcagaaaatgaggattcctgttgctcgcgttcaggccctcccaactcctgcaacgaatggtaatcgcaaaaagtaccagagaaaggggctaacagggcgcgtgttcatctccaagaccgctaggatgaagtggcagttgctggaaaggagagttactgacattatcatgcaaaagatgacaatctcaaacatggaggctgacatgaatagactgcttaaacagcgcgaggaattgaccaagcgccgggaaaagctgtctaagagacgagaaaagattgtgaaggaaaacggggagggcgacaagaatgtcgcgaatattaatgaagaaatggaatccttgactgcaaatatcgactacattaatgatagcatctcagattgccaggccaacattatgcagatggaggaggcaaaggaagaaggagagactctggacgtcaccgccgttatcaatgcctgtaccctgacggaggctcgatatctcttagatcactttctctctatgggcattaacaaggggcttcaggcagctcaaaaagaagcccagattaaggttctcgagggacgcttgaagcagactgagattacaagtgctacccagaaccagctgctttttcacatgctgaaagagaaggctgagttgaaccctgaactggacgcccttctaggccatgcattgcaagacttagacagcgtgccactggaaaacgtagaggacagtacggacgaagatgcccctctgaactctcccggctccgaaggttcgaccctgtcgagtgatctgatgaaactgtgcggcgaagtgaagcccaagaacaaggccaggagacggacaactacccagatggagctgttatatgccgactctagcgaactcgcctcagacacctcaacaggcgatgcctcactcccaggacctctcactccagtggctgaaggccaggagattggaatgaacacagagacaagtgggaccagcgccagggagaaagaattgtctccccctccgggtctccctagcaagatcggttcgattagccggcagagcagtttatctgaaaagaaaatacccgaacccagtccagtgactcggcggaaggcttatgagaaagccgagaaatctaaggccaaggaacagaaacactctgattccggcacttccgaagcttccctgtccccacccagctcaccgccaagcaggccacggaacgaactgaatgtgtttaatcgtctcacagtctcacagggtaatacctctgtccagcaggataaatcagatgaatctgatagctccctatcagaggtacaccgctcgagccgccgaggaattatcaatcctttccctgcatcgaaaggcatcagagcttttcctctacagtgtattcatatcgctgagggtcataccaaggccgtcctctgtgtggacagcaccgacgatttgttgttcacagggtcaaaggacagaacatgtaaggtctggaacctggtaactggacaggagataatgtccttgggaggtcaccccaacaacgtcgtgtccgtgaagtactgcaactacacgtccctggttttcacagtttcaacttcgtatatcaaagtgtgggacatccgagactctgctaaatgtattcggacactgacgtctagtgggcaagtgacattgggggatgcctgcagcgcgtcaacctcacgtaccgttgccattcctagcggtgagaaccagattaaccagattgccttgaaccctacaggtactttcctttatgctgctagcggcaatgccgtgcgcatgtgggacctcaagcggtttcagtccactggtaagctaaccggacacctgggtcctgtcatgtgtctgacagtggatcaaatctcatccggacaggatcttattattacagggtccaaagaccactatattaagatgttcgatgtgacagagggagcactgggcactgtctccccaacccataatttcgagcctccccattacgatggaatagaggctctgaccattcagggcgacaacctattttctggctcccgcgacaacggcattaagaaatgggacctgacccagaaagacctcctccagcaggttcccaatgcccataaagattgggtgtgcgcactgggggtggttcctgatcatccagtactgctgagcgggtgtcgcgggggaattctgaaagtatggaacatggacacatttatgcccgtgggcgagatgaaaggccatgatagcccgattaacgcaatctgtgttaactccacccacatatttacagccgctgacgaccgcacggtccggatctggaaggcgagaaatctccaggatgggcaaatctctgacaccggtgatctgggggaggacatagcctcgaactag

SEQ ID NO: 192434 - DNA, 5028 bp, synthetic construct
  misc_feature 1..5028: note = Description of Artificial Sequence: Synthetic coding sequence
  source 1..5028: mol_type = other DNA
atgctgggcgcccccgacgagagcagcgtgcgggtggccgtgcggatccggccccaactcgccaaagaaaaaatcgaagggtgtcacatttgtacgtccgttactccaggcgagccacaggtgttcctgggtaaagacaaggccttcaccttcgactatgttttcgacattgacagtcaacaagagcaaatctatatccaatgcattgagaagcttatcgaaggctgtttcgagggctataacgccaccgtgtttgcctacggacagaccggagccggaaagacatacaccatgggaacaggatttgacgtcaatattgtcgaagaagagctcgggatcattagcagggcagttaagcacctcttcaagtcgatagaggagaagaaacatatcgcgattaaaaacggtcttcctgctccggactttaaggtgaacgctcagttcctcgagctctacaacgaggaggttctcgacctcttcgataccaccagagatatcgatgcaaagtcaaaaaagtccaatatcagaatccatgaggatagtacaggtgggatctacaccgtgggtgtgacgacacggactgtgaataccgagtccgaaatgatgcagtgcctaaagctaggcgccttgtctaggacaactgcctccacacagatgaatgtccaaagttctcggtcccacgcgatcttcaccattcatgtatgtcagacccgagtctgcccccaaatagacgcagataatgcgactgataacaaaattattagcgaatccgcccaaatgaacgaattcgagacactgacagccaaatttcacttcgtggacctggccgggtccgaacggttgaaacgcacaggagcgacgggggagagagccaaagaggggatctctataaattgcggactgctggctctaggaaacgtgatctcagccctcggagacaaatccaaacgggccacgcatgtaccctaccgcgactctaagttgaccaggcttctgcaggacagcttgggagggaattcacagaccattatgatcgcctgtgtgagcccgtccgatagagattttatggaaactctcaatactctgaagtatgctaaccgcgccaggaacatcaagaataaggtgatggtcaatcaggatagagctagtcagcagattaacgccctaaggtccgaaatcaccagactgcagatggaactcatggaatacaagaccggcaaacgcataattgacgaagagggcgtcgagagcatcaacgatatgtttcacgagaatgccatgctccagacagaaaataataatctgagggtgcgtatcaaagcaatgcaggaaaccgtcgatgctctgcgtagccgaataacccagctggtgagtgaccaggcgaatcatgtgctggcacgggctggagagggaaatgaggaaatctctaacatgatacatagttacatcaaagaaattgaggatctccgggccaagctgctggaaagcgaagcggtcaatgaaaacctacgcaaaaatttgacaagagcaactgcccgtgctccgtatttctcgggctcgagcaccttttccccaaccattttgtcttccgataaagaaaccatcgagatcatagacctggccaagaaagatctggagaagttgaaaagaaaagagaaacgaaaaaaaaaacgcttgcagaaacttgaggagtcgaacagagaagagcgttcggttgctggaaaggaagacaacaccgacactgatcaggagaagaaggaagagaaaggtgtgtctgaaagagagaataacgagctcgaggtcgaggaatcacaggaggtgagtgaccatgaagacgaggaagaagaggaggaggaggaggaagatgatatcgacggcggtgagtcgtccgacgaatcggattccgaatcggacgagaaagcgaactatcaagcggatctggcgaatatcacctgtgagattgctatcaaacaaaagctgattgacgaacttgagaattcccaaaagaggctgcaaacattgaaaaagcagtacgaggaaaagcttatgatgctccagcacaagattcgtgacacccagctggaaagggatcaggtgttgcagaacctgggatccgtcgagtcctacagtgaagaaaaggctaagaaagttagaagcgaatacgagaagaagttacaggccatgaataaagagctgcagcggctccaggcagcgcagaaagagcacgctcggctcctcaagaatcagtcacagtacgagaagcagctgaagaaattacaacaagatgtaatggagatgaaaaagaccaaggtgaggctgatgaaacagatgaaagaagaacaggagaaagcacgactgactgagtctcgtcgaaatagggagattgcccagctaaagaaggaccagcggaagcgcgatcaccagctgcggctgttagaggcccagaagagaaatcaggaggtggtccttcgccggaaaaccgaggaagttacagcattgcgcagacaagtgagaccaatgtccgacaaggttgctgggaaggtcaccaggaagctgtcaagcagtgatgcgccggcgcaggacaccggctcctccgctgcagcagtggaaacagacgcctctcggaccggggcccaacaaaagatgcggattcctgtggccagagttcaggctttacccacacccgccaccaacggaaaccggaaaaagtatcagcgaaagggtctgaccgggcgggtgttcatctctaaaactgccaggatgaagtggcagctcctggagaggagagttaccgatatcatcatgcaaaagatgactatttcaaatatggaagctgacatgaaccgattactgaaacagagagaggagctgaccaagcgacgggagaagctgtccaagcgccgggaaaagatcgttaaggagaatggcgaaggagataagaatgtggcaaacatcaacgaagaaatggagagtctcacagctaacattgactacattaatgactccattagcgattgtcaggccaatatcatgcaaatggaagaggcaaaggaagagggggaaacactcgacgtaactgctgtgattaatgcctgcacacttactgaggcccgctatcttctcgaccacttcctgtccatgggaatcaataaaggcctgcaggcagcacagaaagaagcccagatcaaagtacttgaaggacgactgaaacaaaccgagatcacgtcagccacccagaaccaactcctgtttcacatgttgaaagagaaggctgagctgaaccccgagctcgacgctctgcttgggcatgctcttcaggatttcaagcatttcttcgtggagaacgttgaagactccacggacgaggatgccccactgaactctcccgggagcgagggctccactctgtcctctgatctgatgaagctgtgtggagaagtcaagcccaagaataaagcgcggcggcgcaccactacgcagatggagctgctgtatgccgacagtagcgaattagcatccgatacttccacaggcgacgcgagcctccctggccctctgacgccagtagccgagggtcaagaaattggcatgaatacagaaacttctggcactagcgcccgcgagaaagagctgagtcctccgcctggtctgcctagcaaaatcggcagcatttcacggcagtcttcactgtccgagaaaaagataccagaaccttcacctgtcaccagacgaaaggcctacgagaaggccgaaaagagtaaagccaaagagcagaagcactcagatagcggaaccagcgaagcttccctgtctccacccagcagcccaccgtcacggccccggaatgagctcaatgttttcaaccggctgacagtttcccagggaaacacgtccgtgcagcaggataaatctgacgagagcgactccagtctgtccgaggtgcaccggaatagtaatctcagaggtattatcaaccctttccccgcttctaagggaatccgggcgtttccgctccagtgtatccacattgcggaaggacacaccaaggctgtgctgtgtgtggattctacagatgatctgctctttaccggctctaaggacagaacgtgtaaggtgtggaacctggttacgggccaagaaataatgtctttgggaggtcacccaaacaacgtcgtttctgtcaagtactgcaattacacatccctcgtcttcacagtatcaacttcctacataaaggtgtgggatatccgggatagcgccaagtgcatccgtacattaacaagctccggccaggtgaccctcggtgacgcctgctccgcaagcacgtcacggaccgtggcaattccatcaggggaaaaccagattaaccagattgccttaaatccaaccggaacgttcctctacgccgcgagtggaaatgcggtcagaatgtgggatctaaagcgctttcaatccacggggaagctcactggccatctgggcccagtaatgtgtctcactgtagaccagatttcctccgggcaggacttgatcattaccggtagcaaggaccactatattaagatgttcgacgtcacggagggcgcactgggtaccgtctcgcccactcataactttgaaccccctcattacgatggtattgaagccctgacgatccagggggacaacttgtttagcggcagtcgagataacgggatcaaaaaatgggacctaactcagaaggatcttctgcagcaagtacctaacgcacacaaagattgggtgtgtgcgctcggcgtagtgccagatcatccggttctcctcagcgggtgcaggggagggattctcaaggtgtggaatatggacaccttcatgcccgtgggggagatgaaagggcacgatagccctatcaacgcaatttgtgtaaactccacccacatctttactgccgccgatgatcgcacagtgagaatctggaaggcgaggaatcttcaagacgggcaaatctcagatacgggagatttaggagaagatattgctagtaactag

SEQ ID NO: 192435 - DNA, 4866 bp, synthetic construct
  misc_feature 1..4866: note = Description of Artificial Sequence: Synthetic coding sequence
  source 1..4866: mol_type = other DNA
atgctgggcgcccccgacgagagcagcgtgcgggtggccgtgcggatccgtcctcagctggctaaggagaagattgaaggatgtcacatctgcacttcagtcacgccaggagagccccaggtcttcctcgggaaggataaagcttttacctttgactatgtgtttgacattgacagtcagcaggagcagatttacatccaatgtattgagaagctcatcgaggggtgtttcgagggatataatgcaactgtgttcgcctatggacaaaccggggccggtaaaacttataccatggggaccggcttcgatgtcaacatagtggaagaggagttaggaattatttctcgggctgtaaaacatctgttcaagtccatagaggagaaaaagcacatcgcaatcaaaaatggcctgccagccccagactttaaggtgaacgcacaatttctggagctctataacgaagaagttctggatttgtttgataccacacgcgacattgacgcaaagagcaaaaaaagtaacattaggatccacgaagattccacaggcggaatatacactgtgggcgtcaccacccgaaccgtgaacacagaaagcgagatgatgcaatgcctgaaactgggtgcactgagcagaaccacagctagtactcagatgaatgtgcagtcttctcggtcccacgctattttcacgatccacgtatgccagacgagagtttgtccccaaatcgatgccgataatgcaacggacaataaaattatctccgaatctgcccagatgaatgaattcgagacactcaccgcaaagtttcacttcgtggacctcgcaggctcagagcgactgaaaaggacaggtgccactggagaaagagcaaaggaaggaatctcgatcaattgcggtctcctagcgctggggaatgttatttccgcactcggagataagagtaaacgagcaacacatgtgccttatcgggatagtaaactgaccaggttactccaggatagtcttggtggaaattctcagacgataatgattgcctgcgtgtccccatccgatagggacttcatggagaccttaaatacactcaaatacgccaatcgcgccagaaatataaaaaacaaggtaatggttaaccaagatcgagcctcccagcagatcaacgctcttaggtctgagataacccgcttgcaaatggagctcatggagtataaaacggggaagagaatcattgacgaggaaggcgttgaaagtattaatgacatgtttcacgagaacgctatgctgcaaactgaaaacaataacttgagagtgcgaatcaaggctatgcaagagaccgtggatgctcttaggtctaggattactcagttagtgtccgatcaggccaaccacgtgcttgctagagccggagaggggaatgaagaaatcagcaatatgatccacagctatattaaggagatcgaggacttgcgtgcaaagttactggagagtgaggccgtgaacgagaatctgcggaaaaacctaacgcgggcgacagcgagggccccgtacttctccgggtcttcaacttttagccccactattctatccagtgacaaagagacaattgaaattatcgaccttgcaaagaaagacttggagaaactcaagcgcaaggaaaagaggaagaagaagagtgttgcaggcaaggaggacaataccgataccgaccaagaaaaaaaggaggagaagggcgtctccgaaagagaaaataatgagttggaggtggaagagagtcaggaagtctctgaccacgaagatgaggaggaagaggaggaagaagaagaagacgatattgacggcggcgaaagctctgacgagtccgattctgaatccgacgaaaaggcaaactatcaggcagatctggccaatattacatgcgaaatcgctatcaagcagaagctgatcgacgagctcgagaattcacagaagcggctgcaaaccctgaagaaacagtatgaggagaagctcatgatgttgcagcataaaattagggatacccagcttgagcgcgatcaggtgttacaaaatcttggctccgttgagtcctacagcgaggagaaggcgaaaaaagtaagatccgagtacgaaaagaaactgcaagccatgaacaaggagttgcagagattgcaggccgcgcagaaagaacacgccaggttactcaaaaatcaaagtcagtatgaaaaacagctgaaaaagctccaacaggacgtaatggagatgaagaagactaaagttagactcatgaagcagatgaaggaagagcaggaaaaggcccgcctgacagagtccaggcgcaaccgcgagatcgcccaactgaaaaaagatcaacgcaagcgtgatgtgacggctttaagaagacaggtccgtcccatgtccgataaggtcgccggaaaagtgacccgcaaactcagctcctcagacgcacctgcccaggacaccggtagttctgccgcggcagtagagacggatgcctctcggaccggtgcgcagcagaaaatgcgcatccccgtggctcgggtgcaggcccttcccacacctgccacaaacgggaaccggaagaagtatcaacggaagggactcactggacgtgttttcattagcaaaactgcacgcatgaagtggcagcttctggagcgccgtgttactgatattataatgcaaaagatgacaatctcaaacatggaagctgatatgaaccggctcctgaagcaacgggaggaattaacgaagcggagggagaagctttcgaaaagaagggagaaaatcgtgaaggaaaatggagaaggggacaaaaacgtcgccaacattaatgaggaaatggagagcctgaccgcaaacattgattatataaatgattccattagtgactgtcaagctaatatcatgcagatggaagaggcaaaagaggaaggggaaactctcgatgttaccgcagtaatcaatgcttgtacgctcacagaagcgcgatacttacttgatcatttcctgagcatggggattaataaaggactccaggccgcacagaaagaagcccagataaaagtactggaaggccggttgaaacagacagaaatcacaagcgcaacgcagaaccagttgttgtttcatatgctgaaggagaaggctgagcttaatccggagttggacgcactgctgggccacgctctgcaagacctcgactccgtgccactggagaacgtggaggactccaccgatgaagatgcgccgctcaatagtcccggcagtgagggaagtacactctcctcagatctcatgaagctctgcggcgaggtaaaaccaaaaaataaagcaaggagaagaaccaccacccaaatggaactgttatacgctgactcaagtgagttagccagtgatacctccactggagacgccagtcttccaggtcctctgaccccagtggcagagggccaggagattggaatgaacacagagactagcgggacgagtgcaagagaaaaagagcttagtcccccacctggcttgcctagtaaaatcggttcgattagcaggcagagttcacttagcgaaaaaaagatcccagagcctagcccggtcacacgccgaaaggcctacgagaaggctgagaagtccaaggcaaaggaacagaaacactccgattcaggcacctctgaggcttcgctgtcccctccaagttccccaccaagtagaccccggaacgaattaaatgttttcaacagactaaccgtctctcaagggaacacgtcagtgcagcaagataagggaatcataaacccgtttcctgcaagcaagggaatacgcgcatttccattacagtgtattcacatcgccgaggggcatacgaaagccgttctctgtgtagattccacagatgatttgctcttcactggctccaaagaccgcacttgcaaggtctggaatttggtgacaggccaggaaattatgagcttaggtggacatcccaacaacgtcgtgagtgtaaaatattgcaattatacgtccttagttttcacagtatctacttcctatatcaaagtgtgggatatccgcgacagcgctaagtgcattcggacccttacatctagcggccaggtcacactgggcgacgcctgcagcgctagtaccagtcgcaccgttgctatcccatccggcgaaaaccagataaatcagatagctctgaatcccactgggacatttctgtatgcagcttcaggtaatgccgtgcggatgtgggacctgaaaagattccagtctaccggcaagctcacagggcatctgggccccgtcatgtgtcttaccgtagatcagataagctctggccaggatctcattattactggaagtaaggaccattatatcaaaatgtttgatgtgaccgagggcgctctgggcacagtgtctccaactcataatttcgagccaccccactatgatggcattgaggctctaacaattcaaggcgacaatctgttcagtgggtcacgtgataacggaataaagaagtgggacctcacccagaaagatctgctacagcaggtgcccaatgctcacaaagactgggtgtgcgccctgggtgttgtgccagaccaccccgtgctcctgtcgggttgcaggggcggtattctgaaagtttggaatatggatacttttatgccagtcggggaaatgaaaggtcacgacagtcccattaatgctatctgcgtcaattcaacccatatttttaccgcagccgatgatcggaccgtacgaatctggaaggcgcgcaacttgcaggacggacaaattagcgatacgggagacctgggagaggacatcgcctcaaattag

SEQ ID NO: 192436 - DNA, 4914 bp, synthetic construct
  misc_feature 1..4914: note = Description of Artificial Sequence: Synthetic coding sequence
  source 1..4914: mol_type = other DNA
atgctgggcgcccccgacgagagcagcgtgcgggtggccgtgcggattcggccccagctggccaaagagaagattgaggggtgccatatatgtaccagcgtcactcctggagaaccccaggtattcctgggcaaggataaagctttcactttcgactatgtcttcgatatcgatagccagcaagagcagatttacatccagtgtatcgagaagctgatcgaaggatgctttgaaggctacaacgccacggttttcgcttacgggcaaacaggagccggaaagacctacaccatggggaccggctttgacgtgaatattgttgaggaggaactgggcattattagtcgggccgtgaagcatctgtttaaatcaatcgaggagaagaagcacatcgccatcaagaatggcttgcccgcgcctgatttcaaagtaaatgcccagtttcttgagctttataacgaggaggtcctggacctcttcgatacaacccgggacattgacgcaaagtctaaaaagtctaacattcgcatacacgaggattcaacagggggaatctatactgtgggggtgacaacacggactgtgaatactgagtcagagatgatgcagtgtctgaagttgggggctctatcccggacaactgcttctacacaaatgaatgttcagagctcgcgtagtcacgcaatcttcacaattcacgtgtgtcagacacgggtttgcccacaaatagacgcagacaatgccacagataacaaaatcatttcagagagcgcccagatgaacgaattcgaaacgctgacagccaaattccattttgtggacctggccggatcagagaggctcaaaaggacaggtgcgactggagagagagcgaaggaaggaattagcattaactgtggtctgctagccctcgggaatgtgatttctgctctgggggacaaatccaagcgcgctacacacgtgccttatcgagatagcaaactgacgcgactcttacaggactccctgggtggcaacagccaaactatcatgatcgcttgcgtgtctccgtctgatagagatttcatggagaccttgaacacgcttaaatatgccaaccgggctcgtaatattaagaacaaggtgatggtgaatcaggaccgcgccagccagcaaatcaacgccctgcgatccgagataacgagactccagatggaactgatggaatataaaacaggtaagaggatcatcgacgaagaaggcgtggaaagcatcaacgatatgtttcacgaaaacgcgatgctgcagacagaaaacaataatctgcgggtcaggatcaaggcaatgcaggaaaccgtggatgcacttaggtctcgtatcacacagctcgtgtcagaccaggctaatcacgtgttagcgcgcgcgggagagggtaacgaagagattagcaatatgatccactcttatatcaaggagattgaagacctaagagccaaattgctggagagcgaggcagtaaatgagaatcttagaaagaacctcacacgggccactgccagagcgccgtacttctcgggctctagtaccttctcacccaccatactctcatcggacaaggagaccatcgagatcatagatctcgccaagaaggatctcgaaaagctgaagcgcaaggagaagagaaaaaagaaaagtgtagccggtaaagaggacaacactgacactgaccaggagaaaaaagaggagaagggcgtatcagaaagggagaacaacgagctcgaggtcgaggaaagccaggaagtgtcggatcatgaggatgaagaggaagaggaggaggaagaggaggacgacatcgatggcggagaatcctcagacgaaagtgactccgaatctgatgagaaggcaaattatcaggccgaccttgctaatattacttgcgaaatagctatcaaacagaaactcattgacgaattggagaattcccagaagcgcctacagacattgaaaaaacagtacgaggaaaaacttatgatgctgcagcacaagatccgggatacacagctggagagggatcaggtattgcagaacctgggcagtgtggaaagttacagcgaagaaaaggctaaaaaggtgcgttccgaatacgagaaaaaactgcaggcgatgaataaagagctgcaacggcttcaagcagcccaaaaggaacacgcacgcctgctcaagaatcagagccagtatgaaaaacaactgaaaaaactgcagcaggacgttatggaaatgaagaagacaaaggtgaggcttatgaaacagatgaaggaggaacaggaaaaagccaggcttactgagagccgacggaaccgcgagatcgcccagcttaaaaaagaccagagaaaacgcgaccaccaattgagacttttagaggcccagaaacgcaaccaggaggttgtcctgcgaagaaaaactgaggaggtgactgcactgaggcggcaagttcggccaatgagtgataaagtcgctggtaaagtaaccaggaaattgtcctccagtgacgctccggctcaggacacaggctcttcggccgcagccgtggaaaccgatgcatcacggacaggtgctcagcagaagatgcggatacccgttgctcgggtgcaggcgctgccaacccccgccacgaacgggaaccgaaaaaaatatcagagaaaaggccttaccggaagagtcttcattagcaagacagctaggatgaaatggcagcttctggaaagaagggtaactgatatcatcatgcaaaagatgactatttccaatatggaagccgacatgaaccggctgctgaaacagcgagaggagctgacaaagcggcgcgagaaactgagtaaaagaagagaaaagatcgtgaaagaaaatggcgaaggcgataagaacgtggctaacataaacgaagagatggagtccctaacggctaacatcgactacatcaacgactccatcagcgattgccaggctaatatcatgcagatggaggaggctaaagaagaaggtgagacgcttgatgttactgcggttatcaatgcgtgtacactgactgaggcgcggtacctcttagaccatttcctctctatgggaatcaacaaagggttgcaggccgcccagaaggaagcgcagattaaggtgttggaggggcgcctcaaacaaaccgagatcactagtgcaacccagaatcagttactcttccatatgctcaaggaaaaagctgaacttaaccctgagctggacgcgcttcttggccacgcactgcaggagaatgtggaagattctaccgacgaagacgcccccttgaattcacccgggagcgaaggctccaccttgtcttctgatcttatgaaactgtgcggagaggtgaaaccgaaaaataaggctaggcgccgcacaacaacgcagatggaattgctatatgcagactcttcggagctcgcgtctgacacaagtacaggtgatgcttcccttcctggacccctgactcccgttgcagaggggcaggaaatcggcatgaacactgagacatcagggacgagtgcccgtgaaaaggaactgtcaccgccaccaggccttccctccaagatcgggtctatctcgcgccagtctagcctgtccgaaaagaaaatcccggaaccctccccagtgacccgacgcaaagcttacgagaaagctgaaaaaagtaaagctaaggagcagaagcactccgactctgggactagcgaggcttctctgtccccgccatcatccccgccttccagacctaggaacgagttgaacgtctttaacaggctcacagtatcccaggggaacacatctgttcaacaggacaaaggcattattaatcccttccccgccagtaagggcattagagcttttcccttacagtgcatccacattgctgaggggcacactaaggccgtgctgtgtgtggacagcacagacgacctgctctttacgggaagcaaggatagaacctgcaaggtgtggaacctggtaacaggccaagagataatgtccctgggaggccaccccaataatgtggtgtccgtcaagtactgtaattatacaagcctggtgtttacggtgagcacctcctacatcaaagtctgggacatccgggattctgccaaatgcatccgcacccttacatcctctggacaagtgaccttgggcgacgcctgtagcgcaagcactagccgcacggtcgccatcccgagcggcgagaatcagatcaatcagatagccctgaacccaactggcaccttcctatatgctgcaagcgggaatgctgtccgaatgtgggacctgaagcgttttcagagcaccggcaaactcaccggacacctgggacctgtcatgtgtctgacagtagatcagatctcttcaggtcaagacctcataattaccgggtccaaggatcactacattaaaatgttcgacgttaccgagggagccttaggcaccgtcagccctacccataactttgagccccctcattatgacgggattgaggccctcaccattcagggcgataatctcttcagcggtagtagggataacgggatcaaaaagtgggacctgacgcagaaagacctcctccagcaagtaccaaacgcccataaggactgggtgtgtgcattgggggtggtgccagaccatccagttttgctgtctggatgccgcggaggaattctcaaggtgtggaatatggacacttttatgcccgtaggcgagatgaaaggccatgatagtccgatcaatgcaatatgtgtcaatagtacccatattttcaccgctgctgacgacagaacagtgcggatttggaaggcacggaacctgcaggatggacaaatttccgacacgggcgatcttggtgaggatatcgccagtaactag

SEQ ID NO: 192437 - DNA, 1986 bp, synthetic construct
  misc_feature 1..1986: note = Description of Artificial Sequence: Synthetic coding sequence
  source 1..1986: mol_type = other DNA
atgaaccggctgctgaagcagcgggaggagctgaccaagcggcgggaaaagctgtcaaagcgccgggaaaagattgtgaaggagaatggtgagggggacaaaaacgtggcaaatatcaacgaggaaatggaatctcttaccgccaacattgattacataaatgattctatctccgattgccaggccaacatcatgcagatggaggaagcaaaggaggagggggaaactctggacgtcaccgctgtcataaacgcctgtaccctgacagaggcccggtatctccttgatcactttctgagcatgggcattaataaaggcctccaggcagctcagaaggaggctcagatcaaggtgctcgaggggcgcctgaaacagaccgagataacttctgccacccagaaccagctgctctttcacatgttaaaggaaaaggccgaacttaatcctgagctagacgctctgcttggccacgccttgcaagagaacgtcgaagatagtacggatgaggatgctcccctgaactctcctggttccgaagggtcgaccttgagcagcgatctgatgaagctgtgtggggaggttaaaccaaagaacaaggctaggcggcgcaccactacccagatggaacttctctatgcagacagctcagaactggcgtctgacacctccacaggggacgcttctttacctggcccgcttacccccgtcgccgaagggcaagaaatcggaatgaatactgagacatccgggacctccgcaagagaaaaggagctctccccccctcccggcctgccatctaaaatcggtagtatttcacggcagagtagtttgagtgaaaagaagatccctgaaccaagccctgtgactaggcgaaaagcatatgagaaggcagaaaaaagcaaggccaaggaacaaaagcaagggatcatcaaccccttccccgcctctaaaggaatccgcgcctttccactccagtgcattcacatcgcagaaggacacaccaaggcagttttatgcgtcgacagcacagacgacctgttattcaccggatcaaaagacaggacctgtaaggtgtggaacctcgtcaccgggcaagagatcatgagtcttggcgggcatcccaacaatgttgtgagcgtgaaatactgcaattatacgtctctggtcttcacggtgtcgaccagttacatcaaggtgtgggacattcgtgatagcgccaagtgtattcgaacattgacatcttccggacaggtgaccctaggggatgcctgttcagctagcacgtctaggaccgtcgccatcccctccggtgagaaccaaatcaatcagattgctctcaatcctactggaacgttcctgtacgctgccagtggaaacgccgtgcggatgtgggatctaaagagattccagagcaccggaaagctaacaggtcatctcgggcccgtgatgtgtctcaccgtcgatcagataagctctggtcaggacctgataattaccggtagcaaggaccactatatcaaaatgttcgatgtcaccgaaggcgcactgggaactgtgtcaccaactcataacttcgagcctccccattacgatggcatcgaagcattaaccatccagggggataatctattcagtggctcacgcgacaacggcattaaaaagtgggacctgacacagaaagaccttctccagcaagtgccgaatgctcataaagattgggtgtgtgccctgggtgtggtccctgatcacccggtgttactgtcaggatgtcggggaggcatactcaaggtgtggaacatggatactttcatgccagtcggagaaatgaaaggccacgatagcccaatcaacgcaatttgcgtgaattcgacccatatctttactgccgcagatgatcggacagtgaggatctggaaagctagaaatctgcaggacgggcagatcagcgacaccggtgacttgggagaggatatcgcttctaactag

SEQ ID NO: 192438 - DNA, 4875 bp, synthetic construct
  misc_feature 1..4875: note = Description of Artificial Sequence: Synthetic coding sequence
  source 1..4875: mol_type = other DNA
atggccggccagggcgactgctgcgtgaaggtggccgtgcggatccgcccccagctaagcaaagaaaagattgaaggctgtcacatttgcaccagcgtaaccccaggcgagcctcaggtccttttggggaaggataaggcctttacttacgattttgtatttgacttggatacctggcaagaacagatctatagcacatgtgtgagtaagctaatagaaggttgctttgaggggtacaacgccactgtcctcgcttacgggcagaccggcgctggtaaaacttataccatgggcacaggcttcgatatggcgacatccgaagaggaacagggcatcatccccagggccatcgcacacctcttcggaggaatcgcggagcgcaagagacgggcccaagaacaaggagttgcaggacctgaattcaaggtgtccgcacagttcttagaactgtacaatgaagaaatcttggacttatttgactcgacaagggatcccgacacacgccataggcgctccaacatcaaaattcacgaggatgccaacggtggaatttacaccacaggagtaaccagtcgcctgattcattcacaagaggagctgatccagtgtcttaagcaaggcgccctgtcccgcacgactgcgagcacccagatgaatgtgcaaagctccagaagccacgctatttttaccattcacttatgccagatgcgtatgtgtactcagcccgatctagtgaacgaggcagttacaggtctcccagatggcacaccaccgtcctcagaatacgaaactcttactgctaagtttcattttgtcgatctggcgggctcagaaagattgaagagaacaggtgctacgggggagagagctaaagagggcattagcataaattgcggcctactagccctgggaaatgttatatctgccttaggtgaccagtccaaaaaggtggtccatgttccttatagagacagtaagctgacccggttacttcaggactctctcggcggaaacagtcaaaccattatgatcgcctgcgtgagcccctctgaccgggatttcatggaaacgctgaatacactaaagtacgctaatagggcaaggaacatcaagaataaagtcgtagtgaatcaggacaaaacatctcaacagatttctgcactgcgcgccgaaattgctcgcttgcagatggaactgatggaatacaaagccgggaagagggtcatcggcgaggatggggctgaggggtactccgatctctttagagagaacgcaatgctccagaaagagaatggggccctgaggctccgcgtgaaggctatgcaggaggcaatcgacgcaattaataaccgggtgacccaactaatgtcccaggaagccaacttgctcttagccaaagcgggggacggtaacgaggcgatcggcgcgctgatccagaactacattcgcgagatcgaagaattaagaaccaaacttctcgagagtgaagccatgaacgagtcacttcggcggagcctctcaagagcttctgcaagaagcccatatagcctgggcgccagcccagccgctcctgcgtttgggggcagtccagcttcatcgatggaggacgcgagcgaggtgatccgtcgagctaaacaggacctggagcggctgaaaaagaaagaggtacggcagcgccggaaaagtcctgagaaggaggcattcaagaagagggccaaactccaacaggaaaacagtgaggagaccgatgaaaatgaagccgaagaggaggaggaagagagggacgagtcaggatgcgaagaggaagaggggagagaggatgaggacgaggattcaggcagtgaggagtcgcttgtcgactctgatagcgacccagaagagaaggaagtaaactttcaagcagacctggcagacctgacctgtgagatcgagattaaacaaaaattgatcgatgaactggagaacagccagcgcaggttgcagacacttaaacaccaatatgaggagaagcttattctattgcaaaacaagatcagagacacgcagctggaaagggatcgggtactgcaaaacctttccacaatggagtgttacacggaagagaaggctaacaaaataaaggccgactatgagaagagactgcgcgagatgaaccgcgatctgcagaaattacaagctgcccagaaggaacacgcacgcttattaaaaaatcagtccaggtacgagagagagctgaagaaacttcaggctgaagttgccgaaatgaagaaggctaaggtggccctgatgaaacaaatgagagaggagcagcagcgtcgccgtctcgtggagacaaagaggaatagagaaattgctcagctgaagaaagagcagagacgacaggagttccagatacgagcccttgaatcccaaaagagacagcaggaaatggttctgcggaggaaaacccaggaggtatcagccctacgcaggttagcgaaacccatgagcgaaagggtagctggacgagctggattgaagccaccaatgcttgattccggtgctgaagtttctgccagtaccacctcgagtgaagcagagtctggtgcccggtcagtgtctagtattgtccggcagtggaaccgcaagatcaatcatttcctgggagaccaccctgcaccaactgtgaatgggacccggccggcacggaagaaatttcagaaaaaaggggcaagccagagctttagtaaggctgctagactgaaatggcagtctctcgaaagaagaataatcgatatcgtgatgcaacgcatgaccatcgtgaatctggaggccgatatggaacgactaataaaaaaacgggaggagctttttttgctccaggaggccctgcgccgcaagagagagaggcttcaggccgagtcccccgaagaagagaaggggctgcaggaactggcagaggagattgaggttctggcagccaacatcgactatattaatgacggcattacagattgccaggccaccattgtccagctggaagagacaaaggaggagctggactccaccgatacctcggtggtcatttcatcctgctctctcgctgaggccagactgcttctggataacttcctgaaggcctccatcgataaaggacttcaggtggcgcagaaagaggctcagatcaggttacttgaggggcggctacgacagactgatatggcaggatcgagccaaaatcaccttctcttagatgcactgcgtgaaaaagcagaggcacaccccgagctgcaggctctcatctataacgtccaacaagagaatggctatgcctctactgacgaagagatctccgagtttagcgagggcagcttctcccaaagctttactatgaagggttctacgtcacacgatgatttcaaattcaaaagtgaacccaagctttctgcacagatgaaggcagtgagtgctgagtgcctgggcccccctttagacatctccaccaagaacatcacaaagtccctggcaagtttagttgagatcaaagaagacggagttgggtttagcgtgagagatccgtactaccgcgatcgggtgtctagaaccgtcagtctgccgacacgcgggtccacctttccgaggcagtctagggccacggaaacaagtcctttgacccggcgtaaaagttacgatagaggccagccaatccgaagtacggatgtgggattcactcctccatcatccccccctactagacccagaaacgaccggaacgtcttctctagactgactagcaatcagtcacagggctccgccctcgacaaaggaattatcagtccggttggcggtgctaaaggagctcgtactgcgcctttacagtgcgttagcatggctgagggacacaccaagcccatactgtgtctcgacgccaccgatgagctcttgttcaccggatctaaagaccggtcgtgcaagatgtggaatctggtgaccggacaggagatagcagccttgaagggccacccgaataatgttgtctctattaagtattgttcccactctggcctagtgttctctgtatccacctcgtacattaaggtctgggacattagagactcggcgaaatgcattaggaccctcacgtcaagcggacaagtcattagcggcgacgcttgtgccgctacaagcaccagagccatcacgagcgcccagggggagcaccagattaatcagatcgctctgagtccgtctggcactatgctgtacgcagcatcaggaaatgcggtccgcatctgggagctaagtaggttccagcccgttggcaagctcacaggacatattggacctgttatgtgcctgaccgttacacagacagcctcccagcatgatttagtggttaccgggtccaaggatcattacgtgaaaatgtttgaactgggcgagtgtgtcactgggacgatcgggccaacccacaactttgagccccctcactacgatggaatagaatgcctggctattcagggcgacatcctgttcagtggctcacgagacaacgggatcaagaaatgggatctagaccagcaggaactgattcagcaaatacccaatgcacacaaagattgggtctgcgccctggccttcatacccggcaggccaatgctgctgtctgcttgccgtgccggggtaatcaaagtatggaacgtggacaatttcactcccatcggagaaatcaaggggcacgactctcctatcaatgccatctgtactaacgcgaaacatattttcactgcatcctcagattgccgagtcaagctttggaactacgtgcctggattgaccccatgcctgcctcgtcgcgtgctggcaatcaaaggcagagccaccactctgccatag

SEQ ID NO: 192439 - DNA, 4833 bp, synthetic construct
  misc_feature 1..4833: note = Description of Artificial Sequence: Synthetic coding sequence
  source 1..4833: mol_type = other DNA
atggccggccagggcgactgctgcgtgaaggtggccgtgcggatccgccctcaactgtctaaggagaagatcgaaggctgtcatatctgtaccagcgtgaccccaggcgaaccccaagtgctgctggggaaagataaggcgttcacatacgacttcgtatttgatcttgatacatggcaggagcaaatctatagcacctgtgtgagtaagctgattgaaggctgctttgagggatataacgcaaccgtgctggcctatggtcagaccggagctggaaagacttacaccatgggcacgggcttcgacatggcaacaagtgaggaggaacagggcatcattccccgtgccatcgcacacctgttcggggggattgccgagaggaaaagacgggctcaggagcagggagtcgccggccccgaattcaaagtatcagcccaatttcttgagctgtataatgaagaaattctggatctgttcgacagtacgcgtgatcccgataccagacacaggcgcagtaatatcaagattcatgaggacgcaaatggcggtatttacactacaggggtgacttcccgccttatccatagtcaggaggagctgatccagtgcctgaagcagggcgcattgagcagaaccactgcctcaacccagatgaacgtgcagagcagcaggtcacacgccatctttaccattcacttgtgccagatgagaatgtgcacacagcccgacctcgtgaacgaggccgttactggactccctgacggcactcccccatcaagcgagtacgagacccttacagcaaagtttcactttgtggatctggccgggagcgaaagactgaaacggacaggggctactggcgaaagggcaaaggagggtatatctattaattgtggtctattagcactcggcaacgttatcagtgctctgggcgaccaaagtaaaaaggtcgtgcacgtgccatatagagattccaagctcactaggctactgcaggatagtcttgggggcaattcccagacgatcatgatcgcctgcgtctctcccagcgacagggattttatggagactttgaatacacttaaatacgccaaccgggcccgcaatataaagaataaggtggtggtgaatcaggataaaaccagccagcagatctctgctctgcgcgccgagattgcgcggctgcagatggagctcatggaatacaaggccggaaagcgggtgatcggagaggacggcgcggaaggttacagcgacctgttcagggagaacgccatgctccagaaagagaacggcgctttacgactcagggtcaaagccatgcaggaggcaattgatgccatcaacaaccgtgtgacacagcttatgtcacaagaggccaatctcctgctggccaaggccggcgacggaaatgaggcgatcggggctctgatccagaactatatcagagagattgaggagctcaggaccaaactgctcgaatccgaagctatgaatgaatccttaaggcggtcattgtctcgagcaagtgcacgctctccctattctctcggcgcctccccagccgccccggcctttggcgggtcacccgcgtcctcgatggaagacgcatcagaggtcattaggcgagctaaacaggacctggaacgcctgaagaagaaagaggtgaggcagagaaggaagagcccagagaaagaggcttttaaaaagcgagccaagctgcagcaggagaacagcgaggagaccgacgaaaacgaagctgaagaagaagaggaggaaagagacgagagcggctgcgaagaggaagaagggcgtgaggatgaggatgaagattccggcagcgaggaaagtttggtggacagcgatagcgatcccgaagaaaaggaagtgaattttcaggctgacctggccgacctcacctgtgagatcgagatcaaacagaagctgatagatgaactggaaaattcacagcgcaggttacagaccttgaagcaccagtacgaagaaaagctgatccttctgcagaacaaaatacgcgacacgcagctggagcgcgaccgcgttctgcagaatctgagcacaatggagtgctacactgaggagaaggcaaataagattaaagcagattacgaaaaaagactgcgggaaatgaaccgagaccttcagaagttacaagctgcgcaaaaggagcatgcgcggctgctcaaaaatcagagcagatatgaaagagagctaaagaaacttcaggccgaggtggctgaaatgaagaaggcaaaggtggcactgatgaaacagatgcgagaagaacaacagcgtcggcggctcgtggagaccaaaaggaatcgcgagatagctcagcttaaaaaagaacagcgtaggcaggaattccagatccgggccctggagagccagaagcgacagcaggaaatggtcttacggagaaaaacccaggaggtttccgctctgcgtaggctggccaaaccaatgtccgaaagggtggcggggagggctgggctcaaaccaccaatgctcgattccggcgccgaggtgtcagcttcaacgacttcttctgaggccgaaagcggggctcggtctgtgtccagcattgtgcgccagtggaatagaaagataaatcacttcttgggagatcaccctgcccctacggtgaatgggactcggcctgcccgcaaaaaatttcagaagaaaggcgcctcccagtcgttctcaaaggcggcccgcttaaaatggcaatccctggaacggcgtattatcgacatcgtcatgcaacggatgactattgtgaatctggaggctgatatggaacgtcttattaagaagagagaggagcttttcctcctacaggaagccctgcggcgtaagcgggagagactgcaggcagagagcccagaggaggaaaaaggactccaagaactggccgaggagatagaagtgcttgcagcaaatattgattacatcaacgatggaatcaccgactgtcaggccacaattgtgcagttggaagaaacgaaggaggaactggatagtaccgacacctccgttgtgattagcagctgctccttagccgaggcgagattgttgctagacaacttcttgaaggcttccatcgataagggcttgcaggtggcccagaaggaagcccaaatcaggttactggaaggccgactgaggcagacggacatggctggtagctctcagaaccacttgctgcttgatgcccttcgggaaaaagcagaggcccaccccgaactacaggctctaatttacaacgtacagcaagagaacgggtacgccagcaccgatgaagagattagcgagtttagtgaagggtctttctcacaatctttcacaatgaagggctccacctctcacgatgattttaaatttaagagtgagcccaaacttagcgctcagatgaaagctgttagcgccgagtgtctagggcctcctttagacatttctacaaaaaatattactaagtcccttgcgtcactcgtggagattaaggaggatggagtcggcttcagtgtccgagatccgtactatagggacagagtgtccagaaccgtgtcccttccgacacggggatccacgttcccacggcaatcaagggctaccgaaacatccccccttacccgcaggaagagctatgaccgcggtcagccaatccgctctactgacgtaggtttcaccccgccaagttcaccgcccacgcgccctagaaacgatcgaaatgtcttctcccgattaacaagcaaccagagtcagggctcagctctggacaagggaataatcagccccgtcggtggggctaaaggcgcccggaccgcccctttgcagtgcgtaagcatggcagagggtcacacaaagccaattctttgcctggatgctacagatgagctgctgttcactgggtccaaggatcgctcctgcaagatgtggaatctggtgaccggccaagaaatcgcagctctgaagggacatcctaacaatgtggtgtccatcaagtattgcagccactcaggtttggtattcagcgtgagcacatcttacattaaagtttgggacattcgcgatagcgctaagtgcatccgtactttaacatcatccggacaggtgatcagcggcgatgcatgtgcagccactagcacacgagccatcacaagtgctcaaggggagcatcagataaatcaaatcgccctttctcccagcggtacgatgctgtatgccgcatctggcaatgctgtgcgtatttgggagctgtccaggtttcaacccgttggcaaactcacaggacatatcggtccagtgatgtgcctgaccgtgacacagaccgcatcacaacatgacctcgtggtgaccggatcaaaagaccattatgttaaaatgtttgagctcggagaatgcgtcacaggcacaataggccccacacacaatttcgagcccccgcactacgatggcatcgaatgcctggctatccagggcgacatattattctcaggaagcagagacaatgggatcaaaaaatgggatctcgaccagcaagagttgatacagcagatccctaatgctcataaggattgggtgtgcgctctggccttcatcccaggccgacccatgctccttagtgcatgccgagctggcgtgatcaaggtgtggaacgttgacaactttactcccatcggcgagatcaagggccatgatagccctatcaacgccatctgtaccaacgcaaaacatatctttaccgcctctagcgatctgacagttaaattttggtccgttcggaggcttccacactctggcccgccatag

SEQ ID NO: 192440 - DNA, 4914 bp, synthetic construct
  misc_feature 1..4914: note = Description of Artificial Sequence: Synthetic coding sequence
  source 1..4914: mol_type = other DNA
atggccggccagggcgactgctgcgtgaaggtggccgtgcggatcaggccccagcttagcaaagaaaagatagagggatgtcatatctgtacaagcgtcactcctggggaaccacaggtacttctgggaaaagataaagcctttacatacgacttcgtttttgatctggacacgtggcaagaacagatctactctacctgtgtgtccaagctcattgaagggtgcttcgaggggtataacgcaactgtcctcgcttacggacagacgggtgccggcaaaacatacactatgggtaccggcttcgacatggccacaagcgaagaggaacagggtattatcccccgcgccatcgctcatctcttcggcggcatcgctgagcgtaaaagaagggcgcaggaacagggggtggccggcccagagttcaaagtgagtgcacagttccttgagctctacaatgaggaaattctagacctgtttgatagcacacgcgacccagacacacgacaccggcggagcaatattaagatccatgaagacgccaacggagggatatatacaacaggagtgacaagtagactgatccacagccaggaagagttgatccagtgtttgaagcagggggctctgtcacggacaaccgccagtacacagatgaacgtgcaatcctcaagatctcacgcaatcttcaccattcatctgtgtcagatgcggatgtgcacgcagccggatctagtcaacgaagcggtgactggcctgcccgatggaactcccccaagcagtgagtatgaaaccctgaccgcaaaatttcactttgtagaccttgcaggctctgagcgactgaaaaggacgggtgcaactggcgagcgagccaaagaggggattagcattaattgtggcctgcttgcattgggaaacgtgatctccgccctgggggaccagagtaagaaggtagtgcacgttccctatagagattcaaaactgaccaggctactacaagacagcctgggcggtaattcccagaccatcatgatagcttgcgtgagcccctcagaccgagatttcatggagaccctcaatactctaaagtacgctaatcgggctaggaatataaagaataaggtagttgtgaatcaggacaagacgtcccagcagatcagcgctctgcgggccgaaatagcccgtcttcagatggagctgatggagtataaggccggcaaacgggtcattggggaagacggtgccgaaggctatagtgacctgttccgggaaaatgcaatgctccagaaggaaaatggcgccctgcggctgagggtcaaagccatgcaggaagccattgatgctatcaataaccgagtaacccagctaatgagccaagaggctaacctgcttttggccaaagccggtgacggaaatgaggcaatcggggcattgatccagaattatatacgcgagattgaggagctgaggaccaaattgctcgaatccgaagccatgaatgagtctctccggaggtctctgtcccgcgcttctgctagaagtccctatagtcttggggcaagcccggcagctccggcctttggagggagcccggcttcttcaatggaagatgcatccgaagtaataaggcgcgccaagcaggatctggaacgtctgaaaaagaaggaagtcaggcagagaaggaaaagtccagagaaggaagcctttaaaaaacgtgctaagctgcagcaggagaactcagaggagacagacgaaaacgaagctgaggaggaggaggaggaaagagacgaatcgggctgtgaggaagaggagggacgggaggatgaagacgaggactccggttcagaagagagtttggtggactctgactccgaccccgaggagaaggaagtgaatttccaggcagatcttgcagacctgacctgtgagatcgagatcaaacagaaactgatcgacgaattagaaaactcccagaggagactgcagacccttaagcatcagtacgaggaaaaattaatcctcctccagaataaaatcagagatacccaactcgagcgcgatcgggtgctgcagaatctcagtacgatggaatgttatacggaggaaaaggctaacaaaatcaaagctgactatgagaaacggctgcgggagatgaaccgcgatcttcagaaattacaagcagctcagaaggagcacgcgcgcttgctaaagaatcagtctagatacgaacgggagctcaagaagctgcaggcggaagtggcagaaatgaaaaaagcgaaggtcgccctgatgaaacagatgcgagaggagcagcagcgcagacgattagtggaaactaagaggaatagagagatcgcccaacttaaaaaagagcaacgcagacaggaatttcaaataagagccctcgaatcccagaaacggcagcaagagatggttctccgccgtaaaacacaggaagttagcgcacttcggcgactggctaagcccatgtccgagagggtggctggcagagcagggctgaagccccccatgctcgactccggggccgaagtgagtgccagtacaacctccagtgaagctgagagcggggctcggagcgtgagcagcatcgtccggcagtggaaccggaaaatcaaccattttcttggagaccatcctgccccaactgtgaacggcactagacccgctaggaaaaagttccagaagaagggcgccagtcaaagtttctctaaagctgcacggctgaagtggcagtccctggaaagaagaatcatagacattgtgatgcagaggatgaccatagtgaatctggaggccgacatggaaaggctgatcaagaagcgggaagagctttttctgctccaggaagccttgcgcaggaaaagggagcgccttcaagctgagtccccagaggaggaaaaaggactccaggagctggcagaggagatcgaagtgctggccgcgaatatcgattacatcaatgacgggatcaccgactgccaagccacaatcgtgcaactcgaagagacaaaggaggagttggattccaccgatacttctgtggtcatcagttcttgttcactggcagaagctcgcttgctcttagacaattttctcaaggctagcattgataagggactgcaggttgctcagaaggaagctcagatccgattattggagggccgactgagacaaacagatatggctgggagcagccagaaccatctgctgctcgacgctctgcgggagaaggccgaggcgcaccccgagctgcaggctctcatatataatgtccagcaggagaacggctatgcgtctacagatgaggagatatcagagtttagcgaaggcagcttcagtcaatcttttacaatgaagggtagtacttcccatgatgatttcaaattcaaatcagaaccaaaactatcagctcaaatgaaggcagtttctgctgagtgtctcggcccgcctctcgacatctctacgaagaacataacaaaatcgttggccagccttgttgagattaaagaggacggagtgggattttccgtgcgcgatccttactatcgagaccgcgttagccgtactgtgagccttcctacacgcggcagcacattccccagacagtcccgggctaccgaaactagccccctcaccaggcgcaagtcctatgacaggggacagcccattagaagtactgacgttggatttactcccccatcctctcctcccaccaggcctaggaacgacaggaatgtattttcacggctgactagcaaccagtctcagggtagcgcactcgacaagtcagacgattctgactcaagcctgtctgaggtactgcgtggcattatatcacctgtgggaggtgctaaaggagcccgcacagctcccctgcagtgtgtttccatggctgagggtcataccaagccaatactgtgcctggacgccaccgatgagctcctgttcacagggagcaaagaccgtagctgtaaaatgtggaatctagtgaccggtcaggaaatcgccgctctcaagggccacccaaacaatgtggtctccatcaaatactgtagccatagtggcctggttttctcagtctctacctcctacataaaggtttgggacattcgggattcagcaaaatgtatcagaacactgacctcatcagggcaagtcatcagcggagacgcctgcgccgctacatcaacacgggcgattacctcagcccagggagagcaccaaatcaaccagattgcactgtcaccttccggaaccatgctctatgccgcttctggaaatgctgtgagaatctgggaactgtcgagatttcagcccgtgggaaagctgacaggtcacatcgggcctgtgatgtgtttaaccgtcactcagaccgcctcccaacacgatctcgtcgtaactggttccaaggaccactacgtgaagatgtttgagctcggcgaatgcgtgactgggaccattggaccaacccacaattttgaacctccacactacgacggcatcgaatgtctggcaatccagggtgatattttattttctgggagcagagataacggcatcaagaaatgggacctcgaccagcaggagctgatacagcagattcccaatgcacataaagattgggtctgtgcccttgcttttattccaggccggcctatgcttctatctgcttgtagagccggtgtcattaaggtgtggaacgttgacaacttcacccccatcggtgaaattaagggacatgactctcccattaacgccatttgcacaaacgccaaacatattttcactgcaagctcggattgtagagtgaagctgtggaattatgtgccgggactaacaccctgtttgccccggagagtactggccatcaaaggtcgggccactaccctgccgtag

SEQ ID NO: 192441 - DNA, 4872 bp, synthetic construct
  misc_feature 1..4872: note = Description of Artificial Sequence: Synthetic coding sequence
  source 1..4872: mol_type = other DNA
atggccggccagggcgactgctgcgtgaaggtggccgtgcggatccgcccccaactcagtaaagagaaaattgagggctgccacatttgtacatccgtgactccaggggagccacaggtgctacttggtaaggacaaagcatttacttatgatttcgtgtttgatctggacacttggcaggagcagatctattctacttgcgtgagtaagcttatagagggatgctttgagggctacaatgcgaccgtgctggcatatggccagaccggggcaggtaagacctacacgatgggcacaggattcgatatggccactagcgaggaagagcaagggatcattccaagagcaatagctcatctgttcggaggcatcgccgaaagaaaacggagagctcaggaacaaggcgtcgccgggcctgagtttaaggtctctgcccaatttttagaactgtataatgaggagatcctggatcttttcgacagcacccgggaccccgatactcgccatcgccgatcaaacatcaaaatacacgaggatgccaacggaggcatttatacaactggcgtgacctcacggcttatccactcccaggaggaactgattcagtgcctaaagcagggggccctgagccgtacaacggcatccacacaaatgaacgtgcagtcctcgcgaagtcatgccatctttacgatacatctttgtcagatgagaatgtgcacacagccagaccttgtgaatgaagcggtgacaggcctgccagacggcacaccgcctagctctgaatatgaaacacttactgccaaattccactttgttgacctggccggctctgagcggctaaagagaaccggggcgactggagagcgggctaaggagggaatttccatcaactgcggcttgttggcgttgggcaacgtcatcagtgccctgggtgaccagagtaagaaggtcgtgcatgtcccatatagagattccaagctgacacgtttgcttcaggacagcttaggaggcaatagccagactattatgattgcttgtgtttcaccctccgaccgtgacttcatggaaactcttaatactctgaaatatgcaaacagagcgcgcaatatcaaaaacaaggttgtggtcaatcaggataaaacctctcagcaaatatctgctctgcgtgctgagattgctagattgcagatggaactcatggagtataaggcaggtaaacgggtgatcggcgaggatggcgccgaaggctacagtgacttgtttagagaaaacgccatgttacagaaggagaacggggccctcagattacgggttaaagctatgcaagaagctatcgatgctatcaacaatcgggtcacacagctgatgtctcaggaggctaacctgctcctggctaaggctggggatggcaacgaggccatcggggctctcattcagaactatattagggaaatcgaggaattgcgaacaaagctcctggaaagcgaagctatgaatgagagcctacgcagaagcctgtcccgcgcaagtgcgaggtcaccttacagcttgggtgcatctcctgcagctcctgctttcggtggctcaccggctagtagtatggaagatgcatccgaggtgatccggagagcaaaacaagacctagaaagactcaagaaaaaagaagttagacagcggagaaaaagtcctgaaaaagaagcgtttaagaaaagggccaagttgcagcaggagaactcagaggagacggatgaaaatgaggctgaagaagaggaagaggaacgggacgagagcggttgcgaggaagaggaaggccgagaggatgaagatgaggatagtggcagcgaagaaagtctggtggatagtgactcggatcctgaagaaaaggaagtaaatttccaggcagacttggctgacctcacttgtgagattgagatcaaacagaagttgatcgatgagctggaaaactcccagcgccgcctgcagaccctcaagcatcagtatgaggaaaaactcatattactccaaaataaaattagggatactcaacttgaacgagatagagttcttcaaaacttatcaacaatggagtgctatactgaggaaaaggcaaacaagataaaagccgattacgaaaagcgactgcgagagatgaatagagacctccagaagctgcaggcagcccagaaagagcatgcacggctgctgaagaatcagtcccgttatgagagagagctgaagaaactgcaagctgaggtcgccgagatgaagaaagcaaaggtagcgctcatgaaacaaatgagggaggagcagcagcgacgacggctggtggagacaaagcgtaacagagaaatcgcccaactgaagaaggagcagcgccgacaggaattccaaatccgggctctggaatctcagaagcgtcaacaggagatggtgctacgccggaagacccaggaagtttctgccctgcgccgattggctaagccaatgagcgaacgggtagctggtagggcagggttgaagccaccgatgttagactctggtgctgaggtctccgcctccaccacctcatctgaagctgagagcggcgctcggtctgtcagctctatcgtgagacagtggaaccggaaaatcaatcactttttgggggaccaccccgcgccgaccgtgaatggcaccaggcctgcgcggaagaaattccagaaaaagggtgcttcacagtccttcagcaaagcagcacgactaaagtggcagtctttagagcgcaggattattgatattgtaatgcaaaggatgactattgttaacttggaggcagacatggaacgactcattaagaaacgcgaggagctgttcctactgcaggaggccctgcgcagaaagagagagcgcctccaggccgagagccccgaagaggaaaaaggcctacaggagctggccgaggagatagaagtcctcgctgctaatatcgactacatcaacgatggaatcacagattgccaggcaacaatcgtgcagctcgaggaaaccaaagaggaacttgattccacagacacaagcgtggttatttcatcgtgcagtctggccgaagcccgccttctcctcgacaacttcctcaaagccagcatcgacaaagggctgcaagtggcccagaaggaggcccagatccgcctcctagagggccgcctgcgccagacggatatggccggaagttcccagaaccatctactcctagatgcactcagagagaaggctgaggcacacccagaactgcaggcgcttatctacaacgttcagcaagagaatggatacgcctcaaccgacgaggagatttctgaattttccgaaggttcgttttcccagtccttcactatgaaagggtctacttcacatgatgactttaaattcaaaagcgagccaaaactctcagcccagatgaaagccgtttccgcggagtgtttaggcccacctctggatatctctacgaagaatatcactaagagcctcgctagtctggttgagatcaaagaagatggagtggggtttagtgtgagggatccttactacagggatagggtctctcggactgtgagtctaccaacccgaggaagcacattccctcgtcagtctagggctacggagacgtccccactcacccgacggaagtcttacgatcgtggtcagccaatcaggagcaccgacgtggggtttactccaccctcatccccccccacacggcctagaaacgatcgaaatgtctttagccggctgacatccaaccagagtcaaggctcagcgctagacaaaagcgacgattctgacagttcattgtcagaggtgctccggggtattatcagccccgtggggggcgccaagggggctcgcacagcgcccttgcagtgcgtgagcatggcggaagggcatacgaagccgattctatgcctagacgccaccgatgaacttctgttcacaggctcaaaggaccgcagctgtaagatgtggaatttggtgactgggcaggaaattgctgccctcaaggggcatcctaacaatgtggtcagcattaaatattgttcccacagtggacttgtgttcagtgtaagtacaagctacataaaggtgtgggacattcgggactccgcaaaatgtataaggacactgacttcatccggacaagtaatctccggcgatgcctgcgcggctaccagcacgcgggctatcacctctgcgcagggcgaacaccaaataaatcaaatcgccttgagccccagcggaaccatgttatacgccgccagcggtaatgccgtgagaatctgggagctctcaagatttcagcctgtcggcaagcttactggccatatagggcccgtcatgtgtctgactgtaacacagactgcttctcagcatgacctggtcgtgaccggtagcaaggaccactatgtgaagatgtttgaactaggggagtgcgtgacaggcacaattggtccaacccacaacttcgagcctccacactacgatgggatcgagtgtcttgctatccagggcgacatcttattcagtggcagcagggacaacggaattaaaaagtgggatctggaccagcaggaactgatccagcagatcccgaatgcacataaagattgggtgtgtgcgctggcctttattccagggaggcctatgttgcttagcgcttgtagagccggtgtcatcaaggtctggaacgttgataacttcacaccgatcggagagataaaggggcatgattctccaatcaatgcaatctgcactaacgccaagcatatcttcactgctagctcagatcttactgtgaaattctggtcagttcggaggctgccccacagtggcccgccctag

SEQ ID NO: 192442 - DNA, 5007 bp, synthetic construct
  misc_feature 1..5007: note = Description of Artificial Sequence: Synthetic coding sequence
  source 1..5007: mol_type = other DNA
atggccggccagggcgactgctgcgtgaaggtggccgtgcggatcagaccacagctcagcaaagagaaaatcgaggggtgccatatatgtaccagcgtaacccctggggagcctcaagtactacttggtaaagataaagccttcacgtatgattttgtgtttgatctcgatacatggcaggaacaaatttattctacatgcgtctcaaagctgatcgaagggtgctttgaagggtataacgcgactgtattagcctacggccagacgggagctggtaaaacgtacacgatgggcacaggcttcgatatggctacctcagaggaagagcaaggcatcattccacgcgccatcgcacacttattcggggggatcgccgagcggaagaggagagcacaggaacagggcgtggctggccccgaatttaaagtgagcgcccaattcctcgaactgtacaatgaggaaatcctcgacctgttcgatagcacaagggacccagatacacgacatagaaggtctaacatcaagatccacgaagacgccaacggtggcatctataccactggtgtcactagccgactgatccacagccaggaggaactgatacagtgtctaaaacagggagccctcagtagaaccaccgcttcgacacagatgaacgttcagtccagccgctcacacgccatttttacgatacacctgtgccagatgcggatgtgtacccaacccgacctcgtgaacgaagccgtgaccgggctaccagatggtacaccaccttctagtgagtacgaaacactcactgctaagtttcacttcgttgatctggcgggcagtgagcgcctgaaacgcacaggagctaccggtgaacgggccaaagaaggaataagcatcaattgtggtcttctagccctagggaacgtgatttccgcgctgggggatcagagcaagaaggtagtgcatgtaccttatagagactcaaaactcaccaggctcctgcaggactcacttggcggcaactcacagacaatcatgatcgcttgcgtctccccatctgatcgcgatttcatggaaaccctgaacaccttgaaatatgctaacagagccagaaacataaaaaacaaggtcgtggtgaatcaagataagactagtcagcagatcagcgccctgcgggccgagatcgcacgcctgcagatggagttaatggagtataaagccggaaaaagggtcattggggaggatggagcggaaggctactcagacttgttccgggaaaacgcgatgctccaaaaggaaaacggggctctgcgcctgagagtcaaagcaatgcaggaggctattgacgccataaacaatagagtcactcagctgatgagccaagaagccaacctgttattggcaaaggccggagatggcaatgaggcaatcggggcccttatccagaactacatcagggagatcgaagaactgaggacaaagcttcttgaaagtgaggccatgaacgaatctcttcggagatctctgtcccgtgccagcgctaggtccccatacagcctgggcgcctcacctgcagccccggccttcggggggtccccagccagttcaatggaagatgcgagtgaggtgatcagacgggccaagcaggacctggagagactgaagaagaaggaggtgcggcaaaggaggaagtcgcctgagaaggaggcttttaagaagagagcaaagctacagcaggagaatagtgaggaaactgacgagaacgaagccgaggaggaggaggaagaacgcgatgagtccggatgcgaggaggaggaagggcgggaagacgaggacgaagactcaggctcagaagaatcactggttgactcggactccgatccagaggagaaggaagtgaacttccaggctgatctggcagacctgacttgcgaaattgaaattaagcagaagctgattgatgagctagaaaactcgcaaagacggttacagacccttaagcaccagtacgaagagaaactgatactcctgcagaataagatcagagacacccagctggaacgcgaccgagtactacagaatttgtcaacaatggagtgctatacagaggagaaagccaataaaatcaaggctgactatgagaaaagactgcgagaaatgaatagagacctgcagaagctgcaggcggcacagaaggagcacgcccgactcttaaagaatcagtccaggtatgagcgagaactaaaaaagctgcaggctgaagttgccgagatgaagaaagccaaagtagcccttatgaagcagatgcgggaggaacagcaacgcaggaggcttgtggaaactaaaagaaatagagagatcgcccagttgaagaaggagcagagaaggcaagaatttcagatcagagctctggagtctcagaaaaggcagcaggagatggtccttcgacgaaagacacaggaagtatccgctctgcgtcgactggcaaaacctatgagtgagagagttgctggtagggccggactgaagcctcccatgctcgactctggtgctgaagtgagtgcatctacaacctcatctgaggcggaaagcggagcccgctctgtgtcatcaatagtgagacaatggaaccgtaaaattaatcactttttgggcgatcaccccgcaccgactgttaacggcacacggccagcccggaaaaagttccaaaagaagggggcatcccaaagtttcagtaaagccgctcgactcaaatggcagtccctcgagaggcgcattattgacattgtaatgcagaggatgactatcgttaacctggaggctgacatggagcggctgatcaagaagcgggaggagttgtttttgctgcaggaggccctgaggcgcaaaagggaacgtcttcaggcagagtcccctgaggaggaaaaaggcctgcaggaactggcagaagagatagaggtccttgctgccaacattgactatatcaatgacgggatcacagactgtcaggcaaccatcgttcaacttgaagagaccaaagaagaattggactctacagacaccagcgtcgtgatctcatcctgttcactggcagaggccagattgctgcttgacaattttttgaaggccagcatagataaaggcctgcaggtggcacagaaagaagctcagattagactcctagaaggaagactccggcagaccgatatggccggatcttcacagaatcacctgctcctcgatgccctcagggagaaagctgaggctcatccagagctccaggcccttatctacaatgtgcaacaggagaatggctatgcctctactgatgaggagattagtgagttcagcgaggggagcttttcccagtcgttcaccatgaaaggtagtacaagtcatgacgactttaagtttaaaagcgagcctaaactgtctgcgcagatgaaagcagtgtcagccgagtgcttggggcctccactggatatatccactaaaaacatcaccaagagtctggcgagtctcgtcgaaattaaagaagatggggtaggattctcagtgcgcgatccttactaccgggaccgggtttcacgcacagtctccttgccgacaaggggtagcacattcccccgccagtctagagcaacagaaacaagcccactgactcgacgtaaaagttacgacaggggccagcccatcaggagtaccgatgtgggctttacaccccctagtagtcccccaactagacccaggaatgaccggaatgtcttcagtaggctcacatccaaccagtcccagggcagtgcgcttgataagagcgatgacagtgactcctcactcagcgaggtcctgcggggaatcatttcgcctgttggtggggccaagggagcaaggactgctccactgcagtgcgtaagcatggcagagggacatactaaaccaatcttatgtctggacgcaacagatgagctcctatttaccgggagcaaggaccggtcgtgtaagatgtggaatctggtgaccggacaagagattgctgcactgaaggggcatcccaacaacgtagtttctatcaaatattgctctcattcagggctggtcttctccgtttcgactagctatattaaggtctgggatatccgcgattctgctaagtgcattcgaacccttacatccagcgggcaggtgatatccggtgacgcctgcgccgcaaccagtacacgggccataacatcggctcagggcgagcatcaaattaatcaaatcgccctcagccctagcgggactatgctctacgccgcctccggcaacgctgtccgaatctgggaactgtctaggttccagcctgtcggtaaacttactgggcacatcggaccagtgatgtgcctgactgtaacccagacggcatcacagcacgatctggtcgtaacagggtcgaaggatcactacgtcaaaatgttcgagctcggcgaatgtgtgactggaactattggcccgacccacaacttcgagccccctcactatgacggaatcgagtgcctggccattcagggagatatcctatttagcggctccagagacaacggtatcaagaaatgggatctggatcagcaggagcttatacagcagatcccaaacgcgcacaaggactgggtctgcgccctcgccttcatccctggtaggcctatgctgctgagtgcgtgtagggctggggttataaaagtgtggaacgtggataatttcacaccaatcggagagatcaagggccatgactcgccaatcaacgccatatgtaccaacgcaaaacatatcttcactgcctcgtcagactgtcgggtgaagctgtggaattacgtgcccggcctcaccccatgtctgccacgccgagtcttagctatcaagggccgggcaacaacttgccccgacccaccacaactgtctctaagcccgctctcttttttccctagtttcctgttcccgctctttccccactttgatctttcttgcttcctgacatag

SEQ ID NO: 192443 - DNA, 1998 bp, synthetic construct
  misc_feature 1..1998: note = Description of Artificial Sequence: Synthetic coding sequence
  source 1..1998: mol_type = other DNA
atggccgccggcggcagcacccagcagcggcggcgggagatggccgcagcaagtgcggctgccatctccggcgctgggcggtgccgtctatcgaaaataggagccacccggcgccccccgccagctagagtccgggtagccgttaggcttcggcctttcgtggacggtactgcaggggcaagcgaccccccctgcgtccgcggaatggatagctgttctttagagatcgcaaactggcgcaaccaccaggagacactgaaataccagttcgacgctttttacggcgaaagatccacacagcaggatatttatgcagggtcggttcagccaatcctccggcacctgttggagggtcagaacgcctcggttctggcctacggaccaactggcgctggtaagacgcatacaatgctcggctcccccgagcagcctggagtcattccccgcgccctcatggacctcctccagctgacacgggaagagggcgccgagggacgaccctgggctctttcagtgacaatgagttacttggagatttaccaggagaaagtattggacttgctggatccggcatcaggtgatctcgtcatcagagaggattgtagggggaacatcctgattcccggactgtcccaaaagccaatatcatcctttgcagactttgagaggcactttttgccagctagccgcaatcgcaccgttggagccactcggctaaatcagcggtccagtcgcagccatgcagtcttgctcgtgaaagtggaccagcgcgagcgactcgcaccattccggcagagagagggcaagctatacctcatcgacctggcagggagtgaagacaaccgcagaaccggcaataaagggctgcggcttaaagagtccggtgccattaataccagcctgttcgtgctgggcaaagtggtggatgcgcttaatcaaggactgcctagagtaccataccgggacagtaaactgactagactgctccaggattcactgggcggttccgcccactctatcctaatcgcaaacatcgctcctgaacgaaggttttatctggataccgtgtcagcgttgaattttgcggctagatcgaaagaggtgattaatcggcccttcactaatgaatccctccaaccgcacgccctggggcccgttaagctcagtcagaaggaactgctggggcctcccgaggcgaaaagggccaggggaccggaagaagaggaaattggatccccagaaccgatggctgccccagcttcggcatcccagaagctctcgcccctccaaaagttgagctcaatggacccagccatgttggagcgattgctatccctagatcggctgttggctagtcagggctcccagggggcccctctgctgtctaccccaaagagagaaagaatggttctgatgaagaccgtggaggagaaagacctcgaaattgagagactcaagacaaaacagaaagaactggaagccaagatgcttgcccaaaaagcggaagaaaaagagaaccattgtcccacgatgctgaggcctctgagccataggacggttacaggcgccaagcctcttaagaaggccgtagttatgccacttcagctgattcaggaacaggccgcttctcctaatgccgagatccacattctgaaaaataaaggccgtaagcgcaaattggagtccttggacgcgctggagcctgaggaaaaagctgaagactgctgggagttgcagatttcaccggaattactagctcatggccggcagaaaatccttgacctgcttaacgaaggcagcgccagggacctccggtcactacagcgcatcgggcccaagaaggcccagctgatagtcggatggagggaattacacggtcccttcagccaagtagaggatttggagagggttgagggtataactggaaagcagatggaaagctttctgaaggccaacattttgggcctagctgccggacagaggtgcggcgccagttag

SEQ ID NO: 192444 - DNA, 219 bp, synthetic construct
  misc_feature 1..219: note = Description of Artificial Sequence: Synthetic coding sequence
  source 1..219: mol_type = other DNA
atgctggcccagaaggccgaggagaaggagaaccactgccccaccatgctccgacctctctctcatagaacagtcactggagccaaacctcttaaaaaagcagtggtcatgcccctgcagctgatacaagagcaagccgcatctccaaacgcagaaatccatatcttgaagaataagggacgaaaaaggaaaggggccaacatcactaccggttattag

SEQ ID NO: 192445 - DNA, 1794 bp, synthetic construct
  misc_feature 1..1794: note = Description of Artificial Sequence: Synthetic coding sequence
  source 1..1794: mol_type = other DNA
atggacagctgcagcctggagatcgccaactggcggaaccaccaggagacacttaagtatcagttcgacgccttttacggcgagagatccacccaacaggacatttatgccggatcagttcagcccattctccgccatcttcttgaaggccaaaacgcgtcggtgctggcttatggaccaactggcgccgggaaaacacacacaatgctggggagccctgagcagcccggggtgatccctagggcactcatggacctgctccaactgactagggaagagggcgctgaaggaagaccatgggcccttagtgtaaccatgtcatacctggagatctatcaggagaaggttctggacctgttggaccccgcttctggagacctggtgatcagggaagactgtcgtggcaatatcctgattccgggcttatcacaaaagccaataagttcatttgcagactttgagcggcatttcttaccggcatctcgtaataggaccgtgggcgctacacgcctgaatcaaaggagctcacggagtcacgcggttctcctggtaaaagtcgaccagagggagcgactcgctccttttcgacagcgggaaggaaaattgtacctcatagatctagccggctctgaagataatcgcagaaccggcaataagggactcaggctgaaagaatccggcgcgattaacacgtccctctttgtgcttgggaaggtggtagacgctcttaaccaaggactgcctagagttccctacagggactccaaactgacaaggctgttacaggattccttaggggggagtgcacactccatcctgattgccaacattgctccggagcggaggttctacctggataccgtcagcgcgctaaattttgccgcccgctctaaagaagttatcaatcgccctttcaccaacgaatccctgcaaccccacgccctagggcccgtgaagctgtctcagaaggagttgttaggtcctcccgaggcaaagagggcccgcggacctgaagaggaggagatcggctcgcccgaaccaatggccgcacctgcaagtgccagtcagaagcttagtcccctgcaaaaacttagctctatggaccccgccatgctggagcggctgctttcgctcgatagactgctcgcctcccaaggtagccagggagcaccactcctgtcaactcccaaaagagaacgtatggtcctgatgaagaccgtcgaggagaaggatctagaaatcgagcggctgaaaaccaagcaaaaagagcttgaggctaaaatgctcgcccagaaggccgaagaaaaagagaatcattgccctaccatgctgagacccctgagtcaccgcacagttaccggggccaagcccctcaaaaaagctgtagtcatgcccctgcagctgattcaggaacaggccgcaagcccaaacgctgaaattcacatattgaagaacaaggggcggaaaaggaagctggaaagtctggatgcgctggaacctgaggaaaaggcagaagactgctgggagctgcaaattagccccgagctcctcgcccacgggcgccagaaaatccttgacttactgaacgaaggtagtgctcgggatctgagaagtctccagcggattgggccaaaaaaagctcagctcattgttggatggagggagcttcacggtccattttcccaagtcgaggacctcgaacgggtggaaggtataacaggaaaacagatggagagctttcttaaagctaatatactcggtcttgccgccggccaacgctgtggtgcttcctag

SEQ ID NO: 192446 - DNA, 1794 bp, synthetic construct
  misc_feature 1..1794: note = Description of Artificial Sequence: Synthetic coding sequence
  source 1..1794: mol_type = other DNA
atggacagctgcagcctggagatcgccaactggcggaaccaccaggagaccctcaagtaccagtttgacgccttttacggagaacgttccacccaacaagacatttatgcaggctctgtacaacccatactacgtcatttactggagggccagaatgccagtgtattggcttacggcccaacaggagccgggaagacccatacaatgctagggtcacctgagcagcccggggtgatccctcgcgcccttatggatctccttcaactcacccgcgaggaaggagccgaggggcggccatgggcactatccgtcactatgtcatatctcgagatctatcaggaaaaggtactagacctgctggaccccgcctccggggatctggtgattcgcgaggattgtcggggcaacatcttgattcccggtctctctcagaaacccatcagcagcttcgcggactttgagcgccattttctcccggcatctagaaataggactgttggagcaacccgtctgaaccaaagatcgtccaggtcacatgccgttttactcgtgaaagttgatcagagggagcggctggcccctttcagacaaagggagggcaaattgtatctgatcgacctggcaggctccgaggacaaccgccggaccggcaacaaagggcttagactgaaggagagtggagctataaatacgagcctgttcgtacttggcaaagttgttgacgccctcaaccagggactgcctcgtgttccctaccgcgatagcaaattgacacggcttctgcaggacagtcttggtggttccgcccatagcatacttatcgctaacatcgctccagagagacgcttctacctggatacagtctcggccctcaactttgctgctagatctaaagaggtgataaatcggcctttcacgaatgagagcctgcagccccacgccctgggccctgtcaaattaagtcagaaagaactcctcggccctcccgaagccaagcgggctcgggggccagaagaggaggaaatcggcagccctgaaccaatggccgcgcctgctagcgcatcacagaagctttcccccctgcaaaaactgagctctatggaccccgcgatgctggagagactgctgagtctggacaggttacttgcatcacagggatcgcagggcgcaccactcctgagcacccccaaacgagaaagaatggttctgatgaaaactgtcgaggaaaaagatcttgagattgagcggctaaaaacgaagcaaaaagagctggaggcaaagatgctggcccagaaggccgaagaaaaagagaaccattgtcccaccatgttacggccactctcccacaggacggtaacaggagcaaagccattaaaaaaggcggttgtgatgcctctgcagttgatacaggagcaagccgccagccctaacgcggaaattcatattcttaagaataaggggagaaaacgaaaacttgaatctcttgacgccctcgaacccgaggaaaaagccgaggactgctgggaattacagattagccctgagttgttagctcatggacgccagaaaatcttagacctgctcaatgaggggtctgctagagaccttagatcacttcagaggattggccctaaaaaagcccaactcatagttggatggcgggagctacacggccctttttctcaagtcgaagacttagaacgcgtagagggcatcacgggcaagcaaatggaatcctttcttaaagctaacattctggggttggcggcagggcagcggtgcggagcttcttag

SEQ ID NO: 192447 - DNA, 2883 bp, synthetic construct
  misc_feature 1..2883: note = Description of Artificial Sequence: Synthetic coding sequence
  source 1..2883: mol_type = other DNA
atgaagagcgcccgggccaagaccccccggaagcccaccgtgaagaagggcagccagacaaacctgaaggaccctgtaggcgtctattgtagggttcgcccgttgggattccccgatcaagagtgctgtatcgaagtgattaacaacaccacagtccaactacatacacccgaaggatatcggctgaaccgcaatggagattataaagagacccagtatagtttcaagcaggtattcgggacccatacaacacaaaaagagctgtttgacgtggttgcaaatcccttagttaacgacctgattcacggaaagaacgggcttttgtttacatatggagtgacaggttccgggaagacccacaccatgactggtagtcccggcgagggaggcttactgccccgctgcctggatatgattttcaacagtattggttctttccaggcaaagcgttatgtgttcaaaagtaatgatcgcaactcaatggatattcagtgcgaggtggacgcattgctggagagacagaagagggaagcaatgcccaacccaaaaacgtcctctagcaagcgtcaggtggaccccgaatttgctgacatgatcacagttcaggagttctgtaaggcagaggaggttgacgaggacagcgtgtacggagtcttcgtgtcttatatcgagatttataacaattacatctatgatctcttagaagaagtgccattcgatcccattaagccaaagcccccgcaaagtaagctattgcgagaagacaaaaatcacaatatgtatgtggcggggtgtacggaagtggaagtgaaaagtacggaagaggcatttgaagttttttggcgtgggcagaaaaaacggaggatagcaaacacacacctcaatcgagaatcttctcgatcccactccgtgttcaacattaaattagtacaggcaccgctcgatgccgatggagacaacgtgcttcaggaaaaagagcagattaccatctcacagctctctctggtcgacctggccgggtcagaacgaacaaatcgaaccagagcagaaggaaatcggcttcgcgaggcggggaatatcaaccagtcccttatgaccctgagaacttgtatggatgttttgcgtgagaaccagatgtatggcaccaataaaatggtcccctaccgtgacagtaagctgacccacctcttcaagaattattttgatggagagggaaaggtgcgcatgatcgtctgcgtcaacccgaaggccgaagactatgaggagaacctgcaggtgatgagattcgccgaagtgactcaagaggtggaggtggcacgcccagtggataaagctatttgcggcctgacacctggccgccgttacaggaaccagccacgcgggccagtcggcaacgagcctctggtgacagacgtggtgcttcagtcatttccgcccctgccgtcctgcgaaatcctggatataaacgatgagcagaccttgcctagattgattgaggccctcgaaaagaggcataacttaaggcagatgatgatcgacgaatttaacaaacagagcaatgcattcaaggctttactgcaggagttcgataacgccgtgttgtctaaggagaaccacatgcagggaaaactgaatgagaaggagaaaatgattagtgggcagaaattggaaatcgagcgcctcgaaaagaaaaacaagaccctcgagtataagatcgaaattctcgagaagacaacaacaatttacgaggaggataagaggaacctgcaacaggagctggaaacccagaatcagaagctgcaacgacagttctccgacaagcgaagactcgaggctagattgcaaggcatggtcacagaaacgaccatgaagtgggaaaaagaatgtgagcggcgggtggccgcaaagcaacttgagatgcaaaacaaactctgggtgaaggacgaaaagctgaaacagttgaaggccattgtgaccgaacctaaaaccgaaaaaccagagcgtccctctcgggaaagggatcgggagaaggtcacacagaggtctgtcagcccctctcccgtgccactatcctcaaactacatagcccaaatttcaaacgggcagcagctgatgtcacaaccacagctgcatcgacgatctaattcatgttcttctataagtgtggcctcatgcatcagtgaatgggaacagaagatccccacatataacactcctctgaaagttacgtcaatcgcaaggagacggcagcaggagcctgggcagtccaaaacctgtattgtttctgacaggcgacggggcatgtattggacagagggacgggaggtcgtgccaaccttccggaatgagatcgagattgaagaggatcattgcggcagactcttatttcagccagaccaaaatgcccctcccattcgtctcaggcacaggaggtctcgatcagccggagaccgttgggtggaccacaagccggcatctaacatgcagaccgaaacagtaatgcaaccccacgttccccacgctatcacggttagcgtcgccaacgagaaggccctggcgaagtgcgagaaatatatgttaacccatcaggaattagccagcgacggggagattgaaacaaagctgattaagggcgacatctacaagactaggggaggtggacagagtgtgcagttcaccgacattgagactcttaagcaggagtcaccaaacggaagtcgaaagagaagatcgtcaaccgttgctcctgcacagcctgacggcgctgaatccgagtggacggacgttgagaccaggtgtagtgtggccgtggaaatgcgcgcaggttcccaactcggcccaggctaccagcaccacgcacagcctaaaagaaagaagccctag

SEQ ID NO: 192448 - DNA, 2022 bp, synthetic construct
  misc_feature 1..2022: note = Description of Artificial Sequence: Synthetic coding sequence
  source 1..2022: mol_type = other DNA
atgatcaccgtgcaggagttctgcaaggccgaggaggtggacgaggatagcgtctatggagtctttgtgagctatatcgaaatatacaataactatatctacgaccttctggaagaagtacccttcgacccaataaagcccaagtggaacagttgcagtacccccatgcgaaacaccgacttcgtcccaccccagtccaaactgctgagagaggataaaaatcacaatatgtacgttgctggatgtaccgaagtcgaagtgaaatcaacagaggaggcgttcgaagtgttttggcgcggacagaaaaagcgcagaattgctaacacccatctgaacagggaatccagcaggtcccacagcgtcttcaacattaagctcgtgcaagcgcccctcgacgccgacggggacaatgtgctgcaggagaaagagcagataaccatctctcagttatcactggttgatctggcgggttccgagcgcacgaatagaacaagggccgagggcaatagactgcgtgaggcgggaaatattaatcaatcactgatgacgctgaggacatgcatggatgtcctgagggagaaccagatgtacggtaccaataaaatggttccctaccgggacagcaagcttacccacctctttaagaattatttcgacggggagggcaaagtccgtatgattgtgtgcgtgaacccaaaggcagaggattatgaggaaaatctgcaggtgatgcggttcgcagaagttacacaggaggtcgaggtagcccgtccagtggacaaggcaatatgcggcctgacccctggaagacgttaccggaaccagccgagggggccggtcgggaacgaacccctggtgacggatgtggtgctccaaagcttccctcctctgccctcatgcgagatcctggatataaacgatgagcagaccctgcctcggcttatagaggcccttgaaaaaaggcataatttgagacagatgatgatcgatgaatttaataagcagtcaaatgccttcaaagctttattacaagagtttgacaacgctgtgctgtctaaggagaaccatatgcaggggaaactgaatgaaaaggagaagatgatctctggccaaaagctagagatcgagcggctcgagaagaagaacaagactttggagtataagatagagatcctagaaaaaacgaccaccatttatgaagaggacaaacgaaatctgcagcaggagctggaaactcagaatcagaagttacagcgccagttctctgataaaagaaggctggaggccaggctgcagggaatggtcacagagacaacgatgaagtgggaaaaagaatgcgaacgaagagtggcagcgaagcagctggagatgcagaataaactgtgggtcaaagatgagaaactcaagcaactcaaagctattgtaacggaacctaagaccgaaaagcccgaaagacctagcagggaaagagatagggagaaagttacacagagatcagtttccccaagtcctgtaccacttctgtttcagcccgatcaaaacgcccccccaattcgcctgcgccacaggaggtcccggtccgcaggcgatagatgggtggaccacaaaccagccagtaatatgcagaccgagaccgttatgcaaccccacgtgccgcatgccatcaccgtgtctgttgccaacgagaaggctctcgcaaaatgtgaaaaatacatgctcacccatcaggaattggcttctgatggagaaattgaaactaaacttattaaaggagatatttacaagacccgcggcggaggccaatccgtgcagttcaccgatatcgaaacattgaagcaggagtcgcccaacggctcacgaaaaaggaggtccagcactgtcgcacctgctcaaccagatggcgccgaaagtgagtggaccgacgtagagacacgctgtagcgtggccgtcgagatgagagcaggcagtcagctcggtcccggatatcagcaccacgcgcagcctaaacgcaagaagccctag

SEQ ID NO: 192449 - DNA, 2022 bp, synthetic construct
  misc_feature 1..2022: note = Description of Artificial Sequence: Synthetic coding sequence
  source 1..2022: mol_type = other DNA
atgatcaccgtgcaggagttctgcaaggccgaggaggtggacgaggatagcgtgtatggcgtatttgtgagttacatcgaaatttacaataactatatttatgatttattggaagaggtgcccttcgacccaatcaaacctaagtggaatagctgttcaacccccatgcgcaatacagactttgtccccccacagagcaagttgcttcgcgaagataaaaaccacaatatgtacgtggctgggtgcacagaagtcgaggtgaagtctacggaggaggcgttcgaggttttttggcgggggcagaagaagaggcggatcgctaacacacacctgaacagagagtcctctcgctctcacagcgtcttcaacatcaagctcgtgcaggccccactcgatgctgatggagacaacgtcttacaagaaaaggaacagatcaccatttctcagttgtcactggtggacctggccggttccgaaagaacaaatcgtaccagagcggagggaaaccgactacgcgaggcgggcaacataaaccagtctttaatgaccctccggacctgcatggacgttctgagggaaaaccagatgtatgggaccaataagatggtgccgtacagggattctaagctcacacatcttttcaaaaattatttcgacggcgaggggaaagtgcgaatgatcgtgtgcgtgaatccaaaagccgaagactacgaagagaatctccaggtcatgcgctttgctgaggttactcaagaagtggaggttgcccggcctgtggataaggccatttgcgggctgaccccaggacggaggtatcgcaaccagccccgtggcccagtgggtaacgaacctctggtcacagatgtggtcctgcagtctttcccccctttgccatcttgcgagattcttgatatcaacgacgagcagacactgccccgcctgattgaagcgctggagaagcggcacaacctcagacagatgatgattgacgagttcaataagcaatccaacgcattcaaggccctgctgcaggagttcgataatgctgtcctatctaaagagaaccatatgcaaggcaagctcaacgagaaagaaaagatgatctcaggccagaaactagagatcgaacgcttggagaagaaaaataaaaccctagagtataagattgaaatcctcgaaaaaacgaccacaatctatgaggaggacaaaagaaacctacaacaagagcttgaaacgcaaaaccagaaattgcagagacagttttccgacaagaggcgacttgaggctcggctgcaggggatggtaactgagaccactatgaagtgggagaaggagtgcgagaggcgagtcgctgctaagcagttagaaatgcagaataaactgtgggttaaagacgagaaactgaagcagctcaaggccatcgtgactgagcctaagaccgaaaagccggaaagaccctcccgggagagggatcgagagaaggtcactcagcggtctgtttcgccatcaccagtgcccctgctgttccagcctgatcagaatgctcccccgattcgcctgcgacacaggaggagcagatccgccggcgatagatgggttgaccataagccggccagtaatatgcagacagagaccgtgatgcagcctcacgttccccacgcaatcacagtgtctgtcgccaatgaaaaagcactagccaagtgtgagaaatacatgctgacccaccaagagctagcctcagatggggaaatcgagactaaactaattaagggggatatatataaaaccagaggaggcgggcaaagcgtgcagtttacggacattgagacactcaaacaagaatcacctaatggatcccgaaaaaggaggtcgtccactgtggccccggctcagccagacggcgcagagagtgagtggactgatgttgagacccgctgcagtgtggcagtggagatgcgggcaggaagtcagctggggcccggatatcagcaccacgcacaacctaagaggaaaaagccttag

SEQ ID NO: 192450 - DNA, 2571 bp, synthetic construct
  misc_feature 1..2571: note = Description of Artificial Sequence: Synthetic coding sequence
  source 1..2571: mol_type = other DNA
atgaagagcgcccgggccaagaccccccggaagcccaccgtgaagaagggctcccagaccaaccttaaggacccggtaggagtgtactgtcgtgtaagacccttgggattccccgaccaagagtgctgcatagaagtgattaacaacactactgtgcagttacacacccctgagggctacagactgaatcgaaatggcgattacaaggagactcaatactccttcaaacaggtgtttgggacccacacgactcagaaagagttattcgacgtcgtagctaacccactcgtgaacgatctcatccacggcaagaacggactcctattcacttacggggtgacagggtcggggaaaacacatactatgaccggatctcccggcgaaggtggactcctccccagatgcttagacatgatattcaacagcatcggctcattccaggcgaagcgctacgtgttcaagagcaatgatcgaaacagtatggacatccagtgtgaggtcgacgcccttctggagaggcagaagagagaggccatgcccaatccaaagacatccagtagcaaaagacaggtcgatcccgaatttgcagacatgatcacagtgcaggaattctgtaaggcagaagaagtggatgaggattccgtgtatggcgtattcgtgtcgtacattgagatttataataactacatctatgacttactggaggaagtaccatttgatcctatcaagccaaaacctcctcagagtaagctactgcgagaggataagaaccacaacatgtacgtggcaggttgcaccgaagtcgaggttaagagtacggaggaagcatttgaagttttctggaggggtcagaagaagagacgaatcgctaacactcacctgaaccgggagtcctctcgttctcatagtgtattcaatataaagctggtgcaggcccccctggatgcagatggcgacaatgttcttcaggaaaaggagcagataacaatcagccagttgagcctcgtcgacctcgcagggagtgagaggacaaatcgtacccgggctgagggtaatagattaagagaagccggaaacataaaccagtctcttatgaccctgaggacctgtatggacgtcctgcgggaaaatcaaatgtacggcaccaataagatggtgccttatagggactctaagctcactcacctctttaagaattattttgatggggaagggaaagtgcggatgatagtctgtgttaatcccaaggccgaggattatgaggagaatttacaagtcatgaggttcgctgaggtgacccaggaagtcgaggtggcacgcccggtcgataaggcgatttgtggcctgacgcctggtcgtaggtataggaatcaaccaaggggtcccgttgggaacgaaccactggtgaccgacgtggtgctgcagtccttcccacccctgccgagctgtgagatcttggatattaatgacgagcagactctgccccgcctcattgaagctttggaaaaacggcacaatctacggcagatgatgatcgacgaatttaacaagcagagcaatgcctttaaggccttgctgcaggaattcgacaacgctgtcctttctaaagagaaccatatgcagggcaagttaaacgaaaaagagaagatgatctcgggtcaaaagttggagattgagcgcttagagaagaaaaacaaaaccctggagtataagatcgagatattggaaaaaactactaccatctatgaagaggacaagcgaaaccttcagcaagagttggagacccagaatcaaaagttgcagcgacagttctcagataaacgacggctcgaagcacgcctccagggtatggtgactgaaactacgatgaagtgggagaaggagtgtgaacgacgggtggcagccaaacagctggaaatgcaaaataagttgtgggtcaaagatgagaagctgaagcaattgaaagccatcgtcactgaacccaagaccgagaaaccagagaggccttcacgtgagcgggaccgggaaaaggtgacccagcgcagcgtgagtccctcaccagtgccgctgcttttccagccagatcaaaacgcaccgcccatccgactgcgacatagacggtctcggagcgccggcgaccggtgggtcgaccacaagccagccagcaatatgcaaacagaaaccgtgatgcagccccatgttcctcacgcaataacagtgtctgttgcaaacgaaaaggcccttgcaaagtgcgaaaaatacatgctgacccatcaggagctagcatccgatggcgaaattgaaaccaagctcatcaagggcgacatctacaaaacaaggggcggaggacagagcgtccagtttacagatattgagaccctcaagcaagaatcccctaatgggtcgaggaagcgaaggagtagcaccgtggccccggcgcagcctgatggggctgagtcggaatggacagatgtggaaactcgttgttcagtcgccgtggagatgcgcgccggcagccaactgggccctggataccagcaccacgctcagcccaagcgtaagaaaccttag

SEQ ID NO: 192451 - DNA, 2520 bp, synthetic construct
  misc_feature 1..2520: note = Description of Artificial Sequence: Synthetic coding sequence
  source 1..2520: mol_type = other DNA
atgaccggcagccccggcgagggcggcctgctgccccggtgcctggacatgatatttaactccataggctctttccaagcaaagagatacgtatttaagagcaacgataggaactctatggatatccagtgtgaggtcgacgctctgctcgagcgccagaagagggaggcgatgcctaacccaaagaccagttcgagcaaacgtcaggtggatccagagttcgccgacatgataaccgtgcaggagttctgcaaggcagaagaggtggacgaggactctgtgtacggtgttttcgtatcctacatcgaaatctacaataactacatttacgatctactcgaagaggttcctttcgaccccattaagcctaaaccacctcaaagcaaactgctgcgggaggacaaaaaccacaatatgtacgttgccggttgcacggaggttgaggtgaaatccactgaggaggctttcgaggtgttctggcgtggccaaaagaagaggcggatcgcaaatacgcacctcaatcgcgagtctagtcgctcacacagcgtgttcaacattaagctcgtgcaggctcccctagatgctgatggcgacaatgtacttcaggaaaaagaacaaatcacaatctctcagctttctctggttgaccttgcgggaagcgagcgcaccaaccgcacacgcgccgagggcaatagactgagggaggcaggcaacataaaccagtctctgatgacccttcgtacttgcatggacgttctcagggaaaaccaaatgtacggcactaacaagatggttccatacagggacagtaagttgacacacctattcaaaaattatttcgacggtgaaggcaaagtccgtatgatcgtgtgcgtgaatcccaaggctgaagactacgaggagaatctgcaggtcatgcgcttcgcagaagtgacgcaagaggtcgaagtggccaggccagtcgataaggccatctgcggcctaacacctggacgtcgataccgaaatcagcctagggggcccgtaggcaatgaacctctggttaccgacgttgtgcttcagagctttcctcccttgccctcctgtgagatactggatattaacgatgagcaaaccctccctagactaatcgaggccctcgagaaacgtcataatcttcgacaaatgatgatcgacgaattcaacaaacaaagcaacgctttcaaagctttacttcaggaatttgacaacgcggtcctgagcaaggagaaccatatgcagggcaaactgaatgagaaggagaaaatgattagcggacagaaactcgaaatagaaagactggagaagaagaacaaaacactggaatataagatcgagatactggagaagacaaccacgatttacgaggaggacaaacgcaacttgcagcaggagctggagacacagaatcagaaattacagcgccagttttctgataagcggcgtctggaagcaagactgcagggcatggttacggagaccactatgaagtgggagaaagagtgtgagcgccgcgtggccgccaaacagctggaaatgcagaacaaactatgggtcaaagatgaaaagctgaaacagttaaaagcaatcgtcactgagcctaaaactgagaaacccgagcggcccagccgcgagagggaccgggaaaaagtgactcaaagatcagtgtctccctcacctgtccctctgagcagcaattacattgcccaaatttctaatgggcaacagctgatgagccagcctcagttacaccgccggtctaattcctgcagcagtatcagtgtagcctcttgtatttccgagtgggagcaaaagatacctacatacaacaccccgctaaaggtgaccagcatcgcacggagaagacagcaagagcctggccaaagtaagacatgcatcgtcagcgaccgtcgcagaggtatgtattggactgaaggccgggaggttgtgccaacattccgcaatgagattgaaatcgaagaggaccactgtggcaggctgctctttcagcctgaccagaatgccccacctattaggctccgtcatcggagaagtaggtccgctggcgatagatgggttgatcacaagcccgcttccaacatgcagaccgagaccgtcatgcagccacatgtcccacatgctatcacggtatctgtggcgaatgaaaaagccctagcaaagtgtgaaaaatatatgctgactcatcaggaattagccagtgacggcgagattgagacaaagcttatcaagggggatatctacaagacccgagggggcggacagagcgtacagttcactgacatcgagactcttaagcaagaatctcccaacggctcaagaaagcggcgcagctctacagtggcgccagcccagccagatggggccgaatcagagtggactgacgtggaaaccaggtgcagcgtggcagtagagatgcgagccggctcccagttaggtcccggctaccagcaccacgcacagcctaagcgtaaaaaaccttag

SEQ ID NO: 192452 - DNA, 3705 bp, synthetic construct
  misc_feature 1..3705: note = Description of Artificial Sequence: Synthetic coding sequence
  source 1..3705: mol_type = other DNA
atggccagctggctgtacgagtgcctgtgcgaggccgagctggcccaatattacagccactttaccgcactgggcctgcagaagatcgatgagctggccaagattacgatgaaggactatagtaagctgggcgtgcatgatatgaatgatcggaagcggctgtttcagctcattaaaatcatcaaaattatgcaggaagaggacaaggccgtgtctatccctgagagacacctccagacatcctccctgaggatcaagagtcaggagctgcgaagcggccctagacgacagctcaactttgattctcctgctgacaacaaagaccgaaacgcaagtaacgacggcttcgagatgtgttctttaagcgacttctccgcgaacgaacagaagtccacatatctgaaggttctggagcacatgctccctgacgattcgcaataccacactaaaaccggcatcctgaacgctacagccggggattcatacgttcaaacagagatctccactagcttgttttcacccaactatctctctgcaatccttggggactgtgacatcccaatcattcagagaatatcacacgtgtccgggtacaactatgggatcccccactcctgtatccgccagaatacgtctgagaaacagaatccctggaccgagatggagaaaatccgagtctgtgtacggaagaggcccctgggcatgcgcgaagtgagacgaggggaaatcaacatcattacggtcgaggataaagagacgctgttagttcatgagaaaaaggaagcagttgatttaacccagtacatcctacaagtgatcctcaaggggtccaaagagcggtcaacaggcgcaacaggcgtcaatgctgattcctctaggtctcatgccgtgatacagatacagatcaaagattcagccaagaggacttttggtcggattagcttcatcgatttggcaggttcggaaagggccgccgacgcaagagacagtgaccggcagacaaagatggagggcgccgagatcaatcaaagcctcctggccctcaaggagtgtatacgcgctctggatcaggagcatacgcacacaccctttcgccagtcaaagttgacacaggttttgaaagacagcttcatcggaaacgccaagacctgtatgatcgccaacatcagcccgagtcacgtagccacagagcatacactgaacaccctgagatacgctgacagagtcaaagaacttaagaaaggaattaagtgctgcacaagtgtgacatccagaaatcggacaagcgggaattcttcaccgaagcgcatccagtccagcccgggtgcactgtctgaagataagtgctctcctaagaaagtgaagctcgggtttcagcagtcactgaccgtggcagccccggggagtactagagggaaggtacatccacttacttctcaccctcctaacatcccattcacctctgcccctaaagtaagtggtaagcgaggggggtccagaggcagtccgtcacaggagtgggttatacacgcttctccagttaaaggaactgtgaggtctggacatgttgccaagaaaaaacccgaagagagtgctcccctgtgcagtgagaagaatcgcatgggcaataagacggtgctgggctgggaaagccgtgcctcaggcccgggtgaagggctcgtgaggggcaaactctcaacaaagtgtaagaaagtgcagactgtgcaacccgtgcaaaagcagctagtgtctcgtgtcgaactgtcattcggtaacgcccaccatcgggccgagtatagccaggactcccagagaggcacccctgcacgcccagcatccgaggcgtggacaaacattccaccccatcaaaaagagagggaggagcatcttcggttctaccaccagcagttccagcagccaccattattacagcagaaattgaagtaccagcccttaaagcgctctttgaggcagtatagaccaccagaagggcaactcaccaacgaaacacctccactgtttcacagctactcggagaaccacgacggagcccaggtggaggagctggacgactctgatttttctgaagactccttttctcatatcagctcccagcgggctactaaacaacgcaacacactagagaattcggaggatagcttctttttgcatcaaacgtgggggcaggggccagaaaaacaagtggctgaaaggcaacaaagcctgttcagttctcccaggacaggcgacaagaaagatctcactaaatcctgggtggactcacgggacccaattaaccataggcgggccgcgctcgaccactcctgctctccctccaaaggacctgtggattggtcaagagaaaacagcacatcgagcggtccgtccccgagggactccctagccgaaaagccttattgtagtcaagtagactttatctatcgccaggaacggggtggagggtcttcatttgacctgcgcaaggatgcctcccagtccgaggtctcaggggaaaacgagggcaatttaccatctcccgaagaagacggctttactatttctctgtcgcacgtggccgtccctggatcgcccgaccagcgcgacactgtgaccacgcccctcagagaggtgagcgccgacggaccaatacaggtaacatccaccgtcaagaatggtcacgccgtcccaggcgaggaccctaggggacagttgggaacccacgctgagtacgcttccggcttgatgtctccacttacaatgtccctgttagagaatcccgacaatgagggtagcccaccctccgagcagttagttcaggacggagcaacccattccctggtcgctgagtctacaggagggcctgttgtatctcataccgtcccatctggcgaccaagaggctgcactgcctgtttcttccgctaccagacacctgtggctgagctcatcccctcccgacaacaaacctggcggcgacctgccagctctgtctccgtctcccattcggcagcatccagccgataagctgccttccagggaggcagacttgggggaggcttgtcaatcaagggagaccgtcctcttcagtcacgaacacatggggagtgaacagtatgacgccgacgccgaggagactggtctcgacggctcatggggcttcccagggaagcccttcactactatccatatgggggtacctcacagtggaccaactctgactcctaggaccgggtcctccgacgtagccgatcaattgtgggcccaggaaaggaaacatcccacgagactgggctggcaggaattcgggctcagtaccgaccccataaaattaccctgcaatagcgaaaatgtcacctggcttaaaccacgccccatttcccggtgcctggcaagaccctcgtctcccctggtcccctcgtgctcacctaagactgcggggaccctgagacaaccaacacttgaacaggcccagcaggtcgtgatccgggcccatcaggaacagcttgatgaaatggctgagctcggctttaaagaagagactctgatgagccagctagcatctaacgactttgaggacttcgtgactcagttagatgaaatcatggtgctgaagtcgaaatgcatccagtcgctccgatcccagctccagctttaccttacctgtcacggccctactgccgcacccgaagggactgttccttcatag

SEQ ID NO: 192453 - DNA, 4107 bp, synthetic construct
  misc_feature 1..4107: note = Description of Artificial Sequence: Synthetic coding sequence
  source 1..4107: mol_type = other DNA
atggccagctggctgtacgagtgcctgtgcgaggccgagctggcccagtactattctcattttacagcgttgggtctgcagaaaattgacgagttggcaaagatcaccatgaaagactactctaagcttggcgtgcatgatatgaacgacaggaaacgactgtttcagttgattaagattattaagatcatgcaagaggaagacaaggccgtatctatccctgaacgtcacttacagacttctagtctccggatcaagtcccaagaattgcgatccggtcctagacggcagctgaatttcgattcacctgccgataataaggaccggaatgcctctaacgacggtttcgaaatgtgctctctgtctgacttcagcgctaatgagcagaaatctacttacctaaaagttctggaacatatgctgcccgacgactcacaatatcacaccaagacagggatattgaatgcaaccgcgggggactcgtatgtgcagactgagattagcacctctctcttttcaccaaactacctcagtgctatactgggagactgtgacattcctataattcagagaatttctcatgtcagcggatacaattacgggattcctcacagctgtatacgacagaacactagtgagaagcagaatccatggactgaaatggaaaaaattagggtctgcgtacggaagcgaccccttggaatgagggaagtccgacggggggagattaacattatcacagtggaagataaagaaacactcttggttcacgaaaagaaggaggccgtggacctgactcagtacatcttgcagcatgttttctatttcgatgaagtgttcggcgaggcctgcactaaccaggacgtttatatgaaaactacacatcctctcattcagcatatctttaacggcggcaatgccacctgcttcgcttacggccaaaccggcgccggcaagacctatacaatgataggaacccatgagaaccctggactgtatgccctcgccgccaaggacatcttccgccagctggaagtaagccagccacgtaaacacctgtttgtatggattagcttctacgaaatttactgtggacaattgtatgatttactaaacagacgcaagcggctcttcgcgcgtgaggacagcaaacacatggtgcaaatagtcggcctgcaggaactccaggtggactcggtggagcttctgctcgaagtaattttgaaaggatccaaggaaagatctacaggggcgaccggtgttaatgccgattcaagcaggagccacgcagtcattcaaatacagataaaagactcagcgaagaggacattcggacggatatcttttatcgacctcgccggcagcgaacgtgccgcagacgctcgggatagcgaccgtcagacaaagatggagggagcggagatcaatcaatcgctgctagcgctgaaagaatgcatcagggccctcgaccaagagcacacgcatacaccctttcggcagagtaaactcactcaggtgttgaaggattcattcattggcaatgcaaagacttgcatgattgcaaacatctctccctcccatgttgcaacagagcacactctcaatactttaaggtacgctgacagagttaaggaacttaagaaaggcataaagtgctgcacctctgtgacatcacgtaaccggacctctgggaattcttccccgaagagaatccaatcttcccctggtgcgctgtccgaggataagtgttcgcccaagaaagtgaaactgggctttcagcagtccctgaccgtggctgccccaggctctacccggggcaaggtccacccattgacatcacatccccccaatatcccctttacatccgcccccaaagtatctgggaaacgtggaggctctaggggcagcccctcccaggaatgggtgattcacgcaagtcctgttaagggtactgtgaggtctgggcatgtggccaagaaaaagccggaggaaagtgcaccactctgttcagaaaagaacagaatgggcaataaaactgtcttaggttgggaaagtcgcgcatctggaccaggagagggcctcgtccgggggaaactatctaccaagtgtaaaaaagttcaaacagtccagcctgtacagaagcagctggtctctagagttgaactttcttttggaaatgcacaccacagggcagagtattcgcaggactcacagcggggcacacccgcccgccctgccagcgaggcttggactaacatcccccctcaccagaaggagcgagaggagcatttgcggttctaccatcaacagtttcagcaacctcccctgctgcaacaaaagcttaagtaccagcctctgaagagaagccttcggcagtaccggccccccgagggtcagcttacaaacgagactccccccttatttcactcttacagcgaaaatcacgatggcgctcaggtggaagagctggacgacagcgacttttctgaggatagctttagccacatttctagccagagggccacaaagcaaaggaatactctggaaaactcagaggacagtttcttcctgcatcagacttgggggcaaggtccggagaaacaggtagccgagcgtcagcaatcgcttttctcctcaccgcgcactggcgataagaaggacttgactaaatcctgggttgactctcgtgatcctatcaatcacaggcgagctgccttggatcattcctgttcgccctctaaggggcccgtggattggtcgcgagaaaactcgaccagtagcggaccatccccacgcgattcactcgcagagaaaccctattgcagccaggtggatttcatatacagacaggaacgtggaggcggatcatccttcgacctgagaaaagacgcgtctcagtcagaagtgtccggagaaaatgaaggcaacttgccatcacccgaggaagatgggttcaccataagtttaagccacgtggccgtgcctggctctcctgaccaaagagacaccgtgacaacacccctgcgggaggtctccgctgacggcccaatacaggtgacgtccacagtaaaaaatggccatgctgtgcctggagaggatcctcgcggacagctcggcactcatgcggaatacgccagcggactcatgagccctctcacgatgtctctgctggagaacccagataatgaaggtagtcccccatcagagcagctggtgcaggatggcgccacccacagcctcgtggctgagtctaccgggggtccagttgtgagccacaccgtaccatctggggaccaggaggcagctctacccgtgagctccgccactcgccacttatggctgtcttcctccccacccgataacaagcctggcggggatttgcctgctctcagtccctctcctattcggcagcatccggccgataagctgcccagtcgggaagccgacttaggggaagcatgtcagtcacgtgaaaccgtgctgttctcgcatgagcatatgggctccgagcaatacgacgccgacgcagaggagaccggccttgacggctcttggggatttcctggtaagccttttacgacgatccacatgggcgtgccacattctgggcccacgcttacaccacgaactgggagctctgacgtggcagatcagctgtgggcgcaggagagaaagcatcccacacggcttggatggcaggaatttggcctgtccactgaccctattaagcttccctgtaactcagagaacgtgacgtggctcaaacctcgacccatctccagatgcctggctaggccttcctccccactcgtgccgagttgttcccccaagacggccggcacacttagacagcccaccttggaacaggcccaacaggtcgtgatcagagcccaccaggaacagcttgacgaaatggctgagctggggtttaaagaagagacattgatgtcccaattggcttcaaatgatttcgaggattttgttactcagctagatgaaatcatggtgctcaaaagcaaatgcatccagtctcttcgatcgcagttacagctgtatctgacctgtcatggtcctactgccgctcctgaagggactgtgccttcatag

SEQ ID NO: 192454 - DNA, 4107 bp, synthetic construct
  misc_feature 1..4107: note = Description of Artificial Sequence: Synthetic coding sequence
  source 1..4107: mol_type = other DNA
atggccagctggctgtacgagtgcctgtgcgaggccgagctggcccagtattactcccacttcacagctctaggtcttcagaagattgatgaacttgcaaagatcaccatgaaagactacagtaagctgggcgtccacgatatgaacgacaggaaaaggctcttccagctcattaagataattaaaatcatgcaggaagaggacaaggcagtgagcattccggaacggcatctacagaccagctccctgcggatcaaaagccaggaactccgtagtgggccaagacgccagctgaattttgactctcctgcggacaacaaggatcgcaacgcctccaatgatggattcgagatgtgctcattgagcgatttttccgctaatgagcagaagagcacatatcttaaagtattagaacacatgctgccagacgattcacagtatcacaccaaaaccgggattctaaacgccaccgccggagacagttacgtccagaccgagatatctacatccctgtttagtcccaactacctctctgcaatcttgggagactgtgacatccctatcattcaacggatatctcatgtgtcagggtacaattatggcatacctcatagttgcatacgccagaacaccagtgagaaacagaacccctggactgagatggagaagattagggtctgcgttcggaaacgtccactcggaatgcgcgaggtgcggaggggggaaatcaacatcatcaccgtcgaggacaaggagactctcctggtccatgaaaagaaagaggccgtcgacctaacccagtacattcttcagcacgtgttttacttcgatgaagtgttcggagaggcatgcaccaatcaagacgtctacatgaaaactacacaccccctcattcaacacattttcaacggcgggaacgccacctgcttcgcatacggccagacaggagctggcaaaacttacaccatgattgggactcacgaaaatcccggcctctatgctctggccgctaaggacatcttcaggcagttagaggtgagtcagccgagaaagcacttattcgtatggatatcattctatgagatttattgcggacagctctacgatcttctaaaccggcggaaaaggttgttcgcccgggaggattccaaacacatggtacaaattgtcggactgcaggagttgcaggttgacagcgttgagctgctcttggaggtaattcttaagggaagcaaagagaggagtaccggggccacaggggtcaatgccgattcttcacgatctcacgcagtgattcagattcaaatcaaagattctgccaaacgaacgtttggcagaattagtttcatagatctggctggatctgagagggctgcagacgctcgtgattccgataggcagacaaagatggaaggcgctgaaattaaccagtctcttctcgccctgaaggagtgcatccgagccctcgaccaggagcatacacacacacctttccggcagtccaagctaacccaagtgttgaaagactctttcattggaaacgctaagacttgtatgatcgcaaacatcagtccatctcacgttgccaccgagcatactctcaataccctgaggtatgccgaccgggttaaagaactgaagaaaggtataaaatgctgcacaagtgtgacaagtagaaaccgaacttctggcaattctagccctaaacgcatccagtcgagtccaggcgctctgagcgaggataagtgttcccccaagaaggttaaactaggtttccagcaatccctgaccgtggcggccccaggcagtactcggggcaaggtgcatccactcacgtctcatccccctaatatccccttcacatctgcaccaaaggtgagtgggaagcgcggaggcagccggggatcaccatctcaggagtgggttatccacgcctctcccgttaagggcaccgtaagatccggacatgttgccaaaaaaaaaccagaggaaagtgccccactatgctcggagaaaaacagaatggggaacaagaccgtgttggggtgggaatctcgggctagcgggcccggagagggcctggttcgagggaaactgagcaccaagtgtaaaaaggtgcagaccgtccaacctgtccagaaacagctggtgtcccgcgtcgaactgtctttcggtaacgcccaccacagggccgagtactctcaagacagtcagcggggcactccggcccgccccgcatcagaggcttggaccaacatacccccccaccagaaagagcgcgaagaacacctgcggttttatcaccaacaattccagcaacccccactgcttcaacagaaacttaagtaccagcctcttaaacgatccttgcggcagtatcgaccccctgaaggtcagctgaccaatgagacacctcctctctttcattcatactcagagaaccatgacggagcccaggtggaagaactggatgactctgatttctcagaggatagtttcagtcacatttcatcgcaacgagcaactaaacagcgaaatactctcgaaaactctgaggatagcttctttctgcatcagacttggggtcagggacctgaaaagcaggtggcagagcgacaacagtctctgttctcgagccctaggactggcgacaagaaggatctcactaagagctgggttgacagccgcgacccaattaaccaccgcagggccgctttggaccatagttgcagtccctcaaaagggcctgtagactggagccgcgaaaactccactagttctggcccatcaccaagggacagtcttgccgaaaagccttactgctctcaggtcgatttcatctacaggcaggaacgcggaggaggatcctcattcgacctaaggaaagacgcctcacagagcgaagtgagcggggagaatgagggcaatctgccttcccccgaagaagacggcttcaccattagtctttcccatgttgcagtgccaggttcgccagatcagcgtgacacagttactacacctctgcgcgaagtgtctgcagacgggcctatccaagttacttctacagtgaagaacggccacgctgttcccggggaagatccacgtggccagctcggcacacacgcagaatacgcttcgggcttgatgtcaccccttaccatgagtttactggagaacccagataatgaaggcagccctccatccgaacagctcgtacaggatggagccacacactcactggttgctgagagcacaggtggcccagtggtgtctcacaccgtccccagtggagatcaggaagccgctcttcccgtgagttctgctacacgccacttatggctgagttcctcgcccccagacaacaagcctgggggggatctgcctgccctgagcccgtcgcccataagacagcacccagccgataagttgcccagtcgagaagccgacctcggggaggcttgccagtccagagagacagtgctcttctcacacgagcacatggggagtgaacaatatgacgccgacgccgaggaaactggcctggatgggtcctggggttttcctggaaaaccctttactaccatccacatgggcgtgccccactctggtcccacccttaccccgcgaacaggaagtagcgacgtggcggaccagctgtgggctcaggaacggaaacacccgaccagactaggttggcaggagtttgggctgagcacagatccaatcaagttgccctgtaactcagaaaacgtgacgtggctcaaaccccgtccaatcagtcggtgcctcgctcggccatcgagcccactcgtaccttcttgctcacccaaaaccgcaggtaccctccgacagccaacactggaacaagcccagcaagtagtgatccgggctcaccaagagcaactggacgaaatggctgagctgggatttaaggaagaaactcttatgtctcaactggcgtcaaacgattttgaagactttgttacacaactggacgaaataatggttctcaagtccaaatgcatccagagtctcagaagccaactgcaactgtacctcacatgccatggacccacagcggctccagaggggaccgtacccagttag

SEQ ID NO: 192455 - DNA, 3477 bp, synthetic construct
  misc_feature 1..3477: note = Description of Artificial Sequence: Synthetic coding sequence
  source 1..3477: mol_type = other DNA
atggccagctggctgtacgagtgcctgtgcgaggccgagctggcccagtattacagtcacttcaccgctctggggctgcagaagattgacgagctcgcaaagatcaccatgaaagactattcaaagttgggcgtgcatgatatgaacgaccgcaaacgtctgttccagctgattaagatcatcaaaatcatgcaggaagaggataaagctgtctccattcccgagagacacctgcagacgtcatcactccgcattaagagtcaagagcttcggagcggacccagacgccagctcaactttgactctcctgccgataataaggatcggaatgctagcaatgacggttttgaaatgtgttccctgtccgacttctccgcaaatgagcagaaaagcacctatcttaaagttctggaacacatgttgcctgacgactctcagtatcataccaagaccggaattcttaatgcgactgcgggcgactcttacgtgcagactgagatctccacatccctgtttagccctaactatctctccgccatcctgggcgactgcgacatcccaataatacagcgaatctctcacgtgtccggctacaactacgggatcccacactcatgtatccggcaaaacacatcagagaaacagaacccatggactgaaatggaaaaaatccgcgtttgcgtccgaaagagacctttggggatgagggaggtccgcagaggcgaaattaacataattacggtagaggataaggaaaccctgctcgtgcacgagaagaaggaagctgtggatctgacacaatatattttgcagcatgtgttttacttcgatgaggtgtttggcgaggcatgtactaaccaggatgtgtacatgaaaaccacacacccactaattcagcatatctttaacggaggaaatgccacatgcttcgcttatggccagacaggagcggggaagacttacactatgatcgggacacacgaaaatcctggactttatgccttggccgccaaggatatcttcagacagctggaggtctcccagcccagaaagcatctgttcgtttggatctcattctatgaaatatattgcggacagctttacgatctcctaaaccgaagaaagcgcttatttgcccgtgaggactcaaagcacatggtccagatcgtggggctccaggaactgcaagtggactcggtggaactactgcttgaagtgatcctgaaaggcagtaaagagcgtagtacgggggcaaccggagtgaacgctgattcaagccggtcccacgcagtgatacagatccagattaaggacagtgcaaaacggacctttggtaggatcagcttcatcgaccttgctgggtctgagcgagcagccgatgctcgggactcagataggcaaaccaaaatggaaggtgctgaaatcaaccagagcctcctagccttgaaagaatgcatacgtgccctggaccaggagcacacccacacgccctttcgacagtccaaattaacacaggttctcaaagattcatttatcggaaatgctaaaacatgcatgatcgcaaatatctctcccagtcacgtggccaccgagcatacactgaatactctccgatacgccgaccgcgtgaaagagctcaaaaagggaataaagtgttgcacatccgtaacctcacgcaacaggacatcaggtaattcttcacctaagcgcatccagagttccccgggggcactgtcagaggacaagtgtagtcccaagaaggtcaaactcggttttcagcagagcttaactgtagccgctcctgggagtacaagggggaaggtgcatccattgacaagccatccacctaacattccttttacctctgcccctaaagtgtccggtaagcgaggtggaagtcgagggtccccatcacaagagtgggtcattcatgcttcacctgtgaaaggcactgtccgtagcgggcatgtggccaagaagaaacctgaggaatccgcgccgctgtgttccgagaagaaccgtatggggaataagactgtgttggggtgggagagccgggcttcagggcccggagaagggcttgtccgcggcaagcttagcaccaagtgtaaaaaagtccaaacggtccaacccgtccaaaaacaactggtgagccgagttgagcttagctttggtaacgcccatcatcgggctgagtatagccaggacagtcagcgcggcacccccgctcgacccgcttctgaagcatggaccaatatcccccctcaccagaaagagcgggaagagcacctacggttttaccaccaacagttccagcaaccaccgctgttacagcaaaagctgaagtaccaacctctcaaacgctcccttcgtcagtatcgcccacctgagggacagctgaccaacgaaactccgcctctcttccactcctactctgagaatcatgacggcgcacaggtggaggaactggacgactccgatttttctgaggacagtttctcacatatcagcagccaaagagcgaccaagcagcggaacacccttgagaattccgaggactcattctttctccaccagacctggggccaggggccagaaaagcaggtcgccgagagacaacagtcactcttcagcagcccaagaaccggcgataagaaggatttaaccaaaagctgggtcgattctagagacccaataaatcatcggagggctgcacttgaccactcttgcagcccatctaaaggccccgtggactggagcagagaaaactcaacaagcagtggacctagcccacgggattcactagctgagaagccctattgctcgcaggttgactttatctatagacaggagagaggcggcgggagttcgtttgacctcagaaaggatgcatctcagtcagaggtctcaggtgagaacgaaggaaacttgccttctcctgaagaggacgggttcaccatctcattgtcccacgtggctgttcccggcagtcctgaccagcgcgacactgttacaacccctctcagggaggtctcagctgacggccctattcaggttactagcacggtgaagaatggacacgcagtgcctggagaggaccctcgtggacagcttggcacacacgccgaatatgcttcaggcctcatgagtcctctgactatgtcactgttggaaaaccctgataacgagggctctccacccagtgagcaactggtgcaggatggagccacccacagtctggtggccgaatctacggggggacctgtggtgtcccatacagtgcctagcggagaccaagaagctgccctgcccgtctcctccgcgacgcgtcacctgtggctgtcttcaagcccaccagacaacaaacccggtggagaccttcccgcacttggaccaggtgaaaagacctcttacaaagcctggctcgcaggagtctggtttgttcacaggccccaccaggtggctctccagcagtag

SEQ ID NO: 192456 - DNA, 999 bp, synthetic construct
  misc_feature 1..999: note = Description of Artificial Sequence: Synthetic coding sequence
  source 1..999: mol_type = other DNA
atgacctggaccagcggccagctgcagcgggagaagcaggcccggcccggctccggcgccgtgttagcctttccagacgacaaagatctgcgcgtatacggtccagcagagtcacagagcgcagtgtttggcgatgtgtgccctttactgactagccttttggatggatacaatgtctgtgtgatggcatacggccaaacagggagcggtaaatcctacactatgctgggtagacacagcgacgatggccctgtgttgccacttgatccccaatccgatcttgggatcattcctcgggtggctgaggaactcttccggctgattctggagaacacctcccggtcaccgaaggtggaagtttctatcgttgaggtctacaacaatgatatctttgatctactcgcaaaggattccatcgcggcagtatcaggggtgaaacgggaagtggtgaccgctaaggacggaaggacagaagtggccttactcgcttcagaggcagtggggtccgcctccaaattaatggagctggttcacggagggctccagctccgagctaagcacccaaccttagtccatgcagattcttcgaggtctcacctgataatcactgtgactttgaccacggcgtcatgtagcgattccacagccgatcaagcgtgcagcgcgactctgccacgcgagcagactgaagccggacgtgcagggcggagcagacgggcctctcagggagccctggctccccagcttgtgcccgggaatcctgccggccacgctgagcaggttcaagcccgactccagctggtggactctgcagggtccgagtgtgtgggaggtgacgcaaagctcctggtgatcctttgtatttctccgagccagaggcacttagctcagacactgcagggcttgggcttcggcatcagagcacggcaggttcagaggggtcctgctcgaaagaaacccccttccagtcagaccgagggaaagcggagacctgattag

SEQ ID NO: 192457 - DNA, 1155 bp, synthetic construct
  misc_feature 1..1155: note = Description of Artificial Sequence: Synthetic coding sequence
  source 1..1155: mol_type = other DNA
atgacctggaccagcggccagctgcagcgggagaagcaggcccggccggggtccggggccgtactggctttccctgatgataaggatctgagagtgtacggacctgccgagagtcagtcagctgtgttcggcgatgtgtgcccactcttgaccagtttgctggacggctacaacgtctgtgtgatggcgtatggccagaccgggtcaggaaagtcttataccatgctgggtagacattcagacgacggcccagtgcttcctctcgacccccagagcgatctgggaatcattcctagagtggcagaggaattattcagactgattttagaaaacacctcacgtagtccaaaagttgaagtgtccattgtcgaggtttacaacaacgacatctttgatctgctggccaaagacagcatcgcggccgtgtccggggtcaagagagaagtggtgaccgccaaggacggtcggaccgaggtggctttattggcgagcgaagcagttggctctgcttctaaactgatggagctggtgcatggagggctgcagcttcgcgccaagcaccccacactcgtccatgcagattcttccaggagccacctcatcattactgttacacttacaactgcaagctgcagcgacagcactgctgaccaggcatgctccgcaactctccctcgtgagcagaccgaggctggacgtgctgggcgctctcgccgcgcaagccaaggagccttagccccacagctggttcccggtaatcccgctggccacgcagaacaggtccaggcccggctgcagttagtcgattccgctggctctgaatgcgtgggagtgtctggtgttactggcctggccttacgggaaatggcatgcatctctagatctctggcagcgctcgccggcgtgctgggagccctgctcgaacaccgtggtcacgccccatatcgaaactccaggcttacacacttactccaagactgcctgggcggtgatgcaaaactgctggttatcctttgtatctccccttcgcaaagacacctcgcgcagacgctccagggcctcgggtttggcatccgtgccaggcaagtccaacgcggccccgcccgcaaaaagccaccgtcctcccagacagaggggaaaaggaggcccgactag

SEQ ID NO: 192458 - DNA, 1155 bp, synthetic construct
  misc_feature 1..1155: note = Description of Artificial Sequence: Synthetic coding sequence
  source 1..1155: mol_type = other DNA
atgacctggaccagcggccagctgcagcgggagaagcaggcccggcccggatccggagccgtcctcgcttttcctgatgacaaagatcttagggtatacggtccagctgagagccaatcagccgtattcggtgatgtgtgtcctctgctcacctcactgcttgatggatataacgtttgcgtgatggcttatggacagactgggtctggaaagtcctatactatgctgggcagacacagcgacgatggccctgtgctgccactggacccacaatcagatctgggaatcatcccccgggttgcagaggagctcttcagactgatcttggaaaacaccagccggagcccaaaggtagaggtgtccatcgttgaagtgtacaacaacgacatcttcgacctactggcaaaggactcaatcgctgccgttagtggagtgaaaagagaagttgtgactgcgaaggatgggagaactgaggtcgcccttctggcctctgaagccgtcggcagcgcctccaagctgatggagttggtgcatggtggattgcaattgcgcgctaaacaccctactcttgtacatgcagatagcagtcgaagccatctcatcattactgtcaccctgaccactgcctcctgttctgattctacagcggatcaagcctgtagcgccacattgccacgggagcagactgaggcgggccgcgccgggagaagtcggcgggcctcccagggtgctttagcaccacagctggtacctgggaaccctgccggacatgcagaacaggtgcaggctcggctgcagctggtggactcagccggcagtgaatgcgtgggcgtgagtggagtaaccgggctagcacttagagaaatggcttgtatatcccggtcgctggcagcgctggccggggtcttgggcgctctgcttgagcatcggggacacgcaccttatcgaaactctaggctgacgcatctcctgcaggactgtctagggggtgatgcaaagctcctcgtgattttgtgtatctctccgtcacagcggcacctggcacagacactgcagggcctggggtttggcataagagcccgccaagtccaacgcggccctgcccgaaaaaagccgccttcctcccagactgaggggaagcggcgaccagactag

SEQ ID NO: 192459 - DNA, 5649 bp, synthetic construct
  misc_feature 1..5649: note = Description of Artificial Sequence: Synthetic coding sequence
  source 1..5649: mol_type = other DNA
atggtgggccggggcgtgcccctgtgcgccgcccagcccgccgtggctgagggcgggcctgctcgtgagcctccgccactgctagaggtatctccgaggaagcgtcttccagccggacctgaccaggatccttgtggcagcaggccagcacctgaaggagctggagccggtccagaacaagggcacagtgccggcggaggtgggtggtgtagacactgccatacaaaactggtagaactgaagagacaggcttggaaactggttagcggcccagggactactctgcgggacccttgcctaagcgctctgcttctcgataagctgccagcccccggcgccttgcccgcttgcaggccagaggcagagcggcgctgtgatgtgtgtgccacacacctgcagcagctcactagagaggctatgcatctcttgcaagctccagccagccatgaggacctggatgcccctcatggcggcccaagcctggccccaccttcaaccacaaccagttcaagagatacacctgggccagcagggcctgctggacgtcagcccggaagagcgggaccggacaggactaaaggcctggcatggtctccgggaccaagcgttcaggtatccgtggcacctgccgggttgggcggcgccctgtccacagtgaccatccaggcacaacagtgtctggaagggatgtggtccgtgagcagggtgaactcgttcctgcctcccgcttgcctagcagaggccgccgtcgctgccgttgcagtggcagacactgttcgcgaatgccctccggtggcaggtcccgatggacttagcaaagcctgggggaggggtggagtctgtacctctgccctggtgacccctacacctgggtccgtgggcgggtctacgggaccctctgcggccgcatccttcttcatccgagcaatgcaaaagctgtcccttgcttctaagaggaagaagccccatccccccccaccccctgctacaaggggaaccagtacctatccgaccgatttcagcggagtgctgcagctgtggcccccccctgcacctccctgtctcctgcgggccgccagtaaaaccaaggacaaccccgggtccattgggaaagtcaaagtgatgctgaggatctggccagctcagggcgcccaacggtccgccgaagctatgtccttcctgaaagtggatccacggaagaaacaggtgatcctgtatgaccccgctgcgggcccgcccggctcagctggccctagacgggcagctacggcggctgtgccgaagatgttcgccttcgatgccgtcttccctcaggactctgagcaggccgaagtctgttccggaacggtggcagacgtgctgcagagcgttgtctcaggagcagatggctgcatcttcagcttcgggcacatgagcctcgggaagtcctacacaatgattggcaaggatagcagcccacagagcctggggattgtgccctgcgccatctcatggctattccgcctgattgaggagcgtcgcgaaaggacgggaacccgtttttcggttcgcgtctcggccgtggaagtttgtggtagagaccagtccctcagagacctgctagctgaagtggctccaggtagcttacaggatacccaatcccctggagtgtaccttcgcgaagaccctgtgtgcggcgcccagctccagaaccagagcgaactgcgcgcccccaccgctgagaaagctgcgttctacctcgatgccgcgctagccgcgcgaagcaccagccgggctggctgtggtgaagatgcaaggcggagctcacatatgctgttcaccctgcatgtataccagtaccgaatggaaaaatgcggaagagggggaatgtcaggtgggaggtcacggttgcatctgatcgatctgggcagctgcgaggctgccgcgggtcgggccggggaagcagctggaggccccttatgcctcagcctgagcgcattgggatccgtcatactggcgttggtcaacggcgctaagcatgtgccctatagagaccacagactgacaatgctgttgcgggaatctctggctaccgccggttgccggacaacaatgatcgcccatgtatccgacgccccagcgcagcatgcagagacactgagtactgtccaactggccgccaggatccataggttgagaagaaagaaggctaaatacgctagttctagtagcgggggagagtccagctgcgaggaaggcagagcccgacgccccccacacttgaggcccttccatccacgaactgtagctctggatcctgatcggactcctccctgcctgccgggggatccggattactcgtcatcttctgagcaaagttgtgacacagtgatctatgtgggtcccggcggagcagccctgtccgatcgcgagctgacagacaatgaaggtccccctgattttgtgccaatcattccagccctgagccgacatcgcccctcgaagggacccagagatgctgaccactttcgttgcagcacgttcgctgaactccaggagcggctcgaatgtatggacggtaacgagggcccatcggggggacctggcggcacggatggggctcaggcatcccctgccaggggcgggaggaagccatcaccccctgaggcggcctctccacgaaaagccgtaggcacgccgatggctgccagcacccccagaggatcatctgggcccgacacccaccagggcacaccagagccctgcaaggctatcgtgtggggtgatcagcgcgaggactcatctgcttggcccgagttgctcgtcccagaaaaggccgccgtgtccggggggcgccgtccactgccaagtccagccccacccccacctcagttactggaggcctgtcgagctcctgaagagcctgggggtgggggcactgatggggtggctcggacaccaccagtgggaatgagcggccaggtggccggctcacccatgctccccggagctacctgcccacggcttgccgcagggagccggtgccctgaaaggggtttgttgaccacaacagtaactctccagcgcccagtggagctgaacggagaagacgagttggtgttcaccgtagttgaagagctgtctcttggggctctggctggcgccggaagacctacctcccttgcaagctttgatagcgactgctccctccgagcgctcgcttctggctcaagacctgtgagtataataagctccattaatgatgagtttgacgcttacaccagtcaggcacctgagggcgggcccctggagggagccgcttgggcggggagctcgcatggttcctcaatatcttcttggctgtccgaagtttctgtatgcaccgctgattcccgagaccccacgccacaacctaggttcagtcctgatagcttggcaggactggatcccgggggacccccagctctggatgggtccttgggagatggaagcagtggcttcttaggcccagaccgcccagatagcccagggccaacatggggcccctgtccaggtgaggtagccgctgtcgccccctccagacccggcagggagcctcaggccggaccttccagatgggcgagtgcagcacagaccattcacagcagcttgcctcgaaaaccacgcacggcttccgccacaacacgtgtggggtgtgcacgtctgggacagtccccgcccggacggggtggccttttcgaggatccctggctgctgagggttggggaatgtgacactcaagctgcctcagccgggcgggcgccctctcctactttgggaagccctagactccctgaggcacaggttatgctcgcgtgcgcacaaagagtggtcgatgggtgtgaggttgccgcccgcgccgcaaggcgtcctgaagcagtagcgcgtatcccgccactgaggcggggagcaactaccctgggtgttaccactccggctgtgtcctggggcgacgcccccacagaggtggtggcgtgctccggttcactgaaagcaagcccgacttcaaagaaaggtcttgcacccaaggcaggattcctcccaaggccctcaggagccgccccccccgctcctcctacgcgaaaaagtagcctggagcaaagaagctcccctgcttctgctccgccacacgccgtgaaccccgccagagtgggcgccgccgccgtgctcaggggcgaagaagaaccacgaccgagtagccgagctgatcactccgtgcctagggccacctcgtcactcaaggcaagggctagcaaggtggaggctgcccacaggctcgctgggcacgcctctctggaacgttatgagggcctggcccatagctcgagtaaagggcgggaggcgcctgggaggcccccccgagcggttcctaaactgggagttccccccagcagtccgacccatgggccagcacctgcttgtaggtcaggagctgctaaggcagtcggagccccaaagcccccagtgggtggcggcaaagggagagggcttgttgccggtggctcccgggctctcggcccttctgttaaactctccacagcatcagtgactggacgctctccagggggacctgtggccggtccacgcgccgcccctcgggcgggcccctccgtcggcgctaaagccggccgtggtacagtcatgggcacaaagcaggccctaagggctgcgcatagccgtgtgcacgagttgtctgcttcgggagcacccggaaggggagggagctcatggggatccgcggatagcgacagcggccatgactccggagtgaatgtgggggaagagcgacccccaaccggccccgcacttccctccccttacagtaaggtaactgccccaagaaggccacagcggtactcctccggccatggatcagataattccagtgtgttaagtggagaattaccaccagcgatggggcggactgccctctttcatcactctggcggcagcagcggatatgagtccctcaggcgcgattctgaggccaccgggtcagcttccagcgcacccgatagtatgagcgaaagcggcgccgctagccctggtgcaagaactcgctcactcaagtccccgaaaaaaagagccacaggcttacagagaagaagactaattccggcccccttaccagatacaacggccctggggaggaagccgtcactaccaggacagtgggtcgacctgccgcctcccctggcagggtccctgaaagaacccttcgagattaaggtgtacgagattgacgacgtggagcgtctgcagcgcccaagacccaccccgcgggaagcaccgacccagggcctggcatgcgtctccaccaggctcaggcttgctgaaaggcgacagcagcgcctccgggaagtccaggctaagcacaagcacctatgcgaagaactggccgaaacccaggggcgactcatgctcgaacccggtaggtggctggaacagtttgaagtcgatcctgagctggagcccgagagtgcagaatatctggctgccctggagagggccacggccgccctggaacagtgcgtgaacctgtgcaaagctcacgtcatgatggttacctgttttgacatcagcgtggccgcttccgctgccattccaggtccccaggaggtcgatgtgtag

SEQ ID NO: 192460 - DNA, 5184 bp, synthetic construct
  misc_feature 1..5184: note = Description of Artificial Sequence: Synthetic coding sequence
  source 1..5184: mol_type = other DNA
atgatgatggactggaaggccgtggccgcccagaagctgaacctgagcagcaaaaaaaaaaaacaccggcctagcaccagctccgccgctgagccaccactctttgccacaagtttttccgggatcctgcagacgtcgccacctccagcccccccatgtctcctgcgcgctgtgaataaggtgaaggatactcccgggcttggcaaggtgaaagtcatgttaaggatttgctccacgttggctcgcgatacttctgagagttccagcttcctcaaggtggatccaagaaagaagcagatcacactctatgatcctttgacatgcggtggccagaatgcttttcaaaagcgaggtaatcaggtacccccgaaaatgtttgctttcgacgccgtgtttccacaggatgcaagtcaggccgaggtttgcgcgggtacagtcgcagaggtcattcaatccgtcgtcaacggggccgatggatgcgttttctgtttcggacacgctaagcttgggaagtcgtataccatgataggcaaggacgactccatgcagaacctgggcatcataccctgcgccatatcttggctttttaagttgatcaatgagagaaaggagaagaccggcgccaggttttctgtccgggtaagtgctgttgaggtatgggggaaagaagaaaatcttcgtgatctcctgtctgaggtggctaccggatctctgcaggacggacagtcgcccggagtctatctgtgtgaggaccccatctgcggaactcagctgcagaatcagtccgaactacgggctcctactgctgagaaagcagccttcttccttgacgccgccatcgcgagcagacggtctcaccagcaggattgcgatgaagacgatcacaggaacagccacgtgttcttcacccttcacatctaccagtacaggatggaaaagtctggaaagggaggcatgagtggagggcgatcccggctccacctgatcgacctcggatcatgtgtaaaggctctgagcaagaaccgggaaggggggagtggtctctgtctaagcctgagcgcactaggtaatgttattctcgcgttggtgaatgggtcaaaacacattccatataaggaatctaagctggccatgctgttgcgagagtctctggggaatatgaactgcagaaccaccatgatcgctcacattagtgcagctgtaggaagctatgcagaaaccctgtctacaattcaaatcgccagccgagtcctcaggatgaaaaagaagaagacgaagtatacctcctcttcctctggaggcgaatcctcttgcgaagaaggaaggatgcggcgccccacccagctgcgcccttttcatacccgcgctactgtcgacccagactttccaatagcgcacttgagttccgaccctgattacagttcatcttcagagcagtcttgtgacaccgtcatatatattgggcctaacggtacagccctaagtgacaaggaactcactgacaacgaaggccctccagactttgtcccaatcgtcccggccttacagaagacacgaggggactccaggcctgctgaggccggagaagcagctgcaggcaagtctgagcgggattgtctgaagtgtaatacattcgccgagctccaggaacgcctcgattgcatcgatggcagcgaggagccctcgagtttcccctttgaagagttacccgcgcagttcgggcccgagcaagcatccagaggccccagactttctcaggcggcgggggcatctcctctgagtgagtcggataaagaagataatggctccgaagggcagttgaccaatagagagggtcccgagcttcctgcttccaagatgcagcgctcccattctccagtcccagccgcagcccctgcccattcacctagcccagctagcccacggtcagtgccgggaagcagcagtcagcattctgcatcacccctcgtccagtccccttccttacagtccagcagagagtccttgaattcttgcggtttcgtggagggtaaaccaagacctatgggaagcccacgtttgggaatcgcctctttgagcaaaacttctgagtataaacccccgtcgtcacctagccagagatgcaaggtttatacacagaaaggagtgttaccatccccggcacctctgccaccatcatccaaggattctggtgtagcctcccgtgagagcctgttacagccagaggtccggaccccacctgtgggtatgagccctcaggtgctgaaaaagtcgatgtcagccggatctgaaggtttccctgagacgcctgtggatgatgagcagcaggccgcaaccccgagtgagtctaagaaagagattctgagtaccacaatggtgaccgtccagcagccactggagttgaatggtgaagatgaactggtcttcaccctcgtggaagagctgacgatcagtggcgtgctagactcaggtcggccaacgtcaatcatctcttttaatagtgactgctctgctcgagcattggcgtctggttccagaccagtcagcattatttcaagtatcagtgaggatctggagtgttattctagcacagccccggtgtcagaagtttccattacacagtttttacctctgccaaagatgtccttggacgagaaggcccaggatgcaggaagccgacgcagcagcatttcatcctggctgagtgaaatgtccgccgggtccgagggcgagcagtcttgtcatagcttcatcgcccaaacctgttttggccatggggaggccatggccgaaccagttgccagtgagttcgttagctcacttcagaacaccgccgtggtgtgccgtgagaagcccaaggcgtcccctgataacctgttgatcctgtctgagatgggggacgactcattcaacaaggctgccccaattaagggttgcaaaatcagcacagtttctaaagccatggtcacgatctccaacacagccaatctcagcagttgcgaggggtacatacctatgaaaacaaatatcaccgtctatccttgtattgccatgagccccagaaacatccaagagcctgaggcacctactgccactccaaaggccgggccaacactagctcagtcacgggaaagtaaagagaattccgccaaaaaagaaatgaagttcgaggacccctggctgaaaagggaggaagaagtgaaaaaagaaacggctcacccaaatgaggaaggcatgatgcgatgtgagacagcgacaggaccgagcaacgcggaaacgagagctgaacaggaacaggacggcaaacctagtccaggagatcggctgtcctcttcttctggtgaggtttccgcttcccctgtcaccgataatttccgtagagtagtggacggatgtgaaatggctctgcctgggctcgccacacaaagtcctgtgcacccaaacaaaagtgtcaagagttctagcctgcctagggccttccagaaggcatcccggcaggaagaacctgacagcttgagctattattgcgcagctgaaacaaatggtgtcggcgcggctagtggaacccctccctctaaggcaactcttgaaggcaaagtggcttccccaaagcattgcgtcctcgccaggcctaagggtacgccccctctgcccccggtgagaaaaagttctttagatcagaaaaaccgagccagcccacagcatagtgcctccggtagcgggacaagcagcccgctgaaccaacccgcagctttccctgctggcctcccagatgagcctagtggcaagacaaaggatgcatcgtcctcatccaaactcttctccgccaagcttgagcagctggcctccaggtccaactccctcggccgggccactgtttctcactacgagtgtctgagcttggagcgcgctgaatccttgtcgtctgtttctagtcgactacatgccggaaaggatgggacaatgccccgcgccggacgctcactgggtaggtcagcaggcacctcccctcccagtagcggggcctcacctaaggcgggtcagagtaagatcagtgccgtgtcaagactcctgctggccagccctagggcccgagggcccagtgcctcaacaactaagaccctctctttctctacaaagagtctgcctcaggctgttggacagggctcttcctctccccctgggggcaagcatacgccttggagcacacagtccttgagccggaaccgcagctcaggcctggcttcaaaactccctttgcgggctgtgagcggccgaatttctgagttactgcagggcggcgctggggcaagaggcctgcagctgcgcgctggcccagaggctgaggcacgcggcggcgctcttgcggaggacgagccagcggcagctcatttgctgccatccccgtatagtaagattactcctccacgcaggccccacaggtgctcgagcggacatgggtccgataactcatctgtgttatctggcgagctcccaccggcaatgggcaagactgcacttttctatcactctggaggcagcagcggctatgaatccgtgatgcgggactctgaagctacaggctctgcaagctctgctcaagatagtacaagtgagaattcgtcttccgtcgggggcaggtgccggtcactcaaaacgcctaagaaaagaagtaaccctgggtcccaacggcggcggctcatcccagcgctgagccttgatacttctagtcctgtcaggaaacctccaaacagcacgggggttcgttgggtcgacggtcccctgagatcctcccctagaggtctgggagagcccttcgagataaaagtgtatgagattgacgatgtggagagattgcagagacggaggggcggagcctccaaggaggccatgtgcttcaacgccaaattaaaaatactggagcataggcagcagagaattgccgaggtgagggccaaatacgaatggctgatgaaggagttagaggcgactaagcagtatctgatgctggaccctaacaagtggctgtctgagttcgacctcgagcaggtgtgggaactcgattcactggagtacctggaggcactcgagtgcgtaacagagcgattggaatcccgcgttaatttttgcaaagcccatctgatgatgataacttgctttgacataacctccaggcgcaggtag

SEQ ID NO: 192461 - DNA, 6327 bp, synthetic construct
  misc_feature 1..6327: note = Description of Artificial Sequence: Synthetic coding sequence
  source 1..6327: mol_type = other DNA
atgaacagcgtggccggcaacaaggagcggctggccgtgagcacccgcggcaaaaagtatggtgtgaatgaagtctgctcacctacaaagcctgcagcaccattctcaccagagagctggtacagaaaagcctacgaggaaagcagagccgggtcgcgcccaacaccagagggtgccggatccgctctcgggtcctccggtactcccagccccggctccgggacatcatctccctctagtttcaccggcagtccagggcccgcttcccccggaataggcacgtcttcccctggctctctgggaggctcgccaggcttcgggaccgggagccctggaagtgggagcggcggtggttcctctcctggctcagacaggggcgtttggtgcgagaactgtaatgctagactggtcgaactgaaacgtcaagcccttcgactgcttctgccgggcccctttccgggcaaggaccctgcgtttagcgcggtcatccatgataagcttcaggtacctaacacaattaggaaggcttggaacgaccgcgacaacaggtgcgatatctgtgccacacatcttaaccaactgaagcaagaagccatccaaatggtgctgacactggaacaagccgcggggagcgagcattacgatgctagtccttgttcacccccccctctgtcaaatatacccactctggttggcagtcgacacgtcggcggcctacaacaaccccgggactgggcattcgtgccggccccatgcgcaaccagcaactatactggctttgcgaacaaacacggctcgaaacccagctcactcggggtgtcaaatggagccgagaagaaatccgggagcccaacgcaccaggcaaaggtaagcctgcagatggccactagtccctctaatggtaacatcctgaacagcgttgccatccaggcacaccagtacctggacggcacatggtctctttcccgcaccaacggtgttaccctttacccctaccagatttcccagctgatgaccgagtcaagtcgagagggcctgacggaagcagtgttaaacaggtacaatgccgataaaccctcggcttgctccgtccccgcctcccagggcagctgcgttgcaagtgagacatcgacaggcacaagtgttgctgcttccttttttgctcgcgctgcccagaaactcaatcttagcagcaagaagaagaagcataggccgtctacatcaagtgccgccgagcccccattgttcgccacctctttcagtgggattctgcagacctcacccccccctgcccctccttgtctcctacgggccgtcaacaaagttaaggatactcctggcctgggtaaggttaaagtgatgctccgaatttgctccacactcgcccgggacacaagtgaatctagtagttttctgaaagtggacccccggaaaaaacaaatcacactgtacgatcctttaacatgtggcggccagaacgcattccagaagagaggaaatcaggttccacctaaaatgttcgcttttgatgcggtgtttccccaagacgcaagtcaggccgaagtttgcgccggtactgttgccgaagtaattcagtccgtggtgaacggggcagatggctgcgtcttctgttttggccacgcgaagttgggcaaatcctacacaatgattggcaaggacgactctatgcagaatttgggaattatcccttgcgctattagttggctcttcaagcttattaatgaacgaaaggagaagaccggtgctagattcagcgtacgcgtgtccgcagtcgaagtttggggtaaagaggagaatctgagagatctgctgtctgaagttgccaccggaagcttacaggatggacaaagccccggtgtctacctttgtgaggacccaatctgtggtactcagcttcagaatcaatccgaacttagggcaccaaccgccgaaaaagccgcattcttcttggatgcggctattgcttctcgacggagccatcagcaggactgcgacgaggacgaccaccggaactcgcacgtgtttttcacattgcacatttaccagtaccgtatggaaaagtccggcaaaggcggtatgtccggcggacggtctagattacaccttatcgatctgggcagttgtgtgaaggctctaagtaaaaaccgggaaggagggtcgggcctgtgcttatccctctctgcactgggcaacgtcattctggccttggtgaacgggtccaagcatattccctacaaggagtcaaagctggccatgctactcagagagtcccttggaaatatgaactgcagaaccactatgattgcgcacatatccgctgccgtggggtcttacgctgagacacttagtaccattcaaatcgccagtcgagtgctacgaatgaaaaaaaagaaaaccaaatacaccagctcttcgtcagggggtgagtcaagctgtgaagaggggcgcatgcgcaggcctacacagctgaggcctttccacacacgggccaccgtggatcccgacttccccatcgcccacctcagctcagacccagattattcctcatcttccgagcagtcttgtgataccgttatatacattggtccgaatgggaccgcattatcagacaaagaattaacagataacgagggtccccccgattttgtgcccattgtgcctgccctgcagaagacgcgaggagatagcagacccgctgaggccggggaagcagccgccgggaaaagcgaacgggattgtcttaagtgcaatacttttgcggagctacaagagagattggattgcattgacggttccgaagaaccctccagtttcccatttgaggagctccctgcccagttcggcccagagcaggcgagtcggggtcctcgtttatctcaggccgcaggggcctcccctctgtccgagagcgataaggaggataatgggtcagaaggccagctgacaaatcgggaaggtcccgagttgccagcctctaagatgcagcgaagtcactcccccgtacctgccgcagcacccgcccacagtccttctcccgcaagtcccagatctgttcctggcagttcaagccagcatagcgcatcacctctcgttcaaagcccctccctccagtcttcaagggagagcctgaatagttgtggttttgtggaggggaaacctagacctatggggtcccctaggctgggcatcgctagtctttccaaaacaagcgagtataagcccccttctagtcctagtcaacggtgcaaggtgtatacacaaaaaggtgttctgcctagtcccgctcctctgcccccaagttcaaaggactctggagttgcttctagggaaagccttctccagcctgaagtccgcacgccccctgtgggaatgtctccgcaggtactcaaaaagtccatgagcgctgggtctgaggggttccccgagactcccgtcgatgatgaacaacaggcagccacaccctcagagtcgaagaaggaaattctgtcaactaccatggtgaccgtgcagcagcccctcgagctcaacggtgaagacgaactggtttttactctggtggaggagctgactatctctggcgttctggactcaggacgccctacctctattatcagcttcaacagcgactgcagcgcccgcgcactggcctcaggcagccgtcccgtgtctataatttcaagcatttccgaagatctcgagtgttactccagcaccgctccagtgagcgaagtaagcattacccaattcctccccctgcctaagatgtccctcgacgagaaagctcaggatgccggaagcagaaggtcatcgattagtagttggctgtctgagatgagcgcgggctctgagggcgaacagtcctgccacagtttcatcgcccagacctgtttcggacatggggaggctatggccgagccagtggctagcgagtttgtcagttctctccaaaacacagccgtggtctgtagggagaagcccaaagcatcacccgataacctgctgattttgtccgagatgggggacgactcattcaataaggcagctcctatcaaggggtgtaaaattagtacggtgtctaaagccatggtgacaatttcaaatacggcgaacttaagttcgtgcgaaggctatatcccaatgaaaactaacatcaccgtctatccctgtatcgctatgagccccaggaacattcaggaacccgaggccccaacagccacacccaaggccggacccacattggctcagtctcgggagagtaaggagaactcagccaagaaagagatgaaatttgaagacccatggctcaagcgcgaggaggaagtgaaaaaggagaccgcccatcctaatgaggagggaatgatgagatgcgagacagcaaccggtccctctaatgcagaaaccagagccgagcaggaacaagacggtaagccctctccaggcgaccggttgtcgtcgtcctctggcgaggtaagcgcctccccggtcactgacaacttccgacgcgtggtggacggctgtgaaatggcgttgccaggcctggcaacgcagtccccagtgcaccccaataaaagtgtcaagtctagcagcctgccccgagctttccagaaagccagtcgccaggaagaaccagactcactgagttattattgcgccgctgaaaccaatggggtcggggcagcaagcggcactcccccctctaaagctacacttgagggaaaagtagcctcccctaagcattgcgtcttggcacgccccaaagggactcccccccttcctcccgtccgcaagagttcactggaccagaagaatcgtgcttctccacagcactcggcatcaggcagtgggacatcatcccccctgaatcagccggccgcttttcccgccggtctgccagatgaacccagcggtaagacaaaggatgcctcttcttcttctaagcttttttcagctaagctcgagcaactggcttcccggtccaattctctgggccgcgcaactgtgagtcactacgaatgtctttccctggagcgagcagaaagcctaagttctgtgagttccaggttgcacgccggcaaggatggcacaatgcccagggccggacggagcctgggacgcagtgcaggaaccagcccccctagttctggagcaagccctaaggcaggacagtccaagatttccgcagtttctagactgctgttggcatcgcctcgggccagaggacccagtgcatcaaccactaaaacacttagctttagtacaaaatcattgccacaggcggtcggtcaaggcagctcctcacctcccggcggtaagcataccccttggtctacccagagcctttctcgtaacaggtcaagcgggctggccagcaaactgcccctgcgagctgtaagcggccgaatatccgaactccttcaagggggggccggagcgcggggactgcaactgagggctggccccgaggccgaggcccgtgggggtgccttagccgaagatgagccagccgctgcccacttgctcccctcaccttattccaaaattacgcctcctaggaggccacatcggtgcagctctggtcacggatctgataactcaagcgtgctctcaggggagctgcctccggctatggggaagacagcacttttctaccacagtggtggcagttctggttatgagtccgtgatgcgcgactcagaggcaaccgggtccgcctcctccgcacaagatagcaccagcgaaaactcttcaagcgtgggtgggcggtgcagatcccttaagacccccaaaaagcggtcgaacccaggcagtcagagacgacggctgattcccgccttaagcctggacacaagtagcccagtaagaaaaccacctaatagcacgggggtgagatgggtggacgggcccttgagaagttcccctcggggattgggcgagccctttgaaattaaagtgtacgaaattgatgacgtagagcgcctgcaacgcaggcgtggtggcgcctctaaagaggccatgtgctttaatgccaagctgaagatcctagaacaccgacaacagaggatagcggaagtgagggctaagtacgagtggctgatgaaggagctagaggccaccaaacagtacctaatgcttgaccctaataagtggttaagcgagttcgacctagagcaggtctgggagttagattcactcgaatatctggaggctctggaatgcgtcacagaacgactagaatctcgcgttaatttttgcaaagcccatctaatgatgattacatgtttcgatataacatctcgccggcgctag

SEQ ID NO: 192462 - DNA, 5175 bp, synthetic construct
  misc_feature 1..5175: note = Description of Artificial Sequence: Synthetic coding sequence
  source 1..5175: mol_type = other DNA
gactggaagaccaaggccgcccagaagctgaacctgagcagcaagaagaaaaaacatcggccctctacctcctccgccgccgagccacccctttttgccacctctttttcaggtatcctgcagacgagtccacctccggccccaccctgtttgctccgcgccgtgaataaagtgaaggatactccagggctggggaaggtaaaagtaatgcttagaatttgttcgaccctagcccgcgatacctcagagtcttccagctttctgaaagtagacccaagaaagaagcagattaccctgtacgatccattgacttgcggcggccagaacgcttttcagaagagaggcaatcaggtcccccccaaaatgtttgcctttgacgctgtcttccctcaggacgcttcccaggcggaagtctgcgccggtactgtggcggaagtgattcagtccgttgtgaatggcgccgacggctgcgtcttctgcttcggccacgcaaagttgggtaaatcctatacaatgatcgggaaagatgatagcatgcaaaaccttggcattatcccatgcgcaatttcgtggctgtttaagctcatcaatgagcgaaaagagaagacaggggcccggttctctgtgagagtgtctgccgtcgaggtttgggggaaggaggagaatttgcgtgacctgctgtccgaagtggcaacaggtagcctgcaggacggccagtcacctggcgtctacctgtgcgaggatccaatatgcggcacccagcttcagaaccagagtgaactgcgggctccgaccgccgaaaaggcagctttttttctggacgccgccatagcctccaggcggtcacaccagcaggactgtgacgaggacgatcataggaactcacacgtgttttttacactgcacatataccagtaccgcatggaaaagagcggcaagggggggatgtccgggggtaggagccggctacacttaatagatctggggtcctgtgtcaaggccttgagtaagaatagggaaggcggatcaggactctgcctcagcctgtctgcgttgggcaacgttatcctagcactagtgaacggctccaagcatatcccttacaaggagtctaagctggccatgctgcttagagagtcactggggaatatgaattgcagaaccaccatgatcgcccatatctccgcagccgtcggtagctacgctgagacactgagcacaattcagattgcttctagagtgctcaggatgaagaagaaaaagacgaagtatacgtcttctagttctggaggcgaatcttcctgtgaagaaggtcgcatgaggcggcccacccagctgagacccttccatacaagagctaccgtagaccctgactttcccatagcacatctctcaagtgacccagactactcttcatcgtctgagcagagctgcgacacggtaatatatattggcccaaacgggacggctctgtccgacaaagaactcacagacaatgaggggcctcctgacttcgttccaattgtgccagcccttcagaaaacacgcggtgacagccggcctgcagaagcgggtgaggccgccgccgggaagagtgaaagggactgccttaagtgtaataccttcgccgaacttcaggaacgcttagattgcatcgacggctccgaagagcctagctcttttcccttcgaagaactgcccgctcagtttgggcccgaacaggcgtcccggggaccccgcctttcccaggcggctggggcttcacctctgtctgagagcgataaagaggacaatggttccgaaggtcagctaacgaaccgcgagggccccgaactacctgcaagcaagatgcagcgtagtcacagccctgtgccagcagccgccccagcacacagcccgagtcccgccagcccacgctctgtgcctgggtcatcatctcagcacagtgcctcccctctagtccaatccccttccttacagtccagcagggagagtctgaactcttgcggttttgtggagggaaagcctcgcccgatggggagccccaggttggggattgctagtctgtcaaagaccagcgaatacaaacctccaagcagccctagccaaagatgcaaagtttatacgcagaagggagtgttaccttcaccggcaccactacctcccagcagcaaagattcgggggtcgcatctcgggaaagtttgttgcagccagaggtcaggactccaccagtggggatgtcgcctcaagtgcttaagaagtctatgagcgccgggagtgaggggtttccagaaacgcccgtggacgatgagcaacaggctgcaacaccatctgagtctaagaaagagatcctgtccaccacaatggtcactgtgcaacaaccccttgaactgaacggtgaggacgagcttgtgtttaccctcgttgaggaattaaccattagcggcgtcctcgacagtggtcgacctacctcaattatcagctttaacagtgactgttccgcgcgagcactcgcttcgggttccagacccgtgtcgataatctcaagcatctcagaggatttggagtgttatagctcgacagcacctgtttctgaggtgtcaataactcagtttcttccgctcccaaagatgagcctggatgaaaaggctcaagatgcagggtcccggcgatcctcgatctcaagttggctctctgagatgtcggcaggcagtgagggagagcagtcttgtcacagtttcattgcgcagacatgttttggacatggagaagctatggctgaaccggtggcctcagagttcgttagcagcttgcagaacacagccgtggtttgccgagagaaaccaaaggcttccccggataacctactcatcctgtctgaaatgggcgatgattcctttaacaaggccgccccaatcaagggatgtaagataagtaccgtcagtaaagcaatggtgactatttctaacacagcaaatctgtcatcctgtgaagggtacatccctatgaagacaaacatcactgtatacccatgcatagcgatgagccctagaaatatccaggagccagaggcgcctacagccactccgaaggcaggcccaaccctggcccagagcagagagtccaaggaaaacagcgctaaaaaagagatgaagtttgaggacccatggctgaaacgcgaggaggaagttaaaaaggagactgctcacccaaacgaagaaggcatgatgcggtgcgagacagcgacagggccctccaacgcagaaacgcgcgctgagcaggagcaggatggtaaaccttctccgggagaccgcctgtcgagcagtagcggagaagtttcagccagtcctgtgactgataacttccggagagttgtcgatgggtgtgaaatggccttaccaggactggcaactcagagtccagtccaccctaataaaagcgtgaagtcttccagcctcccaagagcctttcagaaggcctctagacaagaggaacctgatagtttgtcctattactgcgcggccgagaccaacggcgtcggggccgcttcaggcacacctccgtctaaggcaactctcgaaggcaaggtggccagccctaagcactgcgtgctggcacgccccaagggcacgccccctttaccccctgttagaaaatcatccttggatcagaaaaatcgagcttctcctcaacacagtgcctcaggctcaggaacatccagtcctcttaaccaacccgctgctttcccggccgggctccccgatgaaccctccggcaagaccaaggatgcctcaagctcatctaaattgttcagtgccaagctcgaacagttggcctcacggtcaaacagcctcggccgggccacagtgagtcattatgaatgtttaagcctggaacgcgcggagagcctgagctccgtatcatcccggctgcacgccggcaaggatggtaccatgccacgcgccggccggagcctgggacgatccgcaggtacgtcacccccctcctctggcgcatccccgaaagctggtcagtcaaaaatcagcgcagtttctcggttattgttggcctccccaagagcaagaggcccttcggcctctacaaccaaaaccttgtcattttcaactaagtctcttccgcaggccgtgggacagggctcatcatctcctcccggcggtaagcacacaccgtggtccacacagagtcttagtcggaataggtcatcaggcctggcctccaagctaccactgcgggccgtgtcgggcaggatttcagagctcctccaggggggcgctggtgcccgagggctccagctaagggcaggcccagaggccgaggcccgaggtggagccctggcggaggatgaaccagcagccgcacacctgctaccatctccttacagtaagattactccccctcgccgcccccatcgatgttcctctggccacggatcagacaattccagcgtgctcagcggggaactcccaccagccatgggaaaaacggcattgttctaccattccggagggagttcgggctatgagagcgttatgcgggacagcgaggccaccggtagcgcgagctctgcccaggattccaccagcgagaattctagtagcgttggtggtcgatgcagaagcctcaagacccccaaaaaaaggagcaacccaggttcacaaaggaggagactgatcccggccttatccctggatacgtcaagtccggttcgaaagcctcctaattccaccggagttagatgggtggatgggccgttaaggagtagtcccaggggcctgggggaaccctttgaaatcaaagtttatgagattgatgatgtggaacggttgcagagaagaaggggcggggcgtccaaagaggcgatgtgtttcaatgccaaattaaaaatcctggaacaccggcagcaacgcattgctgaggtgcgtgccaagtacgagtggctcatgaaagagctggaagccactaaacagtatcttatgctggatccaaacaagtggcttagcgagttcgatcttgaacaggtgtgggagctcgacagcctggagtatctggaggctctggaatgcgtaactgaacgcctcgagtctcgcgtgaatttctgcaaagcccacctgatgatgattacctgcttcgacatcacgtctcgcagacggtag

SEQ ID NO: 192463 - DNA, 2016 bp, synthetic construct
  misc_feature 1..2016: note = Description of Artificial Sequence: Synthetic coding sequence
  source 1..2016: mol_type = other DNA
atgatcgacttcgacgacgtggccgccatcaaccccgagctgctgcagttactacccctgcatccaaaggacaacctccctctgcaggagaacgtcactatacaaaaacagaagcgccggtccgtaaactctaagattccagcgcccaaggagtcgttgcgcagcagaagcacccggatgagtactgtcagtgagcttcggatcacagctcaagaaaatgacatggaagtggagctcccagcggccgcaaattccaggaaacaattttcggtccctccggctccaacccggccgtcctgccctgcagtcgctgaaatacccctgagaatggtctctgaggaaatggaggagcaggttcactctattcgcgggtcatcctcagctaatcccgtcaacagcgtccgacggaagtcttgcctggtgaaggaggtcgaaaagatgaaaaacaaaagagaggagaaaaaggcccaaaattccgagatgcggatgaagcgggcccaagagtatgattcttccttccccaactgggagttcgcaaggatgattaaagagtttcgggccacactcgagtgtcatcccctcaccatgactgatcccattgaggagcaccgcatttgtgtatgcgtgcggaagaggccactgaataagcaggagctggcaaaaaaggagatcgacgtcatatccatcccatccaagtgcttgcttttagttcatgagccaaagctgaaggtggacctgaccaagtatcttgagaaccaggctttttgcttcgacttcgcctttgacgagacagcatctaatgaggtggtctaccgatttacggcaaggcccctcgtgcagacaattttcgaaggcgggaaggccacatgctttgcctatggccagaccggttcaggcaagacgcatactatgggcggtgatcttagcgggaaggctcagaatgcaagtaaaggcatatacgcaatggcgagcagagacgttttcctgctgaagaatcagccctgttacagaaaactcgggcttgaagtgtatgtgacctttttcgagatttataacgggaaactgttcgacctgctgaataagaaagcgaaactaagggtcctggaagacggcaagcaacaggttcaggtcgtaggactgcaggaacatcttgtcaattcagccgacgacgtcatcaaaatgattgacatgggatccgcatgccggacctcaggccagacatttgccaatagcaatagcagccgaagccacgcatgttttcagatcatccttagagcaaaagggcgaatgcatggaaagttctctctggtcgaccttgccgggaacgagcgcggcgccgacactagtagcgctgataggcagaccagaatggagggtgccgaaatcaacaaaagtctgttggccctcaaggagtgtatccgtgctcttggacagaacaaagcacacacgccatttagggaatccaaacttacccaggtactcagagactctttcattggcgaaaacagcaggacttgtatgatcgcaacaatttcgcccgggattagctcctgcgaatacaccctgaacacacttcgctacgccgatcgagtgaaggaattgagccctcacagtggcccatctggtgagcaactcatccagatggagaccgaggagatggaggcctgctcaaacggggcgttgatcccaggaaacttatctaaggaggaggaggagctctccagccaaatgtcaagctttaacgaggcaatgacccagatccgcgaactcgaggaaaaagctatggaggagctgaaagaaattatccagcaggggcctgactggctggaactatcagaaatgactgagcagccagattacgacctggagactttcgtgaacaaagcggagagtgccctggcacagcaggccaaacacttctccgcactgagagatgtcatcaaggccctcagactcgcaatgcaactcgaagagcaggcctcacgacagatcagctccaagaaacgcccacagtag

SEQ ID NO: 192464 - DNA, 2055 bp, synthetic construct
  misc_feature 1..2055: note = Description of Artificial Sequence: Synthetic coding sequence
  source 1..2055: mol_type = other DNA
atggccatggacagcagcctgcaggcccggctgttccccggcctggctataaaaattcagcggtccaacgggttgattcacagcgcgaacgtaaggactgttaatctcgagaagagctgcgtgtctgttgagtgggccgagggcggggccacaaagggcaaagaaatagactttgacgatgtagcagcaatcaaccccgaattactccaactgctcccgctacacccaaaggacaacctgcctctccaggagaacgttaccatccagaagcagaaacgcaggagcgtgaactctaagattcccgcccccaaggaatcacttcgctctcgtagcacaagaatgtctaccgttagcgagctgcggattaccgcccaggagaacgatatggaggtggagctgccagccgctgcaaattcccggaaacagttttcagtgccactcaggcggaagagctgcctggttaaagaagtggaaaaaatgaagaataagagggaggagaagaaggctcagaactcggagatgcggatgaagcgcgcccaagaatacgactcctcctttccaaattgggaatttgctagaatgatcaaagaattccgtgctaccctggaatgccacccactgacgatgacggatccaattgaagagcataggatatgcgtatgtgtacgaaagaggccactgaacaaacaagaactggccaaaaaagaaatagatgtgatcagcattccctcgaaatgcctgttactggtgcatgagcctaaactgaaagtggacctcacgaaatacctggagaaccaggcattctgcttcgattttgcattcgatgagaccgccagcaatgaggtggtgtacagattcaccgcccggcctcttgtacagacaatatttgaaggaggcaaggccacctgcttcgcctacggacagacaggtagtgggaagacacataccatgggaggggacctctctggtaaagctcaaaacgcaagcaagggcatttatgcaatggccagccgcgacgtgttcctcctaaagaaccaaccctgctacagaaagcttggactggaggtatacgtgacgtttttcgaaatttataacggaaagctgttcgacctcctgaacaagaaggccaaactgagggtgttggaagatgggaaacaacaggtacaggtggtgggtctccaggagcacctggtgaacagtgccgatgacgtgataaagatgattgacatggggagcgcttgtagaacttctggccagacctttgccaactctaacagcagcaggagccacgcctgttttcagattatcttgcgcgccaaagggaggatgcatggcaaattttctcttgtcgacctggccgggaacgaacgtggcgcggacaccagctctgccgacaggcagactagaatggagggcgcagagatcaacaagtccctgttggcgttgaaggaatgcattcgggctctgggtcagaacaaagctcacacccccttccgcgagtctaaactgacccaagtcctgagagattccttcattggcgagaattcgagaacctgcatgattgccactatcagccctggcatctcatcatgcgagtacactctgaatacgttaaggtacgcagacagagttaaggaactctcaccgcacagcggaccctcaggcgagcagttaatccaaatggagaccgaagagatggaagcctgttctaacggggctttaataccagggaacctgtccaaagaggaggaggagctgagcagtcagatgtcatccttcaacgaagctatgacacagataagagaactggaggaaaaggcaatggaggagctcaaggagatcattcagcagggccctgattggctcgagttgtctgaaatgactgaacagcctgactatgatttggaaaccttcgtcaataaagctgagtccgcattggcccagcaggcaaagcacttctcagccttgcgtgatgtgatcaaggccctaaggctggccatgcagctggaggagcaggctagcaggcagatttcaagcaagaagcgccctcagtag

SEQ ID NO: 192465 - DNA, 1839 bp, synthetic construct
  misc_feature 1..1839: note = Description of Artificial Sequence: Synthetic coding sequence
  source 1..1839: mol_type = other DNA
atgagcaccgtgagcgagctgcggatcaccgcccaggagaacgacatggaggtagaactccccgccgcagcaaactcccggaaacaattcagtgtccccccagccccaactagaccctcttgcccagctgtagccgagataccccttcggatggtctctgaggagatggaggaacaagtgcacagcatccgcgggtcctcgagtgctaatcctgtaaacagtgtgagacgtaagtcttgcctggtgaaggaggtggaaaaaatgaagaacaagagggaggaaaagaaggcacaaaacagcgagatgcgcatgaaaagggcgcaggaatacgactctagttttccaaactgggaattcgctagaatgataaaagaatttcgggcaactctggagtgtcaccccctgacaatgactgatccaatcgaggagcacaggatctgcgtttgcgtgcgcaagcgaccgctgaataagcaggaactcgctaagaaagaaattgacgtcatatcaataccttctaagtgcctgttactggtccacgaaccaaaacttaaggtcgacctgacgaaatacctcgaaaatcaggctttctgtttcgatttcgccttcgatgaaactgcctcaaacgaagtagtgtaccgctttaccgcaaggcctctggtgcagactatcttcgagggggggaaggccacgtgttttgcatatggccaaaccgggtccgggaagactcataccatgggtggcgatctgtccgggaaggctcaaaatgcctcaaagggaatctatgccatggcaagtcgcgacgtcttcctgttaaagaaccaaccctgctacaggaagctcggcctcgaggtgtatgtaacttttttcgagatctacaatggcaaattgtttgacttgctgaacaagaaggccaagctccgggtcctggaagatggaaaacagcaggttcaggtggtgggcctccaagaacacctcgtgaattctgccgatgatgtgatcaagatgatcgacatggggtccgcctgtcggacatcaggccaaaccttcgcaaacagcaactcaagcaggagccacgcatgctttcaaattatcctgcgtgctaaagggcgtatgcacggaaagttttcattagtggatctcgcgggtaatgaacgtggcgctgataccagcagcgccgatcggcagaccagaatggagggcgcagaaataaataagagcttactcgcgcttaaggagtgtataagggctctgggtcagaacaaggctcacacgcctttccgggaaagcaagctgacgcaggtgttaagggacagttttatcggcgagaactcccgcacttgcatgattgccacaattagcccaggcattagctcttgtgaatacaccctcaataccctcagatatgcagatcgtgtgaaggagcttagccctcactctggcccctccggtgagcagctcatccagatggaaactgaagagatggaagcctgcagtaacggagcactgatacctggcaatcttagtaaggaggaggaagagctgtcttcccagatgtcatctttcaatgaggccatgacccagatcagagagcttgaagaaaaagccatggaagaacttaaggagatcattcagcagggtcccgattggctggagctgagtgagatgacggaacaacccgattacgacctggaaacgtttgtcaacaaagctgagagtgcattggcccagcaggctaagcactttagtgccttgcgagacgttatcaaggccctgcggttggctatgcagctagaagagcaggcctcgcgccagattagctccaaaaaacgcccacaatag

SEQ ID NO: 192466 - DNA, 2178 bp, synthetic construct
  misc_feature 1..2178: note = Description of Artificial Sequence: Synthetic coding sequence
  source 1..2178: mol_type = other DNA
atggccatggacagcagcctgcaggcccggctgttccccggcctggctatcaagattcagagaagcaacggcctaattcactccgcaaacgtgaggacagtgaatctggaaaaatcatgcgtcagcgtggagtgggccgaagggggagccacaaaggggaaggagatcgacttcgatgacgtagccgcgatcaatcctgaattgctccagctgctgcctctccaccccaaagacaaccttccattgcaggaaaacgtgaccatacagaagcagaagagaagatcagtcaattctaagatcccggccccaaaagaatcactgaggtcgcgctccactcggatgtcaactgtgagtgagctccgcataaccgcccaagaaaatgatatggaagtcgagctgccggcggccgccaactccaggaagcaattcagtgtacctcctgcgccaacacggccatcctgtcccgccgtagcagaaatccctttgcgcatggtgtctgaggagatggaagaacaggtccatagtatccggggttctagttcagctaacccggtgaattctgtgagacgcaagagctgtctggtcaaagaagtagagaagatgaagaataagagagaggaaaaaaaggcacagaattccgagatgaggatgaaaagagcccaggagtacgattcctcattccctaactgggaattcgcgcgaatgataaaggaatttcgcgcaacactggagtgtcatcccctgacaatgaccgacccgattgaggagcatagaatctgcgtgtgtgttcgaaaacgccccctgaataaacaggagctcgccaagaaggaaattgacgtaatttcaatcccttccaaatgcctgctgcttgtgcacgaacccaagctaaaggtggacttaactaagtacctggagaatcaagcattttgctttgactttgcatttgacgagaccgcatccaacgaagtggtttacaggtttaccgcccgcccccttgttcaaacaatctttgagggcggcaaggccacctgttttgcatatggtcagacagggtccggcaagacacataccatgggtggcgatctgagtggaaaggcccaaaatgccagtaaaggaatatacgccatggcctccagagacgtatttctgcttaagaatcagccctgctaccgaaagctcggccttgaagtctacgttaccttctttgaaatctacaatggaaaactcttcgacttgctcaataagaaagccaagctcagagtccttgaggacgggaaacagcaggtccaggtggtcggactgcaagagcatttagttaacagtgccgatgatgtcattaagatgattgatatgggtagcgcttgtagaacaagtgggcagacattcgctaacagcaattccagccgttcacacgcctgcttccagataatacttcgagccaaaggacgcatgcacggtaaattctctctggttgatttggccgggaatgaaaggggcgccgacacctcatctgcagatcgccagacacgcatggagggagccgagattaataagtccctcctggcactgaaggagtgcattcgcgcactcggacaaaataaggcacacacgcccttcagagaaagcaagctgactcaggtactgcgagattcatttatcggggagaatagccggacttgcatgattgcaacaatctcgcctggaatcagcagctgtgaatataccctcaatactcttagatacgcagatagggttaaggaactatctccccattccggaccctcgggggaacaactcattcagatggaaaccgaagagatggaagcctgtagtaacggcgccttaatcccaggcaatctttccaaggaggaagaagaactgagttcccagatgtcttccttcaatgaggctatgactcaaattcgtgaacttgaagaaaaagccatggaagaactgaaggagattatacaacagggtcccgactggctcgagctgtccgaaatgaccgaacagccagattacgatttagagacattcgtaaataaagcagaatctgccctggctcagcaagcaaagcacttcagtgctttgagggatgtgattaaagccctgcgactcgctatgcagcttgaggagcaagcatcaagacaaatatctagcaagaaacggcctcagtag

SEQ ID NO: 192467 - DNA, 324 bp, synthetic construct
  misc_feature 1..324: note = Description of Artificial Sequence: Synthetic coding sequence
  source 1..324: mol_type = other DNA
tgaaaggagtgcatccgggccctgggccagaacaaggcccacacccccttccgggagtctaaactgacacaggtgttgagggactccttcattggcgaaaatagccgtacctgcatgattgccacgattagcccaggcatctcttcatgtgagtacaccctgaataccctgagatacgccgacagacagggttgccattccatccccttagagccacaggccagtaaacctgggcggtgccacatacctcttttgtccaaggaggaagaggagttgtcatcacagatgagttcctttaacgaagcaatgacgcagatcagatag

SEQ ID NO: 192468 - DNA, 1011 bp, synthetic construct
  misc_feature 1..1011: note = Description of Artificial Sequence: Synthetic coding sequence
  source 1..1011: mol_type = other DNA
atggccatggacagcagcctgcaggcccggctgttccccggcctggccatcaaaattcagaggtcaaatggcctgattcactccgcaaatgtgaggacagtgaatcttgaaaagtcctgcgtgagtgtggagtgggcagaaggtggcgcaacaaagggaaaagagatcgacttcgacgatgtagctgccattaaccccgaactgctccagctgctgcccctgcatccgaaggataatctgcctctccaggagaatgttaccatacagaaacaaaaaaggcgaagtgttaacagtaagattcccgcgccaaaagaaagtctgcggagcaggtccactagaatgtccactgtcagcgaactccgaattacagcccaggagaacgacatggaggtggagctgccagccgcagcaaactccaggaaacaattttcagttcctttacgaaggaagtcctgcttggtaaaagaagtggaaaaaatgaagaataagcgtgaggaaaagaaagctcagaactcagaaatgagaatgaaacgagcccaagagtacgattcaagcttccccaattgggagtttgcgcggatgataaaggagttcagggctaccttagagtgccatccactcacaatgactgatcctatagaagagcacagaatttgtgtctgcgtgagaaagagaccccttaacaagcaagaactggcgaaaaaggaaatcgacgtgatttcaataccaagtaagtgtcttctgttggtgcatgaacccaagctgaaggttgaccttacaaaatatctagagaatcaggccttttgctttgacttcgcctttgacgaaacagctagcaatgaggttgtctaccgtttcaccgcccggccccttgtgcagacgatctttgaaggtggaaaagcaacgtgttttgcctacggccagactggcagcgggaaaacgcatacaatgggcggagatctttccggaaaggcccagaatgcgagtaagggtatctacgcaatggcttag

SEQ ID NO: 192469 - DNA, 864 bp, synthetic construct
  misc_feature 1..864: note = Description of Artificial Sequence: Synthetic coding sequence
  source 1..864: mol_type = other DNA
atggtgcggagcggcgtgccccggagccggggcctggtgagcggcctcattcattccgccaacgtaaggaccgtgaatttggagaagtcttgtgtgagtgtggagtgggccgaaggcggcgctaccaaggggaaggagatcgatttcgacgacgtggccgcaataaaccccgagctgcttcagttacttccactgcacccaaaagacaatttacctttgcaggagaatgtcacaatccagaaacaaaaaagacggtccgtcaacagtaagatcccagcacctaaggagagtcttcggtccaggtctacacgtatgtcaaccgtcagcgaactcaggattacagcgcaggagaatgacatggaagttgagctgccagccgccgccaactcacggaaacagttctccgtacctcccgctcccactcggccttcctgccctgccgtcgccgaaatcccactgaggatggtgtccgaagaaatggaggaacaggttcattccatcagaggcagctccagcgccaacccagtgaactctgtgagaaggaagtcctgcctggtgaaagaggtggagaagatgaagaataagcgagaagaaaagaaggcgcaaaactctgaaatgcgcatgaaaagggctcaggaatacgattcaagttttcccaactgggagttcgctcggatgattaaggaatttcgcgcgaccctggaatgccaccctctgacaatgaccgaccctatagaggaacaccgaatctgcgtctgcgtgagaaaacggcccctaaacaagcaggagctggccaaaaaggaaatcgatgtaatctctattccctcaaagtgtcttctgctggtgcacgaacccaagctctag

SEQ ID NO: 192470 - DNA, 2244 bp, synthetic construct
  misc_feature 1..2244: note = Description of Artificial Sequence: Synthetic coding sequence
  source 1..2244: mol_type = other DNA
atgagcaagctgaagagcagcgagagcgtgcgggtggtggtgcggtgcaggccgatgaatggtaaagagaaggccgccagctacgacaaggttgtggatgtggacgtgaagttgggccaggtttccgtgaaaaatccaaagggcacggcccacgagatgccgaaaactttcacttttgacgcggtttatgattggaatgcaaaacagtttgaactctatgacgaaacgtttaggcctcttgtggactctgttctacaagggttcaacgggactatttttgcctatggccagacaggtaccggcaagacctataccatggagggaatccgcggtgaccccgagaaacgaggggtgatccccaactcctttgatcatatctttacacatattagccgatcccagaaccagcagtatctggtgcgggcgtcctatctcgagatttaccaggaggagattagggacctcctatctaaagatcagaccaaaaggcttgagttaaaggaacggcctgacacgggggtctatgttaaggacttgagctctttcgtgaccaagagtgtaaaagagattgaacatgtcatgaacgtgggtaaccagaaccgtagcgtcggtgctaccaatatgaatgagcattcgtctagatctcatgctatattcgtgataacgatagagtgcagcgaggtgggactggatggagaaaaccatattcgagttgggaagctgaacctcgtggatttggctggttcagaacgacaggcaaagacgggcgcccagggagagaggctcaaggaggccactaaaattaacctgtcattatctgctctgggcaacgtgatttccgcccttgtggacgggaaaagcacacacatcccttaccgggattctaagttgactcgcctgctccaagacagcctcggagggaacgccaaaacagtgatggtggctaacgtaggccctgcgtcatacaatgtggaggaaacacttaccacccttcggtacgctaaccgagccaaaaatattaagaacaagcctcgtgtaaacgaggatcctaaagacgcattgctgcgcgagttccaggaagaaattgccaggctgaaggcccagctggaaaaacgctctatcggacgtagaaaacggcgagagaaacgccgggagggtggaggatctggcggcggaggcgaggaagaagaagaagagggtgaggagggggaggaggaaggcgacgacaaagacgactattggagggagcaacaagagaagcttgagatagagaaacgcgccattgtggaagatcatagccttgtggccgaggaaaagatgcgcttgctaaaagagaaggagaagaagatggaggatctacggcgggagaaagacgcagcagaaatgctgggcgccaaaattaaggctatggagtcaaagctcttggtgggaggcaaaaatattgtggaccatactaacgagcagcagaaaatcttggagcagaaacggcaggagatcgccgagcagaaacgacgcgaaagggaaattcagcagcagatggaatctcgggacgaagaaacgttggagctgaaggagacttacagttcgctgcaacaggaggtggacataaagactaaaaaactgaagaaactcttttcaaaactgcaggccgtcaaggccgaaatccatgatctgcaggaggagcacattaaggagaggcaggaactggagcaaacccagaatgagctgacacgggagttaaagcttaagcacctcatcattgagaattttattcctctggaagaaaaatccaaaatcatgaacagggccttttttgacgaggaggaagatcactggaagctgcacccaatcaccaggcttgagaaccagcaaatgatgaaacgccctgtatctgcggtcggatacaagcggccactgtcccagcatgcaaggatgtctatgatgatccgccccgaagccagatatagggcagagaatatcgtcttgttggaactggacatgccgagccgcactacccgggattacgagggccctgccattgcccctaaagtgcaggctgctctggacgctgccctgcaggacgaagatgaaattcaagtggatgcctcctctttcgagagtacagcaaataaaaaaagcaaagctcgcccaaagagcggtcgcaaatccggatcatcgagcagctcatccggcacacctgcatcacaattgtacccacagagtcggggcctggttcctaagtag

SEQ ID NO: 192471 - DNA, 1122 bp, synthetic construct
  misc_feature 1..1122: note = Description of Artificial Sequence: Synthetic coding sequence
  source 1..1122: mol_type = other DNA
atggtggccaacgtgggccccgccagctacaacgtggaggagaccttgactactctcaggtatgctaatagggccaagaatataaaaaataaacccagagtgaacgaggatccaaaagatgcattgctcagggagttccaggaagagatcgcacggctgaaagcacagctagaaaaacgctccattgaagaaaaaatgcgcctgcttaaagaaaaagagaagaaaatggaggacttgcgcagagagaaggacgccgctgaaatgcttggggcaaaaatcaaggctatggagtctaagttgctggtgggcggaaagaatattgtggaccacaccaatgaacagcaaaagatccttgaacagaagcggcaagagattgccgagcagaagaggagagagcgggaaatccagcagcaaatggaatctcgggacgaggagacgctggaactgaaagaaacatacagttccctccaacaggaagtcgatataaagaccaaaaagttaaagaagttgttttctaaactccaggcagtgaaagcagagattcatgaccttcaggaagagcatattaaggagcggcaggaattagaacagacacagaatgaattgacccgcgagttaaagctgaaacatctcatcatcgagaattttattccactcgaggagaagtccaaaataatgaatagggcctttttcgacgaggaagaagatcactggaagttgcatcccatcacgcgactggagaatcagcaaatgatgaagaggcctgttagcgccgtgggatataaaaggcctctgtcacagcacgcccgtatgagtatgatgatcaggccagaagcaagatatagggccgaaaatatcgtgctgctggagctggatatgccatctcgcaccacacgggactatgagggcccagctatcgctccaaaggtccaggccgctctagacgccgccttgcaggatgaggatgaaatccaggtagacgctagttcgtttgagagcaccgctaacaaaaaaagtaaggcacgcccaaaaagcggacggaagagtggaagctccagcagctcgtccggcacccccgcatcgcagctctacccccaaagtcggggattggtcccaaagtag

SEQ ID NO: 192472 - DNA, 2382 bp, synthetic construct
  misc_feature 1..2382: note = Description of Artificial Sequence: Synthetic coding sequence
  source 1..2382: mol_type = other DNA
atggccagcaagaccaaggccagcgaggccctgaaggtggtggcccggtgtagacccctgtctaggaaagaggaagctgccggtcatgagcagatccttaccatggacgtcaagttaggccaggtgaccctgcggaacccgagggctgcaccgggtgagttacctaaaacattcacctttgacgcggtgtatgacgcatcctccaaacaggcagatttgtatgatgaaaccgtgcgaccacttatcgatagcgtccttcaggggtttaatgggactgttttcgcatatggacaaactggaacagggaagacttataccatgcagggtacatgggttgagccggaacttcgaggggtgattcccaacgcgtttgagcatatcttcacgcatatctcccggtcacagaaccagcagtacctggtgcgtgcttcctatctagaaatctaccaggaggagatccgggatctgctctcaaaagagccaggaaagcggctcgagctgaaagagaacccagaaaccggagtgtatattaaggacctctcttctttcgtaaccaagaatgtgaaagaaattgagcacgtgatgaaccttggcaaccagacaagggccgtgggctctacccacatgaatgaagtttccagccggtcgcatgctatcttcatcattacagttgaatgctctgagcggggcagcgacggacaagaccacatccgcgtagggaaactgaacctggtcgacctggctggttctgaaaggcaaaataaagccgggcctaacacggcaggaggcgccgctaccccatcatccgggggcggtggtggaggcggtggaagcggtgggggcgccgggggcgagagaccgaaggaggctagcaagattaaccttagcctcagtgctctgggtaatgttattgctgccttggccggtaatcggtccacacacattccttatagggatagcaagttgacccggctgctgcaggattccctcggtgggaatgcaaagaccatcatggtggccactctgggaccagcttctcattcctatgacgagtccttgagcactcttcgcttcgccaatcgagccaagaacatcaagaacaaacctcaggtgaacgaagatcccaaggatactctgctcagagagttccaggaggaaattgcccgcttaaaggctcagctcgagaaaagagggatgttgggaaagcggccacggcggaaaagcagcaggcgaaagaaggcagtgagcgcgccacccgggtatccagaaggccccgtcattgaggcgtgggttgcggaagaagaagacgataacaacaataaccaccggcccccacagccaatccttgaaagtgcgctggagaaaaacatggagaactacctgcaggaacagaaagagagactggaggaggaaaaggctgctattcaggacgatcgatctctggtgtcggaggagaaacagaaattacttgaggaaaaggaaaagatgctggaagatcttaggcgggagcagcaagccaccgaactgttggcagccaagtataaagccatggagtctaagctactgattggggggaggaacatcatggaccatacaaacgagcagcagaagatgctggaattgaagcggcaggagattgcggagcagaagagacgggagagagagatgcaacaggagatgatgctgagagatgaggagactatggaactcaggggcacctacacttccctacagcaggaagtggaggtaaaaactaaaaagctgaaaaaactgtatgccaaactgcaggccgtcaaggctgaaatccaggaccagcatgatgaatatatcagggtccgccaggacctggaagaagcccagaacgagcaaacaagggagctcaaattgaagtacctaattatcgagaattttatccctccagaggaaaagaataaaatcatgaaccgactgtttctggactgcgaggaagagcagtggaagttccagcctctcgttccagccggagttagtagcagccagatgaagaaacgccctacatccgctgtgggatacaagagaccaatctcacagtacgctcgcgtggcgatggctatgggatcgcatccacgctatcgcgcagagaatatcatgttcctggagctggacgtcagcccccctgcggtttttgagatggagttcagtcatgatcaggagcaagatcctcgagccctgcacatggaacgcctgatgcgtttggattcattcctagagcggccctctacctccaaagtgagaaagtcacgcagctggtgccaaagtccacagagaccgcctccctctacaacccacgcttcccttgctagtgcatccttgagaccagccacggttgccgaccatgagtag

SEQ ID NO: 192473 - DNA, 2382 bp, synthetic construct
  misc_feature 1..2382: note = Description of Artificial Sequence: Synthetic coding sequence
  source 1..2382: mol_type = other DNA
atggccagcaagaccaaggccagcgaggccctgaaggtggtggcccggtgtcgccccctgtctcggaaggaagaagcggcaggtcacgaacagattttaacaatggacgtgaaactgggacaggttaccctgcggaaccctcgcgcggcacctggtgagttacccaaaaccttcacttttgatgccgtgtacgatgctagtagcaagcaggcagatctctacgatgagacggtgaggcctttaattgacagtgtgctgcagggtttcaatgggacagtgtttgcttatggacagacaggaactggaaagacatatacaatgcagggaacctgggtcgagcccgagctgaggggtgttattcctaacgcttttgaacatatttttacacatatctcacggtcccagaaccagcagtatctggtgcgcgcatcttatctggaaatataccaggaagaaatcagggaccttctttcaaaagagcccggaaaaagacttgagttgaaggaaaaccctgagaccggcgtgtatattaaagacttaagttcctttgtgactaaaaatgtgaaggagatcgaacatgtcatgaaccttggtaatcagacgagagccgtgggttctacgcacatgaacgaagtcagttcaagatcacatgcgattttcataatcacagtggaatgcagcgaacgagggtcagatggccaggaccacatcagagtgggaaagctgaacctcgtggatctggcgggcagtgaacgccagaataaagccggtcccaacacggccggaggggccgccactcccagctctggcggcggcgggggcggcggaggaagtggaggcggagcaggaggagagagacccaaagaagcctctaagatcaacctgagcctttccgcattaggaaacgtgatcgccgcactggcggggaaccggagcacccatattccctatcgcgattctaagctcacccgtctcctccaggacagcctgggcggcaatgccaagactatcatggttgccactttaggcccagcctcacattcctatgacgaatccctttctaccctccgcttcgctaatagagctaaaaacattaagaacaagccacaagtcaatgaggatccaaaggacaccctactgagggagtttcaggaagagatcgctcgactgaaagctcaactggagaaacggggaatgctgggaaaaaggcctcggaggaagagcagcagacgcaagaaagctgtgagcgctcctccagggtatccagaagggcccgttatcgaagcctgggtggcggaggaagaagacgacaataacaacaatcaccggcccccacagccaatcttggagtccgccttagaaaagaacatggaaaactacctgcaagagcagaaggaacgcctggaagaggaaaaagcggccattcaagacgacaggtccctggtgagcgaagagaaacagaagcttctggaggaaaaggaaaagatgcttgaagacttacggagagaacagcaggccacggagctgcttgctgcgaagtacaaggccatggagtcaaaactcttgataggtggtcgcaacattatggatcacactaacgagcaacagaagatgcttgagcttaaaaggcaggagatcgccgagcagaagaggcgcgaacgagaaatgcagcaagagatgatgctacgggatgaggagacaatggagctcagggggacgtacacctccttacaacaggaggtcgaagtgaagaccaagaagttaaaaaaactctatgctaagctgcaggccgttaaagccgaaatccaagaccaacatgatgagtacatacgagtgcgccaggacctcgaggaagcccagaacgaacagacacgcgagctgaaattaaagtacctgatcattgaaaatttcattcctccggaagaaaagaataagattatgaaccggctgtttctggactgtgaagaggagcagtggaagtttcaacctctggtgcctgcaggtgtaagcagcagtcagatgaagaaaaggccaactagcgcggtaggatacaaaaggcctatcagccagtacgcgagagtggcaatggcaatgggctctcatccgcgctatcgggcagagaacattatgttcctcgaactcgatgtgtcccctccagccgtctttgagatggagtttagccatgatcaggaacaggatccacgggccctgcacatggagagattaatgaggcttgatagttttctggagcgtccatccacatcaaaagtgcgcaagagtagaagctggtgccagtcacctcaacggccacctcccagcaccacgcacgctagtcttgctagcgccagcctccgcccggctacagtagccgatcatgagtag

SEQ ID NO: 192474 - DNA, 1800 bp, synthetic construct
  misc_feature 1..1800: note = Description of Artificial Sequence: Synthetic coding sequence
  source 1..1800: mol_type = other DNA
atgaacctgggcaaccagacccgggccgtgggcagcacccacatgaacgaagtttcctctcggtcgcacgccatctttataataacagttgagtgttccgagcgtggctccgatgggcaggaccacattcgcgtggggaagctgaacttggtggatctggccgggtccgagaggcagaacaaagctgggccaaacactgctggtggtgccgctacccccagtagcggaggaggtggaggcggcggcggttccggtggcggcgcgggtggtgaaagacctaaggaggcttctaaaattaacttgagcctcagcgccctgggcaatgttatagccgcccttgccgggaacagatcaacccatattccctacagggactccaagttgactagactgctccaagatagccttggcgggaatgccaaaaccataatggtggctacacttgggccagctagccactcatatgatgaaagcttatctaccctgagattcgcgaatagagccaaaaacattaaaaacaagccccaagtcaatgaggatcctaaagatactctgcttcgtgagttccaggaggagatcgcacgcctcaaggcacagctcgaaaagagaggcatgttgggaaaacgccctcgccgcaaatcctcccggagaaagaaggcagtctccgctcctcccgggtatcctgaaggtccggtgatagaggcatgggtcgccgaggaggaggatgacaataataacaatcaccgcccaccccaacctatactcgaaagcgccctggagaagaatatggaaaactacctccaggaacagaaagagcggctggaggaggaaaaagcagccatccaggatgaccgttctctggttagtgaggaaaagcaaaagttattagaagaaaaagagaaaatgctggaggatctgagaagggaacagcaggcgaccgagttactggcggccaaatacaaagccatggagtcaaaactccttatcggaggaagaaacatcatggaccatacgaacgaacagcaaaagatgcttgaattgaaaagacaggagatcgccgaacagaagagaagggaaagggagatgcagcaagaaatgatgctgagggatgaggagactatggaacttaggggcacatacacaagtttgcaacaagaagttgaggtcaagacaaagaagctgaaaaaactatatgctaaacttcaggcggtgaaggctgaaatacaggaccagcatgacgaatacataagagtcagacaggatctcgaggaggcccagaacgaacagacgagagaactaaaattaaagtacctcatcatcgagaacttcattcccccggaggaaaagaataagatcatgaatcgactttttttggactgtgaggaagaacagtggaaatttcagccactggtccctgccggcgttagtagttcccagatgaagaagcgacctacatcagcagttggatataaaagacctatcagccagtacgcaagagtggcaatggctatggggtcccacccccgatatcgcgccgagaatataatgttcctggaattggacgtgtcccccccagcagtgttcgaaatggagttttcacacgaccaagaacaggatccccgtgccctgcatatggagagacttatgcggcttgattcctttcttgagcggccttcgacttctaaggtgcgcaaatctcggtcctggtgccaatctcctcaacgcccccctccatcgactactcatgcttcattggctagcgcatccctccgccctgccactgtggccgaccacgagtag

SEQ ID NO: 192475 - DNA, 3384 bp, synthetic construct
  misc_feature 1..3384: note = Description of Artificial Sequence: Synthetic coding sequence
  source 1..3384: mol_type = other DNA
atgaaggaggaggtgaagggcatccccgtgcgggtggccctgcggtgtcgccccctggtgcctaaagagatcagcgagggctgccagatgtgtctgagtttcgtaccgggcgaaccccaagttgttgtgggaactgacaaaagtttcacttacgacttcgtgttcgatcccagcacggaacaggaggaagtgtttaacactgctgtagcaccactgatcaaaggtgtctttaagggatacaatgcaaccgtactagcctatggacaaacaggctccgggaaaacttattcgatgggtggagcctataccgcagagcaggaaaacgagcccactgtcggagtgatcccccgggtcatccaactgctcttcaaagaaatcgacaagaaaagcgacttcgagtttacactcaaagtttcttatctggagatctataacgaagagattctcgacctgctctgcccgagcagagaaaaggcccaaattaacatccgggaggatccaaaagagggtatcaagattgtgggtttaacagaaaagaccgtgctggttgccctggataccgtgagttgcctcgagcaaggcaataactctcgaactgtggcctcgacagcaatgaactcacagtcctccagatctcacgccattttcacaatcagcctagagcagcgaaagaagtcagataagaattcatcatttaggtcaaaactccacctagtcgacctggccggatcagagaggcagaaaaaaaccaaggccgaaggtgatagactaaaagaaggcattaacataaatagaggactcctttgtctgggaaacgttatcagtgccctcggagatgataaaaaagggggatttgtgccctaccgggacagtaagctcaccaggctgctccaggacagcctagggggtaattcacatactctgatgatcgcatgcgtgtcacctgccgattctaaccttgaagagacattaaatactctcagatatgctgacagggcgagaaagataaagaacaagccaatcgtgaacattgaccctcagaccgctgaacttaatcacttgaaacagcaagtgcagcagctgcaagtactcctgcttcaagcacatggtggaactctgccaggatccattaccgtcgaaccatcagaaaatctgcaaagcttgatggaaaagaatcagtccttagtggaagaaaatgaaaaactgagccgcggactgtcagaggccgccggtcagacagctcagatgctggagcgcattattctgactgaacaggccaacgagaaaatgaacgccaaattggaagaactacgacaacatgctgcgtgtaaactggatctgcagaaacttgtggagacactggaggaccaggagttaaaagagaacgtggagatcatctgtaacttgcagcagttaatcacacagcttagcgacgaaacagttgcctgtatggctgccgccatagacacagctgtggagcaggaggcgcaggtggaaacatcaccggaaacaagtcgcagctctgatgctttcaccacacaacacgctttgaggcaggcacaaatgtcgaaggaacttgtggagctcaacaaggccctcgctctgaaagaggcactggcaagaaagatgacccaaaacgacagccagctgcagccgattcagtaccagtatcaggacaatatcaaggaactggagctcgaggtgatcaacctccaaaaggaaaaggaggaactcgtactggagctccagaccgctaaaaaagacgctaatcaggctaaactgagcgagaggaggaggaagcgtttgcaggaattagaggggcagatcgcagatcttaagaagaagttaaacgaacagtccaagctacttaaactgaaggaatctaccgagaggaccgtctccaagctgaaccaggaaattaggatgatgaagaatcaaagggtccagctgatgcgtcagatgaaggaagacgcagagaaatttcgccaatggaagcagaaaaaagataaggaggtcatccagcttaaagagagagaccggaaaaggcagtacgaattgctgaaactggaacggaatttccagaaacagtctaatgtcttacgcagaaaaaccgaggaggccgccgccgccaacaaacggctcaaagacgccttgcagaagcagagggaggtagccgacaaacgaaaggagacacagagccgagggatggaaggcactgctgcacgagtgaagaattggctgggcaatgaaattgaggtgatggtgtccaccgaggaggctaagcggcatcttaacgacctacttgaagaccgtaagatcctggctcaggacgtggctcaacttaaagagaagaaggagagcggggagaacccaccaccaaagctgagaaggcggacattcagtctcacagaggtgcgcggccaagtgtcagaatctgaagacagcatcactaagcaaatcgaatcgctcgaaactgagatggagtttcgatccgcccagatcgccgacctgcagcaaaagttactcgatgcagagtcagaggacaggcccaagcagcgatgggagaatatagccacgattctggaagccaagtgtgcgctgaagtatctgatcggggagttggtttctagcaagatacaggtctcaaagctcgagtccagtctgaaacagtcgaaaacaagttgtgccgatatgcaaaaaatgttgtttgaggaacggaaccattttgctgaaatagagactgagcttcaggcagaattggtaaggatggaacagcagcatcaggagaaggtcctgtatctgctgagccaactgcagcagagtcaaatggctgagaagcaactggaggagagcgtcagtgaaaaggagcagcagctcctgtccaccctgaaatgccaagacgaagagttggagaagatgcgtgaggtgtgtgagcaaaatcagcagttgctgagggagaacgaaatcatcaaacaaaaactcacgctgcttcaggtagcctctagacagaagcacctgccaaaggacacacttctgtccccagatagctcctttgagtatgtcccccccaaacccaaacccagtcgcgtgaaggagaaatttttggagcagagcatggacatagaagatctgaagtattgcagcgagcactcagtcaacgaacacgaagatggtgatggcgacgatgatgaaggagacgatgaagagtggaaacccacgaaactagtcaaagtgtctagaaagaacattcaaggggtcctgctcctaactcccgttatcagcgctctgtgggaagctgaggcaagaggcctgttggaggcgaggtcctcacgtcctgcctgggccacttggcgtgaccccgtgtctacaaaacccaaaaattag

SEQ ID NO: 192476 - DNA, 3699 bp, synthetic construct
  misc_feature 1..3699: note = Description of Artificial Sequence: Synthetic coding sequence
  source 1..3699: mol_type = other DNA
atgaaggaggaggtgaagggcatccccgtgcgggtggccctgcggtgccgtccgctggtgcccaaggagattagcgagggctgccagatgtgcctgtcattcgtaccaggggaaccccaggtagtggttggaaccgacaaatcttttacttacgatttcgttttcgacccctctacggagcaagaagaggtgtttaacaccgctgtcgcccccctgataaaaggagtgtttaagggctacaatgccacagtgctcgcgtacggacaaacaggctccggcaagacatacagtatgggcggagcatatacggccgaacaggagaacgaaccaacggtgggcgtgatcccgcgagtgattcagctgctgttcaaagagatcgacaagaaatcagattttgaattcacccttaaagtgtcgtatctagagatttacaacgaagaaatcctggatctgctctgcccatcacgagagaaggcgcagatcaacattagagaggacccgaaggagggaatcaaaatcgtcggcctcacagagaaaacagtactggtggctctggacactgtgtcctgtttggagcaggggaacaattctaggacagttgccagcaccgccatgaactctcaatcttctcgaagccacgccatatttacgattagcctggagcagcgcaagaagagtgacaaaaattccagttttaggtccaagctgcacctggtcgacttggctgggtcagagcgacagaaaaagaccaaggccgaaggggaccgacttaaggaagggatcaacattaacaggggcctcctgtgtctgggaaacgttatcagtgctctgggggatgacaaaaagggcggtttcgtgccgtaccgcgacagcaaactaactagattgctgcaagatagcctgggggggaacagtcacactctcatgatcgcctgcgtcagtccagccgatagcaacctggaggagaccctaaacacccttcgatacgcagacagagctcgtaaaatcaagaacaagcctattgtcaacatcgatcctcaaactgcagagctaaatcacctgaaacagcaagtgcaacagctgcaggtgcttctcctgcaggcgcacggcgggaccttgccggggagcattactgtcgaaccaagcgaaaacctgcagagcctcatggaaaaaaaccaaagtttagtcgaggaaaacgaaaagttgtctcgcggtctaagcgaggccgctgggcagaccgcccagatgcttgaacgaataatcctcacagaacaggcaaacgagaagatgaacgcaaaattggaggagctacggcaacacgctgcttgcaaacttgacctgcaaaagctggtggagactctcgaggaccaagaactgaaggagaacgttgagatcatttgcaacctgcaacagttgattacccagctatccgacgagaccgtggcctgtatggccgccgcaattgatactgcggtggagcaggaagcacaagtcgaaaccagccccgagacctctcgctccagcgatgcgttcaccacacagcacgccttgagacaggcgcagatgtccaaagaactggtggaattaaataaggcacttgcactgaaggaggcactggcacggaaaatgacccagaacgactcccaattgcaacccatccagtatcagtaccaggacaacatcaaggagcttgaactggaagtaattaatctgcagaaagagaaagaggagcttgtgctcgaactccagacagctaagaaagatgctaatcaggcgaaactctctgaaaggcgccgtaagaggctgcaggagctggaaggacagattgccgacctaaagaagaagctgaatgaacagtcaaagctgctcaagctgaaagaatcgaccgagcggaccgtgagcaaactgaaccaggagattcgcatgatgaagaatcagagagtgcagctcatgcggcagatgaaagaggacgctgagaagtttcgccagtggaagcagaaaaaggacaaggaggtgatccaacttaaagaacgggacagaaaacggcagtatgagctcttgaaactggaaaggaattttcagaaacagagtaacgttctgaggaggaagaccgaagaagccgccgccgctaataagcggttaaaggatgccctgcagaagcagcgcgaggtggcagacaaacgcaaagagacacagagcaggggcatggagggcacggccgccagagtgaagaattggctgggcaatgagattgaggttatggtgtccaccgaggaagctaaaaggcatctcaatgatctgctggaagaccggaaaatactagcccaggatgtcgcacagctgaaagaaaaaaaagagtcaggggaaaatccaccaccgaagcttcggagaaggaccttttcacttacagaggtgcggggccaggtgagcgagagtgaggattctattactaagcagattgagtccctggaaacagagatggaattcagaagcgcccagatcgctgatctgcagcaaaagctgctggatgccgaaagcgaggaccgcccaaaacagaggtgggaaaacattgcgacaatattagaagcaaaatgtgcacttaaatacttgattggagagctggtgtcgagcaaaattcaggttagcaaactggagtcttccctgaagcagtccaaaacctcctgcgcagatatgcaaaagatgctgtttgaggaaagaaaccacttcgctgagatcgagactgaactgcaggccgagttggtgagaatggaacagcaacaccaggaaaaggtactttatctcctgtctcagctccaacagagccagatggcagagaagcagctcgaagagtccgtcagcgagaaggaacagcagcttctcagcacgcttaaatgtcaggacgaggagctcgaaaaaatgcgggaagtgtgtgagcagaatcagcagctgctgagagaaaacgagattatcaaacagaaattaacactgttacaggtagcctcacgccaaaagcacttgcccaaagacacactgctttccccagattcttcatttgagtatgtgccacccaagccaaagccttctcgcgtcaaggagaagtttctggaacagtccatggacattgaggatctgaaatactgtagcgaacactcagtcaacgagcatgaggacggagatggcgacgatgatgagggcgacgatgaggaatggaagcccactaaactcgtcaaagtctcaaggaagaacatccaggggtgttcttgcaaaggatggtgtggtaacaagcagtgcggttgccgtaaacagaaatcagactgcggcgttgactgctgttgtgaccccacaaagtgtcgtaaccgccagcaggggaaggactcactgggcacagtggagagaacccaggactccgaaggctcctttaaacttgaggatccaacggaagtgaccccaggtctgagtttcttcaaccccgtatgcgccactccaaacagtaaaatcctcaaagagatgtgtgatgtggaacaagtcttgtctaagaaaacacccccggcgccatccccatttgaccttcccgagctgaagcatgtcgcaactgaataccaggagaataaagctcccgggaagaaaaagaagcgcgcgctggcttcaaacacctcattcttctcaggctgtagcccgatcgaggaggaagctcattag

SEQ ID NO: 192477 - DNA, 1605 bp, synthetic construct
  misc_feature 1..1605: note = Description of Artificial Sequence: Synthetic coding sequence
  source 1..1605: mol_type = other DNA
atgtgcagcgacgtgaagcgggaggccgccgccgccaacaagcggctgaaagacgcacttcagaaacaaagagaagtcgccgataagcgcaaagaaacgcaaagtagaggtatggaaggcaccgcagccagagtgaagaactggctgggcaatgaaatcgaagtgatggttagtacagaggaggcgaagcgccatctcaacgatctgctcgaagataggaagatcttggcccaagatgtcgcgcagttgaaggaaaagaaggaaagcggtgaaaaccctcccccaaagctgcgaagaaggaccttctcactcacggaggtgaggggccaggtgagtgagtccgaggactccatcaccaaacaaatcgagagtcttgaaaccgagatggagttccggagtgctcagatcgcagacctgcaacagaagctgttagacgctgagagcgaagataggcccaagcagagatgggaaaacattgctactatccttgaggcaaaatgtgccttgaaatatctcataggcgagttggtgtctagcaagatccaagttagcaagctagagagcagcctcaaacagtccaaaacttcgtgtgctgacatgcagaagatgctgttcgaggagcggaatcatttcgcagagatcgaaacggaactgcaggcagagctcgtaaggatggaacagcagcaccaggagaaggtattgtatctcctctcgcagttgcagcagtcgcagatggctgagaagcagcttgaagagtccgtgagtgaaaaagaacaacagctgctgagcaccctaaagtgccaggacgaggagcttgagaagatgcgagaagtgtgtgagcaaaaccagcagttgttgcgcgagaacgagattatcaaacaaaaactgacactgctgcaagtggcatccagacaaaaacacctgccaaaagataccctgttgtccccagacagtagcttcgagtatgtgcctccgaaacccaagcctagtcgggtgaaagagaaattcctagaacagtctatggacatcgaggacctcaagtactgtagcgaacacagcgtgaatgaacacgaagatggcgacggtgacgatgacgagggcgacgatgaagagtggaagcccacgaagctggtgaaggtcagcaggaagaatattcaagggtgtagctgcaagggctggtgcggtaataaacagtgcggatgccgcaaacagaaatctgactgcggcgtggattgttgttgcgatcctaccaagtgcagaaacaggcaacaaggcaaggacagtttaggaaccgtggaacggacccaggactccgagggatcttttaaactggaggatcccactgaggttactcccgggctgtctttctttaatccagtttgcgctacaccaaactcaaaaatcctgaaggaaatgtgcgatgttgaacaggttctcagcaagaaaacaccccccgcccctagccccttcgacctcccggagctgaaacacgttgccacagaataccaagaaaataaggccccagggaaaaagaagaagagggccctggcgtcaaacacttcgttcttctcaggctgtagccctattgaggaggaagctcactag

SEQ ID NO: 192478 - DNA, 3705 bp, synthetic construct
  misc_feature 1..3705: note = Description of Artificial Sequence: Synthetic coding sequence
  source 1..3705: mol_type = other DNA
atgaaggaggaggtgaagggcatccccgtgcgggtggccctgcggtgccggccactcgtgcccaaggagatcagtgagggctgtcagatgtgtctgtcttttgtgcctggcgaaactcaagtcgttgtcggaacggacaaatccttcacgtacgattttgtctttgacccctgcacggagcaggaggaagtatttaacaaagcagttgccccgctgatcaaaggaatattcaagggatacaacgctactgtgttagcatacggacagactggctcaggtaaaacttacagtatgggaggcgcgtatactgccgagcaggagaatgaaccgacagtcggtatcattccccgcgtcattcagctgttatttaaggagattgataagaagtcagattttgagtttaccctgaaagtgtcctacctcgaaatttacaatgaggaaatcctcgacctcttatgtccttcccgggagaaagcacaaattaatattagagaggaccccaaggaagggatcaagattgtgggcttgaccgagaaaaccgtgctggtggctctggacacggtttcttgcttggagcaaggcaataattcaagaaccgttgcgtcaacagccatgaactcccagtccagccgctcacacgcgatcttcacaatcagtattgaacagcggaaaaaatcagataaaaactgtagctttcgatccaagctgcaccttgtagacttggccgggagcgagcgccagaaaaagactaaagctgagggcgatcggctaaaagagggaattaacatcaaccgcggcctgctttgcctgggcaatgtgatatcagcactgggcgatgataaaaagggaagctttgtgccttatcgcgactcaaagcttactcgtttgctacaggattctctgggcggcaattcccacactctgatgatcgcttgtgtaagtccagcagatagcaacctggaagaaacactgagtacgctgcgctacgcagacagggcccgcaaaatcaaaaacaagcccatcgtaaacatcgaccctcatacagctgagctgaaccatttaaagcaacaggtgcagcaactgcaggttctcctgctccaagcacacgggggcacactgcctggctctatcaatgccgaaccttctgagaacctacaaagcttgatggaaaaaaaccagagtctcgtggaagaaaatgaaaaattgtcacggtgcctttccaaggccgccggacagactgctcagatgctagagagaattatcctgacggagcaagttaatgaaaagctaaatgccaagctggaggaactgcgtcaacacgtggcctgtaagctcgacctccagaagctggtggaaaccttggaagaccaagagctgaaggaaaatgtcgagataatctgtaacttacagcagttaattacccaactgtccgatgaaaccgtcgcctgtactgcagcagcgatcgacacggcggtagaggaagaagcccaggtagagacttctccggagaccagtcgaagtagtgatgcctttacaacacagcacgcccttcaccaagcgcaaatgagcaaagaagtggtggagctgaacaatgctttggcactgaaggaggcacttgttcgaaaaatgacacagaatgacaatcagctacagcctatccagtttcagtatcaggacaacatcaaaaaccttgagcttgaggttataaatctccagaaggagaaagaagagttagttagggagctgcaaacagctaaaaagaatgtgaatcaggctaagctgagcgagcaccggcacaagctcctacaggaactagaagggcagatcgcggacctgaagaaaaagctcaacgaacaatccaagctcttgaagctgaaggaaagtacagaacgcaccgtgtcaaaactgaatcaagagatctggatgatgaaaaaccagcgtgtgcagctaatgcggcagatgaaggaagatgcagagaaattcaggcaatggaaacagaaaaaggacaaggaagtgatccagctgaaggaaagagaccgcaaacgccagtatgagctgctcaaattagaaaggaacttccaaaagcaatccagtgtcctgaggcggaaaacggaggaggccgccgcagccaataagcggcttaaggatgccctgcagaagcaacgggaagttactgacaagcggaaggagactcagtctcatggcaaagaaggaattgccgctcgggtgcgaaattggctagggaatgagattgaagttatggtgagtacagaggaggcgaagagacacctgaacgacttgctggaagatcgaaagattctcgcccaggatgttgtgcagctgaaggagaaaaaggagtcccgggaaaacccacctcctaagctgcgcaagtgtactttttctctgtctgaggtccatggccaggtcctcgaaagcgaagattgcatcacgaaacagatcgaatctcttgagacagaaatggaacttcgcagtgcacagatagccgacctccagcagaaactgcttgacgctgagagcgaggatcggccaaaacagtgctgggagaatatcgctaccattctggaggcaaaatgcgcccttaaatatttaattggagaactagtctctagtaaaatccatgttactaagcttgaaaattcactgcgccaatcaaaggcttcatgtgcagatatgcaaaagatgctattcgaggagcagaatcatttcagcgagatcgaaacagagctgcaggctgaattggtccgaatggagcagcagcatcaggagaaagtactgtatctggttagtcaacttcaagagtcacagatggctgagaagcagctcgaaaaatctgcctctgagaaggagcagcaactcgtcagtactcttcagtgccaggatgaggagctggaaaagatgagagaagtatgcgaacagaatcagcagctgctgcaggaaaacgaaatcataaagcagaaactgatcctgttacaggtggcatccagacagaagcacctgcctaatgatacactgcttagccccgatagctccttcgagtacatccccccaaagccaaaacctagtagagtcaaagaaaagtttcttgagcagtcaatggatattgaagatctcaagtattgcagtgagcactcagttaatgaacatgaggatggcgacggggatggcgatagcgacgagggagacgatgaggaatggaagccaacaaaactggtgaaagtgagtcggaagaacattcagggttgtagctgtaagggatggtgcggcaacaagcagtgcgggtgccgcaaacagaaatctgattgcggcgttgattgcagctgcgaccccacaaaatgcaggaatcggcagcagggcaaggattcattgggcaccgtggaacagacacaggatagtgaaggatcattcaagctagaagaccctactgaagttaccccgggccttagcttcttcaatccagtttgtgccacacccaacagcaagatcctgaaggagatgtgcgacatggagcaggtcttatccaagaagacagctccagcaccctcaccattcgacctgccggaatccaagcatggggcaacagagtaccagcagaataaaccccctggcaagaagaaaaagcgggccctcgccagtaataccagtttctttagcggatgttctcctattgaagaagaagctcattag

SEQ ID NO: 192479 - DNA, 3099 bp, synthetic construct
  misc_feature 1..3099: note = Description of Artificial Sequence: Synthetic coding sequence
  source 1..3099: mol_type = other DNA
atggccgagaccaacaacgagtgcagcatcaaggtgctgtgccggtttcgccctctaaatcaggctgagattctacgcggcgataagttcattccaatatttcagggtgacgattccgtagtcatcggaggaaagccgtacgtttttgatcgcgtctttcctcccaataccactcaggagcaagtgtatcacgcctgtgcaatgcagatagtgaaagatgtccttgccggttacaatggtaccatctttgcctacggtcaaacctcaagcggcaaaacgcataccatggaggggaaattgcacgacccccaattgatgggaattatcccaagaatagcgcgcgacattttcaatcatatatacagcatggacgaaaacctcgagttccatattaaggtcagctattttgaaatatacctggataaaattcgggacctcttagatgtgaccaagaccaaccttagcgtgcatgaggacaaaaaccgggtccccttcgttaagggctgcacagagcgcttcgtctcgtctcctgaggaaatcctcgacgttattgatgagggaaagagtaatcgccacgtcgcggtcacaaacatgaacgaacacagctcgaggtctcacagcatcttcctcattaatattaagcaggaaaatatggagacagaacaaaaacttagcggaaagctgtatctggtggatctagctggttctgaaaaggtctctaagacaggcgcagagggagccgttttggatgaggcaaagaatattaacaagagtcttagtgccctgggaaatgtcatctctgcactggcagaaggtacgaagtcctacgttccatatagagattctaagatgactaggattctccaagattccctcggtggtaactgtaggactacaatgttcatttgttgtagccctagctcctacaatgacgccgagactaagagtactttgatgttcggccagagggccaagactattaagaatacagcttccgtgaatctcgaactaactgcagaacagtggaaaaaaaagtacgagaaagagaaggaaaagacaaaggcacaaaaggagaccatcgccaagctggaagccgagcttagcagatggagaaacggcgaaaacgttcctgagactgagcgacttgctggcgaagaagccgcactaggcgcagagctgtgtgaagaaacacccgtgaacgacaactccagcatcgttgttagaatcgccccggaagagaggcagaagtatgaggaagaaattcgcagactgtacaaacagctggacgataaagacgacgaaattaaccagcagagccagctcattgagaagcttaagcagcaaatgctcgaccaagaggagttactggtgagcacacggggcgacaacgaaaaagtccagcgggagttgagtcatctccagtccgagaatgatgcagccaaggacgaggtgaaggaagtgctgcaggccctggaggagttggcagtgaactacgaccagaagtcacaggaggtggaggagaagtctcagcagaaccaattgctggttgacgaactgtctcagaaggttgctacaatgcttagcctagaatctgagctgcaaaggctccaggaggtgagcggccaccagcggaagaggatcgctgaagttctgaacgggctgatgaaggatctcagtgagtttagtgtaatagtcggcaatggggagatcaaactaccagtggagatatccggcgccattgaggaagagtttaccgtagcaaggctctatataagcaagataaaatccgaagtgaagagcgttgtcaaacgctgccggcagcttgaaaatttgcaggtcgaatgtcacaggaaaatggaggtgaccgggcgggaactttccagctgccaactcctcatctcccagcacgaggcaaagatccgatcgctgactgagtacatgcagagcgtggagctcaaaaaaaggcacctcgaggaaagctacgattccctctctgatgagcttgcaaagctccaggctcaggagaccgtccatgaagttgcgctcaaggacaaggagcctgacactcaggacgctgacgaggtgaagaaggccctggaattgcagatggaaagtcatcgggaagcacatcataggcagctggccaggcttagggacgagattaatgaaaagcagaaaactatagatgaattgaaggatctgaatcagaaattgcagttggagcttgaaaaactgcaagccgattatgagaaactcaagtcggaggagcatgaaaaaagtacaaaacttcaggagctcacatttctgtatgaacgacatgaacagagcaagcaggatctgaaaggcctggaggagactgtcgcccgtgaattacagacattgcataacttgcgaaaactgttcgtgcaggatgtcacaactagagtgaagaagagcgcggagatggaaccagaagactccggggggatacacagccagaagcagaaaatcagctttctggaaaacaacttggaacagcttactaaagtgcacaaacagctggtccgcgataacgccgacctgcgttgcgagttgccgaagttagaaaagcgactgcgtgcaaccgcagagagagtgaaggctctggaaggggcacttaaggaggccaaagagggggccatgaaagacaaaagacggtatcagcaggaagtcgacagaatcaaagaggccgtgcggtataagtcttctggcaagcgtggccactccgctcagattgcgaaaccagttaggccaggccattatccagcttccagtcccacgaatccatatggaactaggagccctgaatgcattagctacactaatagcctattccagaactaccaaaacctgtacctccaggccactccgagctcaacctctgatatgtactttgctaattcttgcactagcagcggagccacaagtagcggagggccgttagcttcctaccagaaagcaaacatggataatggtaacgccacagatatcaatgacaaccgcagcgacctgccttgtggatacgaagcagaagaccaggctaaactgtttccattgcatcaggaaaccgctgcctcgtag

SEQ ID NO: 192480 - DNA, 381 bp, synthetic construct
  misc_feature 1..381: note = Description of Artificial Sequence: Synthetic coding sequence
  source 1..381: mol_type = other DNA
aagagcagcggcaagcggggccacagcgcccagatcgccaagcccgtgagacctggacactaccccgcttcctcccctaccaatccttacggcacacgatcaccggagtgcatcagctacaccaatagcctgttccaaaactaccaaaatctctatctgcaagcgacccctagcagcactagcgatatgtattttgccaatagctgtactagctccggggccacctcgtctgggggccctctggcctcataccagaaggcaaacatggataatggaaatgcaacagacattaacgacaataggagtgatctgccgtgcggctacgaggcggaggatcaggccaaactctttccgctacatcaagaaaccgccgcgtcttag

SEQ ID NO: 192481 - DNA, 2892 bp, synthetic construct
  misc_feature 1..2892: note = Description of Artificial Sequence: Synthetic coding sequence
  source 1..2892: mol_type = other DNA
atggccgacctggccgagtgcaacatcaaggtgatgtgccggttccggccgctgaacgagtccgaagtgaatcgaggagataaatatatcgccaaattccagggagaagatacggtcgtgatcgcttctaagccctatgctttcgacagagtgtttcagagctccacttcacaggaacaagtgtataacgattgcgccaaaaaaatcgttaaggatgtattggaaggttataatgggaccattttcgcttatggccagacgagctctgggaagactcatactatggaaggcaagctgcacgatcctgaaggcatgggaatcatacctagaatcgtacaggacatttttaactacatttatagcatggacgagaatctggaattccatattaaagtgtcctatttcgaaatttatctggacaagattagggacctgctggacgtctcaaagaccaacctgtccgtgcacgaggataagaatcgagttccctacgtcaaaggttgtacggagaggttcgtttgttcacccgacgaagtgatggatactatagacgaagggaaatccaaccggcatgtggcagtaaccaatatgaacgagcactctagccgctcccactcaatttttttaatcaacgtcaagcaggagaacacccagaccgagcagaagctgagtggcaaactctacctagtggatctcgctgggtctgagaaagtcagcaaaactggcgccgaaggcgccgtattggacgaggccaaaaacattaataaatcactctccgcattagggaatgtgattagcgcactggctgaggggagcacctacgttccatatcgggattccaagatgacgagaatacttcaggatagcctagggggcaactgcaggacaacaatcgtcatctgttgctccccgtcctcttataacgagtcagaaacgaaatctaccctgctgttcggtcagagagcaaaaacaataaaaaacacagtttgtgtcaatgtcgaactgacggccgagcagtggaaaaaaaagtacgaaaaggagaaggagaagaacaagatcttacgcaacacaattcaatggctcgaaaatgaacttaaccgatggcggaacggggagactgttcccattgatgaacaatttgataaggaaaaagccaacctggaagcctttaccgtggataaggatataactctcacgaacgataagcctgcaactgcgataggcgttattgggaatttcaccgacgcggagagacgtaagtgcgaggaggagatcgctaaactgtataagcagctcgatgataaggatgaagagattaaccagcaatctcagctggtcgagaagctgaagacacagatgttggatcaggaggaactgcttgcgtccacccgccgcgatcaggacaatatgcaggccgagctgaaccgcctgcaggcagagaatgacgccagcaaggaagaagtcaaagaggtgttacaggcgctcgaggaactagcagtgaactacgatcaaaaatcccaagaggtagaggataaaacgaaagaatatgagctcctgtccgacgagttaaatcagaaaagcgcaaccttggcatccatcgatgcagaacttcaaaagctgaaggagatgactaaccatcagaagaagcgggctgccgaaatgatggcctctttgctcaaagacctggctgaaatcggaatcgctgttggtaacaatgacgtgaaacagcccgaaggcaccggcatgatcgacgaggaatttacagtcgctaggctgtacatatccaagatgaaaagtgaggtgaaaaccatggtgaagaggtgtaagcagctggagtcgacccagacagaatccaataaaaagatggaggagaacgagaaggaactggccgcatgtcagctgaggatttcccaacatgaggccaagatcaaatcattaaccgaataccttcaaaatgtggagcagaagaagagacagctggaggaaagcgtagacgccttgtcagaagagctcgtacagctccgagcgcaggagaaggttcatgaaatggagaaagagcacctcaacaaggtccagactgccaacgaggtgaaacaggccgttgagcagcaaattcagagtcatagggagacacatcagaagcaaatctcctcgctgagggacgaagtggaggccaaggcaaagctgataactgacctgcaggatcaaaaccagaagatgatgctggaacaggagagactgcgggtggaacatgaaaaactcaaggccacagaccaggagaaatccagaaaactccacgaactcaccgtgatgcaggacagacgtgaacaggcccgccaagacttaaagggcctggaggagaccgtggccaaggagctgcagaccctgcacaacctgaggaaactgttcgtccaagatctcgccacacgggtgaagaagtccgcagagattgactctgacgatactggcggctcggccgcccagaaacagaaaatttccttcttggaaaacaacctggaacagctgaccaaagtccataaacagctggtgagggataacgccgatcttcggtgtgaattacctaagttagaaaaacgccttcgtgccactgccgagagggtcaaggcactcgagtcagccctgaaggaggccaaggagaatgctagccgagacaggaaacgctaccagcaggaggtcgatcgtataaaagaagcggtgcggagcaaaaacatggcccgcagaggccattcggcacagattgcaaagccaatacgcccaggacagcaccccgcagccagccccactcacccgtccgccatccgcgggggaggggcttttgtccaaaattcccagccagtggccgtacgaggcggaggtggaaagcaggtatag

SEQ ID NO: 192482 - DNA, 2583 bp, synthetic construct
  misc_feature 1..2583: note = Description of Artificial Sequence: Synthetic coding sequence
  source 1..2583: mol_type = other DNA
ggcaagctgcacgacccccagctgatgggcatcatcccccggatcgcgcatgatatattcgatcacatttactcgatggacgagaatttagaatttcatattaaggtgtcctacttcgaaatttacttggacaagatacgagaccttcttgatgtgtccaaaaccaatctcgcagttcatgaagacaagaatcgcgttccttacgttaagggatgtacagagagatttgttagctcacccgaggaggtgatggacgtgattgacgaagggaaagcaaacaggcacgtggcggtcacaaatatgaacgagcacagcagcagatctcattcaatcttcttgatcaatataaaacaagaaaacgttgaaaccgagaaaaagcttagcggcaagctctacctggtagatctagccggctcggagaaagtaagtaagacaggtgccgagggagccgtgctggatgaagctaagaatatcaacaaaagtctgagtgctctcgggaacgtgatctccgccctagcagaaggcacaaagactcacgtcccttatcgcgatagtaaaatgaccagaatcctacaggactccctcggaggaaactgtcgcaccacgatcgtgatctgctgctctcctagcgttttcaatgaagccgaaacgaagtccactcttatgtttggtcagcgggcaaagactatcaagaatactgtgagcgtgaatctagagctgactgccgaggagtggaagaagaagtatgaaaaggaaaaggagaagaacaaaaccttgaaaaatgtgattcaacacctggagatggagctcaaccggtggcgcaatggagaggcagtccctgaggacgaacagatttctgctaaagatcagaagaatcttgaaccctgtgacaacactcctattatcgacaacattgccccagtggtggccggaatcagcacagaggaaaaagaaaagtatgatgaagagatctcttctctgtacagacagctagacgacaaggacgacgaaattaaccaacagtcgcagcttgcggagaagttaaagcaacagatgctggatcaggatgagctcctggcttcaaccagacgcgattacgaaaagatccaggaagagctgacaaggttgcagatagagaatgaggcagctaaagatgaagttaaagaggtgctgcaagcgctggaggaattagcagtcaactatgaccagaagtctcaggaggtggaggacaagacaagggcgaatgaacaactgaccgacgagctggcacagaagacgaccacgctgacaaccacccaacgcgagcttagtcagcttcaggaactcagcaaccatcagaagaaaagagctaccgaaattcttaacctcctgctgaaagatctgggagagatcggtggcatcatagggaccaacgacgtgaaaactttggcagacgttaacggcgttatagaggaagaattcacaatggccaggctgtacatatctaagatgaaaagcgaagttaagtctttggtcaataggagcaaacagctggagtccgcccagatggactcgaatcgaaagatgaacgccagtgaacgtgagttagcagcgtgtcaactcctaattagccagcacgaagcaaagattaagtccctgactgactacatgcagaatatggagcagaagcggaggcagctggaggagtcccaggattctctgagtgaggaactggccaagcttcgtgcccaggaaaaaatgcatgaggtttccttccaggataaagagaaggagcatctgactaggctgcaggatgccgaggagatgaaaaaggccctggagcaacagatggaaagccacagagaagctcatcagaagcaattgtctagactgagagatgaaattgaagagaaacagaagatcatcgatgagattcgagacttgaaccagaagctacaactggaacaggagaagttatctagtgactacaacaaactaaaaatagaggatcaggagcgcgagatgaagctggagaaattgctgttacttaatgacaagagagagcaggccagggaggatctgaaaggactggaggagacggtctccagagaactccagactctgcacaacctgcgtaaactatttgtccaagacttgacaacgagggtgaagaaaagtgtggagcttgataatgatgacgggggcggaagtgcagcgcaaaagcaaaagatttcctttctagaaaataacctcgaacagctgaccaaagtccacaagcagctggtgcgggacaatgccgatctgaggtgtgagctgcctaagttggagaagcgactccgggccactgctgaacgggtgaaagccctagagagtgctctgaaggaggccaaggaaaacgcaatgagagatcgaaaaagatatcagcaggaggttgaccggattaaagaggccgtgcgcgccaagaatatggcaaggagagctcactcagcccagatcgcaaagccaatcaggccaggacattatccagcctctagtcccaccgccgtgcacgctattcggggtgggggaggatcgtcctccaatagcacacattatcagaaatag

SEQ ID NO: 192483 - DNA, 2178 bp, synthetic construct
  misc_feature 1..2178: note = Description of Artificial Sequence: Synthetic coding sequence
  source 1..2178: mol_type = other DNA
atggccacctacatccacgtgagcaagaccggcgccgagggcgccgtcctcgacgaggccaagaatatcaacaaaagcctttcggccctcggcaatgtgatctcagcattagctgagggcacaaagacgcacgtcccctaccgagacagcaaaatgacacggatcttgcaagattctttgggcggtaattgtcggaccactatagtgatttgttgctccccttctgtgttcaatgaggcggagactaaaagcacgctgatgtttgggcagcgagccaagacaatcaaaaacaccgtgtccgtgaatctggagctgacagctgaggaatggaagaagaagtatgaaaaggagaaggagaaaaataagacgttgaagaacgtgatccagcacctggagatggagttaaatagatggaggaacggggaggctgtcccagaggacgaacagatctccgctaaggaccagaaaaacctcgagccatgcgacaataccccaatcattgacaatatcgcccctgtagtagccgggattagcacagaggagaaggaaaagtacgatgaggaaatcagcagcctttaccggcagctcgacgacaaagatgatgagattaatcagcagtctcagctcgccgagaagctgaagcaacagatgcttgaccaggatgaactgctggctagcactaggcgcgactatgagaaaatccaggaagagctgacccggctgcaaattgagaatgaagccgctaaagatgaggtgaaagaagtcctccaggcgctggaggagctggcagtgaactatgatcagaaatcgcaggaggtggaagataagactagggcaaacgaacagctgacagacgagttggctcagaaaactactaccctaaccactacacaaagggaactctctcagcttcaggagctctcaaatcatcagaagaagagggctactgaaatactaaacctattgctaaaagatctgggggaaatcggcggcataattgggaccaatgacgtcaaaaccctcgctgatgtcaacggggtaatcgaggaagaatttacgatggcccggctgtacatctcgaaaatgaaaagtgaggtaaagtcactcgtgaatagatccaagcagctcgagtcagcccagatggactcaaaccggaaaatgaacgcctccgagagagaactcgcggcctgtcaacttctgattagccagcatgaggccaaaatcaagtcattgacagattacatgcaaaatatggagcagaaacggcgacagctggaggagagtcaagattccctgagcgaggagctcgcaaaacttagagcccaagaaaagatgcatgaggtgtcattccaagataaagagaaagagcatctcaccaggctacaagatgctgaagaaatgaaaaaagccctggagcagcagatggagagtcatcgggaggcacatcaaaagcagttaagccggttaagggatgagatcgaggagaaacagaagatcatcgacgagatccgcgacctcaaccaaaagcttcagctggagcaggagaagttgtcttctgattacaacaaacttaaaatcgaggaccaggagcgagaaatgaaactggagaaactcctcttgttgaacgataagagggaacaagcgagagaggacctgaaaggactggaagagacagtgtccagagagctccaaactctccataatctgcgtaaactgtttgtgcaggacttgaccactcgcgtcaaaaagtcggtggaacttgacaacgacgacgggggaggatctgcagcgcagaagcagaagatttcattccttgagaataacctggaacagcttaccaaagtgcacaagcagctggtgcgggataacgccgatcttcggtgtgaactaccaaaactggaaaaacggctccgcgctactgctgaacgcgtcaaagcattggaatctgcactgaaggaagccaaggagaacgccatgagagaccgcaaacgctaccaacaagaggttgatcggattaaagaggcggtgagggctaagaatatggccaggcgagcccacagcgcccaaatcgcaaagcccattaggccagggcactacccggcatcctcccctaccgccgttcacgcaatcaggggaggcgggggatccagctctaattccacccactaccaaaagtag

SEQ ID NO: 192484 - DNA, 2589 bp, synthetic construct
  misc_feature 1..2589: note = Description of Artificial Sequence: Synthetic coding sequence
  source 1..2589: mol_type = other DNA
atgtggggcaagctgcacgacccccagctgatgggcatcatccccagaatcgcacacgacatatttgaccacatttattctatggatgagaatttggagtttcacattaaggtttcttacttcgaaatataccttgataagataagggatctgctcgatgtcagcaagactaacttggcagtccacgaggacaaaaatagagtcccttacgtcaagggctgtactgagcggtttgtgagcagtccagaagaggttatggatgttatagatgaaggaaaagctaaccgacacgtcgccgttacaaacatgaatgaacactcctctcgtagccacagcattttcctcattaatatcaagcaggagaacgtggaaaccgaaaagaaactcagcggaaaactatatcttgtggatttggctggaagtgaaaaagtctcaaagacaggggccgaaggcgctgtcctggacgaagcgaagaatatcaacaagagcctgtcggctctcggcaatgtaattagcgctttggccgaggggacaaagactcacgtcccttacagagattcaaaaatgactcgcattcttcaagactcccttgggggcaattgccggacgacaatcgtcatctgctgtagtccaagcgtgtttaatgaagctgagacaaaatcaacactcatgtttggtcagcgggccaaaaccatcaaaaatacagtgtctgttaacctcgagttgacagctgaagaatggaaaaagaaatacgaaaaggagaaggagaagaacaaaacattgaagaacgttattcagcacctggaaatggaactgaaccggtggcgtaatggtgaggccgttcccgaggacgaacaaatttcagctaaggaccagaagaacctggagccatgcgacaacactccaattattgacaacatcgccccagtcgtggcgggcatcagtaccgaagaaaaggaaaagtatgatgaggaaattagctcgttgtacaggcaactggatgataaggacgacgaaatcaaccaacaatcgcagctcgccgaaaagctcaagcagcaaatgcttgatcaagatgaactcctggccagtacaaggagggattatgagaagatccaggaagagttgactagactccagatcgagaacgaggcagcaaaggacgaggttaaagaggttctgcaggccctggaagagttagccgttaactacgaccagaagagccaggaagtggaggacaagacccgggcaaacgaacaacttacagatgagctcgcccagaagacgaccacactgacaaccacacagagggaactcagccaactccaagaactctccaaccaccagaaaaaacgtgccactgagatcttaaacctccttctgaaagacctcggagaaatcggggggattattgggaccaatgacgtgaaaacgctcgccgatgtcaatggtgtgattgaagaggaattcacaatggcccgcctctatatcagcaagatgaagtctgaggttaagtccctggtcaatcgcagtaaacagttggaaagcgcgcagatggactcaaatcggaagatgaatgccagtgaaagggaactcgctgcatgtcagctgctgatctcccagcacgaagcaaagattaagagtctgacggattacatgcaaaacatggagcagaagagaagacaacttgaggagagtcaagactcactgagcgaggagctcgcaaagttgagagcccaagaaaaaatgcatgaggtatctttccaagacaaagagaaagaacacctgactcgtctgcaggatgcagaagaaatgaaaaaggcgctggagcagcagatggaaagccaccgagaggctcaccaaaagcagctctccaggcttagggacgagattgaggagaagcagaaaatcatagacgagattagggatctcaatcagaagctgcagttagagcaggagaagctctctagtgactacaacaagctcaagatagaagatcaggagagagagatgaagctcgagaagctactccttctgaacgataaaagggagcaggcaagagaagatctgaaggggcttgaggaaaccgtgtccagggaactccagactctgcacaatctgagaaagctattcgttcaagacctgaccacccgcgtaaaaaaaagcgtcgagctggataatgacgacggcggaggcagtgctgcacagaagcagaagatctctttcttagaaaacaatctcgaacagctgactaaagtgcacaagcaactggtgagggacaatgcagacctgcgctgcgagctgcccaaattggagaagagactgagagccaccgctgagagagttaaagcacttgagtctgcactcaaggaggctaaagaaaacgccatgagggaccgcaagcggtaccaacaggaggtggatcggatcaaggaagccgtgcgggcaaaaaatatggcccgccgtgcacacagcgcacagatcgctaagccaatccgtcccggtcactaccctgcgagttctcccaccgcagtacacgctatcaggggcgggggggggagctccagcaatagcacccactaccaaaaatag

SEQ ID NO: 192485 - DNA, 2874 bp, synthetic construct
  misc_feature 1..2874: note = Description of Artificial Sequence: Synthetic coding sequence
  source 1..2874: mol_type = other DNA
atggccgaccccgccgagtgcagcatcaaggtgatgtgccggttcagaccactaaacgaggcagaaattcttaggggggacaagtttatcccgaagttcaagggagatgagacagtggtgattggtcaggggaaaccttatgtgtttgaccgggtgcttcctccgaataccacgcaggagcaggtgtacaacgcctgcgctaagcagattgtcaaagacgtacttgagggttataacgggaccattttcgcctacgggcagaccagctctggcaagactcacaccatggagggcaagttacacgacccgcagctgatgggcatcataccccgtatcgcccacgatatctttgaccatatttattctatggacgaaaacttggagttccacataaaggtatcctactttgagatatacctcgacaagatcagagatctgttggacgtcagcaagacaaacctggccgtgcacgaagacaaaaatagagtgccatacgtaaagggctgtaccgaaagatttgtaagttcacccgaagaggttatggacgtgattgatgagggtaaggcgaacagacacgtcgccgtgactaatatgaacgaacacagcagccgctcacactctatatttctgataaacattaaacaggaaaacgtagaaacagaaaaaaaactcagtggcaagctctacttggtggaccttgcgggctccgaaaaagtctcaaagaccggtgccgaaggggctgtcctcgacgaggcaaagaatatcaataagagccttagcgctcttggtaatgtgattagtgctttggcggaaggaactaaaacacatgttccctatcgcgattccaagatgacccgcatattgcaggatagcctcggggggaactgcagaacgacaatcgttatatgttgctcacctagtgtgtttaacgaggcagaaaccaaaagcacgctaatgttcgggcagcgcgctaagacaatcaaaaacaccgtctcagttaacctggaactcacagctgaagagtggaaaaagaagtacgagaaggagaaggagaagaacaagactctgaagaacgtgatccagcacctggagatggagctgaacagatggcgcaacggtgaggccgtacctgaagacgagcaaatttccgctaaagatcaaaagaacttggaaccatgtgataacacaccaatcattgacaacatagcaccagtcgtagcaggaatttccacagaagaaaaggaaaagtatgatgaggaaatttcctcactttacagacagttagatgataaagatgacgagattaatcaacagtcccagttggccgagaagctcaagcagcagatgttagaccaggacgagctgttagcttcaactcggagggactatgagaaaatccaggaggagctcacacgtttgcagatagagaacgaagccgccaaggacgaagtcaaagaggttctacaggccctggaagaactcgctgtgaattatgaccagaaaagccaagaagtggaagacaaaacccgagcaaatgaacagctcacagacgagttggctcagaaaaccaccaccttaaccactacccagagagaattaagccagctgcaggagctcagtaatcaccagaaaaaacgggccaccgagatactgaacctgctcctgaaagatttaggggagattggcggaatcatcggcactaacgacgtaaaaacacttgctgacgtaaatggagtaatcgaagaggaatttaccatggcccggctctacatctctaagatgaagtctgaagtgaaaagcctggtcaatagatccaagcaactcgagagcgcccaaatggattctaaccgcaagatgaacgccagcgagcgcgaactggcagcgtgccagctgctgatctcacaacatgaagcaaagatcaagagcctcaccgattacatgcaaaatatggaacagaaacgtagacaactcgaggagtcacaagacagtctatctgaagagctagccaagctccgggcccaagagaaaatgcacgaggtgagtttccaggataaggaaaaagagcatctaacaaggctccaggatgctgaggaaatgaaaaaggcactagaacagcagatggagtcacatagagaagcacatcaaaagcagcttagccggctgagggatgaaatagaggaaaagcaaaagattatcgatgaaatccgggacttaaaccaaaagcttcagttagagcaggaaaagctaagcagcgactataataagctgaagattgaggaccaggagagagagatgaaacttgagaagctgcttttgttgaacgacaaaagggagcaggcacgggaggatttgaaggggctggaagagaccgtgtctcgggaactgcagactttacacaatctacggaagctgtttgtgcaagatttaacaacaagagtcaaaaaatcagtcgagctggataacgacgatggaggcggctccgctgcccaaaagcagaagatctccttcctggagaacaatctagagcaactgaccaaagtacataagcagctagtacgcgataacgcagatctccgctgtgaacttcccaagttggaaaaaagactacgcgctacagcagagcgggtgaaagccctggagtctgccttgaaggaagctaaagagaacgctatgcgggaccggaaaagatatcaacaggaagtcgacagaatcaaagaagccgtccgcgcaaaaaacatggcccgccgcgcccactcggcacagatagcaaagccgatcaggcccggccactatccagcttcctccccaacggctgtacatgcaatccgcggcggcggtggctcaagttctaatagtacccattaccaaaaatag

SEQ ID NO: 192486 - DNA, 219 bp, synthetic construct
  misc_feature 1..219: note = Description of Artificial Sequence: Synthetic coding sequence
  source 1..219: mol_type = other DNA
atggccgaccccgccgagtgcagcatcaaggtgatgtgccggttcagacctttgaatgaggccgaaatcctacgcggcgacaaattcatccccaagttcaaaggcgatgagacagttgtgattggccagggcaagccctacgtctttgaccgcgtcttaccacccaacacaacccaggagcaggtgtataatgcctgcgccaaacagatagtcaaatag

SEQ ID NO: 192487 - DNA, 552 bp, synthetic construct
  misc_feature 1..552: note = Description of Artificial Sequence: Synthetic coding sequence
  source 1..552: mol_type = other DNA
atggagcagcggctggccgagttccgggccgcccggaagcgggccgggctggccgctcagccacccgctgcgtctcaaggagcacagactcccggagagaaagctgaagccgccgcaactctcaaagcggctcctgggtggctcaaacgattcctggtgtggaaaccacgtcccgcgtccgcccgggctcagccagggctggtacaggaggcagctcagccacagggttcgacaagcgaaaccccatggaacacagcaattcctctgccctcctgctgggaccagagttttttgacaaatatcacattcctcaaggtcctgctctggttggttctgttgggcctgtttgtggaactcgaattcggcctcgcctactttgtattatcgttattctactggatgtatgtgggtacacggggcccggaagaaaaaaaagaaggcgagaagtctgcatatagcgtgtttaatccagggtgcgaggctattcaggggaccctgactgcagaacagctcgaaagggaacttcagctcagacccctggcgggcaggtag

SEQ ID NO: 192488 - DNA, 2445 bp, synthetic construct
  misc_feature 1..2445: note = Description of Artificial Sequence: Synthetic coding sequence
  source 1..2445: mol_type = other DNA
atggtgaagcagaccatccagatcttcgcccgggtgaagccccccgtccgaaaacatcagcaggggatttactctatagacgaagacgaaaagttgataccatcacttgagattattctaccgagggacttagcggatggcttcgtgaacaacaagcgcgaatcctacaaatttaagtttcagcgtatctttgaccaagacgctaatcaggaaactgtctttgaaaacattgccaagccagtagctggatctgtgctcgctggctataatggcaccattttcgcttatggtcaaaccggcagtggcaagacttttacaattaccggcggtgccgagcggtattccgacagaggaattatccctaggactttatcgtatatcttcgaacagctgcagaaagactctagcaagatttacacgacacacatctcatatttggaaatttacaatgagtgtggctatgatttactcgatccccggcacgaggcttcaagcctggaagaccttccaaaggtgacgattcttgaggatcccgaccagaatattcatctaaagaatctaactctgcaccaggcaacaactgaggaagaagctctgaacttactgttcctcggggacaccaatagaatgatagcagagacaccaatgaatcaggcgtctacccgcagccattgtatcttcactattcatctgagctctaaggagcccgggagcgccacagtcaggcatgccaagttgcatctcgtggacctggcggggtctgagagggtcgctaaaaccggtgtggggggccacctgctcaccgaggccaaatacatcaacttgagtctgcactacttggagcaggtgataatcgctctctccgaaaagcaccggtcccacattccatacaggaatagcatgatgacttccgtgcttagggattctttgggaggcaactgcatgaccactatgattgctaccctcagcctggagaaacgcaacttagacgagtccattagcacatgtaggttcgcccagagggtggccttgattaaaaatgaggccgtgttgaacgaggagataaacccccggcttgtgattaaacgcctacaaaaggaaatccaagaactcaaggacgagttggccatggttacaggcgaacagagaactgaagctctcacagaagcagagctgttgcaacttgagaagttaattacttccttcctggaagatcaggattcagacagtagactagaggttggggcagacatgaggaaagtacatcattgcttccatcacttgaaaaaactcctgaatgacaagaaaattctagagaacaataccgtgagctctgagtctaaggaccaagactgtcaggagccgcttaaggaagaggagtatagaaaactgagggatatcctcaagcagagagataatgaaattaacatcttagtgaacatgctgaaaaaagaaaaaaagaaggctcaggaagcacttcaccttgccggtatggaccgacgcgaattccgccagtcccagagccccccattcagattgggaaatcctgaggagggtcagcgaatgcgactgtccagcgctccatcacaggcacaggacttttccatcttaggcaaacgtagtagcctcctccacaagaagatagggatgagggaggaaatgagcctgggttgtcaggaggctttcgagatttttaagcgggaccatgccgatagtgtcactattgacgataataagcagattttgaagcaaagattcagtgaagccaaggctttgggagagtctataaatgaggccaggtcaaagatcggccatctcaaagaggagataactcagaggcatatccagcaggtggccctggggatttctgaaaatatggctgtgcctctgatgccagatcagcaggaggagaagctgagatcacagctagaggaggaaaagcggcggtacaagaccatgtttacccggttgaaggctctgaaggtggagatcgagcatctccagctcttgatggataaggctaaggttaagctgcaaaaggaattcgaagtgtggtgggccgaggaagccaccaacttacaggtcaatagccctgctgtgaattccctggaccacactaaaccatttctgcagacctctgattcccagcatgaatggtctcagctccttagtaacaagtcctctggcggctgggaggtgcaagatcagggtaccggccggtttgacgtttgtgatgtgaacgcgcgcaaaatcctcccatctccctgcccatccccacactctcaaaagcagtcatctacctctacacctctagaagattctatccccaagcgcccggtttcatcgatccctctcacaggtgattctcagaccgattccgacattatcgctttcataaaagctcggcaatccatcctgcagaagcaatgtctgggatccaactag

SEQ ID NO: 192489 - DNA, 498 bp, synthetic construct
  misc_feature 1..498: note = Description of Artificial Sequence: Synthetic coding sequence
  source 1..498: mol_type = other DNA
atgatcgccgagacccccatgaaccaggccagcacccggagccactgtattttcaccattcatttaagctcaaaggaaccaggaagtgcaaccgtaaggcacgccaagttacacctagtggatctagccggctcagaaagagttgccaaaaccggagtgggagggcatctgctgaccgaagcaaagtatatcaacctgtccttacattacctcgagcaggtcattattgcactgtctgagaagcaccgttcacacatcccttaccgtaatagtatgatgacatccgttcttcgtgattccctcggcggtaactgtatgactactatgattgctacattatccctggagaagcggaatctggacgagtccatctccacctgcagattcgcacagagggtcgctctgattaagaacgaggcagtactcaacgaggaaataaacccgcgactgaaggccccctcctcttccgatggtgtacttttttgtcggaaccaatag

SEQ ID NO: 192490 - DNA, 1962 bp, synthetic construct
  misc_feature 1..1962: note = Description of Artificial Sequence: Synthetic coding sequence
  source 1..1962: mol_type = other DNA
atggccagcagcctgtacgacctgaagaaggtgaccatcctggaggaccctgatcaaaacattcatctgaagaatctgaccctgcaccaagccacaactgaagaagaggcgctcaatctcctgttcctgggggacaccaatagaatgatcgccgaaacacctatgaatcaggcatcgacccggtcccattgcatctttactatccatctgtcctcaaaggagcccggatccgccaccgttcggcatgccaagcttcatctagtggacttggctggaagcgagcgcgtggccaaaacgggagtgggagggcacctactgacggaagcaaagtatataaatcttagtctccactacctggaacaagttattatcgctctgtctgagaagcaccgcagccacatcccttaccggaacagcatgatgacgtcagtgctgcgcgactcgttaggtggaaactgtatgaccactatgattgcaaccctatcgctggaaaagcggaacctagatgagagcatatctacatgcaggttcgcacagagggtcgctcttattaaaaatgaggcagttctcaacgaggaaatcaatccccgcttagtgattaagcgtctccaaaaagagattcaggagttgaaggatgaactcgcaatggtgactggggagcagcgcaccgaagcactgacggaggcagaactattgcagctggagaagctgataacgagcttcctggaagaccaggattctgactccagactggaggtgggggctgatatgaggaaagtgcatcactgttttcaccatctgaagaagttactcaatgataagaaaatcttggaaaataataccgtatcatccgaatcaaaggaccaagattgccaggagccactgaaggaagaggagtatcgaaaactgagagatatactaaaacagagagacaatgaaatcaacattttagtgaacatgctgaagaaagagaaaaaaaaggctcaggaggccctccacttggccggcatggatagacgtgagtttcggcagagccagtccccgccctttcgactgggtaatccagaggagggacagcggatgcgcctgtccagcgccccgtcacaggcacaagacttttccattttggggaagcggagctcactgctccataagaagatcggtatgcgcgaagaaatgagcctggggtgccaggaagctttcgagatctttaaacgtgaccatgccgactccgtcaccattgacgacaacaagcaaatcctgaaacagcgctttagcgaggccaaagccctgggtgaaagcattaatgaggccagatccaagataggtcacttgaaagaggaaattactcagagacacattcagcaggtcgccctggggatctcagagaatatggcagttcccctgatgccagaccaacaggaagaaaagctcagaagccagctcgaagaagagaaaagaagatataaaacaatgtttactagacttaaggccctcaaagtggaaatcgaacaccttcagctgcttatggacaaagctaaagtaaaactgcagaaggagttcgaggtatggtgggctgaagaggctacaaacctgcaggtcaacagcccagcagtgaacagtctggaccataccaaaccattcttgcagactagtgactctcagcacgaatggtcccagttgctgtccaacaagagtagcggaggctgggaagttcaggatcagggtaccggccggttcgatgtgtgcgacgtgaacgcccggaaaatcctccccagcccgtgtccaagtccccatagccagaaacagtcttctactagcactcccctggaggatagcatcccaaagcggcccgtctcttccattcccttgacaggagacagccagaccgatagcgacattatcgcctttatcaaagctagacagagcatcctacagaagcagtgcttgggttcaaactag

SEQ ID NO: 192491 - DNA, 2394 bp, synthetic construct
  misc_feature 1..2394: note = Description of Artificial Sequence: Synthetic coding sequence
  source 1..2394: mol_type = other DNA
atggtgaagcagaccatccagatcttcgcccgggtgaagccccccgttcggaagcatcagcaaggaatctatagcatcgacgaggacgaaaagctgatcccatccctcgaaatcattttgcctcgcgacctcgccgatggattcgtaaacaataagcgcgagtcgtataaattcaagtttcaaagaatcttcgaccaagacgccaaccaggaaacagtcttcgaaaacattgctaagcccgtcgcagggagcgtactggccggttacaacggtaccatttttgcttatggccagacgggctccggaaagacttttacaattaccggcggggcggagaggtactcagaccgcggcattatcccgagaaccttgagctatatattcgagcagctccagaaagactcatcaaaaatatatacgacgcacatcagctacttagagatctataacgagtgtggttatgatctgctcgacccgcgtcacgaggctagttcccttgaagatctgcctaaagttacaattctggaagatcccgaccagaatatccaccttaaaaacttaaccctgcaccaggctacgacagaggaggaagctctgaatttgctcttcctgggcgacactaatcgcatgattgccgagactcccatgaatcaggcctcaactcggtctcactgcatctttactatccacctctcaagtaaggaacctggctcagcgacagtgaggcatgccaagctgcatttagttgatttagccggatccgaaagagtagccaagactggggtggggggccatctcctgactgaggctaagtatatcaacttaagtttgcattacctggaacaggtgattatcgccctgagcgagaagcacaggtctcatattccttaccgaaacagcatgatgactagtgtgcttcgagactcacttggtgggaactgcatgactacaatgatagccacgctttctctggaaaaaaggaatctggatgagtctattagcacttgtcgcttcgctcagagggttgctttaatcaagaacgaagccgtccttaacgaggagataaaccccagattggtaataaagcgcctgcagaaggaaatccaggagctcaaggatgaactggccatggtgactggcgagcaacgaacagaggcgctcaccgaagctgagctcctgcaactcgagaagctgataacctcctttctggaagatcaggattcagattctcggctagaggtaggagccgatatgaggaaagttcatcactgctttcatcatctgaagaagctgctgaacgacaagaaaattcttgagaataacacagttagctccgagagcaaggatcaagactgccaggaaccactgaaggaggaagagtaccggaagttgagagacatcttaaagcagagggacaacgaaatcaacatactggtgaatatgttgaaaaaagagaagaagaaggcacaggaagcattacatctcgctggaatggaccggagggagttcagacagtctcagtctcctccctttagactgggcaatcccgaggaaggacagcgcatgcgtctcagctctgccccctcccaggcacaggatttctctatactgggaaagaggtcgagccttctgcataagaagattgggatgagggaagaaatgtctctaggttgtcaggaggcctttgagatttttaagcgggaccatgcagattctgtcactatcgatgacaataagcaaattttgaaacagcgattttcagaagccaaagccttgggcgaatccattaatgaagcgagatccaagattggcattagcgaaaacatggccgtgcccttaatgcctgaccagcaagaggagaagctgcgttctcagcttgaggaagagaagagacgctataagacaatgttcacacgtctcaaggccctaaaggtggaaattgagcacctccagctgctgatggataaggcaaaggtgaaactccagaaagagttcgaagtgtggtgggcagaggaagccacgaatcttcaggtaaattctccggccgtaaattcgcttgaccacactaagccgttcctccagaccagtgattctcagcacgagtggagccagctgctgtctaacaaatcgtcgggagggtgggaggttcaggaccagggcactggtcggttcgatgtttgtgatgtgaacgcacgcaaaatcctgccctccccttgcccatccccgcacagccagaaacagtcgagcacttctacaccactggaagacagtatccctaagcgacctgtgagtagtatacccctgactggggacagtcagactgattctgatatcatagcttttatcaaagcaaggcagtcaattcttcagaaacagtgtctcggctcaaactag

SEQ ID NO: 192492 - DNA, 2394 bp, synthetic construct
  misc_feature 1..2394: note = Description of Artificial Sequence: Synthetic coding sequence
  source 1..2394: mol_type = other DNA
atggtgaagcagaccatccagatcttcgcccgggtgaagccccccgtaaggaaacatcaacagggcatttactccatagacgaggatgagaaactgatcccttcactcgaaatcatcttgccacgggatctggctgatggctttgttaataacaaaagggaatcctataagttcaaattccagcggatctttgatcaggacgctaatcaagaaaccgtattcgagaacatcgctaaacccgtcgctgggagcgtgctggctgggtataatggtacaatttttgcatatggacaaactggatcaggtaaaacttttaccatcactggtggtgcagagagatactcagatcgtggcatcatcccacgaaccctgtcctacatttttgagcagctccaaaaggattcatctaaaatctacacaacgcacataagctatctggaaatctataatgaatgcggctacgatcttctcgaccctcgccatgaagcctcctctttggaggacctgccaaaagtgactatcctggaggacccagaccagaacattcatctgaagaatctaacactacaccaagccacgacagaagaagaggcactcaatctgctattcctgggcgacactaacaggatgatcgcagaaacacctatgaaccaagcctcgactagatcacattgcatctttaccatccacctctcatcaaaagaaccagggtccgcaaccgtgaggcatgcaaagcttcacctggtcgacctggccggatcagaacgtgtcgcgaaaacaggagtgggcggtcatttgttaaccgaagctaagtacatcaacttaagcctccattatttagagcaggtcatcattgcccttagcgaaaagcaccggtcccacattccatatcggaacagtatgatgacatctgtactccgagacagtctcggtggcaactgcatgacaacaatgattgcaacgctttcattggaaaagcggaacttggatgagtctatctctacatgtcggtttgctcagcgggttgccctaatcaagaatgaggctgtgcttaatgaagaaatcaacccacgattagtcattaaaaggctgcagaaagaaatccaggaactgaaagacgagctcgcgatggtgacaggtgagcaacggaccgaggcgctcacagaggccgagttactccagctggagaaactgattacaagtttcctggaggaccaggactccgattctcgcctcgaagtgggcgcggacatgcgcaaagttcaccattgctttcaccatctgaaaaagctactgaacgataagaagatactcgagaataacactgtgagtagcgaaagcaaagatcaggactgccaggagccacttaaggaagaggagtataggaagctgagagatatccttaagcaacgcgataacgaaattaacatcctggtgaatatgttgaaaaaagagaagaaaaaggcccaggaggccctgcacctggccgggatggataggcgcgagttccggcagagtcaaagtccaccatttcgcttaggaaatcccgaggaaggccaaaggatgaggctgtcctccgccccatcccaggcacaggatttttccatactcggcaaaagaagctccctgctgcacaaaaagatcggaatgcgagaagagatgtccctcggttgtcaggaggcgttcgaaatctttaaaagagaccacgctgacagcgtgacaatagacgataacaaacagattctgaagcagcggttttccgaagcaaaggccctaggagagtccattaatgaggcccgctcaaaaattgggcatctgaaggaagagataacccagcgacacatacaacaggtggccctgggtataagtgagaacatggcggttcccctgatgccagatcagcaagaggagaagctgcgcagccagctggaggaggaaaaaagacgctataagaccatgtttactcgcctcaaggcccttaaggtggagattgagcaccttcagttactaatggacaaggctaaggtcaagctccagaaagaatttgaagtgtggtgggccgaggaggccactaaccttcaggttaattcacccgcagttaacagcctggaccacaccaaacccttcctgcaaacttccgactcccaacacgagtggtcccagctgctgtcaaataaatccgacgtgaatgctcgaaaaatcctgccaagcccctgtccttcaccacactcacaaaagcaatcatctacatctaccccacttgaggatagcatcccgaaaaggcccgtgagctcaatcccgttgacaggggacagtcagaccgatagcgacataatcgcattcataaaggctaggcagtctatactacagaagcagtgcctaggcagcaactag

SEQ ID NO: 192493 - DNA, 747 bp, synthetic construct
  misc_feature 1..747: note = Description of Artificial Sequence: Synthetic coding sequence
  source 1..747: mol_type = other DNA
atgcgggaggagatgagcctgggctgccaggaggccttcgagatcttcaagcgggaccatgcggattctgttaccatcgacgataacaagcagattctgaagcagaggttttcagaggctaaggctctaggagaatctatcaatgaggcgagatcgaaaatcggacacttaaaggaggagatcacacaaaggcacatacagcaggtggctttagggatttcagagaatatggcagttccattgatgcccgaccagcaggaggaaaagctgaggagtcagttggaggaagagaaacgtcgttataaaacaatgttcactcgattaaaagcactgaaagtggaaattgagcatctgcagcttctcatggacaaggccaaagttaagctgcaaaaggaatttgaggtttggtgggctgaagaagcaaccaaccttcaagtaaacagtcctgcggttaactcccttgatcataccaagccctttcttcagacatccgactcccagcacgaatggtcccagttactgagtaacaaaagcgacgttaacgcgcgcaaaatcctcccatctccttgcccatcaccacattcccagaaacagagctctacgtcaactcccctggaggatagcattccaaagcgccccgtgtcctccatcccactcacaggtgacagccagactgacagcgacatcatcgcgtttattaaagctcgtcagagtattctgcagaaacaatgtctcgggagcaattag

SEQ ID NO: 192494 - DNA, 486 bp, synthetic construct
  misc_feature 1..486: note = Description of Artificial Sequence: Synthetic coding sequence
  source 1..486: mol_type = other DNA
acccccatgaaccaggccagcacccggagccactgcatcttcaccatccatttatctagcaaggagcccggcagcgccacggtccgacacgccaagctgcaccttgttgatctagcgggctccgagagagtcgccaaaacgggggtgggaggacatctgcttaccgaggccaaatatataaatctcagtctccactacttagaacaggtgattatagccctgagcgaaaagcatcgaagccacattccgtacaggaatagcatgatgacctctgttctccgcgatagtctgggtggaaattgcatgaccaccatgattgcgacactttcactggagaagcggaatttagatgagtctatctcaacctgcagatttgcccagcgcgtggcactgatcaagaacgaagcagtcctaaacgaagaaattaacccacgcttaaaggcccccagctcctcagacggcgtcctgttttgccgaaatcaatag

SEQ ID NO: 192495 - DNA, 2070 bp, synthetic construct
  misc_feature 1..2070: note = Description of Artificial Sequence: Synthetic coding sequence
  source 1..2070: mol_type = other DNA
tgaggcgccgagcggtacagcgaccggggcatcatcccccggaccttaagttacatctttgaacagcttcagaaagactcctcaaagatttacaccacacatatctcctatctcgaaatatataacgaatgcggatatgatctgctggatcctcgccacgaggcttcttcgctggaggacctacccaaagtgactattctcgaggaccctgatcagaatatacatctaaaaaatttgacgctgcaccaagcaacaaccgaggaggaagcccttaacctgttgttcctgggcgacactaacagaatgatagctgagactcccatgaaccaggcctcaacaagatcacattgtatcttcaccattcatctgagcagtaaagaaccagggtcagctacagtccgacatgctaaattgcacctggtggacctagcaggctctgaacgggtagctaaaactggagtgggcggacatctgctcaccgaagcaaagtatattaacctgtcgctgcactacttggaacaagtgataatcgccttatcagaaaagcatcgcagccacataccctatcggaactctatgatgacctctgtcttacgagattcccttggggggaactgtatgacaactatgatcgctaccctctcactggaaaagagaaatctggacgaaagcatctccacttgtcggtttgcccagcgtgttgctctgatcaaaaacgaagctgttctcaatgaagagatcaatccacgactcgtgataaagcgcctgcagaaagagattcaagaactgaaggatgagttggccatggtcacgggcgagcagcgtactgaagcgttgacagaggctgaactgctccaattagagaagcttatcacgagtttccttgaggaccaggacagtgattcccgcctggaggtgggggccgacatgagaaaggtccaccactgctttcaccatttaaagaaactacttaacgataaaaagattctggagaataacaccgtcagctccgagagtaaggaccaggactgccaggaacccctgaaggaggaagagtacagaaagctccgggatattttaaagcagcgcgacaacgaaatcaatatactggtgaatatgctcaagaaggagaaaaagaaggcacaggaagcactgcatcttgccggtatggacaggcgcgagtttaggcagagtcagagtccaccgttccggctgggcaatccagaagaggggcagcggatgaggctcagtagcgccccaagccaggcccaggacttcagcattctgggcaaaagaagttctctacttcataagaagataggtatgagagaagagatgtcactcggctgccaagaagctttcgagatctttaagagagaccatgccgatagcgtgacaatcgatgataataagcagattctgaaacaaaggtttagcgaggccaaagccctgggggagagcattaatgaagcacgcagcaagattggacacctgaaggaagagatcacccagcgccatattcaacaggtggcactcgggatctccgaaaacatggccgtgcccctgatgccagaccagcaagaagaaaaactgcgatcgcagctggaagaagaaaagagaaggtacaaaaccatgttcacacgccttaaggcacttaaggtagagattgaacatttgcaattgctcatggataaagctaaagtaaaattgcagaaggaattcgaggtctggtgggctgaggaagctactaatctgcaggtgaatagtcctgccgtgaattccttggatcacaccaaaccatttttgcaaacatccgacagtcagcacgaatggtcgcagttactgtctaacaagtccgatgtcaatgcaagaaagattctgccgagtccatgcccaagcccccactcgcagaaacagtcaagcacatcaacacccctggaggattccatacctaaacgtcctgtgagttcaatccccctcacaggggattcccaaaccgacagcgacatcatagcctttattaaggcccgccagtccatcctccaaaagcagtgtctggggtcaaattag

SEQ ID NO: 192496 - DNA, 2277 bp, synthetic construct
  misc_feature 1..2277: note = Description of Artificial Sequence: Synthetic coding sequence
  source 1..2277: mol_type = other DNA
atggtgaagcagaccatccagatcttcgcccgggtgaagccccccgtcaggaagcaccaacagggaatttattcgatagacgaggacgaaaagttaatcccctcactggagattatcttaccccgagacctcgccgatggatttgtaaacaacaagcgggagagttacaagttcaagttccagcggatcttcgatcaagatgcaaatcaggaaaccgtgtttgaaaatatcgccaaacccgtggcggggtcggtgcttgcagggtacaatggcacaatcttcgcgtacggtcaaaccggcagcggcaagacattcacaataaccggcggggcagagaggtactccgatcgaggaataattccgagaaccctgtcttacattttcgaacagctacagaaagacagttctaagatctatactacccacattagctatctggagatctacaatgagtgcgggtatgatctgctggatcctaggcatgaggctagcagtctcgaggacttgcccaaggtaaccattctggaagatcccgatcagaatattcacttaaagaatctgacattgcatcaggctacgaccgaggaagaggccttaaaccttctctttctgggggatactaacaggatgattgccgaaaccccgatgaaccaggccagcactcgctcccattgcatctttaccattcatctgtcgtctaaagagccgggctcagccaccgtcagacacgccaagttacatctggttgatctagctggcagcgagagggtcgccaagacaggtgtcggaggccacctgctgacagaagctaaatatatcaatctgtccctccactacctggagcaggtcataattgcccttagtgaaaaacatcggtcacacatcccctatcgcaacagcatgatgacttcggtgctccgagattctttgggcggtaactgtatgacaacaatgatagccaccttatccctggagaaacgaaatctggacgagagcatctcaacttgcagattcgcacaaagggtcgccctgatcaagaatgaagcagttctcaatgaagaaattaatccacggctggtaatcaaacgtctacaaaaggaaattcaggagctaaaagacgagttggccatggtaaccggtgaacagcgcaccgaagctctcaccgaggccgaactgctgcagcttgagaagctaattacgagctttcttgaagatcaggactctgattcaagactggaggtgggtgctgatatgcgcaaggtgcaccactgctttcatcacctcaagaagctgcttaacgacaagaagatcctcgagaacaataccgtttcttcggaaagcaaagaccaggactgccaagagccactcaaggaagaggagtatcgaaagctcagagatatcctgaagcagagggataatgagatatcaattctctcggaagtgatgaagaagttgccactgagttggtttgagaggggaatgcgcgaggaaatgtctctcggctgtcaggaagccttcgagatcttcaaaagagaccacgcggactcagtgactattgacgataacaagcagattctgaaacagagattttctgaagccaaagccttaggcgagagtattaacgaagcaagatctaagatcgggcacttgaaagaagaaataacacaaaggcacatccagcaggtggcccttggcatctccgagaacatggcggttccattgatgccagaccagcaggaggagaagctccggtcgcagctggaggaggaaaaaagacgttacaagactatgtttacacggttaaaggcattgaaggttgagattgaacacctgcaactgcttatggacaaagctaaagtgaagctccaaaaggagttcgaggtctggtgggcagaagaggctaccaatctgcaggtgaactctcctgcagtgaactctttggaccataccaagccattcctgcagaccagcgacagccagcatgagtggtcacagcttttaagtaataaatcaagcggaggctgggaggtccaggatcaaggcacggggcggtttgatgtttgcgatgtgaatgcgcgcaaaatccttccctccccttgcccctctccccactctcaaaaacagagtagcacctccacacctctggaggatagtattcctaaacgacctgtgagttccattccgctcactggcgattctcagactgatagtgacatcattgcttttatcaaggcccggcaaagcattcttcagaaacagtgtctgggaagcaattag

SEQ ID NO: 192497 - DNA, 516 bp, synthetic construct
  misc_feature 1..516: note = Description of Artificial Sequence: Synthetic coding sequence
  source 1..516: mol_type = other DNA
atgcgggaggagatgagcctgggctgccaggaggccttcgagatcttcaagagggaccacgccgacagtgtgacaatcgatgataacaagcagatactgaaacagcgattctccgaggcgaaggcgcttggtgagtctatcaatgaggcaaggagtaaaattggtcatctgaaggaagagataacccaacggcatattcagcaggtagccctggggatttcagaaaatatggctgttccgctcatgcctgatcagcaggaggagaaactccggtctcaactcgaagaggagaagagacgctataaaactatgttcacaagactgaaagcgcttaaggtggaaatcgagcacctgcaactcttgatggacaaagccaaagtgaaacttcagaaggagtttgaggtgtggtgggccgaggaggccacaaacctccaggtgaattctccagcagtcaactcgttagatcacaccaagagcaagattaaggctttagccgactccatgtctggtctgtag

SEQ ID NO: 192498 - DNA, 882 bp, synthetic construct
  misc_feature 1..882: note = Description of Artificial Sequence: Synthetic coding sequence
  source 1..882: mol_type = other DNA
atgcgggaggagatgagcctgggctgccaggaggccttcgagatctttaagagggaccatgctgacagcgttaccatagatgataataagcagatcctcaaacaaagattctcagaggccaaggccctcggggaaagcatcaatgaagcacgcagcaagatcggccacctcaaggaagaaataacacagagacacattcagcaggtggccttgggcatctctgaaaatatggccgtccctctgatgcccgaccagcaagaagagaagctgcgctctcagctggaggaagaaaagcgtaggtataaaaccatgttcactaggttgaaagctcttaaagtggaaatcgagcaccttcagctgctgatggacaaggctaaggttaagctgcaaaaagagtttgaagtctggtgggcagaagaggctacaaacttacaagtgaactctccagcagttaactccttagaccacacaaaacccttcctccagacttcagatagccagcacgagtggtcgcagcttctgagtaataagtcaagtggaggctgggaggtgcaggatcagggtacgggtaggttcgacgtttgcgacgtgaatgcaaggaagatcttaccaagcccttgccctagccctcattcccagaagcagagttcaacgagcaccccgctggaagactcaatcccaaaaaggccggttagttctatccccctcactggggattctcaaaccgatagtgacattatcgcatttatcaaggccagacagtctatcttgcagaagcaatacctccagctcctttgctctttatttccgaagagcgctgtatcatcagcccaggcgtccactaacagaaagggcttatcggacgtactcgtgacacggtag

SEQ ID NO: 192499 - DNA, 4032 bp, synthetic construct
  misc_feature 1..4032: note = Description of Artificial Sequence: Synthetic coding sequence
  source 1..4032: mol_type = other DNA
atgggcctggaggcccagcggctgcccggcgccgaggaggcccccgttagggtggccctgagggtgcgtccgctcctcccaaaagagctcctccacgggcaccagagttgcctgcaggtggaaccagggctcgggagagtcacactaggacgtgacagacactttgggtttcacgtggtgctggcagaagatgctgggcaggaggctgtgtatcaggcctgcgttcagcccctgctagaggcattctttgagggtttcaatgccacagtttttgcttacggccagaccggaagcgggaagacgtataccatgggtgaagcctcagttgccagcttgttggaggacgagcagggtatagttcctagggccatggcggaggcttttaaactgatagacgagaatgatctgctcgattgcttggtgcatgtgagttaccttgaggtatataaggaggaatttcgtgacttattagaggtgggcaccgcaagccgggacatacaactccgggaggacgagcggggtaacgtggttctgtgcggcgtgaaagaagtcgacgttgaagggctggatgaagttttgagcctgctggagatggggaacgccgcacggcataccggcgcgactcatcttaaccacctgtcctcccgcagtcacaccgttttcacggtcacattagagcagcgggggcgcgctcctagccgtctccctcggccggcgccaggccagttgttagtctctaaattccatttcgtggatctcgctggttccgagcgagtgttgaaaaccggcagtaccggcgagcggctgaaagaatctatccagattaactcatctctgctagccctgggaaatgttatctccgcgctgggcgatcctcaacgcagaggctcacacatcccatacagggactccaagatcacccggattctcaaagacagtctgggtggcaatgccaagacggttatgattgcctgcgtgtccccatcctcatctgactttgacgagaccctcaatacattgaattacgcatctcgcgcccagaatatcaggaacagagcaactgtgaactggcgacccgaggccgagcggcccccagaggagacggcttcaggggcccgtggaccgccgcgccaccggagtgagaccaggataattcatcgagggcgaagagccccaggccccgccaccgcttccgctgctgctgcaatgcgcttgggcgcggagtgtgcccgctatagagcatgcactgatgcagcttactcactgttgcgagagctccaagcggaaccgggactgccaggcgccgcagccaggaaggtgcgggattggctctgcgctgtggagggggaaagatccgccctcagctcagcttccggacccgacagtggaatcgagtcagcctctgtggaagatcaggcagcccagggagccggcggccgcaaggaagacgagggcgcccaacagctgttaacccttcagaatcaggtggctaggcttgaggaagaaaatagagacttcctagcggcactggaagacgcaatggaacagtacaagttgcagtcagacagactgcgagagcagcaagaagagatggtagagctgagactcagattagagcttgtaaggcctggatggggtgggccgaggctgcttaatggattgcccccgggatctttcgtgccacgccctcataccgcccccctggggggcgctcacgcccacgtcctggggatggtgcctcctgcatgcttgcctggtgacgaggttggttctgagcaaagaggcgagcaagtgacgaacgggagggaagctggcgccgagcttctgacagaagttaaccgcctgggttcaggttcctccgctgcaagcgaggaagaagaagaggaagaggagcctccaagacggactttgcacttgcgacgaaacagaatcagcaactgttcgcaaagggcaggggctaggcccggctccctgcccgaacgcaagggtcctgagttatgtctggaggagctggacgctgctatccctggatcacgggccgttggaggctcgaaagcccgcgtgcaggccaggcaggtgcccccagctacagcctctgaatggaggttagcacaggcccagcagaagattcgagaactcgccataaacattcggatgaaagaagaattgataggggagctcgtgaggactgggaaagccgctcaggccttaaaccgccagcactcacagagaattcgcgagttggagcaggaagcagagcaggtgagggcagaacttagcgaaggacagaggcagttgcgcgagttagagggaaaggaactgcaggacgccggcgagcgctcacgtctccaggagttcagaagaagggtcgctgccgctcagagtcaggtacaagtcctcaaagagaagaagcaggccaccgaacgccttgtttctctttctgcacagtccgagaaaaggcttcaagagttggagaggaacgtccagctcatgcgccagcaacagggccagctgcagagacggttgcgcgaagagacggagcagaaaaggcgcttggaggctgagatgagcaaaagacagcaccgggttaaagaacttgaactgaagcatgaacagcaacaaaaaattctgaaaattaagactgaagaaatcgctgcctttcagcggaaacgtcggagtgggagcaatggaagcgtggttagtctagagcaacagcagaagattgaggaacaaaagaagtggttggaccaggaaatggaaaaagtcttacagcaaaggcgagcgctggaggaactcggggaagaactgcacaaacgcgaggcaatattggccaagaaagaggcgctgatgcaggagaagaccgggctggaaagcaagcggctccgctcttcacaggctctcaacgaagacattgttagagtgtcatcccgactggagcacttagaaaaggaactatccgaaaaatccggccagcttcggcaggggtccgctcagtcacagcagcaaatacgaggcgaaattgatagcctgagacaagagaaagattcactgctgaaacagcggcttgagatcgacggcaagcttaggcagggatcactgctgtctcctgaagaggaacgaacccttttccagcttgatgaggccattgaagcgctcgatgcagcaatcgagtataagaatgaggcgattacgtgccgccaacgggtactacgcgcatcagcaagcctactgagccaatgcgaaatgaacctcatggccaagctgagctacctgtcaagcagcgagactcgggccctcttatgcaagtattttgacaaggtggtcacgttgcgggaggagcagcaccagcagcagatagctttctctgaattggaaatgcagctcgaggagcaacagagacttgtttattggttagaagtggcactagagcgtcagagattagagatggaccggcagttgacccttcagcaaaaagaacacgaacaaaacatgcaactccttctccaacagagtagagaccatctgggagaaggcttagccgatagccgacgccaatacgaggctaggattcaggccttggaaaaagagcttggccgatacatgtggattaaccaagaactgaagcaaaaacttgggggagtaaatgcagtcggtcacagtaggggaggagaaaagaggagcttgtgtagcgagggacgccaagcccctggcaacgaggacgagttgcacctggcccccgaacttctgtggctcagccctttgacagaaggagcccctcgaactcgggaagagactcgagacctcgtacatgcgcccttaccgctgacttggaaaagatcgtctctttgcggtgaggagcaaggctccccagaagagttgcgacagcgcgaggcggcagagcccctcgtggggagggttctgcccgtcggagaagccggactgccctggaactttgggccacttagtaaaccgcgtagggaactgaggagagccagccccggcatgatagacgtgcgaaagaatccattgtag

SEQ ID NO: 192500 - DNA, 2022 bp, synthetic construct
  misc_feature 1..2022: note = Description of Artificial Sequence: Synthetic coding sequence
  source 1..2022: mol_type = other DNA
atggacccccagcggagccccctgctggaggtgaagggcaacatcgaactgaagcgccctctcatcaaagcccccagccagttgcccctaagtggtagccggttgaagcggagacctgaccagatggaagatggtcttgagcctgagaagaaacggactcggggccttggtgctactactaagatcacaacctctcaccctagagtgccttctctgacaaccgttcctcaaacacagggacaaaccacagcacaaaaggtcagcaagaaaaccgggccgaggtgctctaccgccatcgccacagggctcaagaatcagaaaccagtgcctgccgtccccgtacagaagtccggcaccagcggagtaccccctatggccgggggcaagaagccctcaaagaggcccgcttgggatctgaagggccagttgtgtgatcttaatgccgaacttaaacgttgcagagagcgaactcagactctggaccaggaaaaccaacagctacaggatcaactgcgggacgctcaacagcaggtcaaagccctcggaactgaaagaacaactcttgaggggcacctcgccaaggtccaggcacaagctgagcaggggcagcaagaactcaaaaaccttcgcgcctgcgtgctggagctggaggaaaggttgtctacacaggagggccttgtgcaggagttacaaaaaaaacaggttgagctacaggaggaaaggcggggacttatgtcccagctcgaggaaaaggagaggcgcctacaaacctctgaagctgccctctcctcatcccaagcagaggtcgcttctctgcgacaggagacagttgcacaagccgccctcctcacagagagggaggagagactgcacggactggaaatggagcgccgtcgcctccacaatcagctgcaggagctgaaaggcaacattagggtgttctgtagagtcagaccagtccttcccggagagcctacacccccaccgggactgctactgttccctagtgggcctggtggcccctcggacccacccacacgactgtccttgtccaggtccgatgagcgtagagggacactgtctggagctcccgcgccgcccacccgccatgacttttcttttgaccgcgtattcccacctggcagtggtcaggatgaggtgtttgaggagatcgctatgctggtccagagtgccctagacggataccctgtgtgcatctttgcctacggacaaaccggatctggaaaaacttttacgatggaaggcggcccgggcggcgaccctcagctggagggtcttattccccgggctctccggcacttgttttcagtagcacaggagctgagtggccaaggttggacctactccttcgtcgccagctatgtcgaaatttacaacgaaactgttcgggatctgctggccacaggaacccgaaaaggacagggcggggaatgtgagatcaggagagcaggtcccgggtcagaagagctcacggtgaccaatgcccgttacgtacctgtatcatgcgagaaggaagtggacgccctgctgcatctggctagacagaatcgagcagtggccagaacagcacagaatgaaagaagctcgcggagtcatagcgtcttccaactgcagataagcggtgagcattcatctcggggcctgcagtgcggagcacctctgtctttagtcgatctggccggcagcgaacgactggatccaggcctcgctctcggtcccggtgaaagagagaggctgcgcgagacacaggcaatcaattcgtccctgagtacactgggattggtgattatggccctgagcaacaaggagagccatgtaccctaccgcaactctaagctgacttatctcttgcagaacagtctgggaggttccgccaagatgcttatgttcgtcaatattagcccactcgaagaaaacgtgagcgaatccctgaactccctacgctttgcttctaaggttaaccagtgcgtgattggcactgctcaagctaatagaaaatag

SEQ ID NO: 192501 - DNA, 612 bp, synthetic construct
  misc_feature 1..612: note = Description of Artificial Sequence: Synthetic coding sequence
  source 1..612: mol_type = other DNA
atggacccccagcggagccccctgctggaggtgaagggcaacatcgagctgaagagacccctaattaaagccccttcgcagcttcccctgagcggcagtaggctaaagcgtaggcccgatcaaatggaagatggcctggaacctgaaaagaaaaggactagagggctcggtgcgactactaaaattacgacatcacacccaagggtgccttctctaaccactgtccctcaaactcagggccaaaccacagggccaagctctcatccgctgccctggcaatgtcatcaccagccctttctggtgactgaccctggggggcggtcatgggggccgggtcaaaagtggcacaggttacatctgtggtgcacttctgctcagaaggtgagcaagaagactggccctcgctgtagcaccgcaatagctaccgggttgaagaatcagaaaccagtgccagccgtccctgttcaaaagtccggaacttctggggtaccccctatggcagggggtaagaaaccctcaaaacgccctgcctgggatctcaaaggccagctttgtgatctgaacgccgagttgaagagatgccgggaacggacacaaaccttggaccagtag

SEQ ID NO: 192502 - DNA, 612 bp, synthetic construct
  misc_feature 1..612: note = Description of Artificial Sequence: Synthetic coding sequence
  source 1..612: mol_type = other DNA
atggacccccagcggagccccctgctggaggtgaagggcaacatcgaactgaaacggcccctcattaaggctcccagccagcttccgctgtccggctcccggctgaagcgtagacccgaccagatggaggacgggctggaaccggagaaaaaacgcacgagaggtttgggggccacaacgaaaatcacgaccagccaccctagggtaccttcccttactaccgtgcctcagacccaaggtcagacaactggccctagctctcatcctctgccctggcagtgccatcaccagccttttctagagaccgaccctggaggccgctcttggggacccgggcaaaagtggcatcgactgcacctgtggtgcactagcgctcagaaagttagcaaaaaaaccggtccaagatgctccaccgcaatcgccactgggttgaagaaccagaagcccgtgcccgcggtacccgtgcaaaagtcaggaacaagcggggtacctcctatggccggtggtaaaaagccaagtaaacgtcctgcctgggacctgaaagggcagttatgtgatctaaacgctgagttgaagaggtgcagagagcgcactcagacactcgatcagtag

SEQ ID NO: 192503 - DNA, 2022 bp, synthetic construct
  misc_feature 1..2022: note = Description of Artificial Sequence: Synthetic coding sequence
  source 1..2022: mol_type = other DNA
atggacccccagcggagccccctgctggaggtgaagggcaacatcgagctaaagcgtcctttaatcaaagccccatctcagctgccccttagtggttctagactcaaaaggaggcccgaccagatggaggatggcttagagcccgaaaagaagcgtacaagggggctaggcgctaccaccaagatcacaacttcgcatcctagagtgccctcgctcaccacagttcctcagacacaaggccagacaacagcccaaaaagtctcaaagaaaaccggccctcgctgtagcacggcaatcgcaaccggattaaagaaccagaagccagtgcctgcagtccctgtccaaaagagcgggacgtctggtgtaccccctatggccggcgggaagaagcccagcaaaaggccagcttgggacttgaaaggccagctctgtgatcttaacgctgagctgaagagatgccgcgaaaggacccagaccctggatcaggaaaaccaacagctgcaggaccagctgagggacgcccaacagcaggttaaggctctgggaacggaacgcactacactggagggccatcttgcaaaagtccaggctcaggccgagcagggacagcaggagttgaagaacctcagagcctgcgtgttggaactggaggaaaggctttccacccaggaaggattggtacaggaactacagaaaaagcaggttgagctgcaggaggagcgaaggggtttgatgagccaacttgaggaaaaggaacggcgactccagacttcagaggccgctctaagctccagtcaggcagaggttgcaagtctccggcaggagacagtggctcaggcagcactgctgacggagcgcgaggagcggctgcatggactggagatggagcgacgccgcttgcataatcaattgcaggaactaaaggggaacatccgggttttctgcagagttagaccagtgctccccggagagccaaccccgccacctggactgctgctgttcccgagcgggcctggcgggcctagtgacccacccactagactgagcctgtccaggtccgacgagcggcgtggcaccctcagtggtgctcccgcacccccaacacgtcacgatttctcgtttgaccgggtgtttccacccggatctggccaggacgaggtctttgaggaaattgcaatgctggttcaaagcgcattggatggttacccagtctgcatttttgcttacggacaaacaggcagcggcaagacattcaccatggagggcggcccggggggagatccccagctggaagggctgattccccgtgctctccggcacctcttcagcgttgctcaagagttgtccggacaggggtggacatacagtttcgtggcaagctatgtcgagatctacaatgagactgtgcgagacctccttgcaaccgggacacgcaagggtcaggggggcgaatgcgagatcagaagagccgggcccggatccgaagagctgacggttactaacgctcgctatgtgcctgtttcttgtgagaaagaagtcgacgccctcctccacttggccaggcagaacagagcagtggcacgtactgcacagaacgaaagatcatcacgctctcatagcgtgtttcagctacagattagcggtgagcactcctcccggggtctgcagtgtggcgcaccgctgtcgctggtggaccttgccggatcagagagattggatcccgggctggcactcgggcctggggaacgcgaacggctgagagaaacgcaggctattaactctagcctctccacattgggcctcgtgatcatggccctgagcaacaaagagtcgcatgtcccctaccgaaactccaagttaacttacttactgcagaattctctcggaggatccgctaagatgctgatgtttgttaacatctccccccttgaagagaacgtgtcagagtcccttaactctctgcgttttgcctctaaagtcaaccagtgcgtcataggtaccgctcaggctaaccgcaagtag

SEQ ID NO: 192504 - DNA, 2022 bp, synthetic construct
  misc_feature 1..2022: note = Description of Artificial Sequence: Synthetic coding sequence
  source 1..2022: mol_type = other DNA
atggacccccagcggagccccctgctggaggtgaagggcaacatcgagctcaaaagacctctgattaaagccccctcacagctgccactgtccggctcccggcttaagagaaggcctgaccaaatggaagacgggcttgagccggaaaagaagagaactagaggcctgggggcaactactaaaataacaaccagtcatcccagggtcccaagtctcaccaccgtaccgcagacacaaggacaaacaaccgcccagaaggtttctaagaagacgggtcctcggtgctccacagccatcgcgactgggttaaaaaatcagaagcccgtgccagcggtcccagtgcagaaaagtgggacgagtggcgttccaccaatggccggcggtaaaaagccttcgaaaagacccgcttgggatctaaagggccagctctgtgacctgaacgccgaactgaagcgctgtagggagaggacccagacactggatcaagaaaaccagcagttacaggatcagttaagggacgctcagcagcaggtgaaagctctaggaacggaaagaaccaccctggaggggcatctcgctaaggtgcaggctcaggctgagcagggccagcaagagttaaaaaacctgagggcctgcgtcttggagctggaagagagactgtctacacaggaaggactcgtacaggagctccagaagaaacaggtggagctccaggaggagaggcggggactgatgtcccagctggaagagaaagagagaaggctccagacaagtgaggcggcactgagctccagccaggccgaggtggctagtcttcgtcaagaaacagtagcccaagcagccctcctaactgaacgcgaagaacggcttcatggtttagagatggaacgcagaaggttacataatcagcttcaggagctgaaagggaatatccgtgtcttctgtcgcgttaggccggtcctgcccggggagccaacgccgccccctggcctgcttctcttccccagtggtccgggaggacctagcgaccccccgactcggctgagtctgtctaggtctgacgaacggcgaggtaccctatctggggctcccgctccgccgacccggcatgactttagttttgatcgggtgttcccgcctggcagcggacaggacgaagtgtttgaagagatagccatgttagtccagagcgccttggatggttacccagtgtgcatttttgcttatggccagaccggctccgggaagacgtttactatggagggaggtccaggaggtgatcctcaattagaaggactcatccctcgcgccctgagacatctgttttccgtggcgcaggaactgtctggccagggatggacatattccttcgtcgccagttacgtagaaatctataacgaaactgtgcgggaccttctcgctaccggcacccggaaaggtcagggaggggaatgcgagattaggcgcgccggccccgggtccgaagagctgaccgtcaccaacgcccgctacgtccccgtgtcctgcgaaaaagaggtcgatgcgctgctgcacctcgcgcgtcagaatcgggccgttgcccggaccgcccagaatgagcggtccagccgcagtcattctgtcttccagttacagatttctggcgaacatagttcaagggggctgcagtgcggggcccccctcagcctcgtggacctggcgggatccgaaaggcttgatccagggttggcgctgggacccggcgagcgggagcgcctgcgggagacacaagctataaatagctccctctccaccctgggccttgtgatcatggccctttccaataaggagtcacatgtgccttataggaatagcaagcttacatacctgttacagaattctctggggggcagcgccaaaatgctgatgtttgtgaatatcagccctcttgaggagaatgtctctgaaagtctgaacagcttgcgattcgcgagtaaggtcaaccagtgtgtgataggtaccgcccaggccaataggaagtag

SEQ ID NO: 192505 - DNA, 612 bp, synthetic construct
  misc_feature 1..612: note = Description of Artificial Sequence: Synthetic coding sequence
  source 1..612: mol_type = other DNA
atggacccccagcggagccccctgctggaggtgaagggcaacatcgaactcaagcgtccactcatcaaggccccttcccaactgcctctctcgggctcacgacttaaaagaaggcccgaccagatggaagacggactggaaccagagaaaaagaggacgcgggggttgggtgccactacaaagatcaccacctcccacccccgagtgccatcgctaaccactgttccccagactcaaggccagactactggtccttctagccaccccctcccctggcagtgccatcatcagccattccttgaaacagaccccgggggacggtcctggggaccaggccaaaaatggcaccgcttgcatttatggtgcacctctgcacagaaagtgtctaaaaaaaccggcccccgctgtagtactgccattgcaacaggactcaagaaccagaaacccgtgcctgccgtcccagttcagaaatccggcacctctggcgtccctcctatggccggcggtaagaaaccttcaaaacgtcccgcctgggatttaaagggccaattgtgcgatctgaacgccgagttaaaacgctgtcgtgaaaggacccagaccctggaccagtag

SEQ ID NO: 192506 - DNA, 2502 bp, synthetic construct
  misc_feature 1..2502: note = Description of Artificial Sequence: Synthetic coding sequence
  source 1..2502: mol_type = other DNA
atggtgcccagccggcggacctggaacctgggcgccacccccagcctgcggggtctgtggagggtggggagggcaccggagcctgaaccaggaatggcccgccccgctcctgccccggcgtctcccgccgctcgcccttttcctcatacaggtcctggcagattgcgaaccggaaggggcaaggatacccctgtatgcggagacgaggacagctcagccaggtcagccgcacggcctgccttagcacaatgtagggccctcagcgtcgactgggcagggcctggctccccacatggactgtacctgaccctccaggttgagcaccttaaagaaaagctcattagccaagcccaagaggtcagccgcctgcgttcggaacttggcggcacagatttagaaaaacaccgggatttgctgatggtggagaacgaaaggttacgccaggagatgagaagatgcgaagctgaactacaagagttgcggactaaacctgctggcccttgccccggctgtgaacattcccaggagtccgcacagctgcgcgataaactgagccaacttcagttggaaatggcggagagtaaggggatgttaagtgagctgaatttagaagtacaacaaaaaacggatcgcctcgcagaagttgaactccggttgaaggactgcctcgcagaaaaagcccaggaagaggagaggctcagccgccggcttagagacagccatgagactatagcgagtctgcgtgcacagtcccccccagtaaagtacgtgattaaaactgtcgaagttgagtcttctaagacaaaacaggcgctgtctgaatctcaggcaaggaaccagcacctacaagaacaggtggccatgcagcggcaagtgcttaaagagatggagcagcagctgcaaagttcacaccagcttactgcccgcctccgggcacagattgctatgtacgaaagtgaactcgagagagcccacggccagatgctggaggagatgcagagccttgaagaagacaaaaatagagccattgaagaagctttcgctcgggcgcaggtggagatgaaggcagtacatgagaatctggctggagttagaaccaatctgcttacgttacagccggcacttagaactctgacaaacgactataacgggctgaaacgacaggtccggggatttcccctgttgctgcaggaggccctgcgctctgtgaaggccgagattggtcaggctatcgaagaggtgaattctaacaaccaggagctgctccggaaatatcgcagggaactccaactgaggaaaaaatgccataacgaacttgtccggctgaaaggtaacataagggtgatcgctagagtgaggccagtgaccaaggaagatggtgagggccctgaggcaacaaacgcagtgactttcgatgcagatgatgattctattattcatctgctgcataagggtaaacccgtctcgttcgagcttgacaaagtgttcagcccacaggctagtcagcaggacgtattccaggaagtacaggccctggtcacctcatgcatcgatggatttaacgtgtgtatctttgcgtacggacaaaccggtgccggcaaaacttatactatggagggaacggctgaaaatccgggcatcaaccaacgagcactgcagctgctgttttccgaagtgcaggagaaggcgagtgattgggaatataccatcaccgtatcagcagcagaaatctataacgaggtcttgcgggacctgttgggcaaagagcctcaggaaaagttggaaataagactgtgtccggacggcagtgggcagctctacgtacctggattaacagagtttcaggtgcagagcgttgacgacataaataaggtgttcgagttcggacacacgaatcggactactgaattcaccaacttaaatgagcactcatctcgttctcacgccctccttattgttacagtacgtggcgttgattgcagcactgggctcagaacaacgggaaagctgaatttagtggatttagcgggttcagaaagagtgggaaagtctggagctgaaggatcccgcctacgcgaggctcagcacattaataaatcgttgagcgccttgggagatgttattgcggcgctacgctctagacaaggccacgtgcctttcaggaactcaaagctgacctatctgctccaggattctctttcgggagacagcaaaaccctgatggtcgtgcaggtttcccctgtcgagaagaacacctccgagactttgtactcactgaaattcgctgagcgcgttagatcagtggaactagggcccggtctgcggagagccgagctgggctcctggtctagtcaggagcatttagagtgggaacctgcctgtcaaacgccacaaccttctgcccgtgcccatagcgcccccagcagcggtacctcttcccggccggggtcaatcaggcgcaagttgcagccaagtggcaaatctcggccattaccagtctag

SEQ ID NO: 192507 - DNA, 2064 bp, synthetic construct
  misc_feature 1..2064: note = Description of Artificial Sequence: Synthetic coding sequence
  source 1..2064: mol_type = other DNA
atggtggagaacgagcggctgcggcaggagatgcggcggtgcgaggcggagctgcaggagttaaggacaaaacccgccggcccatgtcctggttgcgagcatagccaggaatcagctcagctccgtgataagttaagtcaattacaattggagatggcggagtctaaagggatgttgtcagagcttaacttggaggtgcagcagaagaccgatcgcttggcagaagtcgagctgaggctgaaagactgccttgctgaaaaggcccaggaggaggaacgcctgtctaggcggttacgggacagtcacgagacaatagcttccttgagggctcagagtccacctgtgaaatacgtgattaaaactgttgaggtagagtcaagtaagactaaacaagccctgtctgaatctcaggcgagaaaccagcacctccaggagcaagtggcgatgcaaagacaggtcctcaaagagatggaacaacagttacagagctcgcaccagctgacagcccgactgagggcacaaatcgcgatgtacgagagtgaattagagagggcccacggccagatgctagaggaaatgcaaagtctagaggaggataagaaccgagctatcgaggaggccttcgcaagggcccaagttgagatgaaagccgtccatgagaaccttgcgggcgtgaggaccaaccttcttactcttcagcctgcacttagaacactgactaacgactacaatggactgaagaggcaggttaggggcttccctctacttcttcaagaggctctgcgtagtgtgaaggccgagatcggtcaggccatagaggaagtgaattccaataatcaggagctcctaaggaaatatcgcagagagttacaactgcgaaagaagtgccacaacgagctggtgcgacttaaaggtaatatccgggtaatagctagggtgcgaccagtcaccaaagaggacggcgaaggtcccgaggccactaatgcagtcacctttgacgcagacgacgattctataatacacctgttgcataaggggaagcctgtgtctttcgaactagacaaagtgttctccccccaggcaagtcagcaggatgtgtttcaggaagtgcaggccctcgtcacatcctgtatagacgggttcaacgtatgtatcttcgcatatgggcagacaggcgctggcaagacctacaccatggaggggacagcagagaatccagggattaaccagcgtgcccttcaactactgtttagtgaggtccaagagaaggcctcggactgggaatatacaatcacagtgtcagcagcagaaatatacaatgaagttctgcgcgatttactgggaaaagagccacaggagaagctcgagattagactctgcccagatgggtctgggcagttgtacgtaccaggactcacagagtttcaggtgcagtccgtggacgatataaacaaggttttcgaattcggccatacgaaccgcaccaccgagttcaccaatctcaacgaacattcctcaaggagccacgcactgctgattgtaacggtacgaggtgttgactgttcaactgggctgcgaaccaccgggaagctgaacttagttgacctggctgggagtgagcgagtgggcaaatccggtgccgagggttcgcggctccgggaagcacagcatatcaacaagtcactgagtgccctgggtgatgtgatcgctgccctgcgctccaggcagggacacgtcccgttccggaactccaagctgacgtatctgctgcaggactctctcagtggtgattctaagactctcatggtcgtacaggtctccccagtggagaagaatacgagcgaaacactttattccctgaaatttgccgaaagagtgcggtccgtagaactggggcccggccttcgccgcgcagagctcgggtcttggtcgtcccaagagcatctggagtgggagcccgcctgccaaacaccccagccttcagctcgtgcccattccgcaccatcgagcggcacatcttctcggcctggcagtatccgacgcaagcttcagccctccgcatag

SEQ ID NO: 192508 - DNA, 2481 bp, synthetic construct
  misc_feature 1..2481: note = Description of Artificial Sequence: Synthetic coding sequence
  source 1..2481: mol_type = other DNA
atggtgcccagccggcggacctggaacctgggcgccacccccagcctcagaggtttatggcgagttggcagagccccagaaccagaacctggtatggctagacccgcccccgccccggcctcacccgcggccaggcccttcccacataccggccctggtaggctccgtacaggccgcggcaaagacacccctgtgtgtggcgacgaggattccagcgccagatctgctgcccgtcccgctttagcacaatgcagggcactgagtgttgactgggctgggccaggctcacctcacgggctgtaccttactcttcaggtggagcacctgaaagagaaactgatttcgcaagcacaggaagtgtcgaggctgagaagtgagctcggaggtacagacctcgagaaacatagggatctgctcatggttgaaaatgaaaggttgcgtcaggaaatgagacggtgtgaggctgagcttcaggagcttcgcactaaacctgcgggcccctgccctggatgcgaacatagccaagaatctgcacagctgagagacaagcttagtcagctccaactcgaaatggctgaaagcaaaggcatgctatccgagctgaacttagaagtacagcagaaaactgatcgcctcgccgaggtagagctgaggttgaaggactgtctcgctgaaaaggcccaggaggaagaacgcctgagccgccggcttagggattcacacgagaccatcgccagtctgcgcgcccagtcacctcctgtaaaatacgtcatcaagactgtggaggttgagagtagcaagactaagcaggctctcagcgaatctcaagctagaaaccagcacctgcaagagcaggtggccatgcagcgccaggtgctaaaggaaatggagcagcagctgcagagtagccaccaactaaccgcacgcctgagagctcagatagcaatgtacgaatccgagttagagcgtgcccatgggcagatgttagaagagatgcagtcattggaagaagataaaaaccgggcaatcgaggaggcttttgcacgggcccaggtcgagatgaaggccgtccacgagaacctcgctggggtaaggactaacttgctgaccttacagccagcccttagaacactcaccaatgactacaacggcctcaaaagacaggtgaggggcttcccattgctgcttcaggaagcactccgatcggtaaaagctgaaatagggcaagctattgaagaagtaaactctaataaccaggaactgctccggaaatacaggagggagttacaactccggaagaagtgccataatgagcttgtgcgtctgaaaggaaatatccgcgttatcgccagagtccgcccagttacgaaagaagatggggaaggtccagaggccactaatgcggtgacattcgatgcagatgatgactcaattatccacctactgcataaaggtaaacctgtatcatttgaattggacaaagtgttttcacctcaggcgagtcagcaggatgtctttcaagaggtccaggctctggtcacctcctgtatcgatggcttcaacgtgtgcatcttcgcctatggacaaaccggcgccgggaaaacatacaccatggaaggaacagccgaaaatccaggcattaaccagagagctctgcagctgctcttctccgaagtgcaggagaaagcctccgattgggaatatacaattacggtctccgccgcggagatttataacgaggtgctccgagatctgctggggaaagaaccccaggagaagctggagatacgtctctgccctgatgggagtggccagctgtatgtcccggggttaacagaattccaggtgcaatcagtggacgatatcaataaagtgttcgagtttgggcacaccaaccgcaccaccgaatttaccaacctcaacgagcactcctccaggagccacgcactgctcatagtaaccgttcgcggagtggactgttcaacaggcctccgaactactggaaagctcaacttggtggacctggcaggaagtgagagggtcggtaaaagcggcgccgaaggtagcagactgagggaggctcagcatataaataagagcctgtctgccttaggagacgtaatcgcagcactgagaagccgccagggtcacgtgcctttccggaattctaaattgacgtatctgctgcaagacagcctctctggagattctaagaccctcatggtggttcaagtatctcccgtggagaagaatacctcagagaccctatattcactgaaatttgccgaaagagttaggtccgtggaactcgggcctggtttaagacgcgcagaactgggctcatggtcctctcaggagcaccttgagtgggagcctgcctgtcagactccccaaccctccgcacgtgcacacagcgcgccttctagtggcacaagcagccgacccggctccatcagacggaagctgcagcctagtgcatag

SEQ ID NO: 192509 - DNA, 2307 bp, synthetic construct
  misc_feature 1..2307: note = Description of Artificial Sequence: Synthetic coding sequence
  source 1..2307: mol_type = other DNA
atggtgctgcggatggtggaggccatgagccagctgcaggacgagaagacccagttgcaggaggaactggttgtgctgcaggaaaggctcgccctgagagactctgatcagcaggccaccagcacccaactccagaatcaggttgaacatttgaaggagaagcttattagccaagcccaggaggtgtccaggctaaggtcagagctcgggggaaccgatctggaaaagcaccgggacctgttgatggttgagaacgagcgcctgaggcaagagatgcgacgctgcgaggctgagctccaggaattgcgcacaaagcctgctgggccgtgtcccggctgtgagcactcacaggagtcggcccagcttagggacaagctgtcacagcttcaattggagatggccgaatccaaaggaatgctcagtgagcttaacctcgaggtgcagcagaagacagatcgattagcagaggtagagctgagactcaaggactgcctagccgaaaaggcccaggaagaggagcggctgagcaggcggcttagggactcccacgaaactattgcatccttgcgcgcccagagtccaccagtaaagtacgtcataaagacagtcgaagtcgaatccagcaagaccaagcaagccctgagcgagtctcaggcaaggaatcagcacttgcaggaacaagtggccatgcaaagacaggtgttgaaggagatggagcagcaactgcaaagctcacatcagctgaccgctcggcttcgagcccagatcgcaatgtacgaatctgaattggaaagagcgcatggacagatgttagaggagatgcagagcctcgaagaagacaagaatcgggcgatcgaagaggcctttgcccgtgctcaggtggagatgaaagctgtgcacgaaaacttagccggggtgaggacaaacctactgaccctacagccggctctgaggacactcaccaatgactataatgggctcaaacggcaggtgcgagggttccctttgctgcttcaagaagccctgcgtagcgtgaaggccgagattggacaggcaattgaggaggtcaatagcaataatcaggaactactaagaaaatatcgacgtgagctgcagcttaggaagaagtgccataacgagttagtgagacttaaagggaatatacgcgtgattgccagagtgcgtcctgtgaccaaggaggacggggagggccctgaggccactaatgcggtgacttttgacgccgatgacgactccattatacatctcctgcacaagggaaagccagtatcctttgaactggataaagtttttagccctcaagcttcacagcaggacgtcttccaggaggtccaagctctagtaacatcatgcattgatggcttcaatgtgtgcatcttcgcctacgggcagaccggggccggtaaaacttacacgatggaaggtactgccgaaaaccctggaattaaccagagggcactgcagctgttgttctccgaggtgcaggaaaaggcaagcgactgggagtatacaattaccgtaagcgccgccgaaatttataatgaagttctgcgcgacctgctcggcaaggaaccgcaagagaagctcgagatacgcttatgcccagacggcagcggccaactctatgtccccgggctgacagagtttcaggttcaatccgttgacgacatcaacaaagtctttgagtttggacatacaaaccgcactacagagtttacaaatctgaacgaacatagtagcagatctcacgccctacttatcgtgactgttagaggcgtggattgcagcaccgggcttcgcactacaggtaagctgaacctggtagatctggctggaagcgaacgggtgggcaagtctggtgccgagggcagcagattaagggaagcacagcacatcaataaaagcctgtccgccctcggggacgtgattgctgcactacgcagtcggcaagggcatgtgccctttcgcaactctaagctaacctaccttttacaggactctctctcgggtgacagtaagaccctcatggttgttcaggtgagtccagtggaaaagaatacgtccgagaccctatacagcttaaaatttgccgaaagagttagaagtgtagaactgggtcccgggctgcgtcgcgcagagttggggtcctggtcatctcaggagcatctagagtgggagccagcctgccagacaccgcagccctccgcccgcgctcattccgcaccatctagtggtacaagctccagaccagggagcattcgaagaaagctgcaaccatccgcctag

SEQ ID NO: 192510 - DNA, 2175 bp, synthetic construct
  misc_feature 1..2175: note = Description of Artificial Sequence: Synthetic coding sequence
  source 1..2175: mol_type = other DNA
atgatcaaggtggagcacctgaaggagaagctgatcagccaggcccaagaggtgtctagattgagatcagaattgggaggaaccgacctggagaaacaccgcgatctcctcatggttgagaatgagcgattgcgtcaggaaatgcgcaggtgtgaggcggaactccaggagctgagaactaaacctgcagggccttgcccaggctgcgagcactcacaggaatctgcccagttacgcgacaagctatcccaactgcagctggagatggccgaaagtaaggggatgctctctgagctcaatcttgaggtacagcagaagacggatcgcctggccgaggtagagctgaggctaaaggattgtctggcagagaaggctcaggaagaagagaggctctccaggcgccttagggattctcatgaaactatcgcctcgctgcgagcgcaatcaccaccagtgaagtatgtcatcaaaaccgtggaggttgagtctagcaaaacgaaacaggcacttagcgagtctcaagccaggaaccagcacctgcaagagcaagtggccatgcaacgtcaagtgctgaaagaaatggagcagcagttacaaagtagtcaccagctgacggcacgcttgagagcccagattgctatgtatgagtccgagttggagcgtgcccacgggcagatgttagaagagatgcagtctcttgaagaagacaaaaatcgagctatcgaggaggccttcgcaagggctcaagttgagatgaaggccgtccacgaaaacctggccggggtgcggaccaatctccttacccttcagcccgccctgagaacattgaccaacgactataacggtctgaaaaggcaagtaagaggtttccccctcctccttcaggaagcattaagatcagtgaaggctgagattggccaggcaattgaggaggtcaattccaacaaccaggaactcttacgaaagtacagaagagaactgcagttaaggaaaaaatgccataacgagctagttaggctgaagggaaatatccgcgtgatcgcccgggtgagaccggttaccaaagaagatggagagggtccagaagccactaatgccgtgacattcgacgccgatgacgatagtatcatccatctcctgcacaaaggtaaaccggtttcttttgagctggacaaggtgttcagcccacaagcatctcagcaggacgtattccaagaagtacaggccctggtcaccagttgcatagacggtttcaacgtgtgtatctttgcttacggccaaactggcgctggcaaaacgtatactatggaggggaccgccgaaaatcctggcatcaaccagcgggcgctacagttactgttctccgaagtacaggaaaaagcatccgactgggaatacactatcactgtgtccgctgccgagatctataacgaggtcctgcgagacctgctgggaaaggagcctcaggaaaaactggagatcaggctgtgtcctgatgggtctggccagctgtatgtgccaggcctgacggagtttcaggtccaaagcgtggacgatatcaataaggttttcgagttcggtcacacaaataggacaacagagtttactaacttgaacgagcactcctcccggagtcacgcactgctgatcgtgaccgtgaggggcgtagattgctcaaccggtttgcgaacaaccggaaagttgaacctcgtcgatttggcagggagcgagagggtcggaaagtctggagccgaaggtagtaggttgagagaagcacagcacattaacaagtcgttatccgccctcggtgacgtgattgctgcgctccgaagccgtcagggacacgtgccattccgaaatagtaagcttacctacctgctgcaggattcgctgtccggggactccaaaacgcttatggtggtccaggtttccccagttgagaaaaacacctcggagaccctttactctttgaaattcgctgagcgagtgcgcagcgtagaactcggccctggtcttcgtagggcagaattaggctcatggagttcacaagagcacctggaatgggaaccggcctgtcagactcctcagccctctgctcgtgcgcattccgccccttcttccggaactagcagccggcctgggagcattagaaggaagctgcagccatctgcttag

SEQ ID NO: 192511 - DNA, 2547 bp, synthetic construct
  misc_feature 1..2547: note = Description of Artificial Sequence: Synthetic coding sequence
  source 1..2547: mol_type = other DNA
atgtgcgccagcgcctgcaaggacaccgccgcctggtgccccgaggaggctgccgagccacaggccatggtccccagcaggaggacctggaacttgggtgccaccccaagcctccggggcctgtggcgtgtaggcagggccccggagcctgagcccggaatggccagacccgctccggcccccgcctcgcctgccgctcggccttttccacatactggcccaggcagactccgtaccggccgcgggaaagacactcctgtgtgtggggacgaagattcatcagccaggtccgcggctcgtcccgccctggctcagtgccgcgcactgagtgttgactgggccggccctgggagtccacatgggctctacctgactctgcaggtagagcatctcaaagaaaaacttattagccaggcgcaggaggtatccaggctgaggagtgagctgggcgggactgatcttgagaagcaccgggacttgctcatggtggaaaacgaacgactgaggcaggagatgcggcgctgcgaagcggagttacaggaattacgtacaaagcctgctggtccttgcccagggtgtgaacactcccaggagagcgctcaactgcgggacaagctgtctcaactccagcttgaaatggcagagagcaaggggatgctctccgagctcaatttggaagtgcagcagaagactgatcgactggctgaagtcgaacttaggctcaaagattgcctcgcggagaaggcgcaggaagaggagcgtttgtcacgtcggctccgcgactctcatgaaactattgccagcctcagggcacaatcacctcccgtcaagtatgtgattaagaccgtggaggtggagtcctccaagacaaaacaggcgctcagcgagtcccaggctcggaaccaacacttacaggagcaggtagcgatgcaacggcaggtgctgaaagagatggaacagcaactccagtctagtcaccagctgacggctaggttgagggcccagattgcaatgtatgagtccgagctagagcgagctcatgggcaaatgctagaggaaatgcaaagccttgaggaggacaagaatcgggcaattgaggaggcgttcgcccgcgcccaggttgagatgaaagcagtgcatgaaaacttagctggagtccgcactaaccttctcactttgcaacccgccttacgtacactgaccaacgactacaacgggcttaagcggcaggtgaggggattccccctgctgctccaggaggctttaaggagtgtgaaggcagagattggtcaggccatcgaggaagtgaactccaacaaccaggagctgctgagaaagtaccggcgcgaattgcagttaaggaagaagtgtcacaacgagctggtgagactgaagggcaacataagagttatcgcccgtgttaggcccgtgacgaaggaagacggtgaaggaccagaagccactaacgccgttacctttgatgccgatgacgacagtataatacatctcctgcataaaggcaaacctgtgagtttcgagctcgataaagtcttcagcccccaagcatctcagcaggacgtgtttcaggaagtgcaggctctggttaccagttgtatcgatggattcaatgtctgtatcttcgcgtacgggcaaaccggcgctggaaagacttataccatggagggcacagccgagaacccagggattaatcagagggctctacaactcctcttttccgaggttcaggagaaagcctccgactgggaatacacaataaccgtaagcgcagccgaaatttacaacgaggtgctcagagacctacttggcaaggaaccccaggagaagcttgaaattagactctgccccgacgggtcaggtcagctgtatgtccccggattgaccgagtttcaagtgcagtctgttgatgacataaacaaggtgttcgaatttggacacacaaatagaaccacggaatttactaacctcaatgagcactcctcccggagtcatgccctcctaattgtgaccgtccggggcgtggactgtagtacaggcctccgcacaactggaaagctgaacctggttgatctagctggcagtgaacgtgtaggcaagagtggagctgaggggtcccgtctacgcgaggcgcagcacatcaacaaatcactgtcagccctgggtgatgtgatcgctgccctacgatcaagacagggtcacgtgccattcaggaatagtaagctgacgtacctcttacaggatagcctgagtggggactcgaagaccttaatggtggtacaagtctcacctgtggagaaaaatacatcagagaccttgtatagcctgaagttcgccgaacgggtacggagcgtcgagttaggacccgggttgcggagggccgagttaggcagttggtcctctcaagaacatctggaatgggaacctgcttgtcagacccctcagccctcagccagggcccattctgccccttcaagcggtacctcctcccgccctggtagcattaggcgaaaattgcagccttctgcctag

SEQ ID NO: 192512 - DNA, 2055 bp, synthetic construct
  misc_feature 1..2055: note = Description of Artificial Sequence: Synthetic coding sequence
  source 1..2055: mol_type = other DNA
atggtggagaacgagcggctgcggcaggagatgcggcggtgcgaggctgagttgcaagagctgagaacgaagccagcaggtccttgtcctggttgtgagcacagccaggaaagtgctcagctccgggacaagctttcgcagctgcaactcgaaatggctgaaagcaaggggatgctgtccgaactcaatctggaagtacagcagaagacagatagattagcagaggtggagctccgactgaaggattgcttagctgaaaaagcccaagaggaagaaaggctctcccgccggctgagagatagtcacgagaccatagccagccttagggctcaatcccctccagtcaagtatgttattaaaaccgtggaggtcgagagttccaagaccaagcaagccctgtcagaatcacaggctagaaatcagcacttgcaggagcaggtggctatgcagcgccaggttcttaaggagatggagcagcagctgcagtcttctcaccagctgactgcccgccttagagcccaaattgcgatgtacgaatccgaactggagcgggctcatggccaaatgctggaagaaatgcaatctttagaggaagacaagaaccgcgccatcgaagaggcttttgcccgggcacaggtggagatgaaggcagtccacgagaatctggcgggggtccgtacaaatctcctgacgctgcagccagccttgcgtacactcacgaatgactacaacggcctgaagaggcaggtgcgcggatttcctctgttgctacaggaagctctccggtccgtgaaagccgaaatcggccaagcgattgaggaggtgaactcgaacaaccaggagttgctccgcaagtaccgccgggaactccagttgaggaagaagtgccataacgagctggtcagactcaagggcaacattagagtgatagcacgcgtgcgtcccgtaaccaaggaagacggggaaggtcctgaggcaactaacgccgtgacctttgatgccgacgacgattcgatcatccacctgctccacaaaggcaagcctgttagctttgaactggataaagtcttcagtccacaagctagccagcaggacgaggtccaagccctggtcacctcttgcattgacgggttcaatgtctgcatattcgcctacgggcagaccggagccgggaagacatacaccatggaggggacagccgagaaccccgggatcaaccaacgcgccttgcaactcctcttctccgaggttcaggagaaggcaagcgactgggagtatacaattactgtgtccgctgctgagatctacaacgaagtgctgcgggaccttttgggtaaggagccccaagaaaagctcgagattaggctatgcccggatggctctgggcagctgtacgtgccagggctgacagagtttcaggtacagtccgtcgatgacataaataaagtgttcgaattcgggcatacgaatcgaacgacggagttcactaacctgaacgagcactcaagtaggtcccacgcactgcttattgtcaccgtcagaggggtggattgctcaactggactgcggacgactgggaaacttaatctggttgatctagctggatccgaacgtgtgggcaagagcggggcagagggatcccgactgagggaggcgcagcatatcaataaatctttatcagcattgggtgatgttattgcagcactgcgatcgcgacaaggtcatgtgccgttccgcaactcaaaactgacctacttgttacaggactcactaagcggggatagtaagacactgatggtggtgcaggtgagcccagtggaaaagaatacctccgagacgctctacagtttgaaattcgcggaacgcgttcgcagtgtggagctggggcccgggttgcgccgggccgaactgggctcttggtcttctcaggagcatctggagtgggagcctgcctgccaaactccacaacctagcgcacgtgcccactcagctccaagttcagggacaagctccagaccaggctcaatacgcaggaagctccaaccatccgcttag

SEQ ID NO: 192513 - DNA, 1914 bp, synthetic construct
  misc_feature 1..1914: note = Description of Artificial Sequence: Synthetic coding sequence
  source 1..1914: mol_type = other DNA
atgtacgacaacatgagcaccatggtgtacatcaaggaggacaagttagagaagctgacacaggacgaaattatttcaaaaaccaagcaggtcatccagggactggaggcattgaaaaatgagcacaatagtattctgcagtctctattagagacactcaaatgtctgaagaaagatgatgagagtaatctggtggaggaaaagagtaatatgatcagaaagagcctggaaatgttggagctgggactcagtgaagctcaagtcatgatggcactgagcaatcatctcaacgcagttgagagcgaaaagcagaagctgagggctcaggtgaggagactttgccaggaaaaccagtggctgcgcgacgagctggccaacacccagcagaaacttcaaaaatctgagcagagcgtggcccaactggaagaggagaaaaagcacttagaatttatgaaccagcttaagaagtatgacgacgatatttcacccagcgaagataaagacacagactccaccaaggagcctctggacgatttatttcccaacgatgaggacgaccctggccaaggcatccagcaacagcatagttccgcagccgccgccgcacaacaaggcggttatgaaattccggcacggctgagaacactgcataatctcgtgattcagtacgcttcccaggggcggtacgaggtcgccgtgcctctgtgcaaacaggccctcgaggatttagagaagacctctgggcatgatcatccggatgttgcaaccatgttaaacattttagcattagtatacagggaccagaacaaatataaggacgcggctaatctacttaacgatgcactggctattagggagaagaccctgggcaaagatcaccccgctgtcgccgccaccctgaacaacctggccgtcctatacgggaagcgaggtaagtataaggaggctgagcccttgtgcaagcgagcattagaaatacgcgagaaggtgctgggcaaagaccatcctgacgtcgccaaacagttaaacaacctcgctctgctttgccaaaaccaaggtaagtacgaggaagtggaatattactatcaacgagcactcgagatctaccaaacgaagctgggcccggacgaccccaacgtggccaaaaccaaaaacaatctggccagctgttaccttaaacaaggaaagttcaaacaggcagagaccttgtacaaagagatattgacaagagctcatgaaagagagttcggctctgtggacgacgaaaataaacccatctggatgcacgccgaggaacgggaggagtgcaagggcaaacagaaggatggaaccagtttcggggagtacgggggctggtacaaggcatgtaaagtggactcaccgacagtcaccaccacgctgaaaaacttaggcgcactgtacagacgccagggtaaatttgaggccgctgagactcttgaggaggccgccatgcggtctcggaagcaggggcttgacaatgtccacaagcaacgcgtagctgaagtgctgaacgatccagagaacatggaaaagaggcgctccagggagagtctgaacgtggacgtggtcaaatatgaaagcggccctgacgggggggaagaagtatcgatgagtgtcgagtggaacggcgacgggactgggtcgcttaaaagaagcgggtccttcagtaagcttcgggcctcaatccggcgatcctccgaaaagttagtgcgtaaattaaagggcggaagttctcgagaatccgaaccaaagaatcctggaatgaaaagggcttcctccctgaacgtgctaaacgttggaggaaaagccgccgaagaccggttccaagaaagaaacaactgcctggctgacagtcgtgcccttagtgccagccatactgacttagctcattag

SEQ ID NO: 192514 - DNA, 1920 bp, synthetic construct
  misc_feature 1..1920: note = Description of Artificial Sequence: Synthetic coding sequence
  source 1..1920: mol_type = other DNA
atgtacgacaacatgagcaccatggtgtacatcaaggaggacaagttggaaaagctgacacaggacgagattatcagcaagaccaagcaggttattcagggcctggaggcgctgaaaaacgagcataattccatcttacagtcccttcttgaaactctgaaatgtttgaagaaggacgatgaaagcaacctggttgaggagaagtctaatatgatcagaaaaagcctcgagatgctggagctcggactttctgaggctcaggtgatgatggcgctaagcaatcatcttaatgcagtggagtctgagaaacagaagttgcgcgcgcaggtccgtaggctgtgccaggaaaatcaatggctcagggacgaactcgctaacacgcagcagaagctacagaagagcgagcagtctgtggcccagttagaagaagagaagaaacacttggagttcatgaaccagctgaaaaagtacgatgacgacatcagcccttccgaggataaagacacagattctaccaaagagcctctggatgatctattccccaacgacgaggacgaccccggccagggaatccagcagcagcactcatctgctgccgctgctgcccagcagggtggctatgagatcccagccagactacgcaccctgcataatctagtgatccagtacgcctcgcagggaaggtatgaagtggctgtgcccctctgcaagcaggctcttgaagatttggagaagaccagcgggcatgatcatccagacgtggcaacgatgctgaatattcttgcactggtctaccgcgatcagaataaatacaaagacgcagcgaatctgcttaatgatgcactggcgattcgcgagaaaaccttagggaaggatcatccagccgtggcggcgaccctgaataaccttgccgtcctttatgggaaaagagggaagtacaaggaggctgaacctttgtgtaaacgggccctggagatcagagagaaggtcctgggcaaggaccatccggacgtggccaagcaacttaacaacctcgcgttactgtgccagaaccagggcaagtacgaggaagtcgagtattattatcagagggctctggaaatctatcagactaaattgggccctgacgatccgaacgtggctaaaacgaaaaataacctagcatcttgctaccttaagcaaggaaaattcaagcaggcagagactctgtacaaggaaattctgacccgggctcatgaacgggagttcggtagtgtagatgacgagaataagcctatctggatgcatgccgaggagagagaggaatgtaaagggaagcaaaaggatgggacgtccttcggggaatacggcggctggtacaaggcttgcaaggttgatagccccacggttacgacgaccctcaagaacctgggagccctgtataggaggcaaggcaagttcgaggctgccgagacactagaagaagctgcaatgcgatctcgcaagcaaggcctggataatgtccacaagcagcgtgtggccgaggtactcaatgatccagagaatatggagaaacgtaggagccgcgaatctctcaatgtagacgtggtgaaatacgagagtggccctgacggaggtgaagaggtatctatgagtgtggaatggaacggagatggtacaggatcactgaaacgcagtgggtcctttagtaagcttcgagcctccattcgacggtcatcggagaagctagtgaggaagctgaaaggaggatccagccgagaaagcgagccgaaaaatccaggaatgaagagagcatcttctctgaacgttttaaatgttgggggtaaagcagccgaggacagatttcagggtgtcagcggacgcgcctctttttgtggaaaacggcagcagcaacaatggccaggaagaaggcataggtag

SEQ ID NO: 192515 - DNA, 1887 bp, synthetic construct
  misc_feature 1..1887: note = Description of Artificial Sequence: Synthetic coding sequence
  source 1..1887: mol_type = other DNA
atgtacgacaacatgagcaccatggtgtacatcaaggaggacaagctagagaaactgacacaagatgaaattattagcaagacaaaacaagtgatccagggtcttgaagcacttaaaaacgagcacaacagtatcctccaatccctgctcgagactctgaagtgtctcaagaaggacgacgaatcaaacttagtagaggagaagtccaacatgatcaggaaaagcctagagatgctggaactgggtctatctgaggcacaagtgatgatggcactttccaatcatctaaatgccgtcgaaagtgaaaagcagaagttgcgagcccaggtacgccggttatgccaggaaaatcaatggctgcgtgacgaactggccaacacccagcagaaacttcagaaaagcgaacaatcggtcgcccaactggaggaagaaaagaaacatctagagtttatgaaccagttaaagaagtacgatgatgacatctccccttcagaggataaggataccgacagtactaaagagccgctggacgacctgtttcccaatgatgaggacgatcctgggcaggggatccagcaacaacactctagcgcagcagcagctgcacagcagggcggatatgaaatccctgcaaggctgcgcactctgcataacttggtcatccagtacgcttcacaaggacggtacgaggtcgccgtgcccctgtgtaagcaggccctggaagatttggagaaaacctccggtcacgaccatccagacgtggcaactatgctgaatatcttggcccttgtgtacagggatcagaacaagtacaaggacgcagcaaaccttcttaatgacgccctcgcgattcgagaaaaaacacttggaaaagaccaccccgctgttgcagcgaccttgaataacctggctgtgttgtacggcaaacgtggaaaatacaaggaggcagagccactttgcaagagagcactcgaaatcagggaaaaggtgctgggaaaagaccatccagatgtggccaagcagctcaacaacctggcccttctttgccaaaatcaggggaagtacgaggaggtggagtactactatcagcgagctctagagatttatcagacaaaactggggcctgacgatcccaacgttgccaagacgaagaacaatctggcctcttgctaccttaaacagggaaagttcaaacaggctgaaactctctacaaggaaatccttacccgcgctcatgagcgcgaatttggctccgtggacgacgaaaacaagcccatatggatgcacgccgaggagcgcgaggagtgcaagggcaagcagaaggacggcacatctttcggcgagtatggtggctggtacaaagcctgtaaggtggatagtcccactgttacaactaccctcaaaaatcttggcgccctgtacaggagacaaggtaaattcgaggcagcggagacactggaagaggccgcaatgcggtctcgaaagcagggtctggacaacgtgcacaagcaacgcgttgccgaagtgttgaatgacccagaaaatatggagaagaggaggagccgcgagagcctgaacgtggacgtagttaagtacgaaagcggtcccgatggcggcgaggaagatgggactggatcgctcaaacgctctggaagctttagcaagctgagggcgtctatacgtcgtagcagcgaaaagctagttcggaagcttaagggtggctcatcccgggagtcggagcccaaaaatccgggcatgaaaagagcaagcagcctgaatgtgctgaacgtgggtgggaaagccgccgaggacaggttccaggaacgtaataattgcctggcagactctagggcgctctctgcgtcgcatactgacttagctcactag

SEQ ID NO: 192516 - DNA, 1722 bp, synthetic construct
  misc_feature 1..1722: note = Description of Artificial Sequence: Synthetic coding sequence
  source 1..1722: mol_type = other DNA
atgtacgacaacatgagcaccatggtgtacatcaaggaggacaagctagaaaagctcacgcaagatgagattatcagcaagacaaaacaagtgatccagggcctggaagctctgaagaatgaacacaactctattctgcaaagcctacttgaaacccttaagtgcctaaaaaaagacgatgagtccaatctggtggaggagaagtccaatatgattcgtaaatcccttgagatgctcgaactgggactgagtgaggcccaggtgatgatggcactgagtaaccacctgaacgccgtcgaaagtgagaaacaaaagcttcgggcacaggtgaggcggctgtgccaggaaaaccagtggctgcgcgacgaactggccaacactcaacaaaagctgcagaagagcgaacagtcagtggcacagctggaagaagagaaaaagcatcttgagttcatgaatcagttgaagaaatatgatgatgacatctcaccaagcgaagataaggacaccgatagcacgaaagagcctctggacgacctttttcctaatgatgaagacgacccggggcaggggatacagcaacaacattcttccgccgctgccgccgcccagcaaggcggatatgaaatccctgctaggttacgcacactgcacaatctggtgatccagtatgcaagccaaggtcgatacgaggtagccgtacccctctgtaaacaggcactggaggatctggagaagacctcaggccacgatcacccagatgtcgcgaccatgctcaacattttggcactcgtctaccgtgatcaaaacaagtacaaggacgctgccaacctgttgaatgatgcactggctatccgcgagaagaccctggggaaagatcaccccgctgttgccgcaactctcaataaccttgccgtgttgtatggaaaaagagggaagtacaaggaagcagaacccttgtgtaagagagctctagaaatcagggagaaggtactcgggaaggaccaccctgatgttgcaaaacagctaaacaatctcgctctcctgtgccagaatcagggaaaatatgaagaagtggagtactattatcagagggccctggagatttatcaaactaagctgggcccagacgatcctaacgttgccaaaactaagaataatctcgccagctgttacctgaaacagggaaaattcaagcaggccgaaactctgtataaggagatcctcacccgggcgcatgagagggaatttggctctgtcgacgatgaaaacaaaccaatttggatgcacgctgaggaaagggaggaatgcaagggcaagcagaaggatggaacctcctttggggaatatggtggctggtataaggcatgcaaagtagactctcccacagtcaccactacccttaaaaatttaggcgctctgtaccgtcggcagggcaaatttgaagcagccgagaccttggaggaggctgcaatgcgctcacgtaagcagggactggacaatgtgcacaaacagcgagtggccgaggttttgaacgacccagagaacatggaaaagcgcagaagcagggagtccctgaacgtggacgtcgttaagtacgaatcaggtccagatggaggtgaagaggtgtccatgtccgtcgaatggaatgggggtgtctctggacgcgcctccttctgtgggaaaagacagcagcagcagtggccagggcgccggcataggtag

SEQ ID NO: 192517 - DNA, 1731 bp, synthetic construct
  misc_feature 1..1731: note = Description of Artificial Sequence: Synthetic coding sequence
  source 1..1731: mol_type = other DNA
atgtacgacaacatgagcaccatggtgtacatcaaggaggacaagctagaaaagcttacacaagacgaaatcataagcaaaaccaaacaggttatccagggtctggaagcactcaagaatgagcataatagcattctgcaaagtctgctggagacactgaaatgcttaaagaaggatgatgagagcaacctggtcgaggaaaaaagcaatatgataaggaagtccctcgaaatgttggagctggggctctcagaggcacaagtgatgatggcactgtcaaaccacttgaatgcggtggaaagcgagaagcagaagctgagagctcaagtcagaaggctgtgccaggaaaatcaatggttgcgtgacgagctagccaacacccagcagaagctgcagaagtctgaacagagcgtggcccagctcgaggaagagaagaagcacctggagtttatgaaccagctgaagaagtatgatgacgacatctcgccatcggaggacaaagatacggactcaacaaaggagcctttagacgatctgtttcccaacgatgaagatgatcccgggcagggtatccagcagcagcatagcagcgctgcagccgccgcccagcagggcggctacgaaatcccagcacgactgcgcactctgcataatctggtaatccagtacgcatctcagggtagatacgaagtggctgtgccattatgtaaacaggccctcgaggatcttgagaagactagcgggcatgatcatccggatgttgctacaatgctgaatatccttgcccttgtttacagggaccaaaacaagtataaagacgcagcgaacctcctgaacgatgcactggctataagagagaaaaccttaggaaaagatcaccccgctgtggcagctactctcaataacttagccgtcctctatgggaaaagggggaagtataaggaggcggagcccctatgcaaaagggccttggagattcgtgagaaggtgctgggcaaagatcacccagacgtcgctaagcaactgaacaacctggcactgttgtgccaaaaccaaggcaagtacgaggaggtggagtattattaccagcgtgccctcgaaatctaccagactaagcttggacccgacgatcccaacgtagctaagaccaagaataaccttgccagctgttacctaaagcagggaaagttcaagcaggccgagactctttataaggaaattctgacccgcgcgcacgaacgggaatttggatctgtggacgacgagaacaaacctatttggatgcacgctgaggagagggaagaatgcaaaggaaagcaaaaagacggaacaagcttcggtgaatatgggggctggtacaaagcgtgcaaggtcgacagtcccaccgtgaccaccaccctgaaaaacctgggggcactctatcgcagacaaggtaagttcgaggcggcagaaacactcgaggaagccgccatgcgatcgagaaaacaacgtagcatatccgagatccctaagaagatattaagcgcgaacgggagtaaccatttcccccttccaggtagtcaaggcctggataatgttcacaaacagcgggttgccgaggtcttaaacgatcctgagaacatggagaaaaggagaagccgggagtccctcaacgtcgatgttgtcaaatatgaatctggaccagacgggggagaggaaatgaggaagatgaagctcgggctcgtcaactag

SEQ ID NO: 192518 - DNA, 1683 bp, synthetic construct
  misc_feature 1..1683: note = Description of Artificial Sequence: Synthetic coding sequence
  source 1..1683: mol_type = other DNA
atgtacgacaacatgagcaccatggtgtacatcaaggaggacaagctcgagaaactcactcaggacgaaataataagtaaaacgaagcaggttatccagggactggaggcactcaagaacgagcataattctattttgcagagcctgctggaaactttgaagtgccttaagaaggatgacgagtctaatctggtggaagaaaagagcaacatgatcagaaaatctttggaaatgctcgaattgggactatctgaagcgcaggtaatgatggcattaagtaatcacttgaatgccgttgaaagcgagaagcagaagctccgggctcaggtgcgccgtctctgccaagaaaaccagtggctccgcgatgagttggccaatacccagcaaaaactacaaaaatcagaacaatccgtcgcccagctggaagaagaaaagaaacacctagaattcatgaaccagctgaagaagtatgacgacgacatatcgcccagcgaggacaaggacacggactcaacaaaagagccgctggacgacctgtttcccaacgacgaggatgatcccgggcagggaattcagcagcaacactccagcgctgccgcagctgcacagcaggggggctacgagatccctgcaagactgaggactcttcacaaccttgtgatccagtatgccagtcagggccgctacgaggttgcagtaccactctgcaaacaggccctcgaagatctggagaagacttctggccatgaccatcccgacgtggctactatgctgaacatcctcgccctggtctatagagatcagaataagtacaaagacgctgcgaacttacttaatgacgcacttgcaatcagagagaaaaccttgggaaaggatcatccagcagttgccgcaaccttaaataacctggccgttctgtatggcaaacgcggcaaatataaagaagccgaacccttatgcaaaagggcgctcgaaattcgggagaaagtacttggcaaagatcaccccgacgtggccaagcagctaaataacttggccctcctgtgtcagaaccaaggaaagtatgaagaagtagaatactactaccagcgggcacttgagatctatcagacaaaactaggcccagacgaccctaacgtggcgaagaccaagaacaatctggccagctgctacctgaagcagggcaagttcaagcaggcagaaaccctgtacaaagaaatactaactagggctcatgaaagagagtttggctctgtggacgacgagaataagcctatatggatgcacgcagaagaaagagaggaatgcaaaggaaagcaaaaggatgggacgtcgtttggtgagtatggcgggtggtacaaggcctgcaaggtggattcaccaacggtgactaccaccctgaagaaccttggcgccctatacagacgccagggcaagtttgaggccgccgagacactggaagaggcagcgatgcgatcgcggaagcagggtcttgacaacgttcacaagcagcgtgtggcggaggtattaaatgatcccgaaaacatggaaaagaggcggtccagggagtcattaaacgtggatgtcgtgaaatacgagagcggacccgatggcggagaagaggtttctatgtctgtggaatggaatggcatgcgtaaaatgaagctaggtctggtaaactag

SEQ ID NO: 192519 - DNA, 1755 bp, synthetic construct
  misc_feature 1..1755: note = Description of Artificial Sequence: Synthetic coding sequence
  source 1..1755: mol_type = other DNA
atgtacgacaacatgagcaccatggtgtacatcaaggaggacaagctcgaaaaacttacacaagatgagatcatttccaagaccaaacaggtcatacagggcctcgaggcccttaagaatgaacataactcaattcttcagagcctcctcgagacccttaaatgcctaaagaaagacgacgagagcaacttggtggaggagaaatctaacatgataagaaaaagcttagaaatgctggaactaggtctgtcagaagcacaggtgatgatggcactgagcaaccaccttaacgcagtcgagagcgaaaagcaaaaactgagggcacaagtgcgtcgcctgtgccaggaaaatcaatggctgagagatgagctggccaatacacagcagaaacttcaaaagtccgaacagagtgtggcccagctagaggaggaaaagaagcaccttgaattcatgaatcagcttaagaagtacgacgatgacatctcgcctagtgaggacaaagatactgactcgacaaaggagccactcgacgatctcttccccaacgatgaagacgaccccggtcaaggaattcagcagcagcactctagtgccgcggcagccgcccaacagggcggctatgagattcctgcacgcctgcgcactttgcacaatttggttattcagtatgcaagccaaggacgctacgaagtggctgtccccctgtgcaagcaggccctggaagatctggaaaagaccagcggtcatgatcaccctgatgtggcgactatgttgaacattctcgcgctggtgtaccgcgatcagaacaaatataaagatgctgccaatcttctcaatgatgcgctggctatacgcgagaaaaccctgggaaaggatcatccagccgtggctgccacactgaacaacttagccgttctttacggtaaaaggggaaagtataaagaggcagaacccttatgtaagagggctctggagatacgagagaaagtgctgggcaaggatcaccccgacgtcgcaaaacagttaaataaccttgccctgttgtgccagaaccagggcaaatatgaggaggtggaatactactatcagagagccctcgagatttatcagactaaacttggtcctgatgatccaaatgtggctaagaccaagaacaacctcgcctcatgctatctcaagcagggcaagtttaaacaagcagaaaccttgtacaaagagatcctgacacgagcacacgagcgggagttcggatcggtcgacgacgagaacaagcctatttggatgcacgccgaagagagagaagaatgcaagggaaagcagaaggatggtacttcctttggcgaatacggggggtggtacaaagcatgtaaggttgacagtccaaccgtaactacgactctcaagaatctgggagccttgtacagacgccaggggaagttcgaggccgctgagaccctagaggaagctgcgatgcgctcccggaagcaggggctggacaatgtgcacaaacagcgggtcgcagaggtactcaatgatcctgagaatatggaaaagagaagatccagggaaagcctcaatgtggatgttgtgaaatatgaatctggtcctgatggcggtgaggagatgaagagagcgagtagcctcaacgtactgaatgttggcggcaaggccgctgaggaccggtttcaggaacggaacaactgcttggccgactcccgcgctctttctgcgagtcatacagacttagcgcactag

SEQ ID NO: 192520 - DNA, 1857 bp, synthetic construct
  misc_feature 1..1857: note = Description of Artificial Sequence: Synthetic coding sequence
  source 1..1857: mol_type = other DNA
atgtacgacaacatgagcaccatggtgtacatcaaggaggacaagctagaaaaactcacccaggatgagatcatatcaaagaccaaacaggtgattcagggactggaagccttgaaaaatgagcacaactcgatcctccagtccctgctggagacactcaagtgtctcaaaaaagatgatgagagcaatttggtcgaggaaaaatcgaacatgatcagaaaatctctggagatgctcgagctgggtctgagcgaggcgcaggtgatgatggcactatccaatcatctgaatgccgtggaatcagagaagcagaagctgagggcacaagtcagacgcctgtgtcaggaaaatcaatggttacgcgacgagctcgccaacacccagcagaagttacagaagtcagaacagtcagtggcacaactcgaagaggaaaaaaagcaccttgagtttatgaatcaattgaagaagtatgatgacgacatctcaccctctgaagataaggacacggattcgactaaggaaccgctggacgacctgtttcctaatgacgaagatgatcccggtcagggtatacagcagcagcactcatctgccgccgccgcggctcagcagggggggtacgaaatccccgcgcgactacggacccttcataatttggtaatacagtatgcttcccagggtcgttatgaggtggctgtgcctctgtgtaagcaagctctggaggatctcgaaaagaccagcggccacgaccatcccgatgttgccacaatgctcaacattcttgcgctggtgtacagagaccagaacaagtacaaggacgccgccaatttgctgaacgatgcgctagccatccgtgagaaaacactaggtaaggatcaccctgccgtggctgccactcttaacaatcttgcggtgttatacggtaagcgaggaaaatacaaggaagctgagcccctgtgcaagagggcacttgaaattcgggagaaagtcttaggtaaggatcaccctgacgtagcgaagcaacttaacaacttagccctactgtgtcagaatcagggtaagtacgaggaagtggagtactattatcagagggccttggagatctaccagacgaagctcgggcctgatgatcccaacgttgcaaagacgaaaaataatttagcatcctgttatttaaaacaagggaaattcaagcaagctgaaactctgtacaaggaaattctcacacgagctcacgagagagagttcggctctgtcgacgatgaaaataaaccaatctggatgcacgctgaagagagagaagagtgtaagggaaaacagaaggatgggacaagtttcggggagtatgggggctggtacaaggcatgtaaggtcgactctcctacagtgaccaccaccttgaagaatctgggggcactctaccgcagacaggggaagtttgaggctgccgagactctcgaggaagctgccatgcgctctaggaaacaagggctagataacgtgcataaacagcgcgtggccgaagttctcaatgatccagagaatatggaaaagagacgttccagggaaagtctgaatgtcgacgtagtaaagtacgagagcggacccgatggcggagaagaagtttcaatgagcgtggaatggaatggcgacgggaccgggtcgctcaagagaagtggaagtttcagcaagttaagggcatcaatcagacggtcctccgagaaactggtgcgtaaactgaaaggcgggagctctcgcgaatccgagcctaaaaaccccggggcaagcctggccgagccgttgtttgtggaaaatgattcgtccagctccgggttagaagatgcgacagccaattag

SEQ ID NO: 192521 - DNA, 1683 bp, synthetic construct
  misc_feature 1..1683: note = Description of Artificial Sequence: Synthetic coding sequence
  source 1..1683: mol_type = other DNA
atgtacgacaacatgagcaccatggtgtacatcaaggaggacaagctggaaaagttaacacaggacgaaattatttcaaaaaccaagcaggtaattcaaggccttgaagccctgaagaacgaacacaactctatcctgcagagcctcctggagaccctcaaatgcctgaagaaggacgacgagtccaacctcgtggaagaaaaaagcaatatgatccgaaaatcactggaaatgctagagcttgggctctcagaagcccaggtaatgatggccctctctaatcacttgaatgctgttgagtctgagaagcaaaaactgcgggcacaggtgcggcgactctgtcaggagaatcagtggttgagagatgaactggctaacacgcagcaaaagctccagaagagcgaacagagtgtggcccagctcgaggaggagaagaaacacctagaattcatgaatcagctcaagaagtatgacgacgacattagtccatcagaggacaaagatacagacagcactaaggagcctttggatgacttattccctaatgatgaggatgaccccggccagggcatacagcagcagcatagctccgccgctgccgcggcacagcagggtggatatgagattcccgcccgcctgaggaccctgcataatctcgtcatccaatatgcctcacagggacgatacgaggtggccgtgccactttgtaagcaggcactggaagacctcgagaaaacatcagggcacgaccaccctgatgtggccactatgctaaacatcctggcactggtgtaccgggatcagaacaaatataaggacgccgcaaacctgctcaatgacgccctggctattcgcgaaaaaactctcggcaaggaccacccggccgtcgccgctactctgaataatctggcagtcttgtatgggaaacgcggcaagtacaaggaggcagagcccttgtgcaagagggcattagaaattcgggaaaaggtgctaggcaaagaccaccctgacgttgcaaagcagctgaacaacctggcgctcctgtgccagaatcagggtaaatacgaagaggtcgagtactactatcaacgagcactggaaatctaccagactaagctcggcccagatgatccaaatgtggctaagaccaaaaataatcttgcttcttgttatctgaagcagggaaaattcaaacaagccgagacactgtacaaggaaatactaactagggcccacgagcgcgaatttggatccgtcgacgacgaaaacaagccaatttggatgcatgctgaagaacgggaagagtgcaaagggaagcagaaggatggcacctcctttggagagtatggtggatggtataaagcctgtaaagtcgactccccaacagttaccaccacactgaaaaatttgggggcactgtaccgcaggcaggggaaattcgaagccgccgaaacccttgaggaggccgctatgcgaagtaggaagcaagggctagataatgtgcacaagcagcgcgtggccgaggttctcaacgatcctgaaaacatggagaaacggcgaagtcgtgaatcgctgaacgtcgacgtggttaagtacgaatccggacccgatggcggagaggaggtgtccatgagtgtggagtggaacggtatgagaaaaatgaagcttggcctggtgaactag

SEQ ID NO: 192522 - DNA, 396 bp, synthetic construct
  misc_feature 1..396: note = Description of Artificial Sequence: Synthetic coding sequence
  source 1..396: mol_type = other DNA
tgagagaacaagcccatctggatgcacgccgaggagcgggaggagtgcaagggcaagcagaaggacgggactagttttggtgaatatgggggatggtataaggcgtgcaaagtcgactcacctaccgtgacaacaacgctgaaaaacttaggagctttatacaggcgccaaggcaagtttgaagccgccgagactctggaggaggccgcaatgaggagtcgcaagcaggggttagacaatgtgcacaaacaaagggtagcggaagtgctcaacgatcccgagaatatggagaagcggaggtccagagagagcctgaacgttgatgttgtcaaatatgagtccggccctgacggcggagaagagatgcgtaaaatgaagctgggactggtcaactag

SEQ ID NO: 192523 - DNA, 1893 bp, synthetic construct
  misc_feature 1..1893: note = Description of Artificial Sequence: Synthetic coding sequence
  source 1..1893: mol_type = other DNA
atgtacgacaacatgagcaccatggtgtacatcaaggaggacaagctggagaaactgacacaggacgaaatcattagtaagaccaaacaggtaatccaggggcttgaggcactgaagaatgaacacaacagcattctgcaaagtctcctagagactcttaaatgcctaaagaaggatgacgaatcaaacctcgtggaagagaagagcaatatgattaggaagtctttggaaatgctggagctcgggctcagcgaggcacaggtcatgatggctctcagcaaccatttgaacgcagttgagagcgagaaacaaaagttacgagcgcaagtccgccggctttgccaggagaatcagtggcttagagatgagcttgctaacacacagcaaaagctgcaaaaatctgagcagtctgtcgcccagcttgaggaggagaagaagcatctggagttcatgaaccagctgaagaaatacgatgatgacatatctcctagtgaggataaggatacagattcaacaaaagagcccctcgatgatctgtttcctaacgatgaagatgaccctggacagggtatacagcagcagcattcatcggcagccgcagcagctcaacagggcgggtatgagatccctgcccgtttacggaccttgcacaatttggtaatccaatatgctagccagggtagatatgaggttgccgtgcccctctgcaagcaggccctcgaagatttggagaaaacatccggacatgatcacccagatgtggctactatgcttaacattctggccctagtctatagggaccaaaacaagtacaaggatgcggccaatcttctgaatgatgctctggccattagggagaagaccctcggtaaagaccaccctgctgtggccgccacactcaacaatctggctgtattgtacggaaaacgggggaagtataaggaggcagaacctttgtgcaagcgggctctggaaatccgcgagaaagtcctgggaaaagaccaccctgacgttgccaaacagcttaacaatctggctctgttgtgccagaaccagggaaagtacgaagaagtcgagtattattaccagagagccctggagatttatcaaaccaagctgggtcctgacgacccaaatgtggccaaaacaaaaaacaatttggcaagctgttacctgaaacagggaaagtttaagcaggccgagactttgtacaaggagattttaacacgcgcccatgaacgagaatttggctcggtggacgacgagaataagcctatctggatgcacgccgaagagcgcgaggagtgcaagggcaagcagaaggacggaacatcatttggtgagtacgggggttggtacaaagcgtgtaaggtcgattccccaactgtaaccaccactctgaagaatcttggtgcactttacagacgccaggggaagttcgaggctgctgaaactctggaggaggccgctatgcggtctcgcaagcagggactggataacgtgcacaaacagagggtagctgaggttctcaatgatcctgagaacatggagaagcgaaggtcgcgggaaagtctgaacgtcgacgttgtcaaatacgaatctggcccagacggaggggaagaagatggcacgggctctctgaagagatctggatccttttcaaagctacgggcttctatccggagatcaagcgagaaattggtgcgcaaactgaagggcggcagcagtagggaatctgaacctaaaaaccccgggatgaaacgtgctagctctctcaacgttcttaatgtgggcggcaaagctgctgaggaccgcttccagggagtgtccggcagggcctcattctgtgggaagcgccagcaacagcagtggcccggccgtcgtcatcgctag

SEQ ID NO: 192524 - DNA, 453 bp, synthetic construct
  misc_feature 1..453: note = Description of Artificial Sequence: Synthetic coding sequence
  source 1..453: mol_type = other DNA
atgtacgacaacatgagcaccatggtgtacatcaaggaggacaagcttgaaaagctcacacaggacgagatcatctctaagacaaaacaggtcattcaggggctggaggcgctgaaaaacgagcacaactctatactccagtctctcctggaaacccttaaatgcctgaaaaaggacgatgagtctaatctcgtggaagaaaaatctaacatgatacgaaagtctctggaaatgttggaacttgggctttccgaggcccaggttatgatggcgctctcaaatcacctcaacgccgttgagtcagagaaacagaaactgcgcgcacaggtgaggcgcctttgccaagagaaccagtggctgcgggatgagctggcgaacactcagcagaagcttcagaagagcgaacagagcgtcgcacagctggaagaggaaaagaaacacctggaattctag

SEQ ID NO: 192525 - DNA, 1695 bp, synthetic construct
  misc_feature 1..1695: note = Description of Artificial Sequence: Synthetic coding sequence
  source 1..1695: mol_type = other DNA
atgtacgacaacatgagcaccatggtgtacatcaaggaggacaagctggagaagcttacacaggacgaaattatttcaaaaacaaagcaggtgatccaagggctggaagctctcaagaacgaacataattccatcctccagtctctcctggagactttgaaatgtctgaaaaaagacgatgagtctaacttggtcgaggaaaaatcaaatatgatccgcaagtccctggagatgttggaacttggcttaagcgaagctcaggtgatgatggcattgagcaaccacctgaatgcggtggaaagtgagaagcagaaattgagggctcaagtgaggcggctctgtcaggaaaaccaatggctgcgagatgagttagcaaatacccaacagaagttgcagaagtcagagcagtccgtggcccagttagaggaagagaaaaaacaccttgagttcatgaatcagctcaagaagtatgatgacgatatatccccaagcgaagataaagacacagattctaccaaagaaccattggatgatttgttccccaatgatgaagatgacccgggacaggggatccagcagcaacactcatctgctgccgctgcagcccagcagggagggtatgagataccggctaggctgcgcacacttcacaaccttgtgattcagtatgcaagccaaggcaggtacgaggtggcagttcccttgtgcaagcaggcccttgaagatctggaaaaaacgagcggtcatgaccacccagacgtggcaactatgctcaatatccttgctctggtgtacagggatcagaacaagtataaagacgcagcaaatctcctgaatgatgcactcgcgataagagagaagacattgggaaaggaccaccccgccgtagccgcaaccctgaataatttggctgtattgtacggaaagagaggaaaatataaagaggccgaacctctctgcaagagagctcttgagatccgcgaaaaagtcctgggcaaggaccaccccgatgtggccaaacagctaaataacctggccttactgtgccaaaaccaaggcaagtacgaggaggtggaatactattaccaacgtgccctggagatttatcagacgaagctagggcctgacgaccccaatgttgccaaaactaagaacaacctagcatcctgctacctgaagcaaggtaagttcaagcaggctgagacactttacaaggagattctcacccgagctcacgaaagagagttcggcagtgtggacgacgagaacaagcccatttggatgcatgctgaggagagagaagagtgcaaaggtaagcagaaggacggaaccagtttcggggagtacggaggctggtacaaagcatgcaaagtcgactcccctaccgtgacaactaccctgaagaatttgggggcactgtatagaagacaggggaaattcgaagccgctgaaacattagaggaggcagccatgagatcgcggaagcagggtttggataatgttcacaagcaacgtgtcgccgaggtcttgaatgatcccgagaatatggagaaaaggcggtcccgcgaaagtctgaatgttgatgtggtgaagtatgagtcaggcccggacgggggagaagagggagttagtggccgtgcgtccttctgcggaaagaggcagcagcaacagtggcctggtaggaggcaccgatag

SEQ ID NO: 192526 - DNA, 1869 bp, synthetic construct
  misc_feature 1..1869: note = Description of Artificial Sequence: Synthetic coding sequence
  source 1..1869: mol_type = other DNA
atggccatgatggtgttcccccgggaggagaagctgagccaggacgaaatcgtgctgggtactaaggccgtaatacagggactcgaaaccctgcgtggcgaacacagagccctcctcgctcctcttgtggcccctgaagcaggcgaggcagagccaggaagccaggaaaggtgcatattgctgagacgttccctcgaggcaatagagctcggactcggtgaggcacaggtgatcttggcgctctcgtcccatcttggcgccgtagaatctgagaagcagaaactacgagctcaagtccgaagacttgtgcaggaaaaccagtggctacgggaagagctggctggcactcagcagaagttgcagcgatcggagcaggctgtcgctcagctggaggaggaaaagcagcatctactattcatgtcccaaataagaaagttagacgaggatgccagtcctaatgaagaaaagggagacgtcccaaaggatacacttgacgatctttttcccaacgaggacgagcaatctcctgccccaagcccaggcgggggcgacgtgtccggacagcatggcgggtacgagattcccgccagattgcgcactctgcacaatctcgtgattcagtacgcctcccaggggcggtacgaagtcgcagttccgctgtgcaagcaggccctcgaggacctggagaagaccagcgggcatgatcaccccgacgtcgcaacaatgcttaacatcctggcattagtttaccgggaccagaacaagtataaagaagctgcacatttgctgaatgacgctctggccatacgtgaaaaaaccctagggaaggaccatccagctgtggcagcaacgctcaataatttagccgtcctttacggtaaacggggaaaatacaaggaagcagaacctttatgcaaaagagccttagaaattagagaaaaggttctcgggaaattccacccagacgttgccaaacaactgagtaacctggccctgctctgccaaaatcagggcaaggccgaagaagttgaatactattaccgtagagcgttggagatttacgctacccgattaggccctgacgaccctaacgtggccaagacaaagaataatctggccagctgctacctgaagcagggcaaatatcaggacgccgagaccctgtataaggagatcctgacccgcgctcacgagaaggaattcgggagtgtgaatggagacaacaaaccgatttggatgcacgcagaggagagggaagaatctaaagacaaaaggcgcgattccgccccatacggcgaatacggatcgtggtacaaggcttgcaaggtggacagccctaccgtcaacaccaccctccggagcctcggagcactttaccggcgccaggggaaattggaggctgcccataccctagaggattgtgcgagtcggaacagaaaacagggcctggaccctgcgtctcagacaaaggtcgtcgaactcttaaaagatgggtccggacgaagaggtgatcgccggtccagtagagatatggccggaggcgctgggcctcgtagcgagtctgacctggaggatgtgggccctactgctgagtggaacggtgacgggagcggcagcctgaggcgatctggatccttcggcaagctccgcgacgctctgcggcgatcttcagaaatgcttgtgaaaaaacttcaggggggaacaccacaggaacctcccaacccccgcatgaaacgggcaagctcactcaactttttaaataagagcgtagaggaacccactcaacctggtggcacagggttaagcgacagcagaacactgagttctagctccatggacctttcccgccgctccagtcttgtgggttag

SEQ ID NO: 192527 - DNA, 1638 bp, synthetic construct
  misc_feature 1..1638: note = Description of Artificial Sequence: Synthetic coding sequence
  source 1..1638: mol_type = other DNA
atggccatgatggtgttcccccgggaggagaagctgagccaggacgaaatcgtcctgggcaccaaggcggtcattcagggcctggaaaccctgagaggggaacatagggcacttctggcccccttagtagcccccgaagccggggaggcggagcctggcagccaggaacgttgcattttgctgcgacgatctctcgaagcaattgagctgggtctgggtgaagcccaggaggagaaaggcgatgtcccgaaagacaccctggatgacttattccctaacgaagacgagcagagtccagccccctcccccggcggtggagatgttagtggccagcatgggggatatgagattccggccagactccgaacactgcataacctagttatacagtacgcctctcaggggagatacgaggtcgctgtcccgctttgcaagcaggcattggaggacctggagaaaacctccggccacgatcaccccgatgtagccaccatgctcaatatcctggcgctcgtgtatcgggatcaaaacaaatacaaggaggccgcgcacctcctgaacgacgcccttgcgatcagggagaagactctggggaaggaccatcccgcagttgcagcaaccctgaataatctggcggtcttgtatggtaagagaggcaagtataaggaggcagagccattgtgtaagagggcattggagatccgcgaaaaggtccttgggaaatttcaccctgacgtggcgaagcagctgtctaatttggcactgctatgtcagaaccaggggaaagctgaggaagtcgagtactactatcgtcgtgcgctggagatctacgccacccgcctcggcccagacgatccaaatgtggcgaagacaaagaataatttggcctcctgctacctcaagcagggcaagtaccaggatgcagaaacactgtacaaggagatcctcacccgggcacatgagaaagagtttggttctgtaaatggtgacaataaacccatttggatgcatgcagaggagagggaggaatctaaggataaacgcagagacagcgctccttacggggaatacggttcatggtacaaagcgtgtaaggtggactcccctaccgtgaacaccacccttcgctcattgggggctctttacaggaggcaggggaagctagaggccgcccacacacttgaggattgtgccagcaggaacagaaagcagggccttgaccccgcctcccagactaaggtggtggaacttctcaaggacggaagtgggcgtcgcggtgacaggcggtcaagtcgagatatggcgggtggtgcagggccacgctccgaaagcgacctcgaggacgtcggccctacagctgaatggaacggcgatgggagcggttcccttaggcggtctggatcctttggtaagctgagagacgcacttcgcagatcatctgaaatgctcgtgaagaaactacagggaggaacccctcaggagcctccaaaccccagaatgaagagggcttcctccctcaatttcttaaataagagcgtcgaggagcctactcaaccaggaggaacagggcttagcgacagtcgtaccttgtcatccagctcaatggacctcagtcggcgatcatccctcgttggttag

SEQ ID NO: 192528 - DNA, 1869 bp, synthetic construct
  misc_feature 1..1869: note = Description of Artificial Sequence: Synthetic coding sequence
  source 1..1869: mol_type = other DNA
atggccatgatggtgttcccccgggaggagaagctgagccaggacgagatcgtgttaggtacaaaagctgtgatccaggggttagagaccctgcggggcgagcatagagcccttctggctcccctggtagcccctgaggctggtgaagctgaaccggggagtcaggaacggtgtatccttctgagacgcagtctggaggctatcgagctggggctcggcgaagcccaagtcatcctcgcccttagctctcacttgggggctgtagagtccgagaaacagaagctcagggcccaggttcgccgcctcgtgcaggagaatcagtggctccgggaagagcttgccgggacacagcaaaagctacagcggtccgagcaggctgttgctcagttagaggaggagaagcagcacctgctgttcatgtctcagattaggaaactggatgaggacgcctccccaaatgaggagaagggagacgtgccaaaggacacgctggacgacctttttcctaacgaggacgagcagtcgcccgctccatcacccggtggcggggacgttagcgggcagcacggcggatatgagatccctgcccgcttgcgaacactgcacaatctggtgatacagtatgctagtcagggaagatatgaagtggccgtgcctctgtgtaagcaggctctggaagacttggaaaaaacctcagggcacgatcaccccgatgtagcaactatgctgaacatccttgcactggtataccgagaccagaataaatataaggaggccgcccacctactcaacgacgcacttgcgatcagagaaaagacactagggaaggatcaccctgctgtagctgctactttgaacaacctggccgtgctgtacgggaagcgcggaaaatacaaagaagccgaacccctgtgtaaacgagctctggaaattcgagagaaggtactagggaagttccaccctgatgtggctaaacagctgtctaacctcgccttactctgtcaaaatcagggcaaggctgaagaggtagagtactattatcgaagagccctggagatctatgccaccagacttgggccggatgaccctaatgtggcaaagaccaaaaataacctcgcttcttgttatctgaaacaggggaagtatcaggatgcggagacgttatacaaggaaattcttactcgggcccacgagaaggaattcggctcggtgaacggcgataacaagcctatctggatgcatgctgaagaacgcgaggagtccaaggacaagaggcgggacagtgctccttacggggaatatggttcctggtataaggcatgtaaggtggatagccctaccgtaaatacgaccctccgcagcttgggggcactgtatagacgacagggcaaactggaagcagcacataccttggaggattgtgcttctcggaataggaagcagggacttgacccggctagccagacaaaagtcgtggagctactgaaggatgggtccggcaggaggggagatagacgtagcagcagggacatggccgggggagctggacctcggtctgagtcagatttggaggacgttggcccaactgccgagtggaacggtgatggtagcggctcgttgaggcggtcaggatcctttggcaaactgagggatgcacttagacgatcttcagaaatgcttgtgaagaaactccagggaggcactccacaggagcctccaaacccaagaatgaagagggctagttccctgaacttcttgaacaagtccgtggaagaaccaacacagcctggcggcacgggcctttcagactctagaactctctcttctagttcaatggatctgagtcgtcggtcttctctcgtgggctag

SEQ ID NO: 192529 - DNA, 1869 bp, synthetic construct
  misc_feature 1..1869: note = Description of Artificial Sequence: Synthetic coding sequence
  source 1..1869: mol_type = other DNA
atggccatgatggtgttcccccgggaggagaagctgagccaggacgaaattgtgctcggcaccaaagctgtgatccaaggattggagacactgcggggggaacatcgcgccctgttagcaccactagttgctcctgaagctggcgaggccgaacccggatcgcaggagcgttgtattctgttacgccggagcttggaagccattgagctcggtctgggcgaggcacaagtgattcttgctctgagcagtcaccttggcgccgtggaatctgagaagcagaagctgagagcccaggttaggcgtctcgtccaggagaaccaatggctgcgggaggagctggctggcacccagcaaaagctgcagaggagtgagcaggctgtcgcacagctggaggaggaaaagcagcacctactcttcatgtcccagatcagaaagttagatgaagacgcatctccgaatgaggaaaaaggtgacgtccccaaagacaccctggacgatctgttcccaaatgaggatgagcaatcaccagcccctagtccagggggcggggatgtaagcgggcagcacggcgggtacgaaatacctgctaggctgaggacactccataatctggtaattcagtatgccagtcaagggcggtatgaagtggctgtgcctctgtgcaaacaggcactggaggaccttgaaaagacatctggacacgaccaccccgatgtggccaccatgctaaacattctcgcgctggtttatagagaccagaataagtataaagaggctgcccatctcctgaatgacgcactggcaattcgcgagaaaacgttaggcaaggaccaccctgccgtggcagcgactctgaacaatttagctgtgctgtacggcaagcgcgggaagtataaagaggcggaacccctatgcaaacgcgccctcgagatccgggaaaaagtactggggaagttccatcctgatgtggccaagcagctgtctaatttggcgctgctttgccagaatcaaggaaaggccgaagaggtcgagtattactacagacgcgccctggagatctacgccaccaggctgggccccgacgatcccaacgtagccaaaacaaaaaacaatcttgcctcatgttacttgaagcaaggcaaataccaggatgctgaaaccctgtacaaggaaatccttacccgagctcacgagaaggaattcgggtcagtgaatggggacaacaagccgatttggatgcacgctgaagagagagaggagtctaaggataagcgtcgggattctgccccatatggagagtacggcagttggtacaaggcttgtaaggtcgactctcccactgtcaacaccaccctacggtccctcggcgccttatatcggcgccagggcaaacttgaagccgcacacaccctggaagactgtgcttcaaggaataggaagcagggtcttgatcccgcgagtcagaccaaggtggtagaattactgaaagatggctcagggcgacgcggagacagacgctccagcagggatatggcaggcggggccgggccccggtcagaaagtgatctggaggacgtagggcctactgccgagtggaacggggacggtagcggctctcttagaaggagtgggagcttcggaaaactgcgagacgctctgcggaggtcttccgagatgttggtgaaaaaacttcagggaggtaccccacaggaaccaccaaacccgaggatgaaacgggcttccagtctaaatttcctgaataagagcgtagaggaaccgactcaacctggcggaactggccttagcgactctcggaccttgagcagttcatctatggatctgtccaggcggagttcactcgtgggctag

SEQ ID NO: 192530 - DNA, 1638 bp, synthetic construct
  misc_feature 1..1638: note = Description of Artificial Sequence: Synthetic coding sequence
  source 1..1638: mol_type = other DNA
atggccatgatggtgttcccccgggaggagaagctgagccaggacgagatcgtgctgggtacgaaggccgttatccagggtctggagaccctgcggggagaacatcgggctctgctagcgcctcttgtcgctccagaggcaggggaggctgaacccggctcccaagagagatgtatactgctgcggcgaagccttgaagccatcgagcttgggctgggagaagcacaagaagagaaaggcgatgtaccaaaagacaccctggatgacttattcccaaatgaggatgaacagtcccccgcaccttcccctggtggaggcgatgtgtcaggccagcacggcggctacgaaatcccagcccgccttcggacactgcacaatctcgtgatccagtatgcatcgcaggggcggtacgaagtcgccgtgccactctgcaaacaggcattggaagatctggaaaaaaccagtggtcatgaccaccccgacgttgccacaatgttaaatatcctggcactggtatacagggaccagaataaatacaaggaagctgcacaccttcttaacgacgcccttgccattcgcgagaaaacccttggtaaggatcatcccgctgtggctgccacccttaacaacctggctgtgttatacggcaagaggggtaaatataaagaagcggagccgctgtgtaaacgggctctcgaaatccgcgagaaagtgcttggcaaatttcacccagacgtggccaagcagcttagcaacctcgcattgctctgtcagaaccagggaaaggccgaagaggtagaatattattatcgacgggccctggagatctacgcgacccgcctggggccagatgatccgaatgtcgctaaaacaaaaaacaacctagctagttgttacctaaagcagggcaagtaccaggatgccgaaacactctacaaggaaatcttaaccagggcccacgagaaggagttcggtagcgtgaacggcgacaataaacctatctggatgcacgctgaagagcgcgaggaaagcaaagataaaaggcgagactcagcaccatacggagagtacggctcttggtacaaggcctgtaaagtagatagtcctacagttaacactaccctgcgatcacttggggcattgtatcggcgccaagggaaacttgaggccgcgcatactcttgaagactgtgcttctaggaaccggaagcaggggttagatccggcaagtcaaaccaaggttgttgaactgctgaaggacggtagcggaagaaggggtgacagacgatcgtcaagagatatggctgggggagcaggaccaaggtccgagagtgacctagaggatgttggacctaccgcagagtggaacggggacggcagcggttcactccgacgctctggctcatttggtaagctccgagatgcactccgcagatcttcggaaatgctcgtgaaaaagcttcaaggaggtacacctcaggagccccctaacccaaggatgaaaagggcttcatctcttaactttttgaataaatccgttgaggaacctacccagccaggcgggacaggacttagcgactcaaggaccttgtcttcttcttctatggacctctctaggcgctcttcactggtggggtag

SEQ ID NO: 192531 - DNA, 501 bp, synthetic construct
  misc_feature 1..501: note = Description of Artificial Sequence: Synthetic coding sequence
  source 1..501: mol_type = other DNA
atggccatgatggtgttcccccgggaggagaagctgagccaggacgagatcgtgctggggacaaaagccgtgatacagggattagaaaccctccgaggcgagcacagagcactgctggcaccacttgtagctccagaggccggtgaagcggaaccaggaagccaggaacgatgcatactgctcagaaggtcccttgaagctattgaattgggactgggggaggcgcaggtcatactggccctgtcctcccacctcggagcggttgagtctgagaagcagaaactacgggcacaggtaaggcgtctggtgcaggaaaaccagtggctgagggaggagctggccgggacgcagcaaaagctgcagagaagtgagcaggccgtcgctcagcttgaggaggaaaaacagcacttactctttatgtcccagattcgcaagttggacgaggatgcatcgcctaatgaagagaagggtgacgtccccaaggacaccctagacgattag

SEQ ID NO: 192532 - DNA, 570 bp, synthetic construct
  misc_feature 1..570: note = Description of Artificial Sequence: Synthetic coding sequence
  source 1..570: mol_type = other DNA
atggccatgatggtgttcccccgggaggagaagctgagccaggacgagatcgtgctcggaacaaaagcggtgatccaggggctggagacactgcgaggggagcacagagccctactggcgccgttggttgccccagaagccggcgaggctgagccaggttcccaagaacgatgcatcctgcttcggcgttctttggaggctattgagctgggcctcggagaagcccaggaggagaagggcgatgtgcctaaagatactctcgacgatctttttcccaatgaggatgagcaaagcccagctcccagtccaggcggaggagatgtcagcggacaacacgggggctacgaaatccctgcccggttgcgcacactacacaacttggtgattcaatacgccagtcagggtaggtacgaggtcgccgtgccactctgtaagcaggccttggaagaccttgaaaagacgtctggacacgaccatcctgacgtcgccaccatgctgaacatccttgcactggtgtacagggaccagaacaaatacaaagaggctgcacatctactgaacgatgcctag

SEQ ID NO: 192533 - DNA, 516 bp, synthetic construct
  misc_feature 1..516: note = Description of Artificial Sequence: Synthetic coding sequence
  source 1..516: mol_type = other DNA
atggccatgatggtgttcccccgggaggagaagctgagccaggacgagatcgtcctagggaccaaggctgtcattcaaggactggaaacgctgaggggtgagcaccgggccctcctggccccccttgtggcgccagaagcgggcgaagcagagcctgggagccaggaaaggtgtatcttgctgcgacggtcactggaggccatagagctcggactgggcgaggctcaggttatcttggctttgagttcacatctgggcgctgtcgaatctgaaaaacaaaaactccgagcccaggtgcgacgcctggtccaggaaaatcagtggttacgggaagagctggccggtacacaacagaaactccagcgttccgagcaggccgtagcccaacttgaggaggagaagcagcacttgctgtttatgtctcagatccggaagctggatgaagatgcatctcctaacgaagaaaaaggagacgtccctaaggataccctcgacgacttgtttcccaatgaatag

SEQ ID NO: 192534 - DNA, 438 bp, synthetic construct
  misc_feature 1..438: note = Description of Artificial Sequence: Synthetic coding sequence
  source 1..438: mol_type = other DNA
atggccatgatggtgttcccccgggaggagaagctgagccaggacgagatcgtgctgggaaccaaggccgtgattcagggactggagacactccgaggagaacacagggctctgttggccccccttgtcgcaccagaagccggcgaggccgagccggggagtcaggaacgttgtatcttactgcgaaggagtttagaagccattgagttgggcctcggggaagcccaggtaattcttgccctcagctcccatcttggtgccgtcgaatccgagaagcagaagctgagggcccaggttaggcgacttgtccaagagaaccagtggctccgggaggaactcgcgggcacacagcagaaattacagagaagcgagcaggccgtggcccagcttgaagaggaaaaacagcacttacttttcatgagccagattagaaagtag

SEQ ID NO: 192535 - DNA, 318 bp, synthetic construct
  misc_feature 1..318: note = Description of Artificial Sequence: Synthetic coding sequence
  source 1..318: mol_type = other DNA
atggccatgatggtgttcccccgggaggagaagctgagccaggacgagatagtcctggggacaaaggccgtaatccagggactagaaacattgcgcggagagcatcgcgccctgttggcgccccttgtggcacccgaagcgggtgaagctgagccgggttcgcaggagcgatgtattctcttgcgccggtccctggaggcaatagagctgggcttgggggaggcgcaggtaatcctagctctcagtagtcatctgggggccgtagagtctgagaagcaaaaactgcgcgcccaggtgcgccggcttgttcaggagtag

SEQ ID NO: 192536 - DNA, 1515 bp, synthetic construct
  misc_feature 1..1515: note = Description of Artificial Sequence: Synthetic coding sequence
  source 1..1515: mol_type = other DNA
atgagcgtgcaggtggccgcccccggcagcgccggcctgggccccgagagactgagtcccgaggagcttgtccgccagactaggcaagtagtgcagggtctggaagccttgcgcgccgaacatcatggcttagccgggcatctggcagaggccctagcaggtcagggaccagctgccggacttgaaatgcttgaagaaaaacagcaggtcgtatcccactcactggaagcaatcgagctgggcctcggcgaggctcaagttctgttggcgctaagcgctcatgttggagcactggaagccgagaagcagaggttaaggagccaggcacgtcgcctcgctcaggaaaatgtttggctccgggaggaactcgaagagacacagcgcaggctccgagcttccgaagagagtgtggcccagcttgaggaggagaagcggcacctcgaatttctgggacagctgagacagtacgatccacccgccgaaagtcagcaaagtgagtctccaccaagacgagattctctcgccagcctgttcccctcggaggaggaggaaagaaagggcccagaggcagctggagcggcagccgctcagcagggaggttacgagattcctgcgagacttagaacactgcataacttggtgatccagtatgcaggtcaaggacgctacgaggtggccgtacctctgtgcaggcaggcccttgaggacctggagcggtcctccggtcactgtcatcccgatgtagcgaccatgcttaacattcttgcgctggtctaccgcgatcaaaataagtacaaggaagccacagaccttttgcacgacgccctgcagattagagaacagaccctgggtccagaacaccctgcagtggccgctaccctgaacaatttggccgtcctgtacgggaaacgggggagatatagagaggccgagccactgtgccagagagcgctggagattagagagaaggtgttgggggccgatcatcctgatgtagcgaagcagctaaataatctcgctctgctatgccaaaaccagggaaaatttgaggatgtagagcggcactacgcccgggccctttcaatatacgaggccctgggtgggccccacgatccgaacgtggccaagacaaagaataatctggcctcagcatacctcaagcagaacaagtatcagcaggccgaggagctgtataaggaaattctccacaaggaggatcttcctgccccgctcggagccccaaacacaggtactgccggtgacgctgagcaggcacttagacgatccagcagcctgtcaaaaattcgggaaagcatccgtcgggggagcgagaagctggtctcacgactcagaggcgaggccgccgctggagcagccgggatgaagcgcgccatgtctctgaacacacttaatgtagacgcgccccgggcccctggcactcagttcccatcatggcatctggacaaggcacctcggacactgtcagcctcaacgcaggatctgtcacctcattag

SEQ ID NO: 192537 - DNA, 1557 bp, synthetic construct
  misc_feature 1..1557: note = Description of Artificial Sequence: Synthetic coding sequence
  source 1..1557: mol_type = other DNA
atgatcccccagaccccccaccactgcagccccggcgccgccatgagcgtccaggtggccgctccaggatctgctggccttgggcccgagcgactgtcacccgaagaattggttcgacaaacacgtcaggttgtgcaggggctcgaggccctacgcgctgaacatcacggccttgccggccacctagctgaagccctggccggccaggggccagctgccgggctcgagatgttagaggaaaaacagcaagtggtgtcacacagtctggaggcaatcgaattggggctgggcgaggcccaggtgctccttgctcttagcgcccacgtaggtgcccttgaggccgaaaaacaacggctgagaagccaggccagaagactcgctcaggagaatgtgtggctgagagaagagctcgaggagactcagcgcaggctccgggccagtgaggaaagcgtagctcaacttgaagaggaaaagcgtcaccttgagtttctgggccagctgcggcagtatgatccaccagccgaatcccaacaatccgaatctcctcctagacgcgattctctcgctagcttattcccctccgaagaggaggagcgcaaaggcccggaggctgccggagcggccgctgcacagcaaggcggctacgaaattccagccaggttacgaactctgcacaacctggtgattcagtatgctggacagggccgttacgaggtcgccgtgcccctttgtcggcaggccttagaggatttagagcgatctagcggccactgccatcccgatgttgcgactatgttgaacatcctggctctggtctaccgcgaccaaaataagtataaagaggcaacagatctcctgcacgacgccctgcaaattcgggaacagactcttggccctgagcaccccgcagtagccgcaaccctgaacaacttggcggtgttgtacggcaagcgcgggagataccgggaagctgagcctctgtgccaaagagcgctagaaatcagagaaaaggtgctgggcgctgatcaccccgacgtcgccaagcagctgaacaacctggcccttctctgtcagaaccaaggaaagttcgaggacgtcgaaagacattatgcccgcgctctttctatctacgaagcccttggaggcccacacgatccaaatgtggccaagaccaagaataacctggcctcagcctacctcaagcagaacaaataccagcaggccgaagaactgtacaaggagatcttgcacaaagaggatcttcccgcacccctgggcgccccaaacacaggaacggcaggcgatgccgagcaggcgctccgccgttcatccagcctgagtaaaatccgcgaatccattcgtcgaggaagtgagaagctggtgtccaggctgagaggagaggctgctgctggagctgctgggatgaaacgcgccatgtcactgaacactctgaacgtggacgcgccccgcgctcccggtacacagtttcctagctggcatctcgacaaagcgccacgtacccttagcgcatctactcaagaccttagcccccactag

SEQ ID NO: 192538 - DNA, 2379 bp, synthetic construct
  misc_feature 1..2379: note = Description of Artificial Sequence: Synthetic coding sequence
  source 1..2379: mol_type = other DNA
atgcagggcgaggacgcccggtacctgaagcggaaggtgaagggcggaaacatcgacgtccacccttcagagaaggccttgatagtgcattacgaggtggaggccactatattgggcgaaatgggagatccaatgctaggggaacggaaggaatgccaaaaaatcatccgtctaaaaagcctgaatgctaacaccgacatcacttccctcgccagaaaagtagtcgaggagtgcaaattgatccacccatcaaaattgaacgaggtcgaacagctcctgtattatctgcaaaacaggcgagatagcctgtccggaaaagagaagaaagagaaatcatcaaaacccaaagaccctccaccctttgagggaatggaaattgatgaggtggctaacatcaacgacatggatgagtacatagaacttctttacgaagacattcccgacaaagtgagggggagtgccttgatcctgcaactggctcggaatcccgacaacctggaagaacttctactgaatgaaacagcactgggagccttggcccgcgtgttaagagaggactggaaacagtcggttgagctcgcaacaaacatcatttacatattcttctgcttctcgtcttttagccagtttcacggcctcattacacactacaaaatcggggcattgtgtatgaacataatcgaccatgagctcaagcggcatgaactctggcaagaggagctgagtaagaaaaaaaaggcagtcgatgaagatccagagaatcagaccttacggaaggattacgagaagacgttcaagaagtatcagggacttgtggttaaacaggaacagctccttcgcgtcgccctctacctgttgttgaacttggccgaggacacccggactgagttgaaaatgcgcaacaaaaacattgtccatatgctcgtgaaagctctggatagagataatttcgaactgctgattctcgtggtgagcttcctcaagaagttgtccattttcatggaaaacaagaatgacatggtggaaatggatatagtggaaaaactggtgaaaatgataccatgtgaacacgaggacctcctgaacatcaccctgaggctgttacttaatctttccttcgataccggcctgcgcaataaaatggtgcaagtgggtttactgcccaagctcacagccctcctgggtaatgataattataagcaaatcgccatgtgcgtactgtaccacatttcaatggacgatcgctttaagtctatgttcgcgtacaccgattgcataccgcagctgatgaaaatgttgtttgaatgctccgacgaacgaatcgaccttgagttaattagtttttgcatcaaccttgccgccaataagcgaaacgtccaactgatctgtgaaggaaatggactcaaaatgctgatgaaaagagcgctgaaatttaaggatcccttgctgatgaaaatgatccggaacatatctcagcatgatggcccgactaagaatctttttatcgactacgtgggagacctggctgctcagatctccaacgacgaggaagaggagtttgtcatcgagtgcttaggaacactcgctaatttaaccattcctgatttggattgggagctggtactgaaggagtacaagctggtgccctacctgaaagataagcttaaacccggagcggctgaggacgatttggtgttggaggtcgtcataatgatcggtaccgtgtcgatggacgatagttgcgcagcactgcttgccaaatccggaataatacctgctctgatcgagctgctgaacgcacagcaagaggacgatgagttcgtgtgccagattatctatgtgttctaccagatggttttccaccaggcgacccgcgacgtgatcataaaggaaacccaagccccagcatatttaattgatctgatgcacgacaagaacaacgagatacggaaagtgtgtgataataccttagacatcattgccgaatatgatgaagagtgggccaagaaaatacaaagcgagaaatttcggtggcacaacagccaatggctggagatggtcgagagccgccaaatggacgaaagtgaacaatacctgtacggggacgacagaatcgagccgtacattcacgaaggcgatattcttgaacgcccggacttgttttataatagcgatggcctcatcgctagcgagggtgccatcagccccgattttttcaacgactaccacctgcaaaacggagacgtagttggacaacacagcttcccgggcagcctgggaatggacgggttcggacagcccgtcgggatcctgggtaggccggcgacagcttacggttttaggccagacgaaccttattattacgggtatggaagttag

SEQ ID NO: 192539 - DNA, 2259 bp, synthetic construct
  misc_feature 1..2259: note = Description of Artificial Sequence: Synthetic coding sequence
  source 1..2259: mol_type = other DNA
atgggcgaccccatgctgggcgagcggaaggagtgccagaagatcatcaggctcaaaagcctcaacgcaaataccgatattacttccttggctcgtaaggtggtcgaggagtgtaaactgatccatccatctaagctgaatgaagtggagcaattgctgtattacctgcagaatcgacgggattctctctctgggaaggaaaaaaaagaaaagtcctccaagcccaaagatccaccccccttcgagggcatggagatcgacgaggtcgccaatattaacgatatggatgagtacatcgaacttttgtacgaagacatcccagacaaggtacgcggctcagcgctaattctgcagttggccaggaacccagacaacctggaagagctcttgctcaacgaaacagcactaggggccctggcaagagttctgagggaggactggaaacagtcagtggaattggccacaaacataatttacatcttcttctgtttctcttcattctctcagttccatggattgattacacactataagatcggtgcgctatgcatgaatatcatcgaccacgagctcaagaggcacgagctgtggcaggaggaactttctaagaaaaagaaggcagtagacgaggatcctgaaaatcaaaccttaagaaaagattacgagaaaactttcaagaagtatcagggcttagtggtgaaacaggaacagctcctaagagtggcactgtacttactgttgaacctggctgaagacacacgaacagagctcaagatgaggaataagaacatcgtccacatgcttgttaaggctctcgaccgggacaatttcgaacttcttatccttgttgtctcgtttctcaagaaactgagcatattcatggaaaacaaaaatgacatggtcgaaatggacatcgtggagaagctcgtaaagatgataccttgcgagcacgaggacctcttgaatatcacgttgaggttgcttcttaacttgtccttcgacaccggcctccggaataaaatggtgcaagttggacttctgcctaagctgacagccctgttgggaaacgacaactacaagcagattgccatgtgcgtgctctaccatatcagcatggatgatagattcaaatcgatgtttgcttacacagactgcatccctcagcttatgaagatgctgtttgaatgcagcgacgaacgcatagatctagagcttataagcttctgcattaacctggctgcaaacaaacggaatgtccagcttatatgtgaaggaaacggcctgaagatgttgatgaagagggctttgaagttcaaagaccccctgctcatgaaaatgatccgcaacatttctcagcatgatggaccgactaagaacctgttcattgattacgtgggggatctggccgcccagatctccaatgatgaggaggaagagtttgtgattgaatgcctgggtaccttggccaatcttacaattccggatctggactgggagctcgtgctgaaggagtacaagctcgttccatacctcaaggacaaacttaaaccaggcgcagcagaggacgaccttgtgttggaagtagtgataatgatcggtactgtgagcatggatgattcctgcgcagccctcctggccaaaagtgggataattcctgcacttatagagctgttgaatgcccaacaggaggacgacgaatttgtgtgccagataatttacgtcttctatcagatggtttttcaccaggccacgcgcgatgtgatcattaaggagacgcaggcacctgcctatctcattgacctgatgcatgataaaaacaatgagatacgaaaggtctgtgacaacaccctggatatcatcgcagaatacgatgaggaatgggcaaaaaagatccaatctgagaagtttaggtggcataactcccaatggctggagatggttgagtcacggcagatggatgaaagcgagcagtatctctacggcgacgatcgcatcgaaccctatatccatgagggggacatactggaaaggccggatctgttctacaattctgatggacttattgcgtccgagggcgccatctcacccgacttttttaatgattatcacctgcaaaacggcgacgtcgtcgggcagcactcttttccgggatctctcggcatggacggcttcggccaaccagtgggcatccttgggcgacccgctaccgcgtacggcttccggcctgacgagccttactactacgggtatggtagctag

SEQ ID NO: 192540 - DNA, 2247 bp, synthetic construct
  misc_feature 1..2247: note = Description of Artificial Sequence: Synthetic coding sequence
  source 1..2247: mol_type = other DNA
atgcagggcgaggacgcccggtacctgaagagcatccggctgaagtcgcttaacgccaacaccgatatcacttccctggcaaggaaagtggtggaagagtgcaagctgatccacccaagtaagctcaacgaagtcgagcagctgctctactatctgcaaaatcgcagagacagtcttagcggaaaagaaaagaaggaaaagagttctaaacctaaggaccccccccccttcgagggaatggagatcgatgaagttgcaaacatcaacgacatggatgagtacattgaactgctctatgaggatattccagataaagtgagaggtagcgcactcatattacagctggctaggaacccagataaccttgaggagctgctgttgaatgagacagcgctgggggcattggccagagtgctgagggaagattggaaacagagcgtggaactagccacgaatatcatttacatcttcttctgcttctcctccttctcccagttccatggactgataacccattacaagatcggcgctctctgcatgaacatcattgatcacgagctgaagcggcacgagctgtggcaggaagaactgtccaagaagaagaaggctgtagacgaggaccccgagaatcagactctgcggaaggactatgagaaaacattcaaaaagtatcaggggttagtggtgaaacaggagcagctcctgagggtggctctctacctgcttttgaacctggccgaggacacacgaacggagctcaaaatgagaaacaaaaacatcgtacacatgctagtgaaagctctggatcgtgataatttcgagctgctcatcctcgtggttagtttcctgaaaaagttgagcatctttatggagaataaaaacgacatggtagaaatggatattgttgaaaagctggtgaaaatgatcccatgcgagcatgaggacctattgaatatcacactcagactgctgcttaacctgtcttttgacacaggtctccggaacaaaatggtccaagttgggttactgccaaagctcacggccctgctgggaaacgataattacaagcagattgccatgtgcgtcctgtaccacatttcaatggacgatcgtttcaagtcaatgtttgcctatacagactgcataccccagctcatgaagatgctgttcgagtgtagcgacgaaagaatagacctggagcttatctccttctgcattaacctggctgcgaataagcggaacgtccagttaatctgtgaggggaatggcctgaagatgctgatgaagcgggccctgaagtttaaagaccccctccttatgaagatgatcagaaatatatcacagcatgatggccccacaaaaaatctgttcatcgattatgttggggatctggcggcgcaaatctctaacgacgaggaggaggagtttgttatcgagtgtctcgggaccctggcaaacttgacgattcctgacctggactgggagttagtacttaaggagtataagcttgtgccttacctgaaagataagctgaaacccggcgctgccgaagatgacctagtgttggaggtggtgataatgataggcaccgtgtcaatggatgactcatgtgcggccctgctggcgaagagcgggattatcccagctctgattgagctcctgaacgcccagcaggaggacgatgagttcgtctgccaaatcatctatgttttttatcagatggtcttccatcaggctactagagatgttattatcaaggagacacaggctccagcgtatcttatcgacctcatgcacgataagaataatgagatccgcaaagtgtgcgacaatacactggacatcatcgcggagtacgatgaggagtgggcgaagaagattcagtccgagaaatttaggtggcacaatagccagtggctcgaaatggttgagtctaggcaaatggacgaatctgagcagtatctctacggagacgatcgcattgagccatacattcacgagggagatatcctggagcggcccgatctcttttataattctgatggtctgattgcttcggagggcgcaatcagcccggatttctttaacgactaccacctccagaacggggacgtggttggccagcacagcttcccgggaagtctcggcatggatgggtttggccaaccagtcggaatcttgggcagaccggccacagcctacggcttccggccagacgagccttactattatgggtatggcagttag

SEQ ID NO: 192541 - DNA, 2145 bp, synthetic construct
  misc_feature 1..2145: note = Description of Artificial Sequence: Synthetic coding sequence
  source 1..2145: mol_type = other DNA
atgagcatcgccctgggcaacacctaccggcggagcctgagcgacagtgaaacagtgagcgttctacaagcctcgctgtgcgaggaaaaaaaggaaaagagtagtaaacctaaggatccccctccttttgaaggtatggagatagacgaggtggcaaatattaatgacatggacgaatatatcgaactgctctatgaggacatccccgacaaagtcagagggtccgcacttatcctgcaattggccaggaatcccgacaacctggaggagctgttgctcaacgagacagcactgggggcattagcgagagtgctcagagaagactggaaacagtccgtagaactggccacgaacatcatctatatcttcttctgtttttcttcattttcacagttccacggcttgatcacccattacaagattggagccttgtgtatgaacatcatcgatcatgaactgaagcgtcacgagctgtggcaagaagaactgtctaagaaaaagaaggccgtggacgaagaccctgaaaaccaaacactgcgcaaggattatgaaaaaacctttaaaaagtaccagggcctcgtagttaaacaagagcagctactccgcgttgccctgtacctgcttctaaacctggcggaggatactcggaccgaacttaaaatgcgaaacaagaacatcgtgcatatgctcgtgaaagcattggaccgggataactttgagctcctgatattagtggtgtcattcctaaagaagttgagtatttttatggagaataagaatgatatggtcgaaatggacattgtggagaaactggttaaaatgatcccttgcgagcatgaggatctgctgaacatcacgctgcgcctgttgctcaatctttcgttcgatactggcctcaggaataaaatggttcaggtgggcctcttacctaagctgaccgctctgcttggcaacgataactacaagcaaatagctatgtgtgtactttatcatatttcaatggacgatagatttaaaagcatgttcgcgtatactgactgtattccccagctgatgaagatgctctttgaatgctctgatgaaaggattgacctggaattgatttcattctgcattaacctagcagcaaataaacgcaatgtacagcttatctgcgagggtaacgggctgaaaatgcttatgaaacgggccctgaaattcaaggatcctcttctgatgaaaatgatccgtaacatcagccagcatgacggtcccactaaaaacctatttattgactatgtgggtgatctcgccgcacagatttccaatgatgaagaagaggagttcgtcatcgagtgtctaggaaccctagcaaatctgacaattcctgatttggattgggagttggtactgaaggagtacaagctggtcccatacttgaaagataaattaaaaccgggcgcggccgaggatgatctggtgctggaggtggttatcatgatcggcaccgttagtatggatgattcatgcgcagccctattagcaaagagtggcattatcccagctctaatagagctgctaaacgctcagcaggaggacgatgaattcgtctgccaaataatttatgtgttttatcagatggtgttccaccaggcgacacgcgacgtcattattaaagagactcaggccccggcctacctgatcgaccttatgcacgacaagaataatgagatccggaaagtgtgcgataatacgctcgatattattgccgaatacgacgaggaatgggccaaaaagatccagtcggagaaatttagatggcacaactcacaatggctggagatggtcgagtccagacaaatggacgagagcgaacagtatctctacggcgatgacagaatagaaccttatattcatgaaggcgacatacttgagcggcccgatttgttctataactctgacgggctgatcgccagtgagggagccatctcccccgacttttttaacgactatcacctccagaacggcgacgtggtgggccagcatagcttcccaggatcacttggaatggacggatttggccagcccgtcggaatcctgggccgtcctgccaccgcatacggttttcgcccagatgagccctactactatggctacggctcatag

SEQ ID NO: 192542 - DNA, 1485 bp, synthetic construct
  misc_feature 1..1485: note = Description of Artificial Sequence: Synthetic coding sequence
  source 1..1485: mol_type = other DNA
atgcggaacaagaacatcgtgcacatgctggtgaaggccctggaccgggacaatttcgaactccttattctcgttgtgtcttttctgaagaaactctccatttttatggagaacaaaaacgatatggtggagatggatattgttgaaaaattagttaagatgatcccatgcgaacacgaagatctgctgaatatcactctgcgcctgctactgaacttatccttcgatactggcctgcgcaataaaatggtgcaggtaggactcctccctaaattgaccgccctactggggaatgacaactataagcagattgcaatgtgcgtcttgtaccatatttccatggacgatcgtttcaaaagtatgtttgcttacaccgattgtataccacagctcatgaaaatgctgttcgaatgttccgacgaacggatcgacctagagctcatctctttctgcataaatctggcggccaataaacgcaatgtgcaactaatttgcgagggaaatggcctgaaaatgctcatgaagagggcacttaagttcaaagatcctttgctaatgaagatgatccggaatatcagccagcatgacgggcctaccaagaacttatttatagactacgttggagacctggccgcacagatatccaatgacgaggaggaggagtttgtgatcgagtgcctcggaaccctggccaacctgaccattccagacctggactgggaactggtgttgaaggagtacaagttagtaccctatctgaaggacaaattaaaaccaggcgctgccgaagacgacttagtgctagaagtggtaatcatgattggtacagtgagcatggacgattcctgtgccgccctgctggctaaatccggcatcattcctgcgttgatagaactgcttaacgcccaacaggaggatgacgaatttgtgtgtcagataatatatgtgttttaccagatggtcttccatcaggctacacgtgatgtcataatcaaggaaacacaggccccggcctacctgatcgacctcatgcacgacaagaataacgaaatacgaaaggtgtgcgataacaccttagacatcattgccgagtacgacgaggagtgggctaaaaaaatacaaagcgaaaaatttagatggcacaattctcagtggctagagatggtggaatcccgtcagatggatgagagtgagcagtacctatacggagatgaccgaattgagccatatattcatgaaggcgatatcctggagcgccctgatctgttttataactccgatgggctgattgctagtgagggtgccatttctccagatttttttaacgactaccatctccaaaacggtgatgtggtggggcagcatagttttccggggagcctcggaatggatggcttcgggcagcccgtggggatcttagggcgacctgccaccgcttacggcttcaggcctgatgaaccgtattactatgggtatggaagctag

SEQ ID NO: 192543 - DNA, 1935 bp, synthetic construct
  misc_feature 1..1935: note = Description of Artificial Sequence: Synthetic coding sequence
  source 1..1935: mol_type = other DNA
atgaagctgatcaccatcctgttcctgtgcagccggctgctgctgtcccttacacaggaatcacagagcgaggagatcgattgcaatgacaaagacctgtttaaagctgtagatgccgcattaaaaaagtataactcgcagaaccagtccaataaccagttcgtgctgtacagaatcaccgaagccactaagacagtgggttcggacacgttctattccttcaaatacgagatcaaggaaggagattgtcctgtgcaatctggaaagacatggcaggattgtgagtacaaggatgcagcaaaggcagcgacgggcgagtgtaccgccacagtgggcaagaggtcatccaccaaattcagcgtggctacccaaacgtgccaaatcacaccagctgaggggcccgtagtgacagcacaatacgactgcttaggctgcgtccaccctatttcgacacagagccccgacctcgaaccaatactgcggcacgggatccaatacttcaataacaatacccagcatagcagcctgtttatgctcaatgaggtgaagagagcacagcgccaagtggtcgctggtttaaacttccgtataacctacagcatcgttcagactaattgcagcaaggaaaacttcctctttctcacgcctgattgcaaatcactctggaacggggacacaggtgagtgtactgacaacgcctatatagatatacagctgcgcattgctagcttttcccaaaattgcgacatataccctggcaaagacttcgtgcagcccccaactaagatttgtgtgggctgtccacgggatatacccaccaattccccagagctggaggaaacgctgacccacaccattaccaagctgaatgcggagaacaacgctaccttttactttaagatcgacaacgtgaaaaaggccagggtgcaggttgtcgcaggcaaaaaatacttcatcgattttgtggcccgagagactacttgctctaaggaatcaaacgaggaactcaccgaatcctgtgagactaagaaactgggtcagagcctggactgtaacgctgaggtttacgtggttccttgggagaaaaaaatctacccaaccgttaattgccagcccctcggaatgatctccttgatgaagcgcccccccggatttagcccttttaggagcagtagaataggggagattaaggaagagacaaccgtaagtcccccacacacatccatggctccggctcaagacgaggaacgggactctgggaaagaacaagggcatactagacggcacgactggggtcatgaaaagcagcgtaagcacaacctgggacacggtcataagcacgagcgcgatcagggccacggccaccaaagaggtcacggactcgggcacgggcacgagcagcaacacggactgggacatgggcacaaattcaaactggacgatgatctagagcaccagggcggtcatgtcctggatcacggtcacaaacacaagcacggccacggacacggcaaacacaagaataagggaaagaaaaacggaaagcataacggatggaagactgaacatctagcctcatcatctgaagattcgacaaccccctcagctcagactcaggagaagaccgaaggccccactccaatcccaagcctcgccaaacctggcgtcacagtgacattcagcgatttccaggacagcgacctgatcgccaccatgatgcccccgatctcccctgcaccgatccagtctgacgacgattggattcccgacattcagattgaccctaatggtctctcttttaacccgatcagcgactttcctgatacaaccagccctaagtgtcctgggcggccatggaaatcagtttccgaaatcaatcccacaacccaaatgaaagagtcatactattttgacctcacggacggcttatcatag

SEQ ID NO: 192544 - DNA, 1284 bp, synthetic construct
  misc_feature 1..1284: note = Description of Artificial Sequence: Synthetic coding sequence
  source 1..1284: mol_type = other DNA
atgaagctgatcaccatcctgttcctgtgcagccggctgctgctgtccctgacacaggagtctcaatcagaggagattgattgcaacgataaggacctctttaaagctgtggacgccgcgttgaagaagtataattcccaaaaccagtccaacaaccagttcgtgttgtataggatcaccgaggcaaccaagacagtggggagcgacacattttattcattcaaatacgagatcaaggaaggggattgtcccgttcagtccggaaagacttggcaggactgtgaatacaaggatgccgctaaagcggccaccggcgagtgcacagccacggtcggcaaacgtagcagcacaaagtttagtgtggccactcagacctgtcaaatcacgcctgcggagggccccgtcgtgacggcccagtacgattgcttgggatgcgtccatccaattagtacgcagagtcctgatctcgaaccaatcctgcggcacggcatccagtattttaataacaatacacagcacagttctctctttatgctgaatgaggttaagcgagcccaaaggcaggttgtagccggcctgaactttcgtatcacatatagcatcgttcagacaaactgctccaaggaaaactttctcttcctgacgcctgactgcaagtctttgtggaatggtgataccggcgagtgtactgataatgcatacatcgacatccagctccggatcgccagcttcagtcagaactgtgatatctacccggggaaggattttgtgcaaccaccgaccaaaatctgcgtcggctgccctcgggatattccgacaaatagccctgagctcgaggaaacattaacccatacaatcaccaagcttaatgccgaaaacaacgccactttttacttcaagattgataatgttaaaaaggcccgggtgcaggtcgtggcaggtaaaaagtatttcatcgatttcgtcgcccgagagacgacttgtagtaaggagagcaatgaagaactgaccgagagctgtgagactaaaaagctcgggcaatccttggactgcaacgcggaagtttatgtggtaccttgggagaagaagatttaccctacagtgaactgccaaccacttggcatgatctctctgatgaaaagaccacccgggttctccccttttaggtcctcgcgcatcggtgagatcaaggaggagactacctcccacttgcgtagttgtgagtataaggggagacctccaaaggcaggcgctgagcctgcctcagaacgcgaagtctcttag

SEQ ID NO: 192545 - DNA, 1248 bp, synthetic construct
  misc_feature 1..1248: note = Description of Artificial Sequence: Synthetic coding sequence
  source 1..1248: mol_type = other DNA
atgaagctgagcctgacccaggagagccagagcgaggagatcgactgcaacgataaggacctgttcaaggcagtagacgccgctctgaagaaatataactcccagaaccaatctaacaatcaattcgtcctgtatcgcattacggaggcaacaaaaactgtgggcagcgataccttctatagcttcaaatatgaaattaaggaaggtgactgtcctgtccagtcaggaaagacctggcaagactgcgagtataaagatgcggctaaagccgctacgggagaatgcacagccacagtagggaagcggtccagtacaaaattttccgtggccacgcagacttgtcaaatcacgcctgccgaagggccagtagttaccgcacagtacgactgcttggggtgcgtccacccaatttccactcagtcacccgacttggagcccatcctacgtcacggaatccagtacttcaacaacaatacacagcactctagcttattcatgttaaacgaagtgaagcgtgcacaaaggcaagttgtggccggactgaactttaggataacctattccatcgttcagaccaattgctcaaaagagaactttttgttcttgactcccgattgtaagagtctgtggaacggggacacgggtgaatgcacagacaacgcttacatcgatatacagctgcgcatcgcgtcattttcacagaactgcgatatttatccaggtaaggattttgtacagccaccgacgaaaatctgcgttggatgccccagggacatccccactaactctcctgagttagaagaaaccttaactcatactattacaaaactgaacgctgaaaacaatgctaccttctactttaagatagataatgtgaaaaaggcccgggtgcaggtggttgcagggaaaaaatactttatcgatttcgtggccagggagactacttgttccaaggagagcaacgaggagttaacggagtcctgcgagaccaaaaagttagggcagtcattggactgcaacgccgaggtgtatgtcgtgccatgggaaaaaaaaatctacccaaccgttaactgtcagcccctgggcatgatatctctgatgaagagaccgcctggattctctccttttaggagcagtcgtattggcgaaattaaggaggagaccacctctcatctccgatcttgtgaatataaagggcgcccaccaaaggctggagccgagcctgcaagcgagcgtgaggtcagctag

SEQ ID NO: 192546 - DNA, 1176 bp, synthetic construct
  misc_feature 1..1176: note = Description of Artificial Sequence: Synthetic coding sequence
  source 1..1176: mol_type = other DNA
atgaagctgatcaccatcctgttcctgtgcagccggctgctgctgagccttacacaagagtctcagagtgaggagattgattgtaatgacaaagacctgtttaaagccgtagatgcagctctgaagaaatacaactcccagaaccagtccaacaatcagttcgttctgtaccggatcacggaagcgacgaagacagtgggtagtgacactttctactcgttcaagtacgagattaaggagggcgactgcccagttcagtccggcaagacttggcaagactgtgagtacaaagatgctgcaaaggctgccactggtgaatgcaccgcaacagttggtaaacgaagctccaccaaattttcagtggccactcagacgtgtcagataactccagcagaaggccctgtcgttacggcccagtacgactgtcttgggtgcgtgcacccaatcagtactcaaagccctgatctcgagcctatcttgcggcatgggatccagtactttaacaataatacacagcattccagccttttcatgctgaatgaggttaagcgagcccaaaggcaggacacaggtgagtgcaccgacaacgcctatattgacattcagttaagaatcgcctcttttagccagaattgcgacatctatcctggcaaggatttcgtgcagccccccactaaaatttgtgtcgggtgtccacgcgacattccaacgaatagccctgagctggaggaaactttgactcacacaataacaaaactgaacgcagagaacaatgcaacgttttacttcaagatcgataacgtcaaaaaggcgagggtgcaggtggtggcgggtaagaaatacttcattgatttcgtcgcccgcgagaccacatgctccaaggagtctaatgaggaattgaccgaaagctgcgagacaaagaagctcggccaatctctcgattgcaatgccgaggtttatgtggtaccttgggagaagaagatctacccgacagtaaattgtcaacccctgggaatgatttccctaatgaagcgccctccgggattttcaccctttagatcctcaagaatcggtgagattaaagaagagacaacctcccatcttcggtcttgcgaatataaaggccggcccccaaaggccggcgctgaacctgcgagcgaaagagaagtctcctag

SEQ ID NO: 192547 - DNA, 306 bp, synthetic construct
  misc_feature 1..306: note = Description of Artificial Sequence: Synthetic coding sequence
  source 1..306: mol_type = other DNA
atggacatccccatcagcagccgggacttccggggcctgcagctggcctgcgtcgcactcggcttagtagccggaagcatcatcattggcatttctgtgagcaaagccgccgccgcaatgggtggcgtgttcatcggcgctgctgtcctcggttctttgaggatccatccccaccctggcgctgatcacggcgaaggaagatcatctacgaacggtaacaaggaaggagcgagatcttctttaagcacagtctctcggacactggaaaaactgaagccggggacccggggcgcagaggagtgctag

SEQ ID NO: 192548 - DNA, 375 bp, synthetic construct
  misc_feature 1..375: note = Description of Artificial Sequence: Synthetic coding sequence
  source 1..375: mol_type = other DNA
atggacatccccatcagcagccgggacttccggggcctgcagctggcttgtgtggccctgggccttgttgccgggtcaattattattgggatctcagttagcaaagctgctgcagctatggggggggtttttattggcgccgccgtgcttggactgctgattcttgcttatccttttctgaaagcccggtttaacctcgatcatatactccccaccatcgggtctctccgcattcacccccatccaggcgccgaccacggtgaaggccgatcttccactaacgggaacaaggaaggcgcccggtccagtcttagcactgtgtctcgtaccctggaaaaactaaagccaggaactagaggtgccgaagaatgctag

SEQ ID NO: 192549 - DNA, 3135 bp, synthetic construct
  misc_feature 1..3135: note = Description of Artificial Sequence: Synthetic coding sequence
  source 1..3135: mol_type = other DNA
atgaagcccggctgcgccgccggcagccccggcaacgagtggatcttcttctccactgacgaaatcaccacaaggtaccggaataccatgtccaacgggggcctgcagaggagtgttatcttgagtgccttaatcctgctgagagctgtaaccgggttcagcggtgacggcagggccatttggtccaaaaatcctaactttaccccggttaacgagtctcagctgttcctatatgatacttttccaaagaatttcttttgggggatcggcaccggggcccttcaggtggaaggctcttggaagaaagatgggaagggaccatcgatctgggaccattttattcatactcaccttaagaatgtgtcaagcactaacggcagctcggattcctacatcttcctggaaaaagacctcagcgccctggactttatcggagtgtccttttatcagttctcaattagctggccacggctgtttccagacgggattgtgaccgtggcaaacgcaaagggcctccaatattactcaacgctgctcgacgctctggtcctgagaaatatcgagccaatagtgactctctaccattgggatctcccccttgccctgcaggagaaatacggcggttggaagaacgatacaattatcgatattttcaatgattatgcaacatattgtttccagatgttcggagacagggtaaaatactggattacaattcataacccctaccttgtggcttggcatggctacggcaccggtatgcacgcccctggcgagaaaggcaacctggcggcggtttatactgttgggcataacctcatcaaggcacactcaaaagtgtggcacaactacaacactcatttccggcctcaccagaagggatggctgtcaattaccctgggctcccattggattgagcctaaccggtcagaaaacaccatggacatcttcaaatgtcagcagtccatggttagcgtactcggctggtttgccaatccaatccatggggacggcgactatccagaaggcatgaggaagaagctgttcagcgtcctgcccatcttctctgaggccgagaaacatgaaatgcgaggtactgctgacttcttcgcgttctcttttggaccaaataactttaaacctttgaacactatggccaaaatggggcagaatgttagtctgaatttaagagaagcactgaattggattaagctggagtacaataatccccgcattttaattgccgagaacggatggttcaccgacagtagggttaaaaccgaggacacgacagccatctacatgatgaagaatttcctcagccaggtcttacaggcaatcaggttagatgaaattagggtgtttgggtacactgcctggtctttactggatgggtttgagtggcaagacgcatacacaatccgtagagggctgttctacgtcgatttcaacagtaagcagaaagagcgtaagcctaagtcatctgcccactactataagcagattattagggaaaatggtttcagcctcaaagagagtacacccgacgtgcagggacagtttccctgcgacttctcttggggcgttacagagagcgtgttgaagcccgagtcagtggctagttcccctcagttttccgacccccatctgtacgtgtggaatgctaccgggaacagactccttcacagagtggagggcgtccgcctcaagactcgccctgctcaatgtactgactttgtgaacataaagaagcaactcgaaatgttagcccgaatgaaagtgacacattaccggttcgcactcgactgggctagcgtgctacccaccggcaacttatctgcagtgaaccgacaagccttgcgctactaccgctgtgtcgtatccgaggggctaaagttgggcatcagtgcaatggtgacactttattacccgacacacgcacaccttggcctgcccgaacccctccttcacgccgatggatggcttaatcctagcaccgctgaggctttccaggcctatgccggcctgtgttttcaagagctgggagaccttgtgaagctgtggatcacgatcaacgaacccaaccggcttagtgacatttacaataggtcgggcaatgacacgtatggagcagcgcacaacctgctggtggcacatgcgctggcatggcgcctgtacgaccgacaatttcggcccagccagagaggggcggtgtccctgtcattacacgctgattgggccgagccagccaacccttatgctgattcgcactggagagctgccgagcgctttcttcaattcgaaattgcctggtttgccgagccattattcaagaccggggattatcccgctgctatgcgcgagtacatagccagcaagcataggcgcggcctcagcagtagtgccctgccgaggctgacagaggctgaacggcgcctgctgaaggggaccgttgacttttgcgccctcaatcatttcacaacaaggttcgtgatgcatgagcagttagcagggagccgatacgactccgaccgtgatatccaattcctgcaggacataactaggctctctagccccacacgtttagccgtcattccctggggagttcgcaagctgctcaggtgggtgcgccggaactacggggatatggacatctatatcactgcatctgggatagatgaccaggctctggaggacgaccggcttcgcaagtattatttgggcaagtacctccaagaggtactgaaggcttacctgatcgacaaggtgagaattaaaggatactatgcgttcaagttagctgaggagaaaagtaagcccagatttgggttctttacttctgacttcaaagccaaatctagcattcagttctacaacaaagtgatttcgtccagggggttccctttcgaaaattcaagcagccggtgctctcagacccaggaaaatactgagtgcactgtctgcctctttctggtgcagaaaaagcccttaatcttccttggatgttgttttttcagtacactcgtcttgctcctgagcatagcaatcttccagaggcagaagcgccgaaaattctggaaggctaagaacctgcagcacatcccactcaagaagggtaagcgcgtggtgtcctag

SEQ ID NO: 192550 - DNA, 1389 bp, synthetic construct
  misc_feature 1..1389: note = Description of Artificial Sequence: Synthetic coding sequence
  source 1..1389: mol_type = other DNA
atgggcacccaggccctgcagggcttcctgttcctgctgttcctgcctttattgcagcctagaggggcttctgcagggagcctccactcacccggactctcagagtgttttcaagtgaacggcgccgactatcgcggccaccagaaccggacaggcccgcgcggcgccggtcgtccttgcctgttctgggaccagactcaacagcactcctactcttcagcaagtgatccccacggacgctgggggctgggcgcccataacttctgtcggaaccctgacggcgacgtgcagccttggtgttacgtggccgaaacggaagaaggtatctactggcgctactgcgatatccctagctgccacatgcctggctaccttgggtgcttcgtggactcaggagccccgccggcattgagcggaccatctggtacctccacgaaactgaccgtacaggtgtgcctcaggttctgccgaatgaagggatatcagctcgctggcgtggaggccggttacgcctgcttttgtgggtccgagagtgacttagctaggggtagactggcgccagctaccgactgcgaccagatttgcttcggccacccaggtcaactctgtgggggggacggcagattaggcgtgtatgaagtgagtgtggggtcctgccaggggaactggacggctccccagggcgtcatttacagtcctgactttccggatgaatacgggccagaccggaattgctcgtgggccctgggcccgccaggtgccgcccttgaactgaccttcagactgtttgagctggccgacccgcgagatcgcctagagctgagggacgcagcctccggcagcttattgcgggccttcgatggggccaggccaccacccagcgggcccctgcgtctaggtacagctgcactcctgcttacttttcgcagtgatgccagagggcatgcccagggattcgccttgacataccgagggctccaggacgcggccgaggatcctgaagcccccgaggggagcgcgcagactcccgcagctcctctggacggggccaacgtttcatgcagtcctaggcctggagcgcctccggccgcaatcggtgctagagtgttttctaccgttacagctgtgtccgtgctgctcctattactcctggggctattgcggccccttaggagaagaagctgtttgttggcaccaggcaagggccctcccgctctcggagcctcaaggggtcctagaagatcctgggccgtgtggtatcagcagcctcgcggcgtggctctgccatgcagcccaggggacccccaagccgagggctccgctgctggctaccgacccctgagcgcgtcctctcaaagtagcctgcggtctctaataagcgccctctag

SEQ ID NO: 192551 - DNA, 1263 bp, synthetic construct
  misc_feature 1..1263: note = Description of Artificial Sequence: Synthetic coding sequence
  source 1..1263: mol_type = other DNA
atgggcacccaggccctgcagggcttcctgttcctgctgttcctgcctctgctccagcccaggggggcctcagctggaagcttacattcgcccggtttaagcgaatgtttccaagtgaacggcgccgactacagaggacaccaaaatcgaacagggcctcgcggcgccggacgaccttgcctcttctgggatcagacgcagcaacattcttactcaagtgcatccgatcctcatgggagatggggtctgggtgcacataacttctgtagaaatcccgacggggatgttcagccttggtgctatgttgccgagacagaagagggaatttactggaggtactgcgacattccatcctgccacatgcctgggtatctcggctgttttgtggattccggggccccccccgcactgtctgggcccagcggcaccagcacgaagctcacggtgcaagtatgccttcggttttgtagaatgaagggctaccagctggccggtgtcgaggccggttatgcttgcttttgtggtagtgagagcgatttggctcggggacggcttgcgcccgctaccgattgtgatcaaatttgtttcggtcacccgggtcagctgtgtggcggggatggtcgccttggcgtgtacgaagtttcagtgggatcatgtcagggcaactggaccgcaccgcagggggtaatttacagtcctgacttccctgacgaatacggtccggaccgcaactgctcttgggccttgggaccccctggcgctgccctcgaactcaccttccgattattcgaactagctgatcccagggatcgcctagagcttcgggatgcggccagtggatccctactgcgcgcttttgatggcgccagaccccctcccagtggccccttacggctgggcaccgcagccctgctcctcacctttcgatcagatgctcgggggcacgcccaaggatttgcgctgacttatcgggggctacaggacgctgccgaggatcccgaggcaccagaaggtagcgcccaaactcccgcggcaccactcgatggggccaacgtatcttgctcacccaggcccggagccccacctgcggccataggcggagcggtgtgctggctgcgcgagaagggccctaggcggtggggcctgcccggcgccccgggagaggccggcctctgcgggaccaactccccagagggctggccatgtcctgcaccccccgggacaccccgtttgcgagttctgccacgcgccacgggcctttag

SEQ ID NO: 192552 - DNA, 1272 bp, synthetic construct
  misc_feature 1..1272: note = Description of Artificial Sequence: Synthetic coding sequence
  source 1..1272: mol_type = other DNA
atgggcacccaggccctgcagggcttcctgttcctgctgttcctgccattgctgcaaccacgcggagcgtccgctgggagcctgcattcacccggtttatcggagtgttttcaagtgaatggcgctgactaccgggggcatcagaaccgcacgggcccgcgcggtgctggtaggccgtgcctgttctgggatcagacacagcagcacagctattcttcagctagcgaccctcacgggcgttggggactgggcgcacacaacttttgtcgaaacccagatggcgatgtacagccctggtgctacgtcgctgaaactgaagaggggatctactggcgctactgcgacatcccatcgtgccacatgcctggctatctcggctgctttgtcgactccggagctcctcccgctctttcaggcccttctggcacaagcacgaaattgactgtccaggtttgtttgcgcttctgccggatgaagggctaccagctttgtggcggcgatggtcggctgggcgtgtacgaggtgtctgtcggtagttgccagggtaactggaccgcgccacaaggtgtgatctactccccggacttcccggatgaatacggtcctgaccgaaattgcagttgggcattggggcccccaggcgccgcactggaacttacctttcggctatttgaacttgcagacccccgagacaggctcgaactcagggatgcggcaagtggatccttgctgagggcatttgacggggctcgcccccctccctccggcccccttagactcggaactgcagccttgctgctgacgtttcgtagcgacgctcgtggccacgcgcagggctttgcgttaacctatagaggattacaagacgctgctgaggatccagaagcacctgaagggagcgcccaaactccagccgctcccctggacggcgctaatgtgtcctgctcgcctaggcccggggcaccacctgcggctataggcgcccgagtgttctctaccgtaaccgctgtgtctgtgctcctcctgctgctactgggactgttgaggcctctgaggagacgaagctgtctgctggcaccaggcaaagggccgcccgccctcggcgcttctcgcggcccgcgccgcagctgggccgtgtggtaccaacagccacggggcgtcgctctcccctgtagtcccggtgatccacaggccgagggctccgccgctggatatagaccgctgtcggctagctcacagagttccctgcgtagcctgataagcgccctttag

SEQ ID NO: 192553 - DNA, 1146 bp, synthetic construct
  misc_feature 1..1146: note = Description of Artificial Sequence: Synthetic coding sequence
  source 1..1146: mol_type = other DNA
atgggcacccaggccctgcagggcttcctgttcctgctgttcctgccacttctgcaacctcggggcgcttctgcagggtccctgcacagtcccgggttgagtgaatgttttcaggtcaacggagccgactatcgcggtcaccagaataggaccgggccaagaggcgcaggcaggccctgcttattctgggatcagacccagcagcacagctactcctccgcctcagacccccacggacgttggggtctgggcgctcataatttctgccgaaaccccgacggggacgtgcagccctggtgctatgtcgccgaaacagaggagggcatctattggaggtactgtgatataccatcatgtcacatgccaggctacctcggctgtttcgtggactcaggcgcacccccagcgctgtctggaccttcaggtacctctacaaagctgacagttcaagtgtgcctgcggttctgccgtatgaaaggataccagctctgtggtggggacggcaggctcggcgtgtatgaagtgagcgtcgggtcctgtcaaggcaattggacagcgccccagggggtcatctatagccccgactttcccgatgagtacggacccgatagaaattgctcttgggccctgggccctcctggcgctgccctcgaattgacgttcaggttgtttgaactggcagacccccgagatagattggagctccgcgatgccgcgagcggctccctgctgagagctttcgacggagcccgtccacctccgtcaggaccacttagactcgggaccgcagcactcctccttacctttcggagcgatgcccggggacatgctcagggattcgcgctgacgtaccgcggccttcaggatgctgcagaagacccagaagccccagaaggctctgcccagaccccagctgctcctctcgacggggctaacgtttcttgttctccgagacctggtgcacccccagctgcgatcggaggtgctgtgtgctggcttagagagaagggacctaggaggtggggactccctggtgcacccggtgaagctggactgtgcggcacgaatagccctgaggggtggccctgtcctgctccacccggcacgcccaggcttagagttctcccgcgagccaccggtttgtag

SEQ ID NO: 192554 - DNA, 2211 bp, synthetic construct
  misc_feature 1..2211: note = Description of Artificial Sequence: Synthetic coding sequence
  source 1..2211: mol_type = other DNA
atgggcaaccccgagaacatcgaggacgcctacgtggccgtgatcagacccaaaaacactgcatccctgaactccagagaatatcgcgctaagagttatgagattctgttgcatgaggttcctatagaaggccagaaaaaaaaacgcaagaaggttttgctggagactaagctgcaagggaactctgaaattacccagggcatactcgactacgtggtcgagacaacgaaacccatctctccagccaaccaaggcatcagaggcaagagggttgtgctgatgaaaaaattcccattagatggcgaaaaaatgggccgcgaggccagcttatttatcgtgccctccgtagtaaaggacaacaccaagtatacctacacacccggatgcccgatcttttactgtctgcaggacatcatgcgcgtgtgtagtgaaagctccactcatttcgcaacacttaccgcccgcatgctaatcgccctagacaagtggctggatgaaagacatgcgcaatcccatttcattccggctctgttcagaccttcaccgctcgagcggatcaaaaccaacgtgatcaatccggcttacgcaaccgaaagtgggcagaccgagaatagtctgcacatgggctattccgctctggaaatcaagtctaagatgctggctttagaaaaagcggacacctgtatatataaccccctgtttgggagcgatttgcaatatacaaatagagttgataaagtcgtgatcaacccgtacttcggcctcggggccccagactacagcaagattcagatccctaaacaggagaaatggcagcgcagcatgagctctgtgaccgaagataaggaacggcagtgggtggacgacttcccgttgcatcggtcagcctgcgagggagatagcgagctgctgtcgaggctgctgtccgagagattctccgttaatcagctagattctgaccattgggcaccaattcattacgcttgttggtacgggaaggtagaagccacccgcatcctactggagaaaggcaaatgcaacccaaacctgctgaacggccagctgagctcgcctttgcatttcgctgctggaggaggccacgccgagatagtgcaaattctgctgaatcatcctgaaactgatagacacattacagatcagcagggacggtcccccttgaacatttgcgaagagaataagcagaataattgggaagaggccgcaaagttactcaaggaagccattaacaaaccctacgagaaggttcggatatatcgaatggacggcagctaccgcagtgtggagctaaagcacggcaataacaccaccgtccagcaaatcatggagggaatgcggctgtctcaggaaactcagcagtactttactatctggatctgctctgagaatttatcactgcaactaaagccttatcacaaaccattgcagcacgtacgggactggcccgaaattctggcagagctgacaaatctggacccacagcgagaaactcctcaattgtttctgaggcgggacgtgcgactccctctggaggtggagaaacagattgaagatccacttgccatcttgatcttgttcgacgaagctcgctataatctattgaaggggttctataccgccccagatgcgaagctaattactctggcctctttgttattgcagatcgtatatggtaactacgagtcaaagaaacacaaacaggggttcttgaacgaggaaaacctgaaaagcattgtcccagtgacaaaactcaagagcaaggcgccgcattggactaatcggatacttcatgaatacaaaaacttaagcacaagcgagggggtgtccaaggaaatgcaccacctccagcggatgtttctacaaaattgttgggagattcctacatatggagcagccttcttcacgggccagattttcacaaaagcatcccccagtaatcacaaggttatcccagtttatgtcggcgtcaacattaaagggctgcacttattgaacatggagacaaaggcactgctgatcagcctcaagtatgggtgttttatgtggcagcttggagatacagacacatgtttccaaattcactcaatggagaacaagatgagcttcatcgtgcatacgaaacaggcagggctggtcgttaaactcctgatgaaactgaacggccagcttatgcccacggagcggaattcctag

SEQ ID NO: 192555 - DNA, 3624 bp, synthetic construct
  misc_feature 1..3624: note = Description of Artificial Sequence: Synthetic coding sequence
  source 1..3624: mol_type = other DNA
atggacctgcacatgatgaactgcgagctgctggccacctgcagcgccctgggatacctggagggcgatacgtaccacaaagagcccgactgtttagaatccgttaaggacctgatcagatacctcaggcacgaggacgagacacgggatgtgcgccagcagctgggtgctgctcagatcctccagtccgatctactaccaatccttacccagcaccatcaggacaaacccctgttcgacgccgtgattcggttgatggtgaacctgacgcagccagcattactttgttttggcaacttgcctaaagaaccatcatttaggcaccacttcctgcaggtgctgacttatctgcaggcatacaaggaagccttcgccagcgagaaagctttcggggtcttatcagaaacactttacgagctgctgcagctgggctgggaagaacgccaggaggaggataatctcctgattgaacgcatcctgctactcgtccggaatatcttacatgtccctgccgatctcgatcaggagaaaatcgacgacgacgctagtgcccatgaccagttactgtgggcaatacaccttagcggcctggatgaccttctgctcttcttagctagcagcagcgctgaagaacagtggagcctgcacgtgctggaaattgtgtccctgatgtttagagaccagaatcccgaacagctagcaggggtcggacagggtagactggcacaggagcggtctgcagactttgctgagctcgaagtccttcggcaacgagagatggctgagaaaaagaccagggcactccagaggggaaaccgacactctaggttcggaggaagctacatagtgcagggactgaaatctatcggagaacgggatctcatatttcataagggactccacaacctaaggaactattcatccgatctgggtaaacagcccaaaaaagtccccaaacgtaggcaggccgcaagagagttgagcattcagcgcagaagtgctctgaatgttaggctctttctcagggacttttgctctgagtttctagagaattgttacaaccggttaatggggagtgttaaggatcacctacttcgggaaaaagcccagcagcatgacgaaacatattacatgtgggcactcgccttctttatggcattcaatcgggccgcatccttcaggcccggcttggtctcagagacgctctctgtgcgtacgttccactttatcgagcagaacctgacaaattattatgaaatgatgctcaccgacagaaaggaagcggccagctgggcgcgtagaatgcatctggcactcaaggcttatcaggagctgctggctactgttaatgagatggacattagcccggacgaggctgtgagggagtcatctagaattattaaaaataacatcttttacgttatggaatatagggaactgtttcttgccctttttaggaaattcgatgagagatgtcagcccaggagttttcttcgggacttggttgagactacacacttattccttaaaatgctggaacgattttgtcggtcacgtggaaacctcgtggttcagaacaaacagaagaagcgccggaaaaagaagaagaaagttctcgaccaggccatagtgtcggggaatgtaccatctagccccgaggaagtcgaggctgtgtggcctgcccttgcagaacagctgcagtgctgcgcccaaaactccgagctatccatggacagcgtagtccctttcgatgctgcttctgaggtgcctgttgaggagcagcgagccgaagccatggttcggatccaggattgcctcctcgcgggacaggctccacaggctcttacactgctgcggtcagcccgcgaggtgtggcccgagggcgacgtattcggcagtcaggatatctcacctgaggaggagattcagctcctcaagcagatactgagtgcacctctgcctaggcagcagggtccagaggagcgcggagccgaagaagaggaagaggaagaggaggaggaggaggaggagttgcaagtcgttcaggtctccgaaaaggaattcaactttttggattacttgaaacgcttcgcctgctcaaccgtcgtgcgtgcatatgttcttctcctgcggagttatcagcagaactccgcccataccaaccattgtattgttaaaatgctacacagacttgcacacgatctgaagatggaggcgctccttttccagctgtctgtcttttgtctgttcaataggctcctgagcgatccagcagcaggagcatacaaggaactggtaacgttcgctaaatacatcctcggcaaattcttcgctctggcggccgtgaatcaaaaagccttcgtggagctgctgttttggaaaaatactgcagtcgttagggaaatgacagagggatacggctctctggacgacagatccagcagtaggcgcgcccctacgtggagccctgaagaagaagcacacctcagagaactctatctggccaacaaggatgttgagggccaggatgtggtggaggctatccttgcccatttgaacaccgtgccacggacaaggaaacaaattattcaccatctggtgcagatgggcttggccgattccgttaaagacttccagcgcaaaggaactcacatcgtactgtggaccggcgaccaagagctggagctgcagcgactcttcgaagagtttagagatagtgacgacgtgctcggtcacatcatgaagaacattactgccaagagatctagggcccgcattgttgacaaacttttggctctcggcctggtggcggagaggcgcgagctctataaaaaacggcagaagaaactcgcctcatcaattctgcccaatggggcagagtcattaaaagacttttgccaggaggatttggaggaggaagagaatttgcccgaggaagattcagaggaagaggaggagggggggtcagaggcagagcaggtgcaggggtcactggtgctcagcaatgagaacctcggccagagcttgcaccaggaaggcttttccatcccactgttatggctccagaattgtctgatccgtgcggccgatgatcgagaagaggacggttgttcacaggctgtccctttggtgcccctgacagaagagaacgaagaggctatggagaacgaacagttccaacagctactccgcaaattaggcgtacgtccacccgcttcagggcaggaaaccttttggaggattccagcgaagctcagcccaactcagctgcgaagagctgctgcctctttgtctcagcctgaagaagagcagaagttacagcctgagctgcaacccaaggtgcctggcgagcagggatccgatgaggaacattgtaaagagcacagggcccaggctctgcgagctttattgctggcacataagaaaaaggcaggtctcgcctctcccgaggaggaagatgctgttggaaaagagcctttaaaagcagcacccaagaaaagacaactactggactccgacgaggagcaggaagaggacgagggtcggaaccgcgctcccgagcttggagccccaggtattcaaaagaagaagcgctatcaaattgaggacgatgaagacgactag

SEQ ID NO: 192556 - DNA, 1539 bp, synthetic construct
  misc_feature 1..1539: note = Description of Artificial Sequence: Synthetic coding sequence
  source 1..1539: mol_type = other DNA
atgcacacccccgacttcgccggccccgacgacgcccgggccgtggacattatggacatctgtgagagtatcctcgagcggaaacggcatgatagcgaaagatctacctgctccattttggagcagaccgacatggaggctgtcgaggcactcgtgtgcatgtcaagttggggtcaacggtcccaaaagggggatcttctgaggattcgaccactcacccctgtatccgactctggtgacgtgaccaccaccgtgcacatggacgccgcaacccctgagcttcccaaggattttcattccttgtccacactatgcatcacgcctccgcagagccccgatctggtggagccgagcacccgtactcctgtttcacctcaggtcacagatagcaaagcatgcacagccaccgacgtactgcaatctagtgccgtggtggctcgggccttgagtgggggagcagagagagggcttcttggcctcgagcctgtgccgagtagcccctgcagagcgaagggcacctcagtgattcgccacaccggagagtctccagctgcctgcttccccacaatccagaccccggattgtcggctgtccgattcccgtgagggcgaggagcagctgcttggccacttcgaaactctccaggacacccatctgactgatagtctgctgtcaacgaatctcgtgtcttgccagccttgtcttcacaagagtgggggcctgctgctgaccgacaaagggcagcaggccggatggcctggcgcagtacaaacttgtagcccaaagaactatgagaacgatctcccaagaaagacaaccccgctaatcagtgtgtccgtaccagcccctccggttctgtgtcaaatgatcccagtgacgggccaatctagtatgctgcctgcattcctgaaaccacctccacagttaagcgtagggacagtgcggcctatactggctcaggccgcgcctgctccacagcccgtcttcgttggcccggctgtcccccaaggcgcagtgatgctggtgctccctcagggggctctgcctccacccgcaccatgcgccgcgaacgtgatggcagctgggaatacgaaactgctgcccctggcacctgcaccggtgtttattactagcagccagaactgtgtccctcaggtggacttcagccgccgaaggaactacgtttgttccttccccggttgccgaaaaacctattttaagtcgagccacctgaaagcacatctgcgcacacacactggggaaaagccatttaattgcagctgggacggatgcgacaagaaattcgctaggagtgacgagctctcgcggcatcggcgcacgcacaccggagaaaagaaattcgtgtgccccgtgtgtgacagaaggttcatgcggtcggaccacctcaccaaacatgctagaagacacatgacaacaaagaaaattcccggctggcaggctgaagtgggtaagcttaatcggatcgcgtctgccgagtcacccggatctcctctagttagtatgcctgcgagcgcctag

SEQ ID NO: 192557 - DNA, 1488 bp, synthetic construct
  misc_feature 1..1488: note = Description of Artificial Sequence: Synthetic coding sequence
  source 1..1488: mol_type = other DNA
atggacatctgcgagagcatcctggagcggaagcggcacgacagcgagcgtagcacttgtagtattttggaacagactgacatggaagccgttgaggctttagtctgcatgagttcatgggggcagcgcagccagaagggcgacctactgaggattagacctcttacaccggttagcgactcgggggatgtgacaacaaccgtacacatggacgctgccacccccgagctgcccaaagattttcacagtctcagcacactgtgtatcactcctccacagagccccgacctggtggaaccgtccacccggacaccggtgtcccctcaggtgaccgacagtaaagcctgcaccgccactgatgtgcttcagtccagtgccgtggtcgcacgggcattgagtggaggggccgaacgcgggctccttggcctggaacccgttccctcaagcccatgtagggctaagggcacgagcgtcattaggcacaccggcgaatctccagctgcttgttttcctaccatccagaccccagactgccggttgtcagactcgagagaaggtgaagagcagttgctagggcactttgaaactctgcaggacacccacttaacagactccctgctgtccaccaacttggtctcttgccagccatgtctgcataagtccgggggcctgctcctgacggataaagggcagcaggcgggttggcccggagccgttcagacatgttctccgaagaactatgagaacgatcttccacgcaagacaacacccctgatatcagtctccgttcctgctcctcccgttctatgtcaaatgatccctgtgaccgggcagtcctcaatgcttcccgccttcctcaagccccccccccagctctctgtgggcactgtaaggccaatcctcgcccaagccgcacccgcccctcagcctgtctttgtgggtcccgccgtgcctcaaggtgcggtcatgctggttcttcctcagggtgcgttgcccccccctgccccatgtgctgccaacgtcatggccgcagggaacacaaagctccttccccttgcaccggctcccgtgtttattactagttcccagaactgcgtgccccaggtcgacttctcccggaggcgcaattacgtctgcagtttcccggggtgtaggaagacgtattttaaaagcagtcatttaaaggcacacttaaggacacacacaggagagaagcctttcaactgctcctgggatggttgcgataagaagttcgcccggagcgacgaactgagccgacacaggcggactcatacaggtgaaaagaagttcgtgtgtcctgtttgcgacaggcggtttatgagatcagatcacctcacaaagcacgcacgacgacacatgaccacaaagaaaatacctggatggcaggcagaagtggggaaactgaatcgaatcgcctctgctgagagcccaggaagtccactcgtgtctatgccagcctcagcctag

SEQ ID NO: 192558 - DNA, 1488 bp, synthetic construct
  misc_feature 1..1488: note = Description of Artificial Sequence: Synthetic coding sequence
  source 1..1488: mol_type = other DNA
atggacatctgcgagagcatcctggagcggaagcggcacgacagcgagaggtccacgtgctccatcttagaacagaccgatatggaggcagtggaggcgcttgtttgcatgtcatcctggggccagcggtcacaaaaaggcgatctgttaagaattagacccctgacacccgtgtctgacagcggagacgtcacaactactgtacatatggacgccgctacccccgagcttcctaaggatttccatagtctcagtacattgtgtatcacacctccacagtcacctgatttagtggaaccatccactaggaccccagtgtcccctcaagtaacggacagtaaagcttgcaccgccacagacgtcctccagtcgagcgcagttgtggcccgcgccttgagcggaggcgccgagcgcggtttgctgggcctagagcctgtcccatcgagcccctgcagagccaagggcacatccgttattcgccacacaggtgaatcgcccgccgcgtgcttcccgactattcagaccccagattgtaggctaagcgacagtagagaaggggaagaacagctgctggggcatttcgagactctgcaggatacccatctcactgactccctcctctcaacaaaccttgttagctgtcaaccttgcctccacaagagtggcggactgttacttaccgacaaaggtcagcaagccggttggccaggagcagtgcagacttgctctcctaagaactacgaaaatgaccttccacggaaaactaccccactgatctcggtgtccgtacccgctcctccggtcctctgtcaaatgatcccagtgaccggccagagctccatgctcccagccttccttaaacctcctccgcagctcagcgtgggcactgttcgcccaattctcgcccaggcagcccctgcaccacagcccgtatttgtgggccccgctgtccctcaaggcgcggtgatgctcgtactgccacagggggccctcccgccaccagctccttgtgctgccaacgtgatggcagccggtaatacaaagttgttaccccttgctcctgcacccgtgtttatcacgagctcccaaaattgcgtgccccaagtcgatttctcccgcaggcgtaactacgtgtgtagcttccccggctgcaggaaaacctatttcaagtccagtcacctgaaagctcatctcagaacccacaccggggagaaacctttcaattgctcttgggacggctgcgataaaaagttcgcaaggtctgatgagctctctagacaccgccgaactcacactggggaaaaaaagttcgtgtgcccagtgtgtgataggcgttttatgcgctctgatcacctaaccaagcacgctaggcgccatatgaccaccaaaaagatccccggatggcaggcagaggtgggcaagctcaataggatcgcctcggcagaatccccgggcagtccattagtgagtatgcccgcgtccgcctag

SEQ ID NO: 192559 - DNA, 1209 bp, synthetic construct
  misc_feature 1..1209: note = Description of Artificial Sequence: Synthetic coding sequence
  source 1..1209: mol_type = other DNA
atcagcgtgcacctgatgcggaagcacgtgaagaacatcaacacctttgagaacaggatgcttatgctcgacggaatgccagctgttcgcgtgaagacggaactgttggaatcagagcaaggctctcctaatgtccacaattaccctgacatggaagcagtgcctctgctcttaaacaatgttaaaggcgaaccacctgaggattctctgagcgttgaccactttcagacccagactgagccagtcgacctgtcaatcaataaggcaagaacttcacctactgccgtaagttcttcacccgtcagcatgacagcttccgccagctcaccatcgagcacgtcaacatcttctagcagctctagtcgcctggcctcctcacctaccgttataacctcggtgtctagcgcctcatcctccagtactgtcttaacacccggccccctcgttgcgtccgcttccggcgtgggtggacagcaattcttgcacatcatccaccctgtccctccttctagtccaatgaacctacagtcaaataaactgagccacgtgcataggatacctgtcgtggtacagtctgttcctgtggtgtatacagcagtgaggagtccgggaaatgtgaataatacaattgtcgtgcccctcctggaggacggcaggggacatgggaaagctcagatggatccaagagggctgtcaccgcgacagtcaaaatcggatagcgatgacgatgatctccccaacgttactctcgactccgttaatgagactggaagcaccgcattgtcaatcgccagagccgtgcaagaggtccatccctccccggtgagtcgggtaagagggaataggatgaacaaccagaagtttccctgctcaatttcacctttcagcattgagtccactaggcggcagagacgatctgagtcccccgactctagaaagaggcgtatccaccgatgcgactttgagggctgcaacaaagtgtacactaaaagcagtcatctaaaggcccatcggagaacccacacgggcgaaaagccttacaaatgcacatgggaaggatgcacctggaagttcgcccggagcgacgaactgactcggcattaccggaagcacactggcgttaagcccttcaagtgtgccgattgcgaccggtctttctccagatccgaccatctcgcactgcatagaagaagacacatgctggtgtag

SEQ ID NO: 192560 - DNA, 1209 bp, synthetic construct
  misc_feature 1..1209: note = Description of Artificial Sequence: Synthetic coding sequence
  source 1..1209: mol_type = other DNA
atgaacatccacatgaagcggaagaccatcaagaacatcaacacctttgaaaaccgaatgctgatgttagacggcatgccagccgtacgtgtgaagacagagctccttgaatcggaacaaggttctccgaacgtgcacaattacccagatatggaggccgtccctctcttgttaaacaatgtcaaaggggagcccccagaggactctctaagtgtcgaccatttccagacacagaccgaacccgtggacttgagcattaataaagcccgaactagccctaccgccgtttcctcttcccctgtgtcaatgacagcttccgccagcagtcccagctctactagtacaagttcctcctcatcaagccggcttgcttctagtcctaccgtgatcacaagcgtaagctccgcgagttcatcctcaacagttctgacacccggccccctggttgcatccgcctctggtgtcggcggacagcagttcctccacatcatccatcctgtacccccatcaagccctatgaacttgcagtctaacaaactttcacatgtgcaccggatccccgtggttgttcagagtgttcctgttgtttacaccgcggtacggtcccctgggaatgtgaacaatacaattgtggtgcctcttctggaggacggacggggacacggaaaagcacagatggaccccaggggccttagtcctcgccaatctaagagcgattccgatgacgatgacctccccaacgttactttggacagtgtgaatgagactggatcgactgcgctctcgatcgcaagggctgtccaggaagtccatcccagccctgtaagcagggtcagaggtaaccgcatgaataaccagaaatttccctgttctatttccccattcagcatcgagtcgacaaggagacagcgcagatccgaatcccccgatagccgcaagcggcgcatccatcgctgcgacttcgaaggttgcaacaaagtgtataccaaatctagccacctcaaagcacaccgtcgaacccataccggagagaagccttataagtgtacttgggaaggctgtacttggaaattcgcccgcagcgatgagctgactcgacattatcgtaaacacaccggagtgaagccatttaagtgtgccgactgcgaccggagcttttctaggtccgaccacctggctctccaccggcgaaggcacatgctcgtttag

SEQ ID NO: 192561 - DNA, 1209 bp, synthetic construct
  misc_feature 1..1209: note = Description of Artificial Sequence: Synthetic coding sequence
  source 1..1209: mol_type = other DNA
atgaacatccacatgaagcggaagaccatcaagaacatcaacacctttgagaacaggatgctgatgctggatggaatgcctgcggtgcgagtgaagaccgaactgctggaatccgaacaaggttccccgaacgtccataattaccccgatatggaagccgttccactgcttctgaacaacgttaaaggagagcccccggaagatagcctaagcgtggaccatttccagacacaaacggagcccgtcgatctgtcaatcaataaggcccggaccagcccaactgccgttagttcctcacctgttagtatgaccgcctctgccagctccccaagttccaccagtaccagttccagttcatcctccagattggcaagttccccgaccgttattaccagcgtctccagcgcaagctctagcagtaccgtgctaactcctggtcctctcgtggcctcagcttctggcgtgggaggtcagcagttccttcatataattcacccagttccccccagctcccccatgaatctgcagagcaataagctgtcacacgtgcaccgtattcccgttgtggtccaaagcgtccctgtggtatatacagcagtgaggagtcccggtaacgtcaataacacgatcgttgtgccactgctggaagacgggagaggccatgggaaagcccagatggaccccagggggttatcaccacgacagtccaagtcagatagtgacgatgacgacttgcctaacgtgaccttggatagcgtgaatgaaacaggctcgacggctttgagcatagctcgagccgttcaagaagtccaccccagtccagtctcgcgtgtccgtggaaaccggatgaataatcagaagttcccttgctccatatccccgttctcaattgaaagtacacgcaggcagcggaggtctgaatctccagattcccggaaaagacgcatccatcggtgtgactttgaaggttgcaataaggtctacacgaaatcgtcccacttaaaagcccaccgtcggactcataccggggagaagccctataaatgtacttgggaaggctgcacgtggaagtttgcccggtccgacgagctaaccaggcactaccgtaagcataccggagtgaaacccttcaagtgcgctgactgtgatcggtctttctccaggagtgaccatctggcactccatcggagaaggcacatgctcgtgtag

SEQ ID NO: 192562 - DNA, 867 bp, synthetic construct
  misc_feature 1..867: note = Description of Artificial Sequence: Synthetic coding sequence
  source 1..867: mol_type = other DNA
atggccgccgccgcctacgtggaccacttcgccgccgagtgcctggtcagcatgtcctccagagcagtggtacacgggccaagggaagggcccgaaagccggcccgaaggcgccgcagtggcagccacgcctacgctcccgagggtcgaagagagacgggacggtaaggacagcgcgagcctctttgtggtcgctcgaatactcgctgatcttaaccaacaagcaccagcccctgctcccgcagagcgacgcgagggcgccgccgctaggaaggcccgcactccctgtagacttcctccccctgctcctgagccaacctccccaggtgctgaaggcgcagcagctgcaccgccttctcccgcctggtcagaacctgagcccgaagccggcctggagcccgaaagggagccgggccctgcgggatccggcgaaccgggactcaggcagagagtgcggcgcggcaggagcagggccgacctcgaaagcccccagcggaaacataagtgtcactatgcagggtgtgagaaagtgtatgggaaatcgtctcacttgaaagctcatctgaggacccacaccggggaaaggccgtttgcctgctcctggcaggactgcaataaaaaattcgcgcggtctgatgagctagctcgccactatcggacccacacaggggagaagaagttcagctgccctatctgtgagaagcgcttcatgcgctccgatcacttgaccaaacatgcacggcggcatgcgaatttccacccaggcatgcttcaaaggcggggcgggggttcgcgcaccggctctctgtcagattacagcagatcagacgctagtagcccaactatcagccccgccagcagcccttag

SEQ ID NO: 192563 - DNA, 1251 bp, synthetic construct
  misc_feature 1..1251: note = Description of Artificial Sequence: Synthetic coding sequence
  source 1..1251: mol_type = other DNA
atggtggaccacctgctgcccgtggacgagaacttcagcagccccaaatgtcctgtaggttatcttggagatcggcttgttggacggagagcctaccatatgctgccatccccagtaagcgaagacgacagtgatgcatcctccccctgttcttgctcttctcctgattcacaggcattgtgttcctgctacgggggaggtctgggtactgaatcacaggattcaatcttggattttctgctgtcacaggccacactcggaagcggaggggggtctggctctagtatcggggcttcttccggccccgttgcgtggggcccatggcggcgcgctgcggccccggtgaagggagagcacttttgtctcccagagttcccactcggagaccccgacgacgttccacgcccattccaacctacgctggaggagatcgaagaatttctggaagaaaatatggaacctggcgtgaaggaggtgcctgaaggaaactccaaggatctggacgcttgctcccagctgtctgcaggaccccacaagtctcacctgcatcctggctcctcgggccgggagcgctgctctccacccccagggggcgccagcgctggcggtgcccagggccccggaggtggcccaactccagatggccccatccctgtcctccttcaaattcagcccgtcccagtaaaacaagagtcaggcactggcccagctagccccgggcaagcaccagagaatgtgaaggtcgctcagttgctcgtcaatattcagggccagaccttcgccttggtgcctcaggtggtcccctcttccaacctcaacctgccttcaaaatttgtcagaatcgctcccgtgccaattgccgccaagccagtggggtcggggcctctgggtccaggccctgctggcctattgatgggccaaaagtttcctaagaatcctgccgccgagctgatcaagatgcataaatgtactttcccaggatgcagcaaaatgtataccaagagttcccacttgaaagcgcatctgcgacgacacacaggcgagaagccctttgcctgtacctggccaggctgcggttggcgattctccagatctgacgaactgtctcgccacaggcggtcccactccggcgtaaagccctaccagtgtcctgtctgcgagaagaaattcgctcgatccgatcatctgtcgaagcacatcaaggtgcatcggtttccacggagctctaggagtgtgagaagcgttaactag

SEQ ID NO: 192564 - DNA, 1068 bp, synthetic construct
  misc_feature 1..1068: note = Description of Artificial Sequence: Synthetic coding sequence
  source 1..1068: mol_type = other DNA
atggccctgagcgagcccatcctgcccagcttcagcaccttcgcctctccgtgcagggagagagggctgcaggagaggtggccacgagcagaacctgaatccggaggcaccgatgatgaccttaactctgtactggatttcatactgtccatgggattagacgggcttggcgcggaggccgcccctgagccacctccccccccaccaccccctgccttttactacccagaacccggggctccacctccgtactcagccccagctggcggcctggtgagtgagcttctaagacccgagctggacgccccccttggtcccgcactccatggaagattcttgctggccccccccggacgccttgtcaaagccgagccccccgaggcagatggtggggggggctatggctgcgcccccggcctgactcgcggtccgcgggggctgaagagggaaggagcccctgggcccgcggccagctgcatgcgcggtcccggaggtaggccaccacctcctcccgacacgcctccactttccccagacggtcccgccaggctgccagctccaggaccgcgggctagtttccctccccctttcggcggaccgggattcggcgcacctggtcctggacttcattacgctcctcccgccccccccgcttttgggctgtttgatgatgccgcggctgcagcagccgccctgggactggctccaccagctgccagaggccttcttaccccacctgcctctccactggagctgctggaggccaagcctaaacggggacggcggtcctggccccggaagcgaacagcaacccatacatgcagctacgccggatgtggaaagacctacacaaagagcagccatctcaaggcacatctgcggacacatacaggagagaagccttatcactgtaactgggacgggtgcggttggaagttcgcccgcagcgacgagttaacacggcactataggaaacataccggccaccgccccttccagtgtcatctttgtgatcgggcattctcgagatccgatcatctcgcgctgcacatgaagcgccatatgtag

SEQ ID NO: 192565 - DNA, 234 bp, synthetic construct
  misc_feature 1..234: note = Description of Artificial Sequence: Synthetic coding sequence
  source 1..234: mol_type = other DNA
atggacgtgctgcccatgtgcagcatcttccaggagctgcagatcgtccacgaaaccggctacttcagcgcactgccgagcctagaagaatactggcagcagacctgcctcgagcttgagagatatttacagtctgaaccttgttacgtctccgcctctgagatcaaatttgatagccaagagtccgtcgaccaaaaccactggttaggaagaaaacgccgcaatcctaactag

SEQ ID NO: 192566 - DNA, 846 bp, synthetic construct
  misc_feature 1..846: note = Description of Artificial Sequence: Synthetic coding sequence
  source 1..846: mol_type = other DNA
atggacgtgctgcccatgtgcagcatcttccaggagctgcagatcgtacacgagacaggatacttctccgccttaccctccttagaggaatactggcagcagacctgcttggaactcgaaaggtacttacagtccgaaccctgttacgttagcgcgtccgagataaagtttgatagccaagaggatctctggacaaagatcattctggcgcgtgagaaaaaggaggaatctgagctgaagattagctctagtcctccggaagatacgctgatctctccctcattttgctacaatctagaaaccaattcactgaattcagacgtatcttccgaatccagcgactcctccgaagaattatcaccaacagccaaatttacttctgatcctatcggtgaagttttggtgagcagtgggaagctgagctccagcgtcacctccaccccaccaagcagccctgagctatctagagagccgtctcagctctgggggtgcgtgccaggagaactacctagtcctgggaaagtgcgaagcggtacttcaggaaagcctggagacaaaggaaacggtgatgcatcgcccgacgggcgccgccgggtgcatagatgtcactttaatgggtgtaggaaagtgtatacaaaaagttcccacctgaaggcacaccagaggactcatactggacagtgcccgcgcgggccccgcagagccgcagccggcggaaggcattgcatagctcccgctttagagggcgcagggccgggatgcactggctgcggtcagggccgacagattctgacatcatccgatgtctttcaccagtcgatccgctctttctggagcagcgagtag

SEQ ID NO: 192567 - DNA, 852 bp, synthetic construct
  misc_feature 1..852: note = Description of Artificial Sequence: Synthetic coding sequence
  source 1..852: mol_type = other DNA
atggacgtgctgcccatgtgcagcatcttccaggagctgcagatcgtccacgaaacaggctattttagtgctttgccctctctggaagagtattggcagcaaacctgtctggagctggagcgttacctgcagtcagagccatgttacgtttcagcctcagaaataaagtttgattcacaagaggacctgtggaccaagattattcttgccagagaaaagaaagaggagtcagagctgaaaatctcatcttccccccctgaggataccttgatcagtccatcgttttgttataacctggaaactaatagcctgaatagcgatgtatcttccgagagctctgattcaagcgaggagctcagtcccactgccaaattcacctctgaccctattggagaggtgctcgtgtcatccgggaaactctcatccagtgtgacctctacccccccttcgagccctgaactgtctagagagcccagccagctctggggatgtgtgcctggagagttaccatctccaggcaaggtaagatccggcacctctggaaagccaggggataaagggaacggcgatgcttcacccgatggccggagaagagtccatcgctgtcattttaatggatgcaggaaagtttacaccaaatcctcgcatctgaaagcacatcagcgcactcataccggagagaaaccttatcgctgttcttgggagggctgcgaatggcgtttcgcccggtcagacgagcttacgagacacttccgtaagcataccggcgcgaaacctttcaagtgctcacactgcgaccgctgtttctcccgttcagaccacctcgccttgcatatgaagaggcacctgtag

SEQ ID NO: 192568 - DNA, 714 bp, synthetic construct
  misc_feature 1..714: note = Description of Artificial Sequence: Synthetic coding sequence
  source 1..714: mol_type = other DNA
atggacgtgctgcccatgtgcagcatcttccaggagctgcagatcgtccacgagacaggatacttttccgcccttcccagccttgaggaatattggcaacagacatgcttggagctcgagaggtatctgcaatcagagccctgctatgtcagcgcatctgagatcaaattcgactcacaagaggatctgtggaccaagatcatattggctagggagaagaaggaggagtctgaactgaaaatcagctcttccccacctgaggataccctgattagcccatccttttgctataacctggagacgaacagtttgaatagtgacgtctcatccgaatcctcagactcctctgaagaactctccccaacagccaagttcacgagcgatcccataggagaggtcctggtctccagcggcaagttatccagcagtgtgacctccacaccaccatccagtcccgagttatctcgcgagccatcccaactttggggatgcgtgcccggggaattacccagtcctgggaaggtccggtccgggacgtcaggaaaaccaggcgataaaggaaacggggacgccagcccagatgggcgcagaagggtccatcgctgccattttaatggttgcaggaaagtctacacaaaatccagccacctgaaggcccatcagagaacacacacaggggtgttccccggtctgaccacatggccctgtacttag

SEQ ID NO: 192569 - DNA, 909 bp, synthetic construct
  misc_feature 1..909: note = Description of Artificial Sequence: Synthetic coding sequence
  source 1..909: mol_type = other DNA
atggacgtgctggccagctacagcatcttccaggagctgcagctggttcacgacaccgggtatttctccgcattgccttccctggaagaaacatggcagcagacatgcctcgagctggaacgctacctgcagaccgagccccgtcggatatctgagacattcggggaggacttagattgcttcctacatgcctccccccccccctgcatcgaagaatcgtttcgccgacttgatccactgctcttacctgtcgaggctgcgatctgcgagaagtcaagcgccgtcgacatcctgctctcccgagataaacttctttcggaaacctgtttatctctgcagccggccagctcctctctcgacagctatacagccgtaaatcaggcacagctgaacgccgtcaccagtctcacacctcccagctcgcctgagctgagtcggcacctggtcaaaacatcgcagactctctccgccgtagatggcactgtgaccctgaaactggttgcgaagaaagctgctcttagttccgtgaaagtcgggggagtggcaacagctgcggcagctgtgaccgctgcgggagcggttaagtcagggcaaagcgattctgatcagggaggactcggggcggaagcttgccccgagaacaaaaagagggttcaccgatgccagtttaacggatgtcgaaaggtatatactaagtccagccacctgaaagcacaccagcggacccacaccggggagaaaccatacaagtgttcttgggagggatgtgaatggagatttgccaggagtgacgagctgacgaggcattaccgtaaacatacaggggctaaaccgttcaagtgcaaccactgtgaccggtgcttctctcgtagcgaccacctggctcttcacatgaagcgccacatttag

SEQ ID NO: 192570 - DNA, 825 bp, synthetic construct
  misc_feature 1..825: note = Description of Artificial Sequence: Synthetic coding sequence
  source 1..825: mol_type = other DNA
atgttccccagctggcccacctgcctggagctggagcggtacctgcagacagaacccaggagaatctcagaaacatttggtgaggatttggattgttttctccacgccagtccccccccctgtattgaagaatcctttcgcagacttgaccccttgctgctacctgtggaagccgccatatgtgagaagtcatccgctgtcgacattcttctgtcaagggacaagctgttgtcagagacgtgtctgagcctgcagccggcctctagctcactggacagctacactgcggtgaaccaggcccagctgaatgccgtgacaagcttgacccctccgtcgtctcctgagctctcccgccacctagtaaagacgtcccagactctgtctgctgtcgacggtacggtgacattgaaacttgtggcaaagaaagctgcattgtccagtgttaaagtaggtggcgtggctactgccgccgccgcagttaccgctgcaggcgcggtcaaatccggtcagtcagatagtgaccagggcggtcttggcgcagaggcctgccccgaaaacaagaagcgggttcatagatgtcagtttaacggctgccgaaaggtgtacaccaagagtagtcatttgaaggcccatcagcgtacccataccggcgaaaaaccttacaagtgttcgtgggaggggtgtgaatggcggttcgctaggtctgacgaacttacccggcactacaggaagcacacgggtgctaaaccttttaaatgtaatcattgcgacaggtgcttttccagaagcgatcacctggcactacatatgaagaggcacatctag

SEQ ID NO: 192571 - DNA, 810 bp, synthetic construct
  misc_feature 1..810: note = Description of Artificial Sequence: Synthetic coding sequence
  source 1..810: mol_type = other DNA
atgacctgcctggagctggagcggtacctgcagaccgagccccggcgaattagcgagacgtttggagaagatttggactgcttcttacatgcatcaccaccaccttgcattgaggagtcatttcggcggctggacccgctgctcctgccggtggaagctgctatatgtgaaaaatcaagtgccgtggacattcttctctcccgcgataagttgctgtccgagacatgtctatccctccagccagcatcttctagcctggactcctacactgcagtcaaccaggctcagctcaacgccgtgacctccttgactcccccctcctcccctgagctttcccggcatttggtcaagacaagtcagacattaagcgcagtcgacggcacagtcaccctgaaacttgtggccaagaaagcagccctgtcgtccgtcaaggttgggggcgtcgccaccgccgcagcggctgtcacagccgcgggagccgtaaaatctgggcagagcgactcagatcagggcggcctcggcgcggaagcttgcccagaaaataagaaacgcgtgcatcgctgccagtttaacggatgccgcaaagtgtacactaagtctagtcatctgaaggctcatcagaggactcacaccggggagaaaccctacaagtgctcctgggaaggatgtgaatggagattcgctcgctccgacgagcttacaagacattaccgtaaacacacaggtgcaaagccctttaaatgtaatcactgcgaccggtgtttttctcgatctgatcacctggcattacacatgaagagacacatatag

SEQ ID NO: 192572 - DNA, 339 bp, synthetic construct
  misc_feature 1..339: note = Description of Artificial Sequence: Synthetic coding sequence
  source 1..339: mol_type = other DNA
atggacgtgctggccagctacagcatcttccaggagctgcagctggttcacgacaccggttattttagcgccctgccgagtctggaggagacctggcagcagacgtgtttagaactcgagagatacttgcaaactgagccgcggcgcatcagtgagacttttggcgaagatctagactgtttcttgcacgcctcccccccgccttgcattgaggaatccttcagaaggctagatccgctgttgctgccagtggaggccgctatctgcgaaaagtccagtgcggtcgacattttactgtccagagacaaacttctatcggagacttgcctgagtttgtag

SEQ ID NO: 192573 - DNA, 183 bp, synthetic construct
  misc_feature 1..183: note = Description of Artificial Sequence: Synthetic coding sequence
  source 1..183: mol_type = other DNA
atggacgtgctggccagctacagcatcttccaggagctgcagctggtgcatgatacaggttatttctctgctctcccatctttggaagaaacttggcaacagacctgtctcgaactggagaggtatctgcagacagagccacgccgaatcagcgaaaccttcggggaagacttggactgctag

SEQ ID NO: 192574 - DNA, 339 bp, synthetic construct
  misc_feature 1..339: note = Description of Artificial Sequence: Synthetic coding sequence
  source 1..339: mol_type = other DNA
atggacgtgctggccagctacagcatcttccaggagctgcagctggttcatgacacagggtatttcagcgcactgccgagcctggaagaaacctggcagcagacatgtctcgagctggagagatacttgcagaccgaaccacggcggataagcgagaccttcggtgagaaaccttacaagtgcagttgggaagggtgtgaatggcggtttgctagatccgatgagctcactagacactaccggaagcacaccggcgcaaagcccttcaaatgcaatcattgtgataggtgcttttctaggtccgaccatctggccctgcatatgaagcgccatatttag

SEQ ID NO: 192575 - DNA, 774 bp, synthetic construct
  misc_feature 1..774: note = Description of Artificial Sequence: Synthetic coding sequence
  source 1..774: mol_type = other DNA
atggtggacatggacaagctgatcaacaacctggaggtgcagctgaactccgaaggtggctcaatgcaggtctttaagcaagtgaccgccagtgtgagaaatagggatccgcccgagatcgagtaccgctctaacatgacatctccaacactgcttgacgcaaaccctatggagaatccggctctgtttaacgacatcaagatcgagcctcctgaagagctcctcgcttcagatttcagcctcccgcaggtggagcccgtcgacctgtcttttcacaaacccaaagcccccttacagccggcttcaatgttacaggcgcccatccgaccccccaaaccacaatcctccccccaaactctcgtggtctccacatctacgagtgacatgagcacaagcgccaacattcctactgtcctgacaccagggagcgtgctgaccagctctcagtcaactggctctcagcaaatcctgcatgtaatccacactataccatctgtgtctttgcccaataagatgggcggtttaaagactatacccgtcgttgtccaatcactccctatggtctacactactctccccgctgatgggggccccgctgccatcaccgtgccactcataggaggcgatggcaagaacgcaggcagcgtcaaggtagaccccacgagcatgagccccctcgagattccttccgattcggaggagtcgactatcgagtcgggcagcagtgctctccagtccttacagggtttgcaacaggagagagaagctctgtag

SEQ ID NO: 192576 - DNA, 1080 bp, synthetic construct
  misc_feature 1..1080: note = Description of Artificial Sequence: Synthetic coding sequence
  source 1..1080: mol_type = other DNA
atggtggacatggacaagctgatcaacaacctggaggtgcagctgaactcggaggggggttcgatgcaggtatttaagcaagtgacagcgtccgtgagaaatcgcgatcccccagagatcgaataccgatccaacatgacatcacctacattactggacgctaatccgatggagaatccggctttgtttaacgacatcaaaatcgaaccaccggaagaactccttgcgtcagacttctcgctgccccaagtggagccggttgatttgtcgttccacaagcctaaggctcctctccagcctgcctcaatgcttcaggcaccaattaggccgcccaaaccccaatcaagcccccaaactctggtggtgtcaacaagcacaagcgacatgtccacttccgctaacatccccaccgtactcacacctggttctgtcctgacttcctcacaatcaacgggttcccaacagattctgcatgtgatccacactatcccttcagttagcctcccaaacaaaatgggcggcctgaaaacgatcccggttgtggtgcagtctttaccaatggtgtatacaaccctgcctgcagacggagggcctgcagccataaccgtgcctctcatcgggggcgacgggaagaacgctggatccgtgaaggtagacccgactagcatgagtcctctagagatcccatccgactccgaggagagcacgatagaatccggcagctccgccctgcagagtttacagggtctgcagcaggagcctgctgccatggcccagatgcagggtgaggagtcacttgacctgaagagacggagaattcatcagtgcgacttcgcaggttgcagcaaggtttacacgaaaagtagtcatttaaaggcccatcgaaggatccacacaggagagaaaccctataaatgtacctgggatggctgctcctggaagtttgccagaagcgatgaactgaccagacacttccgcaagcatactggaataaagcctttcaggtgtaccgattgtaacaggtctttctctagaagtgaccacctgagccttcacagacgacggcatgatacgatgtag

SEQ ID NO: 192577 - DNA, 771 bp, synthetic construct
  misc_feature 1..771: note = Description of Artificial Sequence: Synthetic coding sequence
  source 1..771: mol_type = other DNA
atgcagcccgccaaggaggtgaccaaggccagcgacggcagcctgcttggcgatctcggccatactcccctaagcaaaaaggaaggtattaaatggcagcggccaaggctctcacgccaagcactgatgcgctgctgcctcgtgaaatggatcttgtcatccaccgctccacaaggcagtgattctagcgacagcgagctggaattgtcaacagtgcggcaccagccggagggcctggatcagctgcaggcccaaacaaaatttacgaagaaggagctccagtccctctacagagggtttaagaacgagtgtcctaccgggcttgtcgacgaggataccttcaaacttatatatgctcaattcttcccacagggcgatgccacaacatatgcacactttctgttcaacgcctttgatgccgatgggaacggtgccatccactttgaagacttcgtagttggcctctcaatactgctacgcggaacggtgcatgaaaaactgaagtgggccttcaacctctacgacatcaacaaagatgggtacatcacaaaggaggagatgctcgcgatcatgaagtcgatatatgacatgatgggccggcacacttaccctatcctgagagaagatgccccggctgaacacgtggaaaggttttttgagaagatggaccggaatcaggacggggtcgtgaccattgaggagttcctggaggcttgccaaaaggacgagaatatcatgtcatctatgcagttgtttgagaacgtcatctag

SEQ ID NO: 192578 - DNA, 705 bp, synthetic construct
  misc_feature 1..705: note = Description of Artificial Sequence: Synthetic coding sequence
  source 1..705: mol_type = other DNA
atgcagccccggaaggaggtgaccaaggccagcgacggcagcctgctgggggacctgggccacactccgctctcaaagaaagagggcatcaagtggcagcggccaaggctgagtcgccaagcccttatgcggtgttgtctagtgaagtggatactgtcatccaccgcaccacaggggtccgatagtagtgatagcgagctggagttgagcacagtgcgacatcagcctgaaggcctggaccaactccaggctcagaccaagtttacgaagaaagaacttcagtccctgtacagaggatttaagaatggcgatgctaccacttacgctcactttcttttcaatgcattcgatgctgacgggaatggcgcgatacacttcgaggactttgtggtgggcttgagcattctcctgaggggcactgtacatgagaagctgaaatgggccttcaacctctacgacatcaataaggacgggtacataaccaaggaggaaatgctggccatcatgaagtctatctacgatatgatggggaggcacacctatcccatcctccgcgaggacgcgccggccgagcatgttgagcgcttctttgaaaaaatggaccggaatcaggacggcgtagtgaccattgaggaattcctggaggcctgccagaaggatgaaaacatcatgagcagcatgcagctcttcgaaaacgtgatttag

SEQ ID NO: 192579 - DNA, 693 bp, synthetic construct
  misc_feature 1..693: note = Description of Artificial Sequence: Synthetic coding sequence
  source 1..693: mol_type = other DNA
atgggcatccagggcatggagctgtgcgccatggccgtggtggtgctactgttcatagccgttttgaaacagttcggaatcttggaaccgatctcaatggaggatagcagcgatagcgagttggaactgagcactgttcggcaccagcccgagggactcgaccaactccaggcccagacaaagttcaccaagaaagaactgcaaagcctgtacaggggctttaagaacgagtgccctacaggcctcgtagacgaggatactttcaaactgatatacgctcaattcttcccacagggcgacgcgacaacttacgctcattttctattcaatgcttttgacgctgacgggaacggggcaatccatttcgaagatttcgtggtgggcctttcgatcctgctgcggggaactgttcacgaaaagctaaaatgggcttttaacctctatgacattaacaaggacggctacataactaaagaggaaatgcttgcgatcatgaaatccatatatgacatgatgggaaggcacacttaccccatcctccgtgaagatgcacctgccgagcacgtcgaacggttttttgagaaaatggatagaaaccaagacggagtggtaacgattgaagagttcctcgaggcttgccaaaaggacgagaacatcatgagcagtatgcaactcttcgaaaacgtgatttag

SEQ ID NO: 192580 - DNA, 567 bp, synthetic construct
  misc_feature 1..567: note = Description of Artificial Sequence: Synthetic coding sequence
  source 1..567: mol_type = other DNA
atggccaccgtgcggcaccggcccgaggccctggagctgctggaggctcaaagtaagtttactaagaaggagctgcaaattttgtacagaggcttcaagaatgagtgcccatcgggagtcgtaaatgaagaaacgttcaaggagatttattcccagtttttccctcagggggattctacaacctatgcccattttttgttcaatgctttcgacacagatcacaacggtgccgtttcttttgaagatttcatcaagggtctcagtatccttctgcgggggacggtccaagaaaagctgaattgggctttcaacctgtacgacatcaataaggatgggtacatcacaaaagaggaaatgctagatattatgaaggcaatctacgatatgatgggaaaatgcacgtacccagttttaaaggaagatgcccccagacagcatgtcgagactttcttccagaaaatggataagaataaggacggtgtcgtcactatcgacgagtttatcgagtcctgccagaaagatgagaatataatgcgttctatgcagctgttcgaaaatgtgatatag

SEQ ID NO: 192581 - DNA, 678 bp, synthetic construct
  misc_feature 1..678: note = Description of Artificial Sequence: Synthetic coding sequence
  source 1..678: mol_type = other DNA
atgagcggctgccggaagcggtgcaagcgggagatcctgaagttcgcccagtatctgttgcggctgctgactggttctctgcatacagactcagtggaggatgaactcgagatggcaactgtacgccaccggcctgaagccctggagctgcttgaagcccagtccaaattcaccaaaaaagagctacaaattttgtacagggggtttaagaatgagtgtccttcaggcgttgtgaacgaagaaacatttaaggagatctatagtcagttctttccacagggggactcaaccacctacgcccattttctgtttaatgctttcgacacagatcataacggggccgtctcattcgaagatttcatcaagggcttatcgattttactgcggggcaccgtgcaagaaaaactcaattgggcttttaatctgtacgacatcaacaaggatggttatattaccaaggaggagatgttggatatcatgaaggcaatctacgatatgatgggcaaatgtacctaccccgttctcaaggaggatgcgcctagacagcatgtggagaccttcttccagaaaatggataaaaataaggatggagtggtgacaatcgatgaatttatcgagtcctgccagaaggacgagaatatcatgcggtctatgcagctctttgagaatgtcatttag

SEQ ID NO: 192582 - DNA, 690 bp, synthetic construct
  misc_feature 1..690: note = Description of Artificial Sequence: Synthetic coding sequence
  source 1..690: mol_type = other DNA
atgaacctggagggcctggagatgatcgccgtgctgatcgtgatcgtgctgttcgttaagcttctggagcaatttggactgatcgaagccgggctggaagatagcgtggaggacgaactggaaatggccactgtcagacatcgccccgaagctcttgagctcttagaagcacagtctaaatttaccaagaaggagctccagattctctacagagggttcaaaaacgaatgccccagtggggtggtgaacgaagaaacgtttaaagagatctatagccagttttttccacaaggggactccacgacctacgcccactttctgttcaatgcctttgataccgaccataacggggcagtttcattcgaagatttcataaagggcctcagtatcttacttagaggtacggtccaggagaagttgaactgggcctttaacctgtatgacattaacaaggatggatacatcaccaaagaggaaatgctggatattatgaaggccatctacgatatgatggggaagtgcacctatcccgtgctgaaagaagatgcacctcgccagcatgtggagacattcttccagaagatggacaagaataaggacggcgtggtcactatcgacgagtttattgagagctgtcagaaggatgaaaacataatgcgaagtatgcagttgttcgagaatgttatatag

SEQ ID NO: 192583 - DNA, 753 bp, synthetic construct
  misc_feature 1..753: note = Description of Artificial Sequence: Synthetic coding sequence
  source 1..753: mol_type = other DNA
atgaacgtgcggcgggtggagagcatcagcgcccagctggaggaggcgtcttcgactggggggttcctgtatgcacagaactcaaccaagagaagcatcaaggaaagactgatgaaactgctgccatgcagtgccgccaaaaccagttcccccgccatccagaatagtgtggaggacgaactggaaatggcgaccgtgcgacaccggccggaagctctggagttactggaagcgcagagcaaatttactaagaaggagcttcagatcctttaccgcgggttcaagaacgaatgtccttccggagtagttaatgaagaaacttttaaggagatctactcacaattcttcccacagggcgatagcactacttatgcacattttctctttaatgcctttgacactgaccataatggggccgtgtcctttgaggattttataaagggcctatccattctgcttcgaggcaccgtgcaggagaagttgaattgggcctttaatctgtacgacattaataaagacggatacataaccaaggaggagatgctggacatcatgaaggccatctatgacatgatggggaaatgcacctatccagttctgaaggaagacgcgccccggcagcatgtggagaccttttttcagaagatggacaaaaacaaggacggggttgtcaccatcgacgagtttattgaaagctgccaaaaggatgagaacattatgaggtccatgcaactttttgagaacgtcatttag

SEQ ID NO: 192584 - DNA, 567 bp, synthetic construct
  misc_feature 1..567: note = Description of Artificial Sequence: Synthetic coding sequence
  source 1..567: mol_type = other DNA
atggccaccgtgcggcaccggcccgaggccctggagctgctggaggcccagtctaaattcacgaaaaaggagcttcagattctgtacaggggatttaagaacgaatgcccaagtggcgtcgttaacgaggaaaccttcaaggaaatctactctcagtttttccctcagggggattccactacatacgctcacttcctcttcaatgcctttgacacggatcacaacggtgcagttagctttgaggactttattaagggcctatctatcctgttgcgcggtaccgttcaggaaaaattgaattgggcattcaacctctatgacatcaataaggacggttatatcaccaaggaggaaatgttagacattatgaaggctatctacgacatgatgggaaagtgtacatacccagtgctaaaggaggacgcccctcgccagcatgtagagaccttctttcagaagatggataagaataaagacggggtggtgacaatagacgaatttatcgagagttgccaaaaggatgagaacatcatgcggagcatgcaacttttcgaaaatgtaatctag

SEQ ID NO: 192585 - DNA, 651 bp, synthetic construct
  misc_feature 1..651: note = Description of Artificial Sequence: Synthetic coding sequence
  source 1..651: mol_type = other DNA
atgaacgtgcggcgggtggagagcatcagcgcccagctggaggaggccagcagcaccggagacagcgtagaagacgaattggaaatggcaaccgttagacataggcccgaagctctcgaactgctggaggcacagtcaaagttcaccaagaaggaacttcagatcttgtacaggggcttcaagaatgagtgcccgtctggcgtggtgaacgaggagacatttaaagagatttatagtcagttttttcctcagggcgactcgactacctatgcgcacttcctgttcaatgcatttgataccgatcacaacggagccgtgtcttttgaagatttcattaagggcctgtcaattctcttgcgtggcactgtgcaggagaagctcaactgggctttcaacctctacgatattaacaaggatggatacataacaaaggaggagatgctcgacattatgaaagccatctatgatatgatgggcaaatgtacatacccagtgcttaaggaggatgcccctcgccaacatgtagagacattttttcagaagatggacaagaacaaggacggagtcgtgaccatcgacgagtttattgaatcatgtcagaaagacgaaaacattatgagatccatgcagttattcgagaacgtgatttag

SEQ ID NO: 192586 - DNA, 567 bp, synthetic construct
  misc_feature 1..567: note = Description of Artificial Sequence: Synthetic coding sequence
  source 1..567: mol_type = other DNA
atggccaccgtgcggcaccggcccgaggccctggagctgctggaggcccagagtaaattcactaaaaaagaactgcagattctctatagagggttcaagaacgagtgcccctccggggtcgtgaatgaggagacctttaaagaaatttattctcagtttttccctcagggggattcgacaacctatgcccacttccttttcaatgccttcgatacagaccataatggagccgtgagctttgaggatttcatcaagggcctttctattctcctgaggggcaccgtgcaagagaaactcaattgggcctttaacctgtacgatataaataaagatgggtatatcactaaggaagagatgctagacataatgaaggccatttatgatatgatggggaagtgcacctacccggtgttaaaagaggacgcgccccggcaacatgtagagactttttttcagaaaatggacaagaataaggatggtgtagtgaccatcgacgaattcatcgaaagttgtcaaaaagatgagaatattatgcgttccatgcagttgttcgagaacgttatctag

SEQ ID NO: 192587 - DNA, 549 bp, synthetic construct
  misc_feature 1..549: note = Description of Artificial Sequence: Synthetic coding sequence
  source 1..549: mol_type = other DNA
tgaggcatgaacgccggcttcgaggactgcctggtgttcgacgagctgatggataaattcagcaacgatctgagtctgtgcctgccagtatttagccgcctgcgcatacccgacgatcacgccatctccgatctgagcatgtataactacattgagatgagagcccacgttaatagtagctggtttattttccaaaaaaacatggagcgcttcttgcacgcaatcatgccatccaccttcatacctctgtacactatggtcacattctcgcggatccgttaccacgaggctgtgcaacggtggcactggcagaagaaggtgattaacaaggggttgttctttctgggctctctcatcgccatttcaagtacctatctcttaatccactacatgagccctaggagcttcctccggctgcgccggccctggaattggatcgctcactttaggaacaccacttgctttcctgctaaggctgtagactctctagaacagatctctaatctcatcagcagattgctaagccactccgaaatcctgcagacatag

SEQ ID NO: 192588 - DNA, 1359 bp, synthetic construct
  misc_feature 1..1359: note = Description of Artificial Sequence: Synthetic coding sequence
  source 1..1359: mol_type = other DNA
atggacagcagcgtgatccagcggaagaaggtggccgtgatcggcggtggactggtcggttcactgcaggcttgtttccttgctaaaaggaacttccagattgacgtgtatgaggcaagggaggacactcgggtcgccacattcacccggggtcgaagcattaacctggcactcagtcatcgcgggaggcaggcacttaaagccgtaggcttggaggatcagatcgtttcacagggcattccaatgagagcacgtatgatccacagcctgagtggcaaaaagagtgccatcccctatggcaccaaaagccagtatatactctctgtttccagggaaaatctgaacaaagacttgcttacagctgcagagaaatatcccaatgttaagatgcattttaaccacagactgctgaagtgtaatccagaagagggtatgattaccgtactgggcagtgacaaggtgcctaaagacgtaacttgcgacctaattgttggctgcgatggagcttactccacagttaggagccacctcatgaagaagcctcgattcgattacagccagcagtatattcctcatggctacatggaactgacaatcccccccaagaacggagactacgcaatggagcctaactacctgcacatctggccaaggaatacgttcatgatgattgctttgccaaacatgaacaagagtttcacatgcacgttgtttatgccattcgaggagtttgaaaaacttttaacctctaatgacgtggttgatttttttcagaaatacttcccagacgctattccactaataggggaaaagctgctcgtccaggatttctttcttctgcccgctcagcctatgatttcagtgaaatgcagctcgtttcatttcaaatcccactgtgtgctccttggagatgctgcccatgccatcgtgcctttttttgggcaggggatgaatgcgggttttgaagattgcttggtgtttgacgaattgatggataagttcagcaacgacctaagcttgtgtcttccggtgttctctaggctccgcatcccagacgaccacgcaatatcagatctctcaatgtacaactacatcgaggttacattctcccgaattcgctaccacgaagcagtgcaacggtggcattggcagaagaaggtaattaataagggtctcttctttctgggatctcttattgcgatcagctccacttacctactgatacattatatgtcaccccgctcttttctgaggttacggcgtccctggaattggatcgcacattttaggaataccacttgttttccggcaaaagctgtggacagcttggagcagatttccaacctgataagcagatag

SEQ ID NO: 192589 - DNA, 1422 bp, synthetic construct
  misc_feature 1..1422: note = Description of Artificial Sequence: Synthetic coding sequence
  source 1..1422: mol_type = other DNA
atggacagcagcgtgatccagcggaagaaggtggccgtgatcggcggcggtttagtgggctccttacaggcatgctttctagccaagaggaacttccagattgacgtgtacgaggcccgagaagacacaagggtcgccacctttacaaggggccgatccattaatctcgcactgagtcatcgcgggcgtcaagctctgaaggccgtgggccttgaagatcagattgtgtcccagggcatccccatgcgggcccggatgatccactccctgagcggaaagaagtcggcgatcccgtatggaacaaagagtcagtacatactgtctgtgtctcgcgagaacctgaacaaagacttactgaccgccgcagagaagtatccgaatgtgaaaatgcactttaatcatcgcttgttgaaatgtaaccctgaggaaggcatgattacggttctgggctcggacaaggtccctaaggacgtcacttgcgaccttattgtggggtgcgatggcgcctattccacagtcagatcacacctgatgaagaagcctaggtttgactattctcagcagtacattccgcatggctatatggagctgactatacccccaaagaacggcgattatgctatggaaccgaactatctgcacatctggcctcgtaacaccttcatgatgattgcattaccaaatatgaacaagagctttacctgcacacttttcatgccattcgaggagttcgagaaattactcacctccaatgacgtcgtggacttctttcagaagtattttcctgatgctatccctctaatcggggagaaactcctagtgcaggacttttttctgctcccggcccagccaatgatcagtgtaaagtgcagcagctttcacttcaaatctcattgcgttctgctgggcgacgccgcccatgccattgtacccttcttcgggcagggcatgaatgccgggttcgaagattgcctggtatttgacgagctcatggacaagttcagtaatgacctttctctgtgcttgccagttttcagccggttgagaatccctgatgaccatgcaattagcgatctctcgatgtataactacatcgagaaaaatatggaacggttcctccacgctattatgcccagtacttttatccccttatacaccatggtcactttttctagaatcaggtaccacgaggctgttcagagatggcattggcagaagaaggtgattaataagggccttttcttcctaggcagcttaattgcgattagctccacttatctccttattcattacatgtctccaaggtccttcttgagattgcggcgaccttggaattggatagcgcactttaggaataccacctgttttcctgccaaggccgtggacagcctcgagcagatctccaatctcataagcagatag

SEQ ID NO: 192590 - DNA, 1461 bp, synthetic construct
  misc_feature 1..1461: note = Description of Artificial Sequence: Synthetic coding sequence
  source 1..1461: mol_type = other DNA
atggacagcagcgtgatccagcggaagaaggtggccgtgatcggcggaggactggtcggctctctgcaggcctgtttcctcgccaaacgaaattttcaaattgatgtgtatgaggctcgggaggatacgagggtagctactttcactcgggggcggtcgattaatctggcgttgagccaccggggccgccaggcgctcaaagctgtaggtctagaggatcagatcgtttcacaggggatcccaatgcgggctcgcatgatccattccttgtccgggaagaagtccgctattccctacgggactaagtcccagtacatcctgtccgtgagcagggaaaacctcaataaagatttgctgactgcagcagaaaaataccccaacgtcaagatgcacttcaaccatcggttgttaaagtgtaacccagaagaaggtatgatcacagtcctgggcagtgataaagtcccaaaagacgtgacttgtgatctcattgttggttgcgatggcgcctattccactgtgcggagtcaccttatgaaaaaaccccgctttgactactctcagcagtatattccccatggttatatggaactcaccatcccaccaaaaaacggcgattatgccatggagcccaattatctccatatctggccccgcaacacgtttatgatgattgcactcccgaacatgaacaagtccttcacgtgtactcttttcatgccattcgaagaatttgaaaagcttctcacctccaatgatgttgttgacttctttcaaaaatactttcctgatgcaataccactcatcggtgaaaagctgctggtccaggatttctttctcctgcccgcacagcccatgattagcgtgaagtgcagctcctttcacttcaaatctcattgtgtgctgcttggcgatgccgcacatgccatcgtccccttcttcggccaaggcatgaatgcgggattcgaggattgccttgtgttcgatgagctgatggacaagttttcaaatgatctttcgttatgtctgcccgtgttcagcagactcagaatacccgacgatcacgctatttctgacctcagcatgtataattacatcgaaatgcgggctcatgttaattcaagttggtttatctttcagaagaacatggagagatttctgcatgccattatgccaagtacattcatccccctttacaccatggtgaccttctcaaggataagatatcacgaagcagttcagaggtggcattggcagaagaaagtcatcaacaaggggctgttcttccttggctcactcattgccatcagctccacttatcttctgattcactacatgtccccccggagcttcctgaggctgaggcggccatggaactggatcgcgcacttccgcaataccacatgctttcccgctaaagcggttgattcactagaacagatctctaacctgatcagtaggtag

SEQ ID NO: 192591 - DNA, 1689 bp, synthetic construct
  misc_feature 1..1689: note = Description of Artificial Sequence: Synthetic coding sequence
  source 1..1689: mol_type = other DNA
atggagctgaagaaggacatcaacgccgtgagcatcgacatgctgctgatcgtccactccgagaaaaggcgagccgcccaggggaccctcagcgatcagcaggcaaatccaagtagcctactgcagaggggtggcggcttccaaggtgtgggtaacggcgtcagacgttggcagaagctggagggaaacgatttccacgaaaacctggttgagaaacaacacccccaacaaccacaagtaattacttcctataatagtcaggggactcagctcactgtggaagtgcacccccgggatgccatgcctcaattattgaagaaatttagtttggccaaacgtctgcaaggagacaagaacggcaatacgcgaccccggcagcccggagggaaggacgcccacgcctatccctgggatcgaagttctttaaaaagcatgagcctcgacctgcagcagttcgaaaagttggatatttatgcatcacaggtcacagccaagtccggactggatgaactcgtctccgatctgctccaggaagcgcacacagatctggagcgagtgcgggccatttggatctggatttgtcatcatatcgagtatgatatcgctgccgcacaggagaaggaccggcaggctttcaagcctactgacattctgagaacacagaagactaactgcgatggctatgctggcctgtttgagcgaatgtgtcgcttggccggggtgcagtgtatgacagtacccggctactccaaaggattcggctaccaaactggacagtctttttcaggcgagttcgatcacgcatggaacgctgtgtacctagagggaagatggcatttggtggatagcacatggggatctggacttgtggatactataacgtccaagttcacatttttgtataatgagttctacttcctcacgcaccctgccctcttcatcgaggaccactttccggataacaagaactggcagctgctaaagcccccccagagcttacgtcagttcgagaataacatgtatcataagtccgagttctataacaaaggaatgctcagtgcccatcccgagaccagcatgatccggacagtaaacggaaaagccactgtcacaatagagtcctgtgctcccaccctgtttatgttcatgctcaacgggaaacaggagcatggactgctatccctccggaaaaatgggatgaagttggaagtgtatccgccaactatgggaacccataaactgcagatcttcgcaaaaggaaattctgacatatactctagtgtgcttgaatacacactcaaatgtaactacgtagacatgggcgtgcagctacccgccgagcttcatcagcctgtgggacctagttggttcagtgagcagatgggaattatgaagccgtctcaccccgatcctatcatccatacatctgatggacggtgtagcatttctttctctgtcgaggagggcataaacgtgctcgcttcacttcacggagacgatggccccatcacggaggagacacagagacgttacatatttcaacttcacagagagaagcagacggaactgaaggtgcaactgccccacgcaggaaagtttgccctcaaggaggtctacgtcatggtgctggaaaatgctaatcacaatttctactcttacatcttaaagtacaaggtcaacgcccaatag

SEQ ID NO: 192592 - DNA, 1986 bp, synthetic construct
  misc_feature 1..1986: note = Description of Artificial Sequence: Synthetic coding sequence
  source 1..1986: mol_type = other DNA
atggagctgaagaaggacatcaacgccgtgagcatcgacatgctgctgatagtgcactcagaaaaaaggcgggctgcccagggcaccctctccgaccagcaggctaacccctcatctctcctgcagcgtggcgggggttttcagggggtgggaaatggggttcgccgctggcagaaattagaaggcaacgacttccatgagaatctggtggagaagcagcatccccagcagccacaggtgattacaagctacaactcccagggcacccagcttactgtcgaggtgcatccccgagacgctatgcctcagctgctcaaaaagttctcactggccaaacgcttgcaaggtgacaagaacgggaatacccgcccgagacagcctgggggaaaagatgcacatgcctacccgtgggatcgcagctcgctaaagtctatgtctcttgatctgcaacagtttgagaaactggatatctacgcatcccaggtgacggctaagtccggcctcgatgagcttgtgtccgatctcctgcaggaggcccatacggatttggaaagagtgagggccatctggatctggatctgtcatcacattgagtacgatatcgccgcggcccaggaaaaagaccgtcaggctttcaaaccgactgatattctgcggacccaaaagactaattgtgacggctacgccggactctttgaacgaatgtgcaggctggctggcgtgcaatgcatgactgtgccaggctattcgaaggggtttggatatcagaccggccaatctttctccggtgaattcgaccacgcatggaacgccgtatatcttgaaggcagatggcacttggtggattctacatggggatctgggcttgtagacaccatcacttccaaattcacgttcctctataatgagttctactttctcacgcaccccgcgctctttattgaagaccatttcccggataataagaattggcagttgctgaaacctccgcagagtcttagacaattcgagaacaatatgtaccacaaatctgagttctacaataaggggatgctgagtgctcaccctgagacaagtatgatccgtacagtcaatgggaaggccaccgttactatcgaatcgtgtgcgccaaccctctttatgtttatgttgaacggtaagcaggagcacggcctgttgagcctgcgtaaaaacggcatgaaactggaagtgtatcccccaacgatggggactcacaaactgcagatttttgccaagggaaattctgatatctacagtagcgttctggaatacaccctgaaatgtaactacgttgacatgggcgtccagttacctgctgagctgcatcagcccgtgggaccctcatggttttctgaacagatgggaatcatgaaaccctcacaccctgatcccataattcacactagtgatggccgatgctcgatctctttcagcgttgaggagggtataaatgtgctggcttctctgcatggtgatgatggaccaattacagaggagacacagaggcggtatatctttcagttgcacagggaaaaacagactgaactcaaggtgcagcttccccacgcaggcaaatttgccctgaaaattttcgtcaaaaaaaggcaggagcctggcaattacatctttgtttttaactacctggtctgctgcgccaacactaaagtcaactggccaatgttccctgagagcttcgggaactgggggcaagataatgaactccttgaacccctttctggcgtgctaccggccaatagaaacgtacccttcaagctgaaacttcacgggatagctaaggttctcgttaaggggcaggacacctggcctttaaccctcaatcacgaaggatattgggaagggagctgctctactgccggttgtcaagaggtgtatgtcatggtgctggagaacgccaatcacaacttttatagctatattcttaaatataaagtgaacgcccagtag

SEQ ID NO: 192593 - DNA, 1173 bp, synthetic construct
  misc_feature 1..1173: note = Description of Artificial Sequence: Synthetic coding sequence
  source 1..1173: mol_type = other DNA
atgaagctggaggccgtggaccggatgaaccccagcctggtgtgcgtggcctccgtgacagacgtggtggactcgagattcctagttcatttcgacaactgggatgacacttacgattattggtgtgacccaagcagcccctacattcaccccgtcggttggtgccagaaacaggggaagcccttgacaccccctcaagattatcctgaccccgacaacttttgttgggagaaatacctggaggagacaggtgcctccgcagtaccgacatgggcattcaaggtgcgcccgcctcacagttttctggtaaacatgaaactggaggcagtggaccgccgtaaccctgcccttatcagggttgcctccgtagaggacgttgaagatcaccggatcaaaattcactttgacgggtggtctcacggctacgacttctggatagatgcagatcatcccgacatccaccccgctggctggtgctccaagaccggtcacccgttgcagccaccactgggtccccgcgagccatcctccgcgagtcccggggggtgtcctccattgagttaccggtcactcccccacactcggacaagtaaatactcattccaccacaggaaatgccctaccccggggtgtgacggaagcggtcatgttactggaaaattcaccgcacatcactgcttgtctggctgtcctttggccgaacgtaatcagtcacgactgaaggcagagttgagcgactccgaagcctcagcccgaaagaagaacctgtccggcttctctcctcgcaaaaaacccagacatcacggaaggatcggccggcctccaaaatatcgcaaaattccacaggaggacttccagacactcacccctgatgtggttcaccagagcctctttatgtcagctctgagtgcccatccagaccgcagtctttcagtgtgctgggagcagcattgcaagctgttgcccggcgtcgctggcattagcgcatcaaccgtcgccaagtggacgatagacgaggtgtttggatttgttcagactcttaccggctgcgaagatcaagcaagacttttcaaggatgaggtgcggtgtaagtgccgcgtcggcgaccgggcgggtgtaacagtactcaaaaccgccgggtcccgatgtccacctcagcgccacttttgctag

SEQ ID NO: 192594 - DNA, 2232 bp, synthetic construct
  misc_feature 1..2232: note = Description of Artificial Sequence: Synthetic coding sequence
  source 1..2232: mol_type = other DNA
atgcggcggcgggagggccacggcaccgacagcgagatgggccagggacctgtccgagagagtcagtcctcagaccctcccgccctccagtttcgaatcagcgagtataagccccttaatatggcaggcgtggagcagccaccgagccccgaattacgacaggaaggggtcacagaatacgaggacggcggcgctccagcgggagatggcgaggcaggaccccagcaggccgaggatcacccccagaaccccccagaagatccaaaccaggacccacctgaagatgattctacgtgtcaatgccaggcctgcggtccccaccaagctgctggacccgatttagggtcctccaatgatggttgcccccagctattccaagagcggtcggttatcgtcgagaactcatccggcagcacctcggcaagcgagctgctcaagcctatgaagaaacggaaaagaagggaataccagagtccgagcgaagaggaatccgaacctgaagccatggaaaaacaagaagagggcaaggatcctgagggccagcccaccgcatcaactcccgaatctgaggagtggtcctcctctcagcccgctacaggggaaaagaaggagtgttggagctgggaatcatacctcgaagagcagaaagccatcaccgcccctgtgtctctcttccaggactcccaagcggtcacccacaataagaatggttttaagctgggcatgaagctggaaggcattgacccacagcacccctctatgtacttcattttaactgtggcagaggtgtgcggctacaggctgcggctacattttgatggctatagcgagtgccacgatttttgggtgaacgctaactccccggacatccatcccgcagggtggttcgagaagacaggccataagttgcagcccccaaagggatacaaagaagaagaattcagctggtctcagtacctcagaagcaccagagcccaagccgcccccaaacacctgttcgtctcgcagagccacagccctccccccctgggctttcaggtggggatgaaactggaggcggtggatcgcatgaatccttccctcgtctgcgtggccagcgtcactgacgtggtggacagtcgatttctagtgcacttcgacaattgggatgacacatacgattactggtgcgacccttcaagtccatatatccaccccgtcggatggtgtcagaaacaggggaagccgttaaccccaccacaggactatccagatccggacaacttttgctgggaaaagtatctcgaggagaccggcgcatcagctgtgccaacatgggcctttaaggtgcgccctccccattcctttctcgttaacatgaaattggaggccgtcgacaggagaaaccctgccctgatccgcgtcgcctcagttgaggacgtggaagaccataggattaagattcactttgatggttggagccacgggtatgatttttggattgatgccgatcatcccgacatccatcccgctggctggtgctcaaaaactggccaccccctgcagcctcctttagggccccgggaaccttcaagcgcatcccctggcgggtgtccgcccctctcttaccgcagtctcccccacacacggacgtccaaatacagttttcatcacaggctgttcttccctaggaaatgcccaaccccaggctgcgatggctccggacatgtcactggaaagttcaccgcccaccattgtttgagtgggtgcccccttgctgaaaggaaccaatccaggctgaaggcagagctgtccgactccgaggcatctgccagaaaaaagaacctgtctgggttcagtcccaggaaaaaaccccgtcatcacggcagaatcggtcggccgcctaagtatcgaaagatcccccaggaggatttccagaccttgacccccgatgtagttcaccaatctctgtttatgagcgccctatccgctcacccagaccgctccttgtccgtgtgctgggaacagcattgtaagctccttccaggggtggcgggcatttctgcctcaacagtggctaagtggactattgacgaagtcttcggcttcgtgcagactctcactggctgcgaggaccaggccagactttttaaagatgaggtgagatgtaagtgccgggtgggcgacagagcaggagtgaccgttctgaaaacggccgggtctagatgtccaccacagcggcatttctgttag

SEQ ID NO: 192595 - DNA, 2319 bp, synthetic construct
  misc_feature 1..2319: note = Description of Artificial Sequence: Synthetic coding sequence
  source 1..2319: mol_type = other DNA
atgcggcggcgggagggccacggcaccgacagcgagatgggccagggcccagtacgggagagccagagttcagaccctcccgccttgcaattccgtatcagcgagtacaagcccctgaacatggcaggggtagagcagcccccctctccagagttgagacaggagggtgtaaccgagtacgaggacgggggtgcacccgctggcgatggcgaagccggaccccagcaggctgaggaccacccacagaacccgccggaagacccaaatcaggaccccccagaggatgatagtacctgccaatgccaggcctgtggacctcatcaagccgctgggcccgacctagggtcatccaacgatggctgcccacagctcttccaagagagatcagttatcgtggagaattcatccggaagcacaagcgctagcgaactccttaaaccaatgaaaaaacgcaagcgccgggagtaccagtctccatctgaagaggaatccgagccggaggccatggaaaaacaggaagaagggaaggaccctgagggccagcccaccgcgtccacccccgaatccgaagaatggtcctccagccagccagccacaggggaaaagaaagagtgttggtcctgggagagttacctcgaggagcagaaggcaatcaccgcccctgtgagtttgttccaggactctcaggccgtgacacacaacaagaatggtttcaagctgggcatgaaactcgaggggatcgatcctcagcatcctagcatgtattttatactgaccgttgcagaggtttgcggctataggctccggctgcacttcgacggctattcagagtgtcatgacttttgggtgaacgccaactccccagacatccaccccgctggctggtttgagaagaccggacataagctccagcctcccaagggctataaagaagaggagttctcatggtcccagtatttacggtcaacccgggcacaggcagctcccaagcacctgttcgtatcacagtcacactcccccccacccctgggctttcaggtcgggatgaagcttgaggctgttgaccgaatgaatccatccctagtttgcgtcgcgagtgtgaccgatgtcgtcgacagccgcttccttgtccatttcgataactgggatgatacatacgattattggtgtgaccccagctccccctacattcaccccgtcgggtggtgtcagaagcaagggaagcccttaaccccgccacaggattacccagatcccgacaatttttgctgggagaagtatctggaggagacaggagcaagcgcggtgcctacctgggcctttaaggtgagacccccgcactccttcctagtgaacatgaagctggaagccgtggaccgacgaaaccccgctcttatcagggtggcgtctgtcgaagacgtggaggatcacagaatcaagatccactttgatgggtggagccatgggtatgatttctggatagatgctgatcacccagatattcatcccgcaggctggtgttccaagacagggcaccccctgcagccaccactgggcccccgggagcccagttccgcatctcccggaggatgtccacccctgagttatcgcagcctccctcacacacgcacaagcaaatactctttccatcatagaaaatgcccaacgccaggctgtgatggctcagggcacgtgactgggaagtttacagcgcaccactgcttgtctggttgtcctcttgctgaacggaatcaaagtcgcctgaaggcagagctcagcgatagtgaagcctccgcacgcaaaaagaatttgtctggcttttccccacgcaagaagccacgccatcatggccgaatcggtagaccgcctaagtaccgaaaaattccgcaggaggactttcagaccctgacaccagatgtggttcatcagagcctgttcatgtctgccttgtccgctcaccccgatagatccctgtcagtgtgctgggagcagcactgtaaactgttgcctggggtggccggtatttccgcaagtactgtggcgaagtggacaatcgatgaggtgttcggcttcgtacagactctcactggctgcgaggatcaggcgcgtctgttcaaagacgaggcaagaatcgtgagggtaacgcatgtgtcaggcaaaaccctggtttggacagttgcacagctcggtgatctcgtatgctcagatcacttacaggaaggaaaggggattttagagacaggagtgcacagcctgctttgttcactccccactcatctgctagccaaactttcgtttgcatctgacagtcagtactag

SEQ ID NO: 192596 - DNA, 2523 bp, synthetic construct
  misc_feature 1..2523: note = Description of Artificial Sequence: Synthetic coding sequence
  source 1..2523: mol_type = other DNA
atgcacctggtggccggcgacagccccggcagcggcccccacctgcctgctaccgccttcataatcccggcaagctccgccactctgggactgccctcttctgccctcgacgttagctgttttcctcgcgagcctatacacgtcggagctcctgaacaagttgcgggctgcgagcctgttagtgcaactgttctgccacagctcagcgcgggcccagcaagcagcagtacaagtactgtgcgactgttggaatggacggaagcagccgcgccgcctcccggaggcggcctgaggtttagaatttccgaatacaaaccactaaatatggctggcgtggagcagcctcctagcccagagctgcgtcaggagggcgtgaccgaatatgaggacggaggggcacctgccggggacggagaggctggcccacagcaggctgaggatcaccctcagaatcctcctgaggaccctaatcaagaccccccagaggacgattcaacgtgtcagtgtcaagcttgcggcccacaccaggcagctggacccgacttggggtcaagtaacgacggatgcccgcaattgtttcaggaacgttctgtcattgtggaaaactcttccggctccacgagcgccagtgaactcctcaagcccatgaagaagcgcaagcgacgggaatatcagagcccgtctgaggaagaatcggaacctgaagccatggaaaagcaggaggaaggcaaggatccggaggggcagcccactgcttccaccccggaaagcgaggaatggagctcttctcagcctgccacaggcgagaaaaaggagtgctggagttgggaatcctacttggaggagcagaaagccattaccgctcctgtctcattgttccaggatagccaggccgtgactcacaataaaaacggtttcaagctggggatgaagttggaagggatcgacccacagcatccaagtatgtactttatcttgacggtggccgaagtgtgcggatatcgacttcgtctccacttcgacggctattccgagtgtcacgacttctgggtgaatgctaactcacctgatatacaccccgctgggtggttcgaaaaaacaggtcataagctacagcctcccaaggggtataaggaagaagagttttcatggtcccaatatctgcggtctaccagggctcaggctgcacccaaacatctgtttgtttcccagagccacagcccccctccgctgggttttcaggttggcatgaaactggaggccgtggatcgtatgaatcccagcctggtgtgcgtggcatctgtaaccgacgtcgttgatagtcggtttctggtgcacttcgacaattgggacgacacatatgactattggtgtgaccctagctctccgtacattcatcctgtcggctggtgtcaaaaacagggaaagcctttgacaccgccccaggattaccccgaccctgacaacttctgttgggagaaatatttggaggaaacaggggccagcgcagtccctacttgggccttcaaggttcgcccgcctcacagctttttagttaatatgaaacttgaggcggtagatcggaggaaccctgccctgatccgtgtggccagcgtggaggacgtggaagaccataggattaagatccactttgacggctggagccacggatacgatttttggatcgacgccgaccatccagacatccaccccgccggatggtgtagcaaaacaggccaccccctgcagccaccgttagggcctagagaaccctcttccgcatcccccggtggctgtccaccactctcttatcgcagtcttccgcatacaagaacctccaaatatagcttccaccaccgaaaatgtccaacacctggctgtgacggctctggccatgttactgggaaattcacagctcatcattgtctgtccgggtgtcccttggctgagaggaatcaatctcggctaaaagcagagctgagcgattctgaagcatctgctcggaaaaagaatctgtcgggcttctcaccccgcaaaaagcccagacaccatggccgcatcgggcggccgcccaagtacaggaaaataccacaggaggacttccagacactgacacctgacgtagtgcaccagtctctattcatgtcagccctgagcgcccaccccgaccggtctctcagtgtttgctgggaacagcattgtaagcttttgcccggcgtggctggcataagtgcttctacagtcgctaaatggacgatcgacgaggtgttcgggtttgttcagactctgactggctgcgaagaccaggcacggctctttaaggatgaggctcgtatcgtgagagtcactcacgtcagcggcaagactctcgtttggacagtcgcccagctcggggatcttgtttgctctgatcatctgcaggaaggcaagggcatccttgagaccggagtccactcactgctatgttctctcccgacacatttacttgcaaaattgtcattcgcctccgacagccagtattag

SEQ ID NO: 192597 - DNA, 1617 bp, synthetic construct
  misc_feature 1..1617: note = Description of Artificial Sequence: Synthetic coding sequence
  source 1..1617: mol_type = other DNA
cagaaggccatcaccgcccccgtgagcctgttccaggacagccaggccgtgacccacaataagaacgggttcaaattgggcatgaagctggaggggatcgaccctcaacatcccagcatgtatttcattctgactgttgctgaagtgtgcgggtacaggctgcggctacatttcgatgggtacagcgagtgtcacgacttctgggtgaacgctaactccccagatatccacccagctgggtggttcgaaaaaacaggtcacaaactgcagcctcctaagggctataaggaggaagagttcagttggagtcagtatctgagatccactagagcccaagccgctccaaagcatctattcgtttcacagtcgcactccccaccacccctgggattccaggtggggatgaagttggaggcagtggacaggatgaaccccagtcttgtatgcgtggcttccgtcactgacgtagtggactctcgattcctggtgcactttgacaattgggatgacacatatgattactggtgtgacccctcctccccgtatattcatccagtgggctggtgccagaaacaaggcaagccactgacccccccccaggattaccctgaccccgataacttttgttgggaaaagtacctggaggagactggcgccagcgcggtcccaacttgggcctttaaggtgcgcccaccccattcatttctggtgaatatgaaactcgaggcagtcgatcggcggaatcccgcactgatccgcgttgccagtgtcgaggatgtggaggatcatcgaatcaagatacatttcgacgggtggtcccacggctacgatttctggattgatgcggatcatccagatattcacccagccggctggtgctccaaaacagggcacccgctccagcctccattgggccctagggagcccagtagcgcgtctccagggggctgtcccccactgagttacagatccctgccacacaccagaacaagtaagtactctttccatcaccgtaagtgtccaacccccgggtgcgacggtagcggtcacgtgaccggaaaatttaccgcccaccactgcctcagtggttgtccattggcagagcgcaatcagtcgaggcttaaagcagaattgagtgattcagaagcgagcgccaggaagaagaacctgtctgggttttcgccccggaagaagccacgccatcacggtagaattggacgccctcccaagtaccgcaagattccacaggaggactttcagaccctcacccccgacgtggtgcaccagtccctgttcatgagcgccctgtccgcccacccagacaggtccctttcagtgtgctgggaacaacattgtaagctgctgcccggcgtggcaggcatctccgcctctacagttgcgaagtggacaatagatgaggtgtttggcttcgtgcaaacactaacggggtgcgaagaccaagcaagactattcaaagacgagatgattgacggcgaagcttttctgctcctgacacaggccgacattgtgaaaatcatgagcgtgaaactcggccccgccctgaaaatttataatgcgatcctgatgttcaaaaatgcagatgatacactgaaatag

SEQ ID NO: 192598 - DNA, 2523 bp, synthetic construct
  misc_feature 1..2523: note = Description of Artificial Sequence: Synthetic coding sequence
  source 1..2523: mol_type = other DNA
atgcacctggtggccggcgacagccccggcagcggcccccacctgcctgctaccgcgtttatcatccctgcctcaagtgccaccctcgggctgccgtctagtgccctcgacgtatcctgttttcctagggagcccatccatgttggcgctccggaacaagtagccggatgcgagcctgtgagcgccaccgttctgcctcagttgtctgccgggccagcctctagttcaacgagcaccgtgcggctgctggaatggaccgaagctgcagccccacccccaggtggtggtctgaggttccgaatctctgaatacaaacctttgaatatggcgggtgtagaacagccaccttctcccgaactgaggcaggagggcgtgaccgagtacgaggatggaggagctccagccggagacggcgaagctggaccccagcaagcagaagaccaccctcaaaatccaccagaagacccaaaccaggaccctcccgaagatgacagcacatgtcaatgccaggcctgtggaccccaccaggctgccgggcctgaccttggctcaagcaatgacggctgtccacaattatttcaggagcggtctgtgatcgtcgagaacagttctggctccacctcagcttcagaactgttgaagcccatgaagaagaggaaacgaagagaataccagtctccttctgaggaagaatctgaaccagaggccatggaaaaacaggaggagggtaaggacccagagggccagccaaccgcctctactccggaaagcgaagaatggtcttcttcccagcctgcgactggcgagaagaaggagtgctggtcatgggaatcgtacctggaagagcagaaagccatcacggctccagtttctttgtttcaggattctcaggccgtgacacataacaaaaacgggtttaaattgggtatgaagctggaggggatcgacccacagcacccgtcaatgtactttatcttaaccgtggcggaagtctgcggctaccgcctcagactacacttcgacggctacagcgaatgtcacgacttctgggttaacgctaactccccagatatccaccctgccgggtggtttgagaagactgggcacaagctccagccccctaagggctacaaagaagaggaattctcttggtcgcagtatcttcggtcaaccagagcgcaggcagctcctaagcatttgtttgtgagtcaaagccacagtcctcccccgttgggattccaggtcggaatgaaactggaggcagtcgaccgcatgaatccctctctggtgtgtgtagcatctgtcaccgatgtggtggactctaggttcctggtgcattttgacaattgggacgacacctatgactattggtgcgatccatcctctccatatatccacccggtcggatggtgtcagaaacaggggaagcccctcacaccacctcaggattacccagaccctgacaatttttgttgggagaagtatttggaggaaacaggcgccagcgcggtgcccacctgggcctttaaagtgcgccctcctcatagctttctcgtgaacatgaaacttgaggctgtcgataggcgcaatcccgcactgatccgggtggcctcagtggaggatgtggaggaccacaggataaaaattcattttgatggttggtctcacggctacgacttctggatcgacgccgatcacccagacatccaccccgcgggttggtgctctaagaccgggcaccctttacagccgccgctgggacctcgcgaaccctcctccgcctctcccggaggctgcccccctcttagctacagatccctgcctcacacaagaacgtctaaatattccttccaccacagaaagtgtcccactcccggttgtgacggatcaggtcacgtaactggtaaattcactgcgcaccactgtctgtcaggatgtcctctggcggaacgaaatcagtctcggttgaaggctgaactctctgactccgaagcttctgcccggaaaaaaaacttgtcaggtttttccccacgtaaaaagccgaggcatcacggcaggattgggagaccacccaagtatcgaaagattccacaagaggactttcaaacgctgacacccgacgtggtgcaccaatcgctcttcatgtcagccctgtctgcacacccggacagatccctctcagtgtgttgggagcagcactgcaagttgctgcctggtgtggccggaattagcgccagtacggtggctaagtggactatcgacgaagtctttgggtttgtacagacgctcacaggctgcgaagaccaggcaaggctcttcaaagatgaagccagaatcgtcagagtaacacatgtatcgggaaaaactctggtttggacagtcgcgcagctcggggacctggtgtgcagcgatcatctccaggaagggaaagggatactggagacaggcgtgcattctctgctgtgctctcttcctacacacctcctcgccaagcttagctttgccagcgattcccagtattag

SEQ ID NO: 192599 - DNA, 255 bp, synthetic construct
  misc_feature 1..255: note = Description of Artificial Sequence: Synthetic coding sequence
  source 1..255: mol_type = other DNA
atggccggcgtggagcagccccccagccccgagctgcggcaggagggcgttacagaatacgaggacggcggagccccagcgggcgacggggaggcgggaccacagcaggccgaggaccatccccaaaatccccccgaagatcctaaccaggatccccccgaggacgattccacctgtcagtgccaggcttgtgggccccaccaggcggccggtcctgatttgggcagcagtaacgatggctgccctcaactgtag

SEQ ID NO: 192600 - DNA, 417 bp, synthetic construct
  misc_feature 1..417: note = Description of Artificial Sequence: Synthetic coding sequence
  source 1..417: mol_type = other DNA
atgcacctggtggccggcgacagccccggcagcggcccccacctgccagccaccgcctttattatccccgcaagttcggccacgctgggtctaccgtccagcgctttggacgtgtcctgttttccccgcgaacccatccatgtgggagctcctgagcaggtggccggctgtgaacctgttagcgcgactgtcctgccacagcttagtgccggtcccgctagttctagtacatccacagtgaggcttttggagtggacggaagcggccgccccaccaccgggagggggcctgcgattccgtatttccgagtataagccccttaatatggccggcgttgaacagcctcctagccctgaattgaggcaggagggcgttaccgaatacgaggatggcggtgcccctgcaggagatggttag

SEQ ID NO: 192601 - DNA, 2217 bp, synthetic construct
  misc_feature 1..2217: note = Description of Artificial Sequence: Synthetic coding sequence
  source 1..2217: mol_type = other DNA
atgcggcggcgggagggccacggcaccgacagcgagatgggccagggccccgtgcgggagtcccaatcgtccgatccacctgccctgcagttccggatcagcgaatacaagccactaaatatggctggagtcgagcaacctccttcccctgaactgcgtcaggagggcgtgactgagtatgaagacggaggagcccccgcgggagatggcgaggcaggcccccaacaggctgaggaccatccccagaatcccccggaggatcccaatcaagaccctccagaggacgattctacctgtcaatgccaggcttgtggtccccaccaagccgccggccccgatctaggaagctcaaatgacggttgccctcagttgtttcaggagcggtctgtgatcgtggagaacagtagcgggagcacgagcgcctccgagctccttaaaccaatgaagaaacgcaaacggagggaataccagagccccagtgaggaggagtccgagcctgaggcgatggagaagcaggaggagggtaaagaccctgaggggcagccgacagctagcacccccgagagcgaggaatggtcatctagtcaaccggctaccggtgaaaaaaaagagtgttggtcatgggaatcctacttggaggagcagaaggccatcactgcaccagtttctctattccaagatagtcaggccgtcacccataataaaaatgggtttaagcttggtatgaaactggagggcattgatcctcagcacccgtcaatgtattttattctgaccgtggccgaagtctgtggatacaggctgagactgcatttcgatggctattcagaatgtcacgacttttgggtgaacgccaactctcccgacatccaccccgcaggctggttcgaaaaaaccggtcacaagctgcagcccccaaagggctataaggaagaggaattcagctggtcacagtacctgaggagcactagggcgcaggccgcaccaaagcacctctttgtgtcgcagagccactcgcctccacctctggggttccaggtgggcatgaagcttgaggctgtcgaccgcatgaatcccagcttggtgtgtgtcgcatccgtcactgacgtggtggattccaggttcttggttcacttcgacaactgggacgatacatacgactattggtgtgacccaagttctccttatatacaccctgtgggttggtgccagaaacaggggaagccactgacccctccccaagattatcccgacccggataatttctgttgggaaaagtatttagaggagactggagccagcgccgttcctacctgggcttttaaagttaggcccccacactcattcctggttaacatgaaactcgaagcagtggatagaaggaatcctgccctaattcgtgtcgctagtgtagaagacgtggaagaccatagaatcaagattcatttcgacggatggagccacggctatgatttctggatcgacgccgatcatcctgacatccatcctgccggctggtgctccaagacagggcacccattacagcctcctctgggacctcgtgaaccatcatcagctagcccagggggatgccctccgcttagttatcggagtttgccacacactcgtacttcaaagtactccttccaccatcgaaaatgccccactcccggttgtgacggtagcgggcatgtcactggaaagtttaccgctcaccactgcctctccggatgccctctggctgagagaaatcagagccgcttgaaagccgaactctcagacagcgaagctagcgcccgcaagaagaatctatctgggttctccccacgcaaaaagccaagacatcacgggcggattggcagacctcctaaataccgcaagataccccaggaggatttccagacgttaactccagacgtcgtgcaccaatcgctgtttatgtctgcactttccgcccaccctgaccggtctctgtccgtctgctgggagcagcattgtaaactgctgccaggtgtggctggtatctccgccagcaccgtggcaaaatggactattgacgaagtgttcggctttgtgcagacactgaccggctgcgaggaccaagccaggctcttcaaggatgaagtgagatgtaagtgccgcgtgggtgaccgggctggggtaaccgttctgaagaccgccgggagcaggtgcccccctcagcggcacttctgttag

SEQ ID NO: 192602 - DNA, 870 bp, synthetic construct
  misc_feature 1..870: note = Description of Artificial Sequence: Synthetic coding sequence
  source 1..870: mol_type = other DNA
tgaaccagcggcagcatgcccacccccctgaccttcaccctgctggcgggctcacggcggcgcgccaccagctgttctctgcccaagtctccccctcccttgggcttccaggtcggaatgaaactcgaagctgtggaccggatgaacccaagcctcgtctgtgtagcctccgtgacagatgtggttgatagtcgattcttagtgcatttcgacaactgggacgatacgtatgattactggtgtgatccctcctctccatacatccaccccgtggggtggtgccagaagcagggtaagccactgaccccccctcaagactacccagatccggataacttctgttgggagaaatatctagaagaaaccggtgccagcgccgtcccaacttgggcctttaaagttcggcccccccactcttttcttgtgaatatgaaactggaggccgttgaccggcgcaatcccgccctgattcgggtggcaagtgtcgaagacgtagaagaccatcggatcaagattcacttcgatggatggtctcatggctacgacttctggatcgacgctgatcaccccgatatacaccccgcaggttggtgctctaagacaggccacccactgcagccaccactcggcccaagggaaccatcttctgccagccctgggggctgtccacctttaagctataggagccttccacacacccgcacatccaagtacagtttccaccacaggaaatgccctacacccggatgcgatgggtccggccatgtgacaggcaaatttaccgctcaccactgtctttccggatgtccattagcagaaaggaaccagagtcgactgaaggcagagctgagtgacagcgaggcatcttag

SEQ ID NO: 192603 - DNA, 327 bp, synthetic construct
  misc_feature 1..327: note = Description of Artificial Sequence: Synthetic coding sequence
  source 1..327: mol_type = other DNA
atggccgccgccatggacgtggacacccccagcggcaccaacagcggggccgggaaaaaaaggttcgaagtgaaaaagtggaatgcggttgctctgtgggcctgggatattgtcgtcgataactgcgccatctgccggaaccacattatggatctctgcatcgagtgccaggccaatcaggcatctgcgacctccgaggaatgcacagtggcctggggagtctgcaatcacgccttccatttccattgcatctcaaggtggttgaaaactcgccaggtttgcccactcgataatcgtgaatgggaatttcagaagtatggacactag

SEQ ID NO: 192604 - DNA, 867 bp, synthetic construct
  misc_feature 1..867: note = Description of Artificial Sequence: Synthetic coding sequence
  source 1..867: mol_type = other DNA
tgacggccccacctgcagaaccagtggcggaagcggaagatgaccacctggagttgtctcgtggcaatgatcgtgtccggcgtaatcaccgctgtgtgggccgtgagagcagctccaatttggcgctctcaagtcaagcagaagatgaggatcggcaaacagggaaactgtagaccaccgcgatgtatttgtagtgctctgggtcttctggcgccctggatggctgtggtgttgagccagggcaagcctcctacaaaaaaagccaaagttttgcacaaggccgcctggtcagccaagatcggggccttcctccacagccaggggacaggccagctggccgacggcactccgacagggcaggatgccctggtcttaggattcgattggggaaagttcctcaaggaccattcatataaggccgcccctgtgtcttgtttcaagcacgtgcccctgtacgaccagtgggaggacgttatgaaaggtatgaaagtggaggtgttgaactcggatgccgtgcttccttcacgggtgtactggattgcgtcagtgatacagactgcaggctatagggtattgttaaggtacgaaggctttgaaaacgatgcttctcatgacttttggtgtaacctgggcacagttgatgtccatcccataggctggtgcgcaatcaattcaaagatccttgttcccccccgcaccatccatgccaaattcactgattggaagggttatctgatgaagcgactcgtgggcagcagaacgctccccgtggacttccacatcaaggtcggcagcgagcccctcaccgacgttcctcctagtgctttgccctttttttgtatcttacacgccacgcattggtcctag

SEQ ID NO: 192605 - DNA, 3762 bp, synthetic construct
  misc_feature 1..3762: note = Description of Artificial Sequence: Synthetic coding sequence
  source 1..3762: mol_type = other DNA
atggtggtggccctgcggtacgtgtggcccctgctgctgtgcagcccctgcttgctcatccagatacccgaagaatatgagggacaccatgtcatggaaccccctgtgattactgaacaaagcccccgaagactggttgtgtttccaacagatgatattagcctgaaatgtgaagcttcaggcaagcctgaggtgcagtttcggtggactcgggacggcgtgcacttcaagcctaaggaagagctgggagtgacagtgtatcagtctcctcactccggatctttcacaatcactggcaataattctaactttgcacagagattccaggggatataccggtgtttcgctagtaacaaactggggaccgccatgtctcacgaaattcgcctgatggctgagggagccccaaaatggcctaaggaaaccgtgaagcctgtggaggttgaggagggtgagagtgtggtcttgccatgcaaccccccacccagtgctgagcctcttaggatttactggatgaactccaaaatcctgcacatcaagcaggatgagcgagtgacaatgggacagaatggcaatctgtactttgccaatgtcctcacgtccgacaatcactctgactatatttgccacgctcattttccagggaccagaaccataatccaaaaggagcctatcgacctgcgggttaaggccaccaactccatgattgatcgcaaaccaaggctcctgttccccacaaatagctcctcccatctggtcgcccttcagggtcagccactggtcctcgagtgtattgccgaaggtttccctacccctactattaagtggctccgaccctctggcccaatgccagccgatagagtcacttatcaaaatcacaacaaaactttacagctgctcaaggttggagaggaagacgatggagagtaccggtgcttggccgaaaatagtttgggatccgcacggcacgcttattatgtgaccgttgaggcggccccctattggctgcacaagccgcagtcccacctgtatgggcctggagagacggctcgccttgattgtcaggtgcagggacgccctcagccagaggtgacgtggcgtatcaatggaattccagtagaagagctcgcaaaagaccaaaaatataggatacagagaggcgccctcatcctttctaatgtacagccttccgacaccatggtcactcaatgtgaggcacgcaacaggcatggattgctgcttgcgaacgcatatatctacgttgtccagctgccagccaaaatactgactgcagataatcagacatatatggcggtgcaggggagtacggcctaccttctgtgtaaagccttcggcgctcccgtgccatctgtgcaatggctggacgaagatggcactactgttctacaggacgaaagattttttccctacgcaaatggcacattgggaattagggatctccaggcaaatgacactggtcgatacttttgtcttgccgcgaacgaccagaataacgtaaccataatggccaatctgaaagtgaaggacgccacacagatcacacagggcccacggtccaccatcgaaaagaagggctcccgtgtgacattcacatgccaggccagcttcgatccctcattacagccatcaatcacttggagaggtgatgggagggatctccaagagctcggcgattctgacaaatacttcatcgaggatggcaggctggtcatccatagtctggattactccgatcaggggaactattcctgcgtggcaagtaccgaattagacgttgtggaatctcgggcacaattgctcgttgtgggttccccgggacctgttcctcgcctagtgttgtccgatttgcatctgttaacccagagccaagtacgggtcagctggtcacctgctgaggaccacaacgcccccattgaaaagtatgacatagagtttgaagacaaggagatggccccagagaaatggtattctttaggtaaggttccaggcaaccagacatccaccactctgaagctctccccatatgtgcattatacattccgcgtcactgccatcaacaagtacgggccaggggaaccttcccccgtgtccgagacagtggtaaccccagaagccgcgcccgaaaagaaccccgtcgacgtcaagggtgaggggaacgagaccacaaatatggtgatcacctggaaacctctgaggtggatggactggaatgccccgcaggtgcaatatagagttcagtggagaccgcaggggaccagaggtccctggcaagagcagatcgtgtccgatccttttttggttgtgtccaatacctccacctttgtgccctacgagatcaaggtgcaggctgtaaattcgcagggaaaaggtcccgagccacaggtaacgattggctacagcggggaggactatccacaggcaatcccagagctagaaggcatagagatccttaacagttcagccgtattggtgaagtggcggcctgttgacctggcacaggttaagggacacctgcgtggttacaacgtcacctactggcgggagggctcgcagagaaaacactcaaagaggcatattcacaaagatcacgtggttgtgccagctaacactacgagcgtgatcttgagcggactgcgtccgtacagctcgtatcacctggaggtccaagcattcaacggcagaggctccgggcctgctagtgagtttacgttttcaaccccagaaggagtgccgggccacccagaggcactccatctggaatgccaatccaacacttccctgttgctacggtggcagccgcctctcagccataacggagtgctgactggctacgtgcttagctaccacccactggacgaagggggtaagggccagctgtcctttaaccttcgcgatccggagctccggacccacaatctcacagacctgtcaccccatctgagataccggtttcagctccaggcaaccactaaagaaggacccggcgaagccatcgtccgggagggagggacaatggcattgtccgggattagcgattttggaaacattagcgccacagctggcgagaattactcagtggtttcatgggtaccaaaggaaggacagtgcaatttccggtttcatatcctcttcaaggccctcggagaggagaagggtggcgcgtccctgtccccacaatatgtgagctataatcaatcttcatacacacagtgggatctgcagccagacaccgattacgaaatccacttgtttaaagaaaggatgttcagacaccagatggccgtcaagacaaatgggaccgggcgcgtgagactgcctccagccgggtttgccacggagggctggtttatcggcttcgtatctgcgattatactgctgctactggttcttttaattctgtgttttatcaagcgaagtaagggtggaaagtactccgtgaaagataaggaggacactcaggtggatagcgaagcccgcccgatgaaggatgagacctttggagaatactccgataatgaagagaaagctttcggatcctcacagccatccctgaacggcgacataaaacctctgggaagcgacgactcattggctgattatgggggctcagtggatgtgcagttcaatgaagacggaagctttatcggacagtactccgggaaaaaagagaaggaggccgcaggcggaaatgattccagcggagcaacaagccctatcaatcctgccgtggcactggagtag

SEQ ID NO: 192606 - DNA, 3747 bp, synthetic construct
  misc_feature 1..3747: note = Description of Artificial Sequence: Synthetic coding sequence
  source 1..3747: mol_type = other DNA
atggtggtggccctgcggtacgtgtggcccctgctgctgtgcagcccttgtcttcttatacagatcccggaagaactcatggaaccacccgtgataactgaacagtcccccaggcggttggttgtgttcccaacagacgacatatccctcaagtgtgaggcttccgggaaacctgaggtgcagttccgctggacccgggatggagtgcactttaaacccaaagaggaactcggcgtgactgtctaccaatcaccccatagtggctcctttacgatcacgggaaataactcgaattttgctcagcgtttccagggcatctaccgttgctttgcgagcaataagttagggaccgcaatgtcgcacgagattcggctcatggctgagggggcgcctaagtggcccaaagagacagtaaagcctgttgaggtggaggagggggagagtgtagtactgccctgtaatccaccccctagcgcagaacctctgagaatctactggatgaattcaaaaatcctgcatatcaagcaggatgagcgagtgactatggggcaaaacggcaacctttactttgccaacgtcctgacatctgataaccattctgactatatctgtcacgctcatttccccggcactcgtacaattatccagaaggagcctatagatctgagggtcaaggctaccaatagcatgatcgataggaagcccagactcctctttccgaccaactcttcctcgcacctcgtggccttacaaggacagcccctggtgttggagtgcatcgccgagggcttccctacacctacaattaagtggctacgcccctcaggacctatgcctgccgacagggttacctaccaaaaccacaataagacactgcagctgcttaaggtcggggaagaagatgacggtgaataccgctgcttggccgagaacagcctgggcagcgcccgccatgcctactatgtgacagtcgaggcggccccttattggcttcataaaccgcagtctcatctgtatggtccaggggaaactgccagactcgattgtcaggtgcaagggaggccacagcccgaggtgacttggcgcataaatgggatccccgtcgaagaactggcaaaggatcagaaatatagaattcaacgaggtgccctcatcctgagcaacgttcaacccagcgacacaatggtgacccagtgcgaggcccgaaatcggcacggcctgctcttggctaatgcctacatttatgttgtccagttacccgctaagatactgaccgcggacaatcagacatacatggctgtgcagggctctactgcctatctgctgtgcaaagcattcggagcccccgtgcctagcgttcagtggttggacgaagatgggaccaccgtgctccaggacgagagatttttcccttatgccaatgggacacttggtattcgagatttacaggcaaatgacactggcaggtacttctgcctggctgctaatgatcagaataacgtgacaatcatggcaaatcttaaggtcaaggacgcaacccagattactcaggggccaaggagtacgatagaaaagaaagggtctagagtgacctttacttgccaggcgtctttcgatcccagcctccagcccagcatcacctggcgcggggatggccgggacttgcaagagcttggcgactctgataagtatttcatcgaagacgggcgcctcgttattcactccctcgattattctgaccaagggaattatagttgtgtggccagtaccgaattggatgtggttgagtcaagggcgcagttgctagtggtgggatcgcccggaccagtgccccgactggtcttaagcgatctacacctgctgacccaaagccaggttagagtgtcttggagcccggcagaggaccataacgccccaatcgagaagtacgatatcgagttcgaggataaggagatggcacccgagaaatggtattcgctagggaaggtgcctggaaatcagacctcaaccactctgaaactcagcccttacgtgcactatactttccgggtaacggccattaacaagtacggtcccggagagcctagccccgtgtccgagactgtggtgacccctgaagccgctcccgaaaagaatccagtggacgtaaagggtgagggcaacgaaacaactaatatggtgatcacttggaaacccctcaggtggatggattggaatgccccacaggtgcagtatagagtacagtggagacctcaagggacaagagggccctggcaggagcagatagtctctgatccgtttctcgtggtgagtaatactagcacgttcgtgccgtacgagattaaagtccaggccgtgaatagccagggcaagggccccgagccgcaagtgacgatcggatactcaggcgaggattatcctcaggcgatcccagagctggagggaatcgagatcctcaattcaagtgctgtgctcgttaagtggcggcccgtcgatctggctcaagtgaaaggccatcttagaggttataacgtgacttattggcgagagggaagccagcggaagcattccaagaggcatatccataaagaccatgtggtcgtccccgccaatacaacctctgttattctgtctgggctgcgtccctactcctcataccatttagaggtgcaggcatttaacggcagaggatctgggccagcatcagagttcacattctctaccccagagggggtacctggacacccagaggccctgcatctggagtgccagagtaatacgtccctgctcttaaggtggcagccgcccctgtcacacaatggcgttctgacagggtatgtgctttcctatcatcccctggatgaagggggcaaaggacaactctcattcaaccttcgggacccagagctcagaacgcacaacctgacagacctgagccctcacctgcgctatagatttcagctgcaggcgacgaccaaggaagggcctggagaagcaatagtaagggaagggggcacaatggccctctctggcattagtgacttcgggaatatctctgcaaccgccggggaaaattattctgtggtgtcctgggttcctaaggaaggtcagtgtaacttccggtttcacattctatttaaagcactgggcgaggagaaaggaggagcgagtttgtctccccaatacgtgagttataatcaaagcagctatacccagtgggatctgcagcccgatacagactacgagatccacctctttaaggagcggatgttcagacaccaaatggcagtgaaaactaatggcaccgggagagtaagactccctcccgcagggttcgctaccgagggctggttcattggttttgtgtctgcaatcatcctgctgctgttggtactgctcatcttgtgtttcatcaaacgcagcaagggtgggaaatactcagtgaaagataaagaggatacccaggttgattccgaagctcggcccatgaaagacgaaacttttggagagtacagcgacaacgaggagaaagcctttggcagctctcagcccagcctgaacggtgacattaagccattaggcagtgacgactccctcgcagattacggcggtagtgtagatgtgcagtttaacgaggacgggagcttcatcggacaatacagcggaaaaaaagagaaggaggctgccggaggcaacgatagttcaggagctacatcccccattaatcccgcagtggctctcgagtag

SEQ ID NO: 192607 - DNA, 3747 bp, synthetic construct
  misc_feature 1..3747: note = Description of Artificial Sequence: Synthetic coding sequence
  source 1..3747: mol_type = other DNA
atggtggtggccctgcggtacgtgtggcccctgctgctgtgcagcccttgtcttctgatccagatccccgaggagttaatggaaccacccgtgataacagagcagtctccacgacgactggttgtgttccctaccgacgacatcagcctgaaatgcgaggcgagcggtaagcccgaggtgcagttccgatggactcgcgatggtgtccacttcaaacccaaagaggagctgggggttaccgtttatcagtcccctcattccggctcctttacgattacaggaaataactccaattttgctcagaggttccaaggcatttacagatgtttcgcctccaataagctgggcactgcaatgtcgcacgagatcagattgatggcagagggcgcacccaagtggcccaaagagacagtcaaacccgtggaagtggaagagggggaatccgtggtgctcccgtgtaatcctccccccagcgcagaaccactccgaatctactggatgaactctaaaatcctgcatatcaagcaggacgagagagtcaccatggggcagaacggaaacctctatttcgctaatgtgttaactagtgacaaccactcagactatatctgtcatgcgcatttcccgggaaccaggacgataattcaaaaagagcccatcgacctccgcgtgaaggctaccaattctatgatagatcgcaagccacgcctcttgttccctaccaactcgtcttctcatcttgtggccctgcagggacaacccttagtgctagagtgtattgccgagggatttcctacccctactatcaaatggttgcgcccatccgggcctatgcccgccgaccgtgtgacctatcagaaccacaataagacactgcaactgctgaaggtgggcgaagaagacgatggcgagtaccggtgcttagccgagaattcgctgggcagtgcccggcacgcttattatgttactgtagaggccgccccgtattggctgcacaaaccccaatcacacctttacggtccgggcgagactgcaagactcgactgtcaagtgcaggggcggcctcagccagaggtgacctggcgaataaatgggatccctgtcgaggagctcgctaaggatcaaaagtacaggatccaacggggagctcttatcctgagtaacgttcagccaagtgacacaatggtcactcagtgcgaggctaggaatcggcacggactcttactggctaacgcatacatttatgtggttcaactgccagcaaaaattttaaccgccgacaaccagacctacatggccgtccagggaagcacagcatacttgttgtgcaaggccttcggcgctccagtcccctccgtccagtggctggacgaagatggaaccacagtgttgcaggacgaacggttcttcccctatgctaacgggacactgggaattcgtgatctgcaggctaacgatacagggaggtacttctgtctggctgccaacgaccagaacaacgtcaccatcatggccaatcttaaggtaaaggatgctactcagataacccagggaccccgatccactattgaaaaaaagggcagtcgggttacgtttacgtgccaggcaagcttcgatcctagcctccagccaagcataacgtggcgaggggatgggagagacctccaagaactgggcgattctgacaagtatttcatagaagatggaagactggtaatacattctctggactattctgaccagggcaactactcgtgcgtagcctcaactgagcttgatgtcgtggaatcccgtgctcagttgctggttgtggggagtccaggaccagtgccacgcttagtactgagtgacctccacctgctgacgcaaagtcaggtgagggttagctggagcccagcagaagatcacaacgctccaatcgaaaagtacgacatagagttcgaggacaaagaaatggctcccgagaaatggtactctctgggtaaagtgccaggaaaccagaccagcaccacgctgaagctgagcccttatgtccactacacttttcgggttacagctatcaacaaatatggccccggcgaaccgtcacccgtgtcagagacagtggtcacgccagaagccgcccccgaaaaaaacccggttgatgttaagggagagggtaatgagactacgaatatggtgatcacctggaagccactgcggtggatggactggaacgctcctcaggtgcaataccgggttcagtggaggcctcagggcactcgggggccttggcaggagcagatcgtctctgacccattcctggtcgtttccaacacatcaacgtttgtcccttacgaaatcaaagtgcaggcagtcaactcgcagggtaagggccccgagcctcaggttaccattgggtactcaggcgaggattacccccaggcaatcccagagctggagggaatcgagatcctaaattccagcgccgtcctagtgaagtggcggcctgtcgacctggcacaggtaaaagggcacttgagggggtacaacgtcacctattggcgggaaggctctcagaggaaacatagtaagcgccacattcataaggaccatgtcgtggtgccggcaaataccaccagcgtcatacttagcggactgaggccctattccagttatcatttagaagtgcaagcattcaacgggaggggtagcggacccgcaagcgaattcacgttttcaacaccggagggggtgcccggccatcctgaagccctgcacctggagtgccagagcaacactagccttctgctcaggtggcaaccgccactcagccataacggcgtcctaaccggttatgtcctgagctatcacccacttgatgagggcggaaagggtcagctgtctttcaatttaagggacccagaactgcggacccacaacttgaccgatttgtcccctcacctaaggtatcgattccaactgcaggccactacaaaggaaggtcctggtgaggcaattgtaagggaagggggcactatggctttgtccggaatatccgatttcgggaatatttctgctacagcaggcgagaactacagtgttgtcagctgggttcccaaggaaggccaatgcaactttaggttccatatcctgttcaaggcactgggggaagagaagggaggcgcatcattgtcccctcaatacgtatcgtacaaccagtcctcttacacccagtgggacctgcaacctgataccgattatgagatccatcttttcaaggaacgcatgtttaggcaccagatggccgtaaagacaaacggcacgggacgggttaggctaccgccggcagggtttgccaccgagggatggttcatcggcttcgtgtcggctatcatacttctcctactggttctgctgattctctgctttatcaaacgaagcaagggagggaagtatagtgtaaaggataaagaggacactcaggtagacagcgaggctcggcctatgaaagatgaaacatttggagaatattccgacaacgaggaaaaggcttttgggtccagtcaacctagcctgaatggagacattaaacctctcgggtccgatgactcactggcagattacggcgggtctgtggacgtgcagttcaacgaggacgggagttttattgggcagtatagcgggaagaaggaaaaagaagcggccggaggcaacgactcgagcggtgccacttcacctattaatcctgcagtggcacttgaatag

SEQ ID NO: 192608 - DNA, 3774 bp, synthetic construct
  misc_feature 1..3774: note = Description of Artificial Sequence: Synthetic coding sequence
  source 1..3774: mol_type = other DNA
atggtggtggccctgcggtacgtgtggcccctgctgctgtgcagcccttgcctgctgatacagattccagaggagtacgaaggacaccatgtgatggaaccaccggtcattacagagcagagccctcgccgtctagtcgtctttcccaccgacgacatttccctaaagtgcgaagcaagcggcaagcctgaggtacaattccggtggacccgagacggagtgcacttcaagcccaaagaagaactaggcgtcacagtctatcaaagcccacactctggcagcttcaccatcaccggaaacaatagcaacttcgctcaacgtttccagggaatctacaggtgcttcgcttccaataaactcgggaccgccatgagtcacgaaatcaggttaatggccgagggggcaccaaagtggcccaaagaaacagtgaagcccgtcgaggtggaggaaggggagagcgtggtcttgccatgcaatccacccccttccgccgagcccctgcggatttattggatgaactccaaaattcttcatatcaaacaggacgaacgcgtaactatggggcagaacggcaacctgtatttcgccaacgtgctgacctctgataaccactccgactacatttgccatgctcatttcccaggaacccgcacaatcatccaaaaagaaccgattgatctccgtgtgaaggccacaaatagcatgattgaccgcaagcctcgcctgctatttccgactaactccagttcccacctcgtcgcccttcagggacagcctctggtactggagtgcatcgccgaaggatttcctacacccacgatcaagtggctgcggccctctggccctatgcctgctgatcgggtcacctaccagaatcataataaaaccttgcaactcctcaaggtgggggaggaggatgatggagagtatcgatgcctagccgaaaacagcctgggaagcgcccgccacgcatactatgtcactgtggaggcggccccttactggctgcacaaaccccagtcccacctgtacgggcccggcgaaacagccagattggactgccaggtccaaggacggccgcaacccgaggtcacttggaggataaatggtatccctgtggaggagcttgctaaggaccagaaataccgcatccagagaggcgctctcatcctgagtaacgtgcaaccctctgatacgatggtgactcagtgcgaggccaggaatagacacggcctcctattagccaatgcctatatttacgtcgtacagctaccagctaagattctgacagcagacaatcagacttacatggcggtccagggctcaaccgcctatctcctatgcaaggccttcggagccccagtgccctcagtccagtggctcgacgaagatggcaccaccgtgctccaggatgagcgctttttcccctacgcaaatgggaccttgggaatccgggacctccaagccaacgacaccggtaggtatttttgtctggccgccaacgaccagaacaacgtaactattatggccaatctgaaggtgaaggacgccacgcaaatcactcagggaccgcggagtactatcgagaaaaagggaagtcgcgtgacgttcacctgccaggccagttttgatcctagtctgcagcctagcataacatggcgaggtgacggacgggatctacaagagttgggcgactctgacaaatattttatcgaggatggaagactcgtgattcacagcctggactactccgatcaaggaaactactcttgtgtggcctcaaccgagctcgacgtggtcgagagccgggcacagcttttagtcgtgggcagccccggaccggtgccgaggctagtcctgagtgacctccatctgctcacccaatctcaggtgagagttagttggagccctgcagaggatcacaatgcgcctatcgaaaagtacgacattgaattcgaagacaaagagatggcgccagaaaagtggtatagtttagggaaggtgccaggaaatcagacctcaaccaccctaaaattgtcaccttatgtgcattacacattcagggtgacggcgatcaacaagtacggccccggagaaccttcccccgtgtccgaaaccgtggtgactcccgaggctgctcccgaaaagaatcccgtggacgtgaagggagagggaaatgaaactaccaatatggtgatcacatggaagcccctgaggtggatggactggaatgccccacaggtgcagtacagggtgcagtggcggccacagggcacacgaggaccctggcaagaacaaattgtctctgaccccttcttggtggttagcaacacaagcacatttgtaccgtacgaaatcaaggtgcaggctgttaactctcagggtaagggccctgagccccaggtgaccattggatatagtggcgaagattatcctcaggcaatccccgagctggagggcatagagatcctgaactcctctgcagtgctggtcaagtggaggcccgtggatctagcccaagtaaaaggtcacctgcgcggatataatgtgacctattggcgggagggcagtcagcgaaagcattcgaaacggcatattcacaaggatcacgtagtcgtgccagcaaataccaccagtgtgattctgtcaggattgagaccatactcttcttatcatttggaggttcaagcctttaacggtagaggctcgggccccgcgtctgaatttacgttttcaacccctgagggcgtgccaggacaccctgaagctctacatctggagtgccagagcaatacgtcacttctgctccgctggcaaccacccttgagtcataatggtgtactcacggggtatgttctgtcctaccaccccctggacgagggtgggaaggggcaactgtctttcaacctacgtgatcccgagctcaggacacacaacctcacggacctgtccccgcacctgcggtacaggtttcagctccaggccacaacaaaggagggcccaggcgaggcaattgtgcgcgagggcggaacaatggccttgtccggcattagtgacttcggaaatatcagcgctaccgccggcgagaattattcagtagtgtcttgggtccctaaagagggccagtgcaattttcgctttcacatactatttaaggccctgggcgaggagaagggcggtgctagtttatctcctcagtacgtgagctacaaccagagttcttacacccagtgggacctccagcccgatacagactatgagattcaccttttcaaggagaggatgtttcgccaccagatggctgttaagacgaacggcaccggcagggtgcggttacctccagctggcttcgcaaccgagggatggtttattgggttcgttagcgccatcatcctgctcctgctcgtactactcatactgtgctttatcaaacgctccaaaggcggcaaatactcagttaaagataaggaggacacacaggtagattccgaggcgcgtcctatgaaagatgagacattcggcgagtatagaagcctagaatccgacaacgaagaaaaggcctttggttctagccagccctccctgaacggagatatcaaacctttaggatccgacgactctctggctgactacggcggatcagtggatgtgcagtttaatgaagacggaagtttcatcggccaatatagtggtaagaaggagaaggaagccgctggaggcaatgattcttccggtgccacctctcccataaacccggccgtggcactcgaatag

SEQ ID NO: 192609 - DNA, 3774 bp, synthetic construct
  misc_feature 1..3774: note = Description of Artificial Sequence: Synthetic coding sequence
  source 1..3774: mol_type = other DNA
atggtggtggccctgcggtacgtgtggcccctgctgctgtgcagcccctgtctgttgatccagatacctgaggaatatgaggggcaccacgttatggagccacccgtcatcacagagcaaagcccccgacgcctggtggttttccctactgatgatatcagcctcaaatgtgaggcttctggcaagccagaggtgcaattccgctggactagggatggggtccatttcaaaccgaaggaagagctcggcgttactgtctatcagtcaccccatagtggatcattcactataactggaaataacagtaatttcgcccaaaggttccagggcatctatcggtgctttgccagcaacaagcttggaactgctatgtcacacgaaatacggttgatggctgagggagcccccaaatggcctaaagaaactgtgaaacccgtagaagtggaagagggagagtccgtggtgctgccttgcaacccgccaccttctgcagaaccactgcgcatctactggatgaactccaagatcttgcacattaagcaggacgaacgcgttacgatgggtcagaacgggaacctttacttcgcaaatgtactgactagtgataaccattccgattatatttgtcacgcccacttcccagggaccagaacaatcatccaaaaagagcccatcgacctacgcgttaaagcaacaaattccatgatcgatcgtaaaccaaggctgcttttcccaacgaatagcagctcccatctggtggctcttcaggggcagcctctagtcctagagtgtatagcagagggcttccccacaccaacgatcaagtggctgcgaccatctggcccgatgcctgctgatcgagtaacttaccagaatcacaataagaccctgcagctcctgaaggtgggagaggaggacgacggagagtaccgctgtctggctgagaactcccttggctctgcccgccacgcttattacgtcacagtggaagcagctccctactggctacacaagccgcagagccatttatacggccccggagagaccgcccgcctggactgtcaggtccagggccggccacagcctgaagtcacgtggaggatcaatggcattccagttgaagaattggctaaggatcagaagtataggatccagcgcggagctctcattctctcaaacgtgcagccgagcgacaccatggtgacacagtgcgaagccaggaaccgccacgggctccttctcgccaatgcgtacatttatgtcgtgcagttgccagccaaaattttaaccgccgataaccagacttatatggctgtgcagggcagcacagcctacctcctgtgcaaggcttttggtgctcccgtcccttctgtccagtggctggacgaagatgggaccaccgtactgcaggacgagcgattttttccttacgcaaatgggaccttgggaattcgcgatctacaagcaaatgacacgggccggtatttttgcctagctgcaaacgaccagaacaacgtgacaatcatggctaacttaaaggtaaaggacgccacccagatcactcaggggccccggtcaaccatcgagaagaaaggatcccgggttactttcacgtgccaggcaagcttcgatcccagcctgcagccatccattacctggaggggcgatggaagggatcttcaggagcttggagattccgacaagtattttatagaagacgggaggttagttatccattccctcgattattccgaccaaggaaactacagttgcgtcgcatcaacagagctcgatgttgtggagtctcgtgctcagttgctggtggtcggaagccccggccccgtgccacggttagtgctgtccgacctccatcttctgacccaatcgcaggttagggtgtcttggagcccagcagaggaccacaacgctccgatagaaaagtacgatattgagttcgaggataaagagatggccccagagaaatggtactctttagggaaagtgccaggcaaccagacatcgacgactctcaagctttcaccttatgtgcattatacattccgtgtgacggctattaacaagtatgggcccggggaaccctcgcccgtaagcgagaccgttgttactcccgaggccgctccagaaaagaaccccgtggacgtgaagggtgagggcaacgagaccactaatatggtaattacttggaagccgctccgttggatggactggaatgcacctcaggtgcagtatcgcgtacaatggcgtcctcaggggaccagaggcccttggcaggaacaaattgtgagcgatccctttctggttgttagtaatactagcacatttgtcccgtacgaaatcaaagtgcaggccgtaaatagtcaaggaaaaggtcctgaaccccaggtgactattggctattctggagaagattatccccaggctatcccagagctggagggcatcgaaatccttaactcctccgccgtgctggtgaaatggcgccctgtggatttggcacaggttaaaggccatctccggggatacaacgtgacatactggcgcgagggtagtcagcggaagcactcaaagcgtcacatccacaaagaccacgttgtggtgcctgcaaatacgacctcagtcatcctgtcgggcttaagaccttacagttcatatcacctggaagtgcaagctttcaatggccggggatctggtccagccagcgagttcacatttagtacacccgagggcgtgccgggccaccctgaggcactgcacctggaatgccagagcaatacttccctgcttttaaggtggcaaccaccactcagccacaacggcgtccttaccggctacgtactcagttatcacccccttgacgaggggggtaaaggtcaactcagttttaacttgcgagacccggagttacgcacacataacttgaccgatctgtcgccccacctacgatacaggtttcaactacaggccacaactaaggagggcccaggagaggccattgtcagggagggcggaacaatggctctgagcgggatctcggattttgggaacatttcagcaaccgcaggagagaactactcagtggtgagctgggtccccaaggagggacaatgcaacttcagatttcatattctgtttaaggcactgggggaggagaagggcggcgcttcattatccccgcagtatgtgagttacaatcagtcttcatacacccagtgggacctgcagccggacacagattatgagatccatctgtttaaggagcggatgttccgtcaccagatggcagtcaagacaaacggtacaggcagagtcagacttcctccagcgggattcgccactgagggctggttcattggcttcgttagcgccattatcctcctgctgctcgtgttgctgattctgtgcttcattaaaaggagcaaaggaggaaagtactcagttaaggataaagaggacacccaggtggactctgaagctaggcccatgaaagacgagactttcggcgagtatcgaagcctcgagtctgacaacgaggaaaaagcattcgggtcctcacagccgtccctgaacggagatattaagcccctggggagcgacgacagcctcgccgattatggaggaagcgttgacgtgcagttcaatgaggatggctcttttatcgggcagtatagcggtaagaaagagaaagaggcagccggcgggaacgactcttctggagccacgagtcctattaacccggccgtggctttggagtag

SEQ ID NO: 192610 - DNA, 456 bp, synthetic construct
  misc_feature 1..456: note = Description of Artificial Sequence: Synthetic coding sequence
  source 1..456: mol_type = other DNA
atggtggtggccctgcggtacgtgtggcccctgctgctgtgcagcccatgtttgctgatccagattccagaagagtacgaaggccatcacgtcatggagccacctgtaattacagaacagtccccccggaggctggtggtcttccctactgatgacattagcctcaagtgcgaagcctccggcaagccagaggtacagtttagatggacccgagacggagtgcacttcaagcccaaagaggagctgggcgtgaccgtttaccagtcaccacacagtgggtcatttacgattacgggcaacaacagcaatttcgcacaacggtttcagggcatttatagatgcttcgcatccaataagctcggtactgcaatgtcccacgagattaggctcatggccgaaggcgcaccgaagtggcccaaggaaactgtcaaacctgtggaggtggaagaaggatag

SEQ ID NO: 192611 - DNA, 255 bp, synthetic construct
  misc_feature 1..255: note = Description of Artificial Sequence: Synthetic coding sequence
  source 1..255: mol_type = other DNA
atggtggtggccctgcggtacgtgtggcccctgctgctgtgcagcccctgcctgctcatccagatccctgaggaatacgaaggacaccacgtgatggaaccaccggtgatcacggaacagagtccgcgccggctcgtcgttttcccaactgatgacatcagcttgaagtgtgaggcttcaggcaaacccgaagtacaattcaggtggacgagagatggcgtgcacttcaagccaaaggaagagttaggggtttag

SEQ ID NO: 192612 - DNA, 3768 bp, synthetic construct
  misc_feature 1..3768: note = Description of Artificial Sequence: Synthetic coding sequence
  source 1..3768: mol_type = other DNA
atggtggtggccctgcggtacgtgtggcccctgctgctgtgcagcccctgcctcctgattcagatccctgaagaaagtttcccagggcacagggttgttatggaacccccagttataaccgagcagtcaccaaggcggctggtcgtatttcccaccgacgacatcagcctgaaatgcgaagcttcaggcaaacctgaggtgcagttcagatggactagggacggtgtgcatttcaagcctaaggaagaattaggcgtgaccgtgtaccagagtccccactccggtagcttcactattacaggcaacaactctaactttgctcagcgattccagggcatctaccgttgcttcgccagcaacaagctgggcactgcaatgagccatgaaatacggttgatggcagagggcgcaccgaaatggccaaaggagacagtaaaacctgtggaggtggaggagggtgaaagcgtcgtattaccgtgtaaccccccaccgtccgccgagcccctgagaatttactggatgaactccaagatcctgcatattaaacaagacgaaagagtgaccatggggcaaaacggcaacctgtacttcgcaaatgtcttaacaagtgacaaccacagcgattacatctgccacgcccactttcctgggacgcgaactataattcagaaagaacctatcgatttacgggtcaaagccacaaacagcatgatcgaccggaaaccaagactgctgttcccaactaatagctccagccatctggtggccctccagggccagccactggtcctggaatgcatagctgagggattccccactccgaccattaagtggctgagaccatctggccctatgcccgctgaccgtgtcacatatcagaaccacaataagaccctccaattgctgaaagttggggaggaggatgacggcgagtacaggtgcttggcggagaactctctcggcagtgccagacacgcatattacgtaacagtggaagcagctccatactggctgcataaaccccaatctcatttgtatggcccaggggagactgcgcggctggactgccaagtccaaggccggcctcagcccgaagttacgtggcgtatcaatggtatcccagttgaggagctggctaaagatcaaaagtatagaatccagagaggagctttaatcttgagcaacgttcagccctcagatacgatggtcacccagtgcgaggcccggaatagacacggactcctactagcaaacgcctacatttacgtagtgcagctcccagctaagattctcaccgccgataatcagacgtatatggccgttcaagggagtacagcatacctgctttgcaaagccttcggcgccccagtgccctcagtacagtggctggacgaggatggcactaccgtgctgcaagacgagcgatttttcccgtacgcaaatggaacactaggtatcagggaccttcaggcaaatgacaccggtaggtacttctgtttagccgctaatgaccagaataatgtcacaatcatggccaatctgaaagtcaaggacgcaacccagattactcaagggcctaggtcaacaatcgaaaagaaagggtcccgggttacttttacttgccaggccagctttgatcctagcttacagccttccatcacatggcgcggcgatggccgcgatctgcaggaattgggggacagcgacaaatattttattgaggatggccgccttgtgattcactctctggattacagtgaccagggcaactacagttgtgtcgccagcaccgagttggatgtggtggaatcacgcgctcagctcctggtcgtggggtcaccggggccggttccaagactggttctgtccgatttacacctcctgactcagtctcaggtccgtgtctcttggtcccctgctgaggaccacaatgcccctatcgaaaagtacgatatagaattcgaggacaaagaaatggccccagaaaaatggtactctctgggcaaggttcccggcaaccaaacctccactactcttaaactcagtccctacgtacattatactttcagagtgaccgctataaacaaatacggccctggtgaaccatctcctgtgagtgagacggtagtgacacccgaggccgctcctgagaagaatcccgttgacgtgaaaggagagggcaatgagactactaatatggtgataacctggaagcctttgaggtggatggattggaatgcaccgcaggtgcagtatcgtgtacagtggagaccacaggggactaggggtccatggcaggaacagattgtaagtgatccatttctggttgtatctaacacatccactttcgtgccatatgaaatcaaagtgcaggcagttaatagtcagggaaaaggtccggagccccaggtaactattggttatagcggagaggactatcctcaggccatcccggagctggaaggcatagaaatacttaattcaagcgcagtgctggtcaaatggcgtcccgtcgacctcgcccaagtgaaaggccaccttagagggtacaatgtgacttattggagagaggggtcccagcggaagcattccaaacgccacattcataaggaccacgtagtggtcccagcgaacaccacaagcgtgatcctctccgggcttcggccatattccagctatcaccttgaggtgcaggcttttaatggccgcggttccgggcctgcatcagaattcactttctccacccccgagggtgtacctggccatcctgaggctcttcacctggaatgccaatccaacacaagcctgctccttcggtggcagcctcctctgagccacaatggagtgctcaccggatacgtgctgagttaccacccactagacgaggggggcaaaggccaactcagcttcaatttgcgggaccctgagcttcgaacacataacctcacagacctgtccccgcatctgcgctacaggtttcaactgcaggcgacgacgaaggagggtcccggggaggcgatagtccgggagggcggcaccatggctctctcgggcattagcgactttggaaacatctcagcgacagccggagaaaattattctgtggtctcttgggtgcccaaggaaggacagtgtaactttcggttccacatactgtttaaggcactgggggaagaaaaagggggcgccagcctatctcctcagtatgtgtcgtataaccagtcttcttatacccagtgggacctgcaacccgataccgattatgaaattcatctgttcaaggaacggatgttccgccatcagatggctgtcaaaacgaatgggaccgggcgcgttcgcctacctccagctggtttcgccaccgagggatggttcattggttttgtcagtgccataatattacttctgctggtcctactgatactgtgcttcatcaagcggagtaagggcggcaagtactctgttaaagacaaagaggatacacaggtggactccgaggcgcgcccgatgaaggatgagacattcggggaatactccgacaacgaagagaaggcctttggcagctctcaaccttctctgaatggagatatcaaacctctcgggtctgacgattctcttgcagattatggcggtagtgtggatgtgcagttcaacgaagacgggtccttcattgggcagtattccggcaaaaaagaaaaggaagccgctggcggaaacgacagctcaggagctacaagccctatcaatcccgctgtcgccctcgagtag

SEQ ID NO: 192613 - DNA, 351 bp, synthetic construct
  misc_feature 1..351: note = Description of Artificial Sequence: Synthetic coding sequence
  source 1..351: mol_type = other DNA
atggccgagggcgcccccaagtggcccaaggagaccgtgaagcccgttgaagtggaggagggtgagtctgtagtcctgccctgtaatcctcctccctcagccgaaccactccgcatctactggatgaacagcaaaatcctccacatcaaacaagacgagcgtgtgaccatggggcagaatgggaacctatacttcgccaatgtactgactagtgataatcattctgattatatctgtcacgcacacttccccggaactcggaccatcatacagaaagagcccattgatcttagagttaaagcgacaaattccatgatcgatcggaagcctagacttctgtttcccacatag

SEQ ID NO: 192614 - DNA, 3780 bp, synthetic construct
  misc_feature 1..3780: note = Description of Artificial Sequence: Synthetic coding sequence
  source 1..3780: mol_type = other DNA
atggtggtggccctgcggtacgtgtggcccctgctgctgtgcagcccatgccttctcattcaaataccagaggagagttttcctggccacagggtcgtcatggaacctccagtaatcacggaacaatctcctagaaggctcgtggtcttccccacggacgatatatctcttaaatgtgaggcctctggcaagcccgaagtgcagtttagatggaccagagacggcgttcactttaaaccaaaggaggagctaggagtcacagtctatcagtctccccatagcggatctttcaccattactggtaataactccaacttcgcacagcgattccaaggtatttatagatgtttcgcgagcaacaaattgggaactgccatgtcgcatgagataaggctgatggctgagggggcccctaaatggcctaaggagacggtgaagcccgtagaggtagaagagggggaatccgtggtgttgccttgcaatccccccccctccgcggagcctctcaggatctactggatgaacagtaaaattctgcacatcaaacaggatgagagggttacaatggggcagaacgggaatctgtactttgctaacgtgctgacgagtgataaccatagtgattacatctgccacgcccattttccgggaacccggactattattcagaaagagcccatcgatttgcgcgtgaaagctacaaattccatgatcgatcgcaagcctcgactcctgttccctaccaattcttccagccacctggtggctctgcagggacagccattagtcctcgagtgtattgccgaaggattccccactcccacgatcaaatggctaagaccaagcggacctatgcccgcagaccgcgtgacctaccagaatcacaataagactctgcagctcctgaaggtgggcgaagaagatgatggcgagtatcggtgccttgctgagaattctctcggttctgcccggcatgcctactatgtgaccgtggaggccgctccatactggctccacaaaccacaatcccatctttacggccctggagagactgcccgactggattgtcaggtccagggtaggccgcagcccgaagtgacttggcggatcaatgggattcccgtggaggaacttgcaaaggatcagaagtaccggatccagagaggggctcttatcctaagcaacgttcaaccaagcgacactatggtcactcaatgtgaggctcgtaatagacatggtctccttctggccaacgcttatatttatgtggtgcagctccctgctaagatactcactgccgacaaccagacctatatggcagtgcaggggtcaactgcctatctgctctgcaaggcatttggggcacctgtaccatccgtgcagtggcttgacgaggatggtaccactgtgctgcaggacgagaggttttttccttacgcaaatggcaccttaggtatacgagacctgcaggcgaatgatacaggtcggtacttttgcctggctgctaacgaccagaacaacgttactatcatggctaacctgaaagtcaaggacgcgacccagattacccagggtccccgtagtactatcgagaagaaggggtcacgcgtaacctttacctgtcaggcctcgttcgacccctcactgcagccaagcatcacttggcggggcgacggaagggacctgcaagagctgggcgattcagacaagtattttatcgaggatggaagactggtgattcattcccttgattattcagatcaggggaactactcttgtgttgcttccactgaattagatgtcgtcgaaagcagagcccaactactggtggtgggatccccggggccagtacctcgcctcgtactttcagacctgcatttgttgacgcaaagtcaggtccgtgtcagttggagccctgctgaagatcacaacgcccccatcgaaaaatacgatattgagttcgaggacaaggagatggcgcctgaaaagtggtacagcttggggaaggtgcctggcaaccagacctccacaacgctgaagctgtcgccctatgtgcactacacattcagagtcacagcaatcaataaatacggcccaggagagccgagtcctgtatccgagactgtcgtcacaccggaagcagccccagagaagaaccctgttgatgtgaagggagagggaaacgagacaactaatatggttatcacatggaagcctttgcgatggatggattggaacgctccgcaggttcagtaccgggtccagtggcgacctcagggaacccgaggaccttggcaggagcagatagtgtctgatccatttcttgtggtcagcaatacctccacattcgtgccgtatgaaattaaagttcaggcggtcaactcccagggcaaagggccggagccgcaggtgaccattggatatagcggcgaagattatccccaagccatcccagagctcgaaggaattgagatactgaacagctcggccgttctcgtgaagtggaggccagttgacctggcccaggtgaaaggccacctcagaggctataatgttacatactggagggaagggtcacaaaggaaacattctaagagacacattcacaaagatcacgtggtggttcctgccaacacgacctccgtgattctatctggcctccgcccctattcaagctaccatctcgaggtgcaagcatttaacggccgcgggagtggccccgccagcgagtttacgttctcgacccccgagggagtgcccggtcaccccgaagcccttcatctagagtgtcagagtaatacgtctctgctgctgcgatggcaaccgccactcagccacaacggcgtcctgacagggtacgtgctgtcttatcatccgcttgatgagggcggcaagggccaacttagcttcaacctgagagaccctgagctcaggacccataatctaactgacctgagtcctcacctgaggtacagattccagctccaggctacaacaaaggagggcccgggtgaggccatcgtccgggaaggcggcactatggcgttaagcggcatttcagattttgggaacattagcgccactgcaggggaaaactactcggtggtgtcttgggtccccaaagaggggcagtgtaattttaggttccacatcctgtttaaggccctcggagaggagaaaggtggcgctagcttgagcccacagtacgtctcctataaccagagttcctacacgcagtgggatctacaacccgataccgactacgaaatccatctgtttaaggagcgcatgttccggcaccagatggccgtcaagacgaatggaactggccgagtacgtttaccacccgctggatttgctactgaaggatggttcattggcttcgtctcggccattattctgcttttattagtgctgctgatcctctgtttcataaagcggagtaaggggggcaaatattccgtgaaggataaagaagacacgcaggtggattccgaagccagaccgatgaaagatgagacgttcggagaatacagatcactggagtccgataacgaggagaaggcgtttggaagctcgcaaccatcactgaacggggatatcaagccactggggagtgatgattctctggcagattatggaggaagtgtagacgtccagtttaacgaagacggatcttttatcgggcaatattctggtaaaaaggaaaaggaggccgcaggaggcaacgattcaagtggtgccacgtcccctattaaccccgctgtagctttggagtag

SEQ ID NO: 192615 - DNA, 1326 bp, synthetic construct
  misc_feature 1..1326: note = Description of Artificial Sequence: Synthetic coding sequence
  source 1..1326: mol_type = other DNA
atggtgcccgccctgcggtacctggtgggcgcctgcggccgggcccgtggcctgtttgcaggtgggagtcccggagcctgcggcttcgctagcggacgccccaggcctctgtgtggtgggtctcgatcggcctcaacttcgtccttcgatatagttattgtaggaggtggcatcgtggggcttgcctcagcacgtgccctgatactgcgtcaccccagtctctcaatcggggtgcttgagaaggaaaaagacctcgctgttcaccaaacgggccataacagcggcgtaattcactctgggatatactataaacccgaatccttaaaggcaaaactgtgtgtccagggtgccgccctgctgtacgagtactgtcagcaaaagggcatctcttataaacagtgcgggaaactgatcgtcgctgtggagcaagaagaaattcccaggttgcaagccctgtacgaaaagggactccaaaatggcgttcctgggctgcgtctgattcagcaggaagacatcaagaaaaaagaaccatattgcagaggtctcatggcaattgattgtcctcataccggcatcgtggattacagacaggtggccctgagttttgctcaggattttcaggaagctggcggaagcgtgctaactaactttgaagttaagggaattgaaatggccaaagaaagccctagtagatcaatcgacggtatgcagtatccaatcgttataaagaacactaaaggcgaagaaattcgatgtcagtatgtcgtcacgtgcgccggactctactcggaccgtatttccgagctctctggctgtactcctgatccaagaatagtgccattcagaggcgattatctgcttcttaagccggagaagtgttacctagtcaaaggtaacatttaccccgtccccgattctaggttccccttcttgggggtacactttacaccccgcatggatggctccatttggttggggccaaacgccgttttagctttcaaaagggagggatatcggccgttcgacttctcagcaactgacgtgatggatattattatcaattctggattaattaagctcgcctcgcagaattttagctatggagttaccgagatgtacaaagcatgctttttgggggcgaccgtcaagtatctgcagaagtttattcctgaaatcacgatttctgacattcttcgccaggtcgctgtgcggggtccctcatggctgtggcagcaacctatgaaggtctccgataataatatatattgcttcctctggcgttgttttgccttgcttctaaccggctccgcctgttcttttaagtag

SEQ ID NO: 192616 - DNA, 1392 bp, synthetic construct
  misc_feature 1..1392: note = Description of Artificial Sequence: Synthetic coding sequence
  source 1..1392: mol_type = other DNA
atggtgcccgccctgcggtacctggtgggcgcctgcggccgggcccggggtctgtttgcaggcggttcaccaggcgcttgtggattcgcatccggacgtccgcgtcccctgtgcggaggatcgcgttctgctagtacaagttcctttgacattgtcattgtcgggggcggcattgtgggacttgcatcagctcgtgccttaatcctgcggcacccctctctctctatcggtgtactggagaaggaaaaggacttggccgtgcatcagaccggtcacaattccggcgttattcactctggtatctactataagcccgagagcctgaaggccaagttatgcgtgcagggtgccgctctgttgtacgaatactgccagcagaaagggatttcgtacaaacagtgtggcaaactgatagtggccgtcgaacaggaagagatccccagactccaagccttatatgagaaaggcttacagaacggcgtccctgggctcaggttaattcaacaggaggacattaagaagaaagaaccgtattgccgtggacttatggccatcgactgcccccacacaggcatagtcgactaccggcaagtggctctttcctttgctcaggatttccaagaggccggcggctcagtcctaactaacttcgaggtgaaaggcatcgagatggctaaagaaagcccgtctaggtccatcgacggcatgcagtatcccatcgtgataaaaaacacaaaaggtgaagaaatcaggtgtcagtacgtggtcacttgcgcagggctgtactcggatagaattagcgagctgtccggctgtacaccagatccccggatagtgcctttcaggggcgactacctgctcctcaagcccgaaaagtgttacctcgtgaaagggaacatttaccccgtccctgatagccgatttcctttcctgggtgtccacttcacgccccgaatggatggctcaatctggctgggccctaacgctgtcctggcttttaaacgtgaagggtaccggcctttcgacttttcggctacagacgtaatggatatcatcatcaattcgggcctgatcaagctcgcaagtcaaaactttagctacggtgtgacagagatgtacaaggcttgttttctgggcgccacagtgaagtacctgcagaaatttattcctgaaattaccatatcagatatcttgagaggacctgcgggggtcagggcccaggcactggatagggacggaaatctggtggaggactttgtttttgatgccggtgttggtgatattggtaataggattctccacgtcaggaacgcaccttctcctgccgcgacatcctccatcgcgatcagtgggatgattgccgacgaagtgcagcagcgtttcgaattgtag

SEQ ID NO: 192617 - DNA, 1392 bp, synthetic construct
  misc_feature 1..1392: note = Description of Artificial Sequence: Synthetic coding sequence
  source 1..1392: mol_type = other DNA
atggtgcccgccctgcggtacctggtgggcgcctgcggccgggccagaggcctgtttgccggtggctcccctggcgcctgcggatttgccagcggtcggccacgaccactatgtgggggctctaggagtgcctccacctcctctttcgatattgtaatagttgggggtggtatcgttgggttagccagtgcgcgcgcactgatcttgcggcacccctccctgagcatcggggtgctcgagaaggaaaaagaccttgccgttcaccagactggccataactccggggtaattcactccgggatctactacaaacctgaatctctcaaagccaaactttgtgtgcagggcgcggccttgctttatgagtactgccaacagaaagggatcagctataaacagtgcggtaagctcatcgtggctgtggagcaagaagagatacctcgattgcaagccctctatgagaaaggcctgcagaacggagtgccaggattgcgcttgattcagcaggaggatatcaaaaaaaaggagccttactgtagaggactcatggctattgactgtccacacaccggtatcgtcgattatcgccaagtagccctgtcatttgcccaggacttccaggaagcaggagggtctgtgcttaccaatttcgaagtgaagggaattgaaatggccaaggaaagcccctctaggtccatcgacggaatgcagtaccctattgtcatcaagaatacaaagggtgaagagattcggtgtcagtacgtggtgacctgcgccggtctctacagcgacaggatctcagaactgtctggttgtacgcccgatccgcgaattgtgccattccgaggggactacctgctcctcaaacccgagaagtgttatttggtcaagggtaacatctaccccgtcccagattctaggtttccgttcttgggcgtgcacttcacccctcgaatggacggctcaatctggcttgggccgaacgctgtgcttgctttcaagcgggagggctatagacccttcgacttttccgccaccgatgtcatggatattatcatcaactctggcctcatcaaactggcttctcagaactttagttacggtgtaaccgagatgtacaaagcttgtttcctaggagccaccgttaaatacttacaaaaattcataccagagataactatcagcgacatcctcaggggccctgctggtgtcagagctcaagcgctggatcgggacggtaaccttgtggaagactttgtgtttgacgcaggcgttggagacatagggaatcggattctgcacgttcgcaacgcaccgtcccctgccgccacgagttctatcgccatctcaggcatgattgctgacgaagtacaacagcggtttgagctgtag

SEQ ID NO: 192618 - DNA, 3060 bp, synthetic construct
  misc_feature 1..3060: note = Description of Artificial Sequence: Synthetic coding sequence
  source 1..3060: mol_type = other DNA
atgctgtggcgggtgctgctgagcaagcggccccccttcccccaccctgaactggacttccaggaagcccccataccatcatgtccgggcaggctgcctgggaggaagaactcggtggctcttgcagccgcacctcgcaaggaacctactggcgacagggagaagcctctgccatttccagtgttggcaccgttcagcaatcccgagcattcggcccccgctaaggttgtgagggcagccgtgcctaagcaacggaagggcagcaaagtaggagactttggagacgctattaattggcctactccaggcgaaattgctcataagtcagtgcaaccccagtctcacaagccacagcccactcggaagttgcctcctaaaaaggatatgaaagaacaagagaaaggcgaaggcagcgattccaaggagtcccccaaaactaagagtgatgagagcggcgaggagaagaacggcgatgaggattgccagcgcggtgggcagaagaagaaaggcaacaagcacaaatgggtccctctccagattgatatgaagccagaagtgccgcgcgaaaaactcgcttccaggcctacaagacctccagagccacggcacattcctgctaataggggggaaatcaaaggaagtgaatccgccacctacgttcccgtcgcgccacccacgccagcttggcagccagaaattaagcccgagcccgcttggcacgatcaggatgagacaagtagcgtgaagtccgacggcgccggaggggcccgggcgtcgtttagaggccggggacggggccgcggcaggggcaggggaaggggaagaggtggcacccgtactcacttcgactatcagtttgggtatcgaaagtttgacggagtcgagggtcctagaacacccaagtatatgaataacattacatattattttgataatgtgagctcgactgagctctacagcgtggaccaagagctgctgaaggactatattaagcgccagattgagtattatttcagtgtcgacaacttggaaagagacttctttcttcgccggaaaatggacgctgatgggttcctacctatcactctgatagcaagcttccaccgggtacaggctctcactactgacatatcactgatttttgcagctttaaaggattccaaagtggttgaaatcgtggacgagaaggtgaggaggcgcgaggagcccgaaaaatggcctctgccccctatcgttgattattcccagacggatttttcccagcttctaaactgtccagagtttgtaccacgtcagcattaccaaaaagagactgagagtgcaccaggatctccacgcgctgtgacaccagtgccaaccaaaaccgaagaggtgtcaaatcttaagaccctgcccaagggcctctctgcttccctgcccgacctggactctgagaattggatcgaggtgaaaaagagaccaaggcccagcccagctcggcccaagaagtcagaggagagccgcttttcccacttgacctctttacctcagcagctccccagccagcagctcatgtccaaagatcaagatgaacaggaggaactggactttttgttcgacgaagaaatggaacagatggacggaagaaaaaacaccttcaccgcgtggtctgacgaggagtctgactacgaaatagacgatcgcgatgtaaataaaatactcattgtcacccaaactccacactatatgaggagacaccctggtggagaccggacgggaaaccacacgagccgggctaagatgtccgccgaattggccaaggtcattaacgacggattattctattacgaacaggatctatgggccgagaaatttgagcccgagtactcccagataaagcaggaggtcgagaatttcaaaaaagtaaacatgatatctcgggagcagttcgacactctgactccagagccacccgtcgatccaaaccaggaggtgcctccaggacccccaaggttccagcaggtgcccaccgacgccctggcaaacaaactgtttggggcccccgagccatctaccattgcaaggagcctgcctactaccgtgcccgagtcccccaactacaggaatacccggacccctcgcacccccagaaccccccagcttaaagactccagccagacatctcggttctaccccgtcgtcaaggaaggacgtacactcgatgccaaaatgcctaggaagcgtaagacccgccattcatcgaatccccccctcgagagtcacgtggggtgggtcatggacagcagagagcatcggcctagaacagcatcgatatctagctccccttcggagggaacccccacggtggggagttacgggtgcacgccgcagagtctaccaaaattccagcatccttcccatgaactgttgaaggagaatggcttcacccaacatgtgtaccataagtaccgcagacgttgtctgaatgagcgaaaacggcttggtattggacagtctcaggagatgaatacactgtttaggttttggagttttttcctccgtgatcacttcaataagaaaatgtatgaagagtttaagcagctggctttggaagatgcaaaggagggctaccgctacggtctggagtgcctctttcgctactacagttacggactcgaaaagaaattcagactggacatatttaaagatttccaggaggagacagttaaagattacgaggctggacagctgtatggattagaaaagttttgggccttcttgaagtactctaaggctaagaatctggacatcgatcctaagcttcaggaatacttgggtaagttccgccgtcttgaggatttcagggttgatccacccatgggagaggaaggtaaccacaaaagacactccgttgtggcaggaggaggcgggggggaaggaaggaaacgctgcccctcccagtcatccagccgccccgctgccatgatatcacagcctcccactcctccaaccggacagcccgtgcgagaagacgccaaatggacttcacagcactcaaacacccagacgctgggcaaatag

SEQ ID NO: 192619 - DNA, 2451 bp, synthetic construct
  misc_feature 1..2451: note = Description of Artificial Sequence: Synthetic coding sequence
  source 1..2451: mol_type = other DNA
atggccacccaggtggagcccctgctgcccggcggcgccaccctgttgcaagccgaagaacacggcggcttagtgaggaagaaacccccgcctgcccccgaaggaaagggggagccaggtcctaacgacgttagagggggtgagcccgacggctccgctagacgtcctagaccgccttgtgccaagccgcataaggaggggacaggacagcaggagcgggaatctcctcgcccactgcaactgccaggcgcggaaggacctgctatcagcgacggagaggagggcggaggggagccaggcgccggagggggggccgcaggagccgccggcgctggaaggagggactttgtggaagcccctccgcctaaagtgaacccttggacaaagaatgctctaccaccagtgctgaccaccgtgaacggccagtctcctcccgaacacagcgcacccgctaaggtggttagagccgctgtccccaagcagcgaaagggtagcaaggtgggcgatttcggagatgcaattaattggcctactccaggggagattgctcacaagtcagtccagcctcagtcacacaaaccccagccaacacgcaagctgccaccaaagaaggatatgaaggaacaagaaaaaggagagggaagcgattcgaaagagtcacctaagactaagtctgacgagagtggagaagaaaagaatggagacgaggactgccagcgcgggggccagaaaaaaaaagggaataagcataaatgggttcctttacagatcgacatgaaaccagaggtgccaagggaaaaattagcatctagacccactcggcccccagagccaagacacataccagcaaaccgcggagaaataaagggcagcgagagtgccacctatgtgcctgtcgcgcctccgacgccagcctggcaaccagaaatcaaacctgagcccgcttggcacgaccaggacgaaacctcaagcgtcaaatccgatggcgctggaggagcccgagcaagctttaggggacgcggacgcggacgcggcagaggaagaggacggggcagggggggcacacggacccacttcgactaccagtttggctataggaagtttgacggcgtcgaaggccctcggaccccaaagtacatgaataatattacatactatttcgataacgtatcaagtacagaactctatagcgttgatcaagagctgcttaaggattatattaaaagacagattgagtactacttctccgtcgacaacttagaacgagatttctttttacgcaggaagatggacgcggacgggtttcttccaataacactcatagcatcctttcaccgcgtgcaggcattaacaaccgacatctccttgattttcgcagcactgaaagactccaaagtggttgagatcgttgacgagaaggtccggcgacgcgaggagcccgaaaaatggcccttgccgccaatcgtagactattctcagacagatttctctcagttactgaattgccctgaatttgtgcccagacaacattatcaaaaggaaacagagtccgcccctggctctccaagggccgtaacgcctgtccctaccaagaccgaggaagtctccaatctaaaaacactccccaaaggactgagcgcgagcctcccggatctggatagtgaaaactggatcgaagtgaaaaagagacctaggccaagccctgcccggcctaagaaaagcgaggaatcaagattttcacacttaactagtctaccgcaacaactcccttcacagcagttgatgtccaaagaccaggacgagcaggaggagttggacttcttgttcgacgaggaaatggagcagatggacggacgcaagaatactttcaccgcctggtccgatgaggagagcgactacgagatcgatgacagggatgttaacaagatcttgattgtcacccagactccacattatatgcggcggcaccctggtggcgacaggactggcaatcatactagccgggccaagatgtccgctgagctggcaaaagttataaatgacggtctattctattacgaacaggatctgtgggccgaaaaattcgaacctgagtactcccaaattaagcaggaagtcgagaacttcaagaaagtgaacatgataagccgggaacaatttgatacgctgacgcccgaacctcccgtggacccgaaccaggaggtacctccaggccctcctagattccagcaggtccccactgatgccttagctaataaattgttcggggcccctgagccaagcactatcgccagatctttaccaaccaccgtccctgagagtccgaattacaggaatacccgcacaccccgcactcccaggactccacagctcaaggactccagccagacctcccgattctatcccgtggtgaaagaaggccgcactttggatgctaagatgccacgatag

SEQ ID NO: 192620 - DNA, 282 bp, synthetic construct
  misc_feature 1..282: note = Description of Artificial Sequence: Synthetic coding sequence
  source 1..282: mol_type = other DNA
atgaaggagcaggagaagggcgagggcagcgacagcaaggagagccccaagactaaaagtgacgagtcaggagaggagaagaatggggacgaggactgtcagcgcgggggtcaaaaaaaaaaaggcaacaaacacaaatgggtgcccctccagatcgatatgaagcccgaggttcccagagagaaactggcttctcggcctacacgccctcctgagcccaggcacatcccagcaaatagaggggaaattaaaggaagtgaaagcgccacctatgtcccgtag

SEQ ID NO: 192621 - DNA, 1836 bp, synthetic construct
  misc_feature 1..1836: note = Description of Artificial Sequence: Synthetic coding sequence
  source 1..1836: mol_type = other DNA
atgaaggagcaggagaagggcgagggcagcgacagcaaggagagcccaaagacaaagtccgatgaaagcggcgaggagaagaacggcgacgaggactgtcaaaggggcggccagaagaagaaaggaaacaagcacaagtgggttcccctccaaattgatatgaaacccgaggtcccacgcgaaaagctggcgtcaaggccgactcggccccctgagccccgtcatatcccagccaacaggggcgaaatcaagggaagcgagtccgcaacatacgttccagtggcgcccccaacccccgcgtggcagcctgaaattaagcccgagcctgcctggcacgatcaggacgaaacttccagcgtgaagtcggacggtgctgggggagcaagggcttcttttcgggggaggggtagaggaaggggccggggccggggacgaggcagagggggtacccgcacgcacttcgattaccagtttggctatcgcaagtttgacggagtcgaagggccgaggacacccaagtatatgaataatattacatattacttcgacaacgtgtcctctacagaactgtactcagttgaccaagagcttttgaaggactacattaaacggcaaattgaatattacttcagtgtagataacctggaacgcgattttttcctaaggcgaaaaatggacgctgatggcttcctgccaattactctgatagccagtttccatagggtgcaggccctgaccaccgacatctccttgatttttgcagccttgaaagattctaaggtggtggagatcgtggacgaaaaagtaaggcggcgcgaggaacccgaaaagtggccattacccccaatcgtggattactcccaaactgacttctcacagctgttgaactgccctgagtttgttcctcgacagcactaccagaaggagactgagagcgcgcccggcagccctagagcagttacgccggtacccacaaagacagaagaagtgtccaatttaaagacacttccgaaaggactctcagcgtcactcccagacctggattcagaaaactggatagaagttaagaagcgcccgcggcccagtcctgcaagaccaaagaaaagtgaagaatctcgctttagtcatctgacaagcttgccgcagcagttgccttcccagcaactgatgagcaaggaccaggatgagcaagaggagctggattttttgttcgatgaggagatggagcagatggacgggaggaaaaatactttcacagcgtggagcgatgaggaaagcgattacgagattgacgacagggatgtcaataaaatcctcattgtaacacaaaccccccattacatgcgccggcacccaggcggtgataggactggcaatcacacaagtagggccaagatgagtgccgaactcgctaaggtcatcaatgacggcctgttctattatgagcaggacttgtgggccgagaagttcgagccagagtactctcaaatcaaacaggaggtggagaactttaagaaagtgaacatgatcagccgtgagcaatttgacactcttaccccagaaccccctgttgaccctaatcaggaggtgccacccgggccccccaggttccagcaagtccccaccgatgccctggctaataagctttttggcgccccggagccatcaaccattgctcggtctctgcctacaactgtccccgagtcacccaactatcggaatacgcgcactccaaggacgccacggactcctcagctcaaggattcgtctcagaccagccggttctatcctgtggtcaaagagggtcggacactggatgcaaagatgcctcggtag

SEQ ID NO: 192622 - DNA, 1749 bp, synthetic construct
  misc_feature 1..1749: note = Description of Artificial Sequence: Synthetic coding sequence
  source 1..1749: mol_type = other DNA
atggagaccgagagcggcaaccaggagaaggtgatggaggaggagtctaccgagaagaaaaaagaggtggagaagaaaaaaagaagtcgagtgaagcaagtactggcggatatcgccaaacaggtcgatttctggtttggagacgccaacctgcataaggatcgtttcctcagggaacagattgagaaatcgcgcgacggctatgtagacatctctctgctggtctctttcaataagatgaaaaagctgaccacagacggtaagttgattgccagagcactgagatcctccgcggtcgtcgaacttgatctcgagggaacaagaatcagacggaaaaaaccactgggcgaacggcctaaggacgaggacgaacggacagtgtacgttgagctacttcctaaaaacgtgaatcatagttggattgagcgtgtatttggaaagtgcggcaatgtggtctatatctcgatcccccactacaagagtaccggcgacccaaaaggtttcgccttcgtggagttcgagactaaagaacaggcagccaaggccatagagtttctgaacaatcctcccgaagaggccccacgtaagcccggaatatttccaaagaccgtaaagaataaaccaatccctgctctccgggtcgtcgaggaaaaaaaaaaaaagaaaaagaaaaagggacgcatgaaaaaggaggataacatccaagctaaggaggagaacatggatacatctaacacaagtatcagcaagatgaagcggtcaaggccgactagcgaggggtccgatatagaatccacagagccccaaaagcagtgctctaagaagaagaagaaacgtgatagagtagaggcatcctctctgccagaagtacgcacgggcaaacggaagaggagctcctccgaagacgccgagtcccttgccccgcggagtaaggtcaagaagatcatccagaaagatatcataaaggaggcctccgaagcaagcaaggagaatcgggatattgagatcagtacagaggaggagaaggacacaggtgacttaaaggactcatccttgctgaaaactaaacgtaaacataaaaaaaagcacaaggaacgccataagatgggagaagaagtgattccccttcgcgtactatcgaagagcgagtggatggacttgaaaaaagagtacctggccctgcaaaaagcttccatggccagccttaaaaagacaatctcacaaataaagagcgagtctgagatggagaccgattcaggtgtcccacagaacactggaatgaaaaacgagaaaacagcaaatagggaagaatgccggacccaggaaaaggtgaacgcaaccgggccacagtttgtgtcaggcgtgatcgtgaaaataataagtactgaacctctgcccggcaggaagcaggtccgcgataccttggccgctatctctgaagtattgtatgttgatctcctggagggagacaccgaatgccatgctcgattcaagacaccagaggatgctcaggccgtgatcaacgcatataccgaaatcaataaaaaacactgttggaaattagaaattctttctggagatcacgagcagcgctattggcagaaaatcctggtggacagacaggcaaagttaaaccagccgagagagaagaaacggggaacagaaaagctgattacaaaggctgaaaaaatccgcttggcaaaaactcagcaggctagtaagcacatacgcttctctgagtacgactag

SEQ ID NO: 192623 - DNA, 1749 bp, synthetic construct
  misc_feature 1..1749: note = Description of Artificial Sequence: Synthetic coding sequence
  source 1..1749: mol_type = other DNA
atggagaccgagagcggcaaccaggagaaggtgatggaggaggagagcactgagaagaaaaaggaggtggagaaaaagaaacgatcaagagtgaagcaagtactcgccgatatcgcaaagcaggtcgacttttggttcggggacgccaatcttcataaagaccgcttcttaagggaacagatcgaaaagtccagagacggctacgtggatatatcactgctagtctctttcaacaagatgaaaaagctgactaccgatggcaagctcatagcccgggcattgcgctcctccgctgtcgtcgaactggacctggaggggacgcgcatccggcgtaaaaaacctcttggtgagcggcccaaggatgaggatgagcgaacggtgtacgtcgagttgctgcctaaaaatgttaaccacagctggatcgagcgtgtgttcggaaagtgcggcaatgttgtctatatttctatcccgcattataagagcacaggggatccgaaaggatttgcttttgtagagtttgagaccaaggaacaggctgcaaaagccatagagttcctgaataaccctcccgaagaggccccccggaaaccaggtatcttcccaaaaaccgtgaagaataagcctatacctgctctgagggtcgtggaggaaaaaaagaagaagaagaaaaagaagggccgcatgaagaaggaggataatatccaggctaaggaggaaaatatggatacgagcaacacctccatatcaaaaatgaagcgcagccgcccaacatctgaggggagcgacatagaatccaccgagcctcaaaagcagtgttctaaaaaaaaaaagaagcgcgaccgagtagaggcgtcttccttgcccgaggtcagaactgggaagcgcaaacggtcctcatcagaagatgccgaatccttagcaccacgctccaaggttaagaaaatcatccaaaaggacattattaaagaggcttccgaggcgtctaaggaaaatagagatattgagatctcgaccgaggaagagaaagacacgggcgatctgaaagatagtagtttgttaaaaaccaagagaaaacacaagaaaaagcacaaagaacgccacaaaatgggcgaagaggtaatccccttgagagttcttagcaagtctgaatggatggatttgaaaaaggaatacctcgccctccaaaaggcctctatggccagtcttaaaaaaaccatcagtcagatcaaatccgagtcagagatggagactgacagtggcgtaccacagaataccggaatgaagaacgaaaaaacagctaatcgagaagaatgccggacacaagaaaaagttaatgcaactggaccacagttcgtgagtggcgttattgtgaaaattatttcaactgagccgttaccaggaagaaaacaagtgagagataccctcgcagctatctctgaagtgctatatgtcgatctgcttgagggggacaccgaatgtcacgctcgatttaagacacccgaggacgcccaggcagtgatcaatgcctacacagagataaataaaaagcactgttggaaactggagattctgtcaggcgaccacgaacagcgctactggcagaagatattagtggatcgtcaggccaagctgaatcagcccagagaaaaaaagcgcgggaccgagaagttgattacaaaggctgagaagattcgcctagccaagacccagcaagcgtctaagcacatccgttttagtgagtacgattag

SEQ ID NO: 192624 - DNA, 900 bp, synthetic construct
  misc_feature 1..900: note = Description of Artificial Sequence: Synthetic coding sequence
  source 1..900: mol_type = other DNA
atggagaccgagagcggcaaccaggagaaggtgatggaggaggagtcaaccgaaaaaaagaaggaggtggagaagaagaaaagaagcagggtaaaacaggtgttagccgacatcgctaagcaggtggatttctggttcggtgacgccaatctgcacaaagacagattcctgcgggagcagatcgagaagagccgagacggctacgtggatatttcccttctggtaagttttaacaagatgaagaagctcacgacagacggcaaactgatcgccagagcactgcgatcctctgcggtcgtcgagcttgacctggagggcactcgaatcagacgcaaaaagccccttggggagcgaccgaaggatgaggatgaacggacagtatacgttgagctgcttcccaaaaacgtgaatcactcctggattgagcgggtttttggcaagtgtgggaatgtggtgtatatctcaatccctcattataagagcacaggtgacccaaagggcttcgccttcgtggaattcgagaccaaggaacaggctgccaaagccatcgagttcctaaataatcctcccgaggaagctcctaggaaaccagggatctttcccaagaccgtgaagaataagccgatcccagccctacgggtggtggaagagaaaaaaaagaaaaagaagaaaaaaggcagaatgaaaaaggaagataacattcaggctaaggaggaaaacatggatactagtaacacatcaatcagtaaaatgaaacggtcaagaccgacttcagagggctcagatatcgaatcgaccgaaccccagaagcagtgttctaagaagaagaaaaagcgggatagggtggaagcttcctctctacccgaggtacgtacagggaagaggaaaagaagtagctag

SEQ ID NO: 192625 - DNA, 390 bp, synthetic construct
  misc_feature 1..390: note = Description of Artificial Sequence: Synthetic coding sequence
  source 1..390: mol_type = other DNA
atggagaccgagagcggcaaccaggagaaggtgatggaggaggagtcaactgagaagaaaaaggaggtagaaaagaagaagagaagccgcgttaaacaggtgctggcagacattgccaagcaagtggacttttggtttggcgatgctaacctgcacaaagatagattcctgagggaacagatcgagaagtctagggatgggtatgtcgatatcagcctccttgtaagttttaacaagatgaaaaaattgacaacggacgggaaactcattgctcgcgcgctgcgttcatctgctgtagttgagctcgatcttgaggggacgcggatcagaaggaagaaacctctcggggagcggcccaaggacgaggacgaaagaacagtctacgtatag

SEQ ID NO: 192626 - DNA, 360 bp, synthetic construct
  misc_feature 1..360: note = Description of Artificial Sequence: Synthetic coding sequence
  source 1..360: mol_type = other DNA
atggagaccgagagcggcaaccaggagaaggtgatggaggaggagagcaccgagaaaaaaaaggaagttgaaaaaaagaagagaagtcgggtaaagcaggttctcgccgacattgctaagcaagtcgacttctggtttggcgacgcaaacctccacaaggaccgcttcctgagggaacagattgaaaaatctcgagacggctacgtggacatttcactgctggtgagcttcaacaagatgaaaaagttgaccacagacgggaagctcattgcccgtgccttgcggtcgtctgcagttgtcgaattggacctggaaggtacacgaattcgacgaaaaaaaccccttggcgagcgcccctag

SEQ ID NO: 192627 - DNA, 1770 bp, synthetic construct
  misc_feature 1..1770: note = Description of Artificial Sequence: Synthetic coding sequence
  source 1..1770: mol_type = other DNA
atgatccccaacatcgagggcatggagaccgagagcggcaaccaggagaaggtcatggaagaagaatccactgagaagaaaaaagaggtcgaaaagaaaaagaggagcagagtgaaacaagtgctcgccgatatagccaagcaggtagatttctggtttggagacgcaaatttgcataaagacagattcctgcgggaacaaattgagaaaagcagggacgggtatgtcgatatcagtttactcgtcagctttaacaagatgaagaagctgacaacggacggtaaattgatcgcaagggcattgcgcagttccgccgtggtggaattagatctggaagggactcgcataagaagaaaaaaacccctgggagagcgcccgaaggacgaggacgaacgaacagtttacgtggaactgcttccgaagaacgtgaaccactcatggattgagcgtgtttttggcaagtgcggaaacgtagtctatataagtattccccactataagagtaccggcgatcccaaaggattcgcctttgtggaattcgagacaaaggaacaggctgccaaggcaatcgaatttttgaataatcctccagaggaggcgccacggaaaccagggatttttcctaaaaccgtgaagaacaaacctatccctgcactgagggtggtcgaggagaaaaagaaaaaaaaaaagaagaaagggagaatgaagaaagaggacaatattcaagcaaaagaagagaacatggatacttccaatacatctatcagtaaaatgaagcgaagccggccgacctctgaaggatccgacatcgagagcacagaacctcagaaacagtgctcaaaaaaaaagaagaaaagggatagggtggaagcgtcatcactgccagaggtccgaaccgggaaacgaaagcgaagtagttcggaggatgcggagtcattagcacctcgctcaaaagtcaagaagataattcaaaaggacatcataaaggaggcctccgaggcaagcaaggaaaacagggatattgagattagcacagaagaggagaaggatactggcgacctgaaagactcttctttgctcaagaccaagcgcaaacacaaaaagaagcataaggagcggcataagatgggagaggaagtgattcccctaagggtcttgtctaagagcgagtggatggacctgaagaaagagtatctcgccctgcaaaaagcgagtatggcctcacttaaaaaaacaatatcccaaatcaaatccgagtcagaaatggagaccgattctggggtgccccaaaatacagggatgaagaatgaaaagacagccaacagggaagaatgtcgtactcaggaaaaggtgaacgccaccggacctcagttcgtcagtggcgtgatcgtgaaaattatcagcacagagcccctgcctggcaggaagcaggtccgtgatactctggccgcaattagtgaggttttgtatgtagatctgctggaaggcgacacggaatgccacgcccggttcaaaacccctgaggacgcccaggccgttataaacgcctacacagaaattaacaaaaaacactgctggaagctggagattctcagcggtgatcatgaacagcgatattggcagaagattctcgtggacaggcaggccaaactcaatcagccacgggaaaagaagaggggcactgagaagctcatcaccaaggccgaaaagatacgcttggctaagacccaacaggcttccaagcacataaggttctctgagtacgactag

SEQ ID NO: 192628 - DNA, 417 bp, synthetic construct
  misc_feature 1..417: note = Description of Artificial Sequence: Synthetic coding sequence
  source 1..417: mol_type = other DNA
atgaagttcaccaccctgctgttcctggccgccgtggccggcgccctagtatacgctgaagatgcttccagtgatagcactggcgccgaccccgcacaggaggcggggacttccaaaccaaacgaggaaatcagcggccccgctgagcccgcatcaccccccgagactaccacaacggcccaagagaccagcgctgctgcagttcaaggcacagcaaaagtcacatccagtagacaggagcttaacccccttaaatcaatagtggagaagagcatcctgctcacggaacaagccctggcaaaggctggaaagggtatgcacggcggcgtgcccggtgggaagcagttcatagagaatggctctgagttcgcgcaaaagttactgaagaaattctctctgctgaaaccttgggcctag

SEQ ID NO: 192629 - DNA, 429 bp, synthetic construct
  misc_feature 1..429: note = Description of Artificial Sequence: Synthetic coding sequence
  source 1..429: mol_type = other DNA
atgcggttcttcgtgcccctgttcctggtgggcatcctgttccccgcgatcctcgctaagcaattcacgaagtgtgagctgtcccagctcctgaaggatattgacggctacggaggcatcgcactgcccgagttaatatgtacaatgtttcacactagtggatatgacacccaggctatcgttgagaataatgaaagcacagagtacgggctgttccagattagtaacaagctgtggtgcaagtcatcccaggtgccccagagtagaaacatttgcgacatcagctgtgataaatttcttgacgatgatattaccgatgatattatgtgcgctaaaaagatcctggacatcaagggcattgattactggctcgcccacaaggctctctgtaccgagaagttggaacaatggctgtgcgagaagctttag

SEQ ID NO: 192630 - DNA, 1644 bp, synthetic construct
  misc_feature 1..1644: note = Description of Artificial Sequence: Synthetic coding sequence
  source 1..1644: mol_type = other DNA
atgtaccggctgatgagcgccgtgaccgcccgggccgccgcccccggaggcttggcctctagctgtgggcgcagaggtgtgcatcagagagccggtttgcctcctctgggacatgggtgggtgggcggacttggattggggcttgggctggcccttggggtgaaattggctggtgggctccgaggcgcggcccccgctcagtctccggctgctcctgacccagaagcctctcctctggccgaacctccacaggagcagtccctggccccctggagtccacaaacccccgcccctccatgttcgcgttgttttgcgcgtgccatcgaatcctcgagagacttgctgcacagaattaaggacgaggtcggggccccggggatagtcgtaggggtttccgtagacggaaaagaagtctggtctgagggtctcgggtatgcggatgtcgaaaatcgcgtgccttgtaaacccgagaccgtgatgaggattgcgtccatctcgaaatctttgaccatggtggccttggccaaactttgggaggcggggaagctggacctggatatacccgtgcagcactacgtgcctgagttccctgagaaagaatatgaaggagagaaggtgtccgtgacaacaagattgctgatctcccatctgtcagggatccggcattacgaaaaggacataaaaaaggtgaaggaggagaaggcgtacaaggctctcaagatgatgaaagaaaacgtcgccttcgagcaagaaaaagaggggaaaagcaatgaaaagaatgactttacaaaatttaaaactgagcaggaaaatgaggctaaatgtagaaactcgaagccaggcaagaagaagaatgacttcgaacagggcgagctgtacctgcgggaaaagtttgaaaacagtatcgaaagtctgcgactcttcaaaaatgaccccttattctttaagccagggtcccagtttctgtactctacatttgggtatactctgctggctgccatcgtcgagagggcgagcgggtgtaagtacctcgactacatgcagaagatctttcacgacctggacatgctgaccacggtgcaggaggaaaatgagcctgttatttacaatcgggcacgcttctacgtttacaataaaaaaaagcggttggtgaacactccatatgtcgacaactcttataagtgggccggtggtggtttcttatctacggtgggagatctgctgaagtttggaaacgctatgctgtacgggtatcaagtcgggctgtttaaaaattcaaatgaaaatctcctcccgggatacctgaaacctgaaaccatggtgatgatgtggactccagttcctaacaccgaaatgtcatgggataaggagggaaagtacgccatggcctggggtgttgtggaaaggaaacagacttacggctcatgtagaaagcagagacactacgcaagccatacggggggagcagtaggagcctccagcgtgcttctggtactaccagaggaactcgataccgagactatcaataataaggtgccccctcgcggaatcattgttagtattatttgtaacatgcagagcgtgggcctgaactctactgctctgaagattgccctcgagtttgacaaagatcgttcagattag

SEQ ID NO: 192631 - DNA, 1122 bp, synthetic construct
  misc_feature 1..1122: note = Description of Artificial Sequence: Synthetic coding sequence
  source 1..1122: mol_type = other DNA
atgtaccggctgatgagcgccgtgaccgcccgggccgccgcccccggaggtctcgccagtagttgtgggcggcgaggggtgcatcaacgggccggactaccaccactgggtcatggatgggttggcggcctggggcttggattgggcctcgctctgggggtaaagctggccggcggtctgagaggtgccgccccagcgcagtcccccgccgccccggatcctgaggccagcccactggccgaacctcctcaagaacaaagtcttgctccgtggagcccccagacgcctgctccaccatgttccaggtgtttcgcaagggctatcgagtccagtagagacttactccatcgcattaaagatgaagttggggcacccggtattgtcgtaggcgtgtcagtcgatggtaaggaagtgtggagcgagggcctgggatatgcagacgttgaaaaccgagtcccatgcaaacctgagactgtcatgcggatcgccagcatcagcaaaagtctcaccatggtggctttagcaaaactatgggaggcagggaagctagatctagatatacctgttcagcattacgttcccgagttcccagaaaaggaatatgagggggaaaaggtgtcggtgaccactaggctactgattagccacctctctggtatcagacattatgaaaaggatatcaagaaggtgaaggaggaaaaagcttataaggctctcaaaatgatgaaagagaatgtggcgttcgagcaggaaaaggagggcaaaagcaacgagaagaacgattttacaaagttcaagactgaacaggagaatgaagcaaaatgccgcaattcaaagcccggaaagaaaaaaaacgactttgaacagggggagctgtatttgagggagaagttcgagaactcaatagaaagcctccgcttgttcaagaatgaccccctcttcttcaagccaggctcccagttcctgtattccacattcggctatactctcctagctgccatcgttgagcgggcctcaggctgcaaatacttggactatatgcagaaaatcttccacgacctcgacatgttgaccaccgtccaggaggagaatgaacctgtgatctataaccgcgcccggtag

SEQ ID NO: 192632 - DNA, 5784 bp, synthetic construct
  misc_feature 1..5784: note = Description of Artificial Sequence: Synthetic coding sequence
  source 1..5784: mol_type = other DNA
atggagctgagctggcacgtggtgttcatcgccctgctgagcttctcctgttggggctccgattgggagtctgatcgtaacttcatcagtaccgcaggccccctgaccaacgacctgcttcacaacttgtccggactcctgggtgaccagtctagcaacttcgtcgcaggcgataaagatatgtacgtgtgccaccagcccctccccaccttcctgcctgagtatttctcatctctccatgctagccagattacccactataaggtgttcctttcctgggcacaactgctcccagcgggtagtacccagaacccagacgaaaaaaccgtgcagtgttatagacgcttattgaaagccttaaagaccgcccgacttcagcccatggtgatcctacaccatcagaccttgcctgcaagcaccctacgtcgcactgaagcttttgccgacctctttgccgactatgccactttcgctttccactctttcggggatttagtcggcatttggttcaccttctcagacctggaagaagttatcaaagagcttccacaccaagagagtcgggcctctcagctgcaaactctgtctgacgcccatcgaaaggcatacgagatttaccacgaaagttacgccttccagggaggaaaactcagtgtggtcctgagagcggaggacattcccgagttgttgctggagccaccgatttcagcattggcccaggataccgtcgattttctgagccttgacctgtcttacgaatgtcagaatgaggccagcctcagacaaaaattgagtaagttgcagaccattgagcctaaggtgaaggtctttatttttaatttgaaactgcctgattgccctagcacaatgaagaatcctgcttcgctcctgttttccctctttgaggcaatcaataaggaccaggtgctcactatcggcttcgacattaatgaattcctgtcgtgctcttcatccagtaagaagtctatgtcttgtagcctgacaggctccttagcactgcaacccgaccagcagcaggaccacgagacaactgacagctcacccgcctcagcataccagagaatctgggaggcctttgccaaccagagtcgtgctgagagagacgcatttttacaggataccttccccgagggcttcctttggggggcatccactggcgcctttaacgtcgaaggaggatgggctgaaggtggtcgaggtgtgtccatctgggatcccagacggcctctgaacactacggaagggcaggccacactggaagtggctagtgactcatatcataaagtagcaagcgatgtagccctgctgtgcgggctccgggcccaggtgtacaaattcagtattagctggagtagaatctttcctatgggacacggctcttctcctagcctgccgggagttgcctactataataaactgatcgataggctgcaggacgcagggatcgagccaatggccacattatttcactgggacctgccccaggccttacaggatcacggaggttggcagaatgagagtgtggtggatgccttcttagattatgccgccttttgtttcagcacatttggagatagggtgaaactgtgggtgactttccatgagccatgggtgatgtcatacgcgggctatggaacaggccagcaccctcctggtatcagcgatccgggagtcgcatccttcaaagttgctcatctcgttctcaaggctcatgcccggacatggcatcattataatagccaccatcgcccccagcaacaaggacacgtcggaatcgtgctcaactctgattgggccgaaccactgagcccagagcgaccagaggacctgcgggccagcgagagatttctgcactttatgcttggatggttcgcccacccagtgtttgtggatggcgactacccggccaccctgcggactcagatccagcagatgaacagacagtgcagccaccccgttgcccagctgccagagttcacagaggcggagaaacaactgctgaaaggtagcgccgattttctgggactgtctcattacacctctcggttgataagcaatgctccccagaacacctgtattccttcgtatgatactatcgggggattcagccagcacgttaaccacgtgtggccacagacctcctctagctggatccgcgtagtgccttggggtataaggcgcctgctacaatttgtgtccctggagtataccaggggtaaggtccctatttatttggccggaaatgggatgccgatcggggaatcagaaaacctgtttgatgattcactgagggttgattactttaaccagtacattaacgaggtattgaaggccatcaaggaggattcggtggatgtacgctcatatattgcccggtctctgattgatggtttcgagggtccatccgggtacagtcagcggttcggcttgcatcatgtgaacttcagcgattcttccaagagtaggaccccgcgcaagagtgcctatttttttacatccattatcgaaaagaacggcttcctgacgaaaggcgcgaagcgactgctccctccgaataccgtcaacttgcctagcaaggtgcgtgcttttaccttccccagcgaggtgcccagcaaggccaaggtggtctgggaaaagttcagctcacaacctaaattcgagcgcgatctgttttaccatggcacttttcgcgatgacttcctgtggggggtttcatcttctgcctatcaaatcgagggagcgtgggacgctgacggaaagggcccgtccatatgggataacttcacccacacccccgggtcaaatgttaaggacaacgcaacgggagacatcgcctgcgactcgtaccaccagcttgacgcagatctgaatatgctccgggcattgaaagttaaggcctatagatttagtatatcttggagccggatcttccctacagggcggaattcatccattaatagccatggagtggattactacaatcgactcatcaacgggttagttgcgtccaatatcttccccatggtcactctcttccattgggatctgccccaggccctgcaggatataggcgggtgggaaaaccccgcgttgattgatctctttgattcatatgccgacttttgcttccagactttcggcgacagagtgaaattctggatgacattcaacgagccaatgtatctggcttggctgggctatgggagtggagagtttcctcccggagtgaaagaccctggttgggctccatatcggattgcgcacgccgtcattaaagcccacgcaagagtataccatacatatgacgagaagtaccgtcaggagcagaagggcgtgatcagtttaagtctgagcacacattgggccgagccaaaatcgcctggggtccctcgtgatgtggaagcagcagaccgcatgttgcagtttagtctgggctggtttgctcatccaatcttccgaaatggcgactaccccgacacgatgaaatggaaggtaggaaaccggagcgagttgcaacatcttgctactagtagactcccgagcttcacggaggaggagaaacggtttatacgtgccactgccgatgtcttttgcctcaatacgtactattctaggatcgtgcagcataaaaccccccgtctgaatccaccgtcctatgaagatgatcaggagatggccgaagaagaggacccatcctggccctcaacagcaatgaaccgggccgcaccttggggtacccgtcgactgctcaactggataaaagaagaatacggcgatattccgatttacataaccgagaatggggttggcttgaccaatcctaataccgaggacaccgatagaatcttttaccacaaaacatacattaacgaggcccttaaggcctaccgcctggacggcattgatctcagaggatacgtggcctggtcacttatggacaacttcgaatggctaaacggctacacagtgaagttcgggctgtaccacgtcgacttcaataacactaatagacccagaaccgccagggcttctgccagatattacaccgaggttattaccaacaacggtatgccgttggcccgagaagatgaattcctttacggaagatttcctgagggctttatctggagcgcagcttctgccgcttaccagatcgagggcgcatggagggccgacggaaagggtttgagtatttgggacactttctcccacacccccttgcgggtcgagaatgatgctattggggacgtggcctgcgatagttatcacaagatcgcagaagacttggttactctgcaaaatttaggtgtaagtcactaccgttttagtatcagctggagcagaatcctccccgatggcacaactcgctacatcaacgaggctggcctaaactactacgtaagactcattgacaccctgttggcagcttcaatccagccccaggtgacaatctatcactgggatttaccccagaccctgcaggacgttggcggctgggagaacgaaaccattgttcagcgatttaaggaatacgccgacgtgttgttccaacggctaggcgataaggtgaagttctggattacactaaatgagcccttcgtgatagcttatcagggttatggctatggaactgccgcacctggcgtatcaaatcggccaggtaccgccccgtacatcgtggggcataatctcatcaaggctcacgcagaggcgtggcatttgtataatgatgtgtatagggcgagccagggtggggttatatcaataactatcagctctgactgggcagagccacgcgatccgagtaatcaggaagatgttgaggccgcccgcagatacgtgcaattcatgggtggctggtttgcacaccccattttcaaaaacggggactacaatgaagttatgaaaacacgcattagagaccgcagtcttgctgcaggccttaacaaaagccgcctgccagagttcacagaatctgaaaagcgacggataaacgggacatacgacttctttggattcaatcactacaccaccgtgctggcatataacttgaattatgccacggctattagctccttcgatgcagacaggggtgtggccagcattgctgaccgatcgtggccagacagcggctctttctggctgaagatgacaccatttgggttccgccgcattctgaactggctgaaagaagagtataatgacccaccaatttacgtaacggaaaatggcgtttcgcagcgcgaggagaccgacctgaatgatacagctagaatatactatcttaggacctatatcaacgaagctctgaaggccgttcaggacaaggtcgacctgcgggggtatacagtctggtctgctatggataactttgaatgggcaaccggcttttctgagagatttggccttcactttgtaaactactctgacccctcgcttccccgcatacccaaagccagcgccaagttctacgcttctgtcgttcgctgtaatgggttccctgaccccgccacaggacctcatgcttgcttacaccagcccgacgctggtcccaccatatctcctgtgcgacaggaggaggtgcagtttctaggccttatgttaggcactaccgaggctcagacagccctctacgttcttttcagcctggtgctcctgggagtgtgcggtctggcctttttaagttataaatattgcaagaggtccaaacagggaaagacccagcgcagccagcaggaactgtctcctgtgtcctccttctag

SEQ ID NO: 192633 - DNA, 3012 bp, synthetic construct
  misc_feature 1..3012: note = Description of Artificial Sequence: Synthetic coding sequence
  source 1..3012: mol_type = other DNA
aaggtggcccacctggtgctgaaggcccacgcccggacctggcaccactataatagccaccacagacctcagcagcaggggcacgtggggattgtgctgaatagcgattgggccgaaccactgtcaccagaaaggcctgaggatctccgtgctagtgagaggttcttgcactttatgctcggatggttcgcccatcctgtattcgttgacggagattaccccgccaccctcagaacacagattcaacaaatgaaccggcagtgcagccatccagtggcccaactgccagagttcactgaagcagagaagcagctcctcaagggatcagcggactttttgggcctgtcacattacacttcgcgattaatatcaaacgccccacagaatacgtgtattccaagctatgatacgattgggggcttctcccagcacgtcaatcacgtgtggccgcagacatcaagctcttggatccgcgtggttccatggggcattcgacgccttctgcagtttgtcagtctggaatatactagggggaaggtaccaatttacttagccggcaatggtatgcccattggtgagtctgagaatcttttcgacgactcactccgtgtggactacttcaatcaatatattaatgaggtgctcaaggccatcaaggaagacagcgtagatgtgcgctcctatatagcacggagtctgatagatggattcgaagggccgtcagggtattcccagcgttttggactgcaccatgtaaattttagcgactcatcaaaatccagaactcccaggaagtctgcctatttttttacctcaattatcgaaaaaaatggtttcctgacgaaaggcgccaagagattgctgccacccaacactgttaatctgcccagcaaagttcgcgcattcacctttccgagcgaggtcccctccaaagctaaagtcgtctgggaaaaattctcgagtcaacccaagtttgagagagacctgttttatcatggcactttccgtgatgacttcctttggggcgtgtcatcgtccgcataccagatcgagggcgcctgggacgccgacggtaagggaccatctatatgggacaattttactcacactccgggctcaaatgtgaaggataatgccactggcgatattgcttgtgacagctatcaccagcttgacgccgacctcaatatgctgagggccttaaaggtgaaggcatacaggttcagtatatcgtggtcccgcatattcccaactgggagaaactcttctatcaattcccatggagtcgattattataatcgcctgattaatgggttagtggcatcaaatattttcccaatggtaaccctgttccactgggatttgcctcaggctctgcaggatatcggcggatgggagaacccagcccttattgacctattcgacagctacgcagatttctgctttcagacctttggagacagagttaaattctggatgaccttcaatgagcccatgtacttggcttggctaggatacgggagcggcgagttcccgcctggagtcaaggatccaggctgggccccttatcgcatcgcacacgcagtcattaaggcccacgctcgtgtgtaccatacgtatgacgaaaagtataggcaggagcagaaaggggtgatttcacttagcctctcaacccactgggcggaaccaaagtcacccggtgtaccacgggatgtagaagctgccgatcggatgctgcagttctccctcgggtggttcgcccaccctatcttccggaacggcgactatcctgacactatgaaatggaaggtggggaatagaagtgagttgcaacacctggccacatctaggcttccatcattcactgaggaggagaaaaggttcatccgcgccaccgcagacgtcttctgtttgaacacttattactccaggatagtgcagcacaaaacccctaggctcaatcccccgagttacgaggacgaccaggagatggcagaggaagaagatccaagctggccgtcgacagctatgaaccgcgccgccccttggggtaccagaagactgctcaattggattaaagaagaatacggcgatataccaatctatataaccgagaatggggttgggttaacgaatccaaacaccgaggatacagaccgcatattctatcacaaaacctacattaatgaagccttgaaggcctatcgccttgacgggattgacttgcgagggtacgtggcgtggtcccttatggacaatttcgagtggctgaacggttacactgtgaaatttggcctgtaccacgtcgatttcaataacacaaataggcctcgcacagctagagcctccgcaagatactacacagaggttatcaccaataacggtatgccccttgcgcgtgaggacgaattcctctacggtcgctttcctgagggattcatttggtcagccgccagtgctgcataccagatcgaaggagcctggcgggcagatggaaagggattgagcatatgggatacattttctcacactcctcttagagtggaaaacgatgccataggcgatgtagcctgcgattcataccataagatcgcagaagatcttgttactcttcaaaacctgggggtgtcccactatcgcttcagcattagctggtctagaattctccctgatggcaccacccgttatataaatgaggctgggctcaactactacgtgagattaatcgacacacttctcgccgccagtatccaaccgcaagtcaccatctaccactgggacctcccacaaaccttgcaagatgttggggggtgggaaaatgagacaattgtccagcgtttcaaggaatatgcagacgtgctgtttcaacggcttggggacaaggtcaaattctggatcaccctcaatgagccatttgtcatcgcctatcaaggatacgggtacggaacagccgcccccgtgcacggaagattggtctgtacatcatattttcaggagtggcgtctgcaatag

SEQ ID NO: 192634 - DNA, 1005 bp, synthetic construct
  misc_feature 1..1005: note = Description of Artificial Sequence: Synthetic coding sequence
  source 1..1005: mol_type = other DNA
atggccaccctgaaggagaagctgatcgcccccgtggccgaggaggaggctacggttcccaataacaaaatcacggtcgttggcgtagggcaggtcggcatggcatgcgctatctcaatcctcggaaagtctctggccgacgagctggctctggtcgacgttctcgaggacaagctcaagggcgagatgatggatctgcagcacggcagcctgtttctgcagactccaaagatagtggctgacaaggattacagtgtgactgccaatagcaaaatagtggtcgttaccgcaggggtgaggcagcaggagggtgagagccgcctcaatctcgtccaacgaaacgtcaacgtgttcaagtttattatccctcagatcgtgaaatatagcccggactgtatcatcattgtggtgtcgaatcctgttgatatcctcacctatgtaacctggaaattgagcggcttgcctaagcaccgggtgataggaagcgggtgtaacctggattccgcacggttcagatacctgatggccgagaagttagggatacacccatcttcctgtcatggatggatattgggcgaacacggcgacagtagcgtcgcagtttggagtggggtaaacgtggcaggcgtaagcctgcaggaactaaatccagagatggggactgataacgactctgagaattggaaagaggtgcataagatggtagttgagtctgcatatgaagtgatcaaactgaaaggttacacgaactgggccatcggattgagcgtcgctgatttgatcgagtcgatgctgaaaaacctttcccgaattcaccccgtgagcacgatggtgaaagggatgtacggcatcgagaacgaggtgtttctctccctgccatgtatccttaacgctcgcgggctaacctctgtgatcaaccagaagctgaaggacgacgaagtagcccagcttaagaagtcagctgacacactatgggatatccaaaaagatctgaaggacttgtag

SEQ ID NO: 192635 - DNA, 699 bp, synthetic construct
  misc_feature 1..699: note = Description of Artificial Sequence: Synthetic coding sequence
  source 1..699: mol_type = other DNA
atggccaccctgaaggagaagctgatcgcccccgtggccgaggaggaggctacggtgccaaataataagatcaccgtagtcggtgtaggacaagtcggaatggcgtgtgctataagcatccttggaaagtccctggccgatgagctagccctcgtcgatgtgctggaagacaagttaaaaggtgagatgatggatctccagcacggtagcctgtttcttcagacccccaagattgtggcagataaggattacagtgtgacagctaacagtaaaatcgtggtggtgactgccggggtgaggcagcaggagggcgaaagcagactcaacctagtccaacgcaacgtcaatgtgttcaagtttattatcccacagatcgtgaagtattctcccgactgcataataatagttgtatcaaacccagttgacattctcacatatgtgacatggaagctctccggattaccaaagcacagggtcataggctctggctgcaaccttgattcagccaggttccgttatctaatggccgaaaaactcggaatccatcctagctcctgtcatggttggatcctgggagagcatggcgattctagtgtagccgtgtggtctggggtaaacgttgccggagtgtctctgcaggagcttaatcccgagatgggtaccgacaatgactccgaaaactggaaagaggtacactag

SEQ ID NO: 192636 - DNA, 1005 bp, synthetic construct
  misc_feature 1..1005: note = Description of Artificial Sequence: Synthetic coding sequence
  source 1..1005: mol_type = other DNA
atggccaccctgaaggagaagctgatcgcccccgtggccgaggaggaggccaccgttccaaataataagatcacagtcgtgggagtgggccaggtgggcatggcctgtgcaatcagtattttagggaagtcgctggcagacgaactggctcttgtggatgtcttggaggacaagctcaagggcgaaatgatggatctgcagcatgggtctctgttcttgcaaaccccaaaaatagttgctgacaaggactattccgtcacagcgaattcgaagatcgtggtagttaccgccggtgttcgccaacaggaaggggaaagccggctgaacctggtgcagcgaaatgtgaatgtgttcaagttcattatcccacagatcgtgaagtacagcccggactgcataataatcgtagtgtccaatccagtggatatcctcacttatgtcacttggaagctaagcggtctgcccaagcacagggtgatcgggagcggatgtaacctggacagcgctcgcttccgatacctaatggctgagaaactaggaatccacccatcttcctgtcatgggtggatattaggagagcacggtgactcaagcgtagccgtgtggagcggggtaaatgtggctggggttagcctgcaggagctaaatccagaaatggggacagacaatgacagtgagaactggaaagaggtgcacaaaatggtggtcgagtctgcctacgaggtgatcaagctgaaagggtatacgaactgggcaataggtctgtccgttgcagacctgatagaatcgatgttgaagaatctgtcacgcattcaccccgtgtcaacaatggttaaaggaatgtatggaattgagaacgaggtgtttctgtctcttccctgtatcctgaacgcccgaggacttacatctgtgatcaaccaaaagcttaaggatgacgaggtagcacagttgaagaaatcagcagacacgctgtgggacatccagaaagacctgaaagatctttag

SEQ ID NO: 192637 - DNA, 414 bp, synthetic construct
  misc_feature 1..414: note = Description of Artificial Sequence: Synthetic coding sequence
  source 1..414: mol_type = other DNA
atggccaccctgaaggagaagctgatcgcccccgtggccgaggaggaagccactgtgcccaacaacaaaattacggtggtaggcgtcggacaggtgggaatggcctgtgctatcagtatccttggcaaatcactagccgatgaactcgcgcttgtcgacgtcctggaggataaattaaagggagaaatgatggatctgcagcacggtagtctgtttctgcaaactccgaagatcgtggcggataaggattatagcgtaacagctaactcgaaaatcgtggtagtcacagcaggagtgaggcagcaggagggagaatcaagactgaacctcgtgcagcgcaatgttaacgtctttaagttcatcatcccccagatcgtcaagtacagtcctgattgcatcatcatcgtggtgtag

SEQ ID NO: 192638 - DNA, 309 bp, synthetic construct
  misc_feature 1..309: note = Description of Artificial Sequence: Synthetic coding sequence
  source 1..309: mol_type = other DNA
atggccaccctgaaggagaagctgatcgcccccgtggccgaggaggaagccactgttcctaacaacaagataacagttgtaggcgtgggccaagtgggcatggcgtgcgctatctccatactgggaaaaagcctcgcggatgagcttgcactggtggatgtgctggaggacaagctcaaaggagaaatgatggacctgcaacacggctctctgttcctgcagacacctaaaatcgtggccgacaaggactactcagtcacagcaaacagtaagattgtcgttgtgacagcaggtgtccgtcagcagtag

SEQ ID NO: 192639 - DNA, 999 bp, synthetic construct
  misc_feature 1..999: note = Description of Artificial Sequence: Synthetic coding sequence
  source 1..999: mol_type = other DNA
atgagcaccgtgaaggagcagctgatcgagaagctgatcgaggacgatgagaatagccagtgcaaaatcactatagttggcacgggcgccgttggcatggcctgcgcaatctctattctgctgaaggacctggcggacgagttggccttggtagacgtggcactcgacaaactgaagggagaaatgatggacctgcaacatggatctctctttttcagcacatccaaaataacctccggtaaagactattcagtcagtgccaattcacgaattgtgatagtgaccgctggtgcaagacaacaggagggcgagacacgcctcgcactggtacagagaaacgtggcaataatgaagagcatcattccggccatcgtgcactacagtccagattgtaaaatcctcgttgttagcaatccagtggacattctgacatatatagtgtggaaaatatctggccttcccgttacaagagtcattggatccgggtgtaacttggattcagcacgcttccgatacctcatcggcgagaagctgggcgttcaccctaccagctgtcacgggtggattatcggtgaacatggagatagcagtgtgcctctgtggtcaggagtcaatgtcgccggcgtggctctgaaaaccctggaccccaaattaggaactgattctgataaagagcactggaagaatatccacaagcaagtgatacagtccgcctacgagatcattaaactcaagggttacacatcctgggctatcggattgagcgtgatggacctggtaggctctatattgaagaacctccgccgtgtgcatcccgtgagtaccatggtcaaaggtctgtacggcatcaaggaggaactgtttctgagtattccttgcgtgctcggtcggaatggtgtctccgacgtggttaaaatcaaccttaattctgaggaggaggctctgtttaagaaaagcgccgagactctgtggaacatccagaaagacttgatcttttag

SEQ ID NO: 192640 - DNA, 999 bp, synthetic construct
  misc_feature 1..999: note = Description of Artificial Sequence: Synthetic coding sequence
  source 1..999: mol_type = other DNA
atgagcaccgtgaaggagcagctgatcgagaagctgatcgaggacgacgagaattcccagtgcaaaatcaccatcgtgggtacaggagctgtggggatggcctgcgcaatatccatccttttaaaagacttggctgatgaattggccctggtggatgtagcacttgacaaacttaagggggagatgatggatttgcagcacggcagcctcttcttctcaaccagcaaaataaccagtgggaaagactacagtgtgagcgctaacagccgaattgttatcgtaaccgccggagctcgtcagcaggaaggggagacccgacttgctctagtgcagagaaatgttgccattatgaagtccatcattcccgccatcgtgcactattcccccgactgcaaaatcctggtcgtatccaacccggtggacattctgacatacatagtgtggaaaattagtggcttgcccgtgactagggttatcggttccggttgtaacctggacagtgccaggtttagatatttaatcggagagaagctcggcgtgcacccgacgtcttgccatggctggatcatcggtgagcacggggactcctctgtgccactctggagcggcgttaatgttgcaggcgtggccctgaaaacactcgatcccaagctgggcacagattccgataaagagcactggaaaaacattcacaagcaagttatccaaagcgcatatgaaatcatcaagctgaaaggctacacaagttgggcaatcggcctgtcagtcatggacctcgtcgggtctatcctgaagaacctcagacgggttcaccctgtgtctaccatggtgaagggactgtacgggattaaggaagagctattcttgtccataccgtgcgtcctgggaagaaatggggtgagcgacgtggtcaaaatcaacctcaattctgaggaggaggccctattcaaaaagtcagctgaaactctgtggaatattcagaaggacctaatattttag

SEQ ID NO: 192641 - DNA, 1524 bp, synthetic construct
  misc_feature 1..1524: note = Description of Artificial Sequence: Synthetic coding sequence
  source 1..1524: mol_type = other DNA
atggcccggctgctgcggagcgccacctgggagctgttcccctggagagggtactgctcccagaaagccaagggagagttatgccgagatttcgtggaagcgctcaaggctgttgtgggtggttctcacgtaagcactgcagccgtcgttcgcgagcaacacgggcgggacgagagcgtccacagatgcgagccccctgacgcagtcgtatggcctcaaaacgtcgaacaggtgagtaggcttgccgctctttgctataggcaaggagtgcccattataccattcgggacgggcacaggcctggagggcggggtatgtgcagtacaaggcggcgtctgtgttaacctcactcatatggataggatcttggagctgaaccaggaagacttttctgttgtggtggagccgggcgtgactagaaaagcactgaatgctcacctgagagactcaggactgtggtttcccgtggaccccggagcggatgcatcgctgtgtggaatggcagcgaccggcgccagcggcaccaatgccgtgcggtacggcaccatgcgcgataacgtcctgaatttggaagtggtgctgcctgatgggcggctgctccatactgccggtagaggtaggcattttagatttgggttctggcctgagataccccatcacacagcctggtattccccctgtgtgtctctgggccgtcgtaaatccgcagcaggatacaaccttacaggcttatttgttggttctgagggcacactgggtctgatcactgcaacaaccctgaggctccacccagcacctgaagcgacagtggcggcgacttgcgcgtttccatccgtgcaggccgccgtggacagcactgtgcatatcttgcaggcagccgtccccgtggcgcggatcgaatttctggatgaggtcatgatggacgcctgtaacagatactcgaagctcaactgtctggtcgcccccactctcttcttagaatttcatggcagccagcaagcgctcgaggaacagctccagaggaccgaagaaattgtgcagcagaatggggcctcggatttttcatgggctaaggaggcggaggaacgaagcaggctgtggacagcgagacacaatgcttggtacgctgcactggcaactcgccctggctgtaagggttactcgaccgacgtatgcgtgcctatcagcaggctgccagagatcgtagtgcagaccaaagaggacctaaacgcatcaggtttaacagggtccatcgtcggacacgttggcgacggaaatttccactgtattctgttggtaaatcctgacgacgccgaggagttgggtagggtgaaggcattcgccgagcagctgggccgcagggccctggcgctgcacggcacttgcactggcgagcatgggattggaatgggcaaacggcaactattgcaggaagaagtaggagctgtcggggtggagacaatgagacagctcaaagcagttttagatccgcagggtcttatgaaccctggaaaggtgctctag

SEQ ID NO: 192642 - DNA, 1455 bp, synthetic construct
  misc_feature 1..1455: note = Description of Artificial Sequence: Synthetic coding sequence
  source 1..1455: mol_type = other DNA
atggcccggctgctgcggagcgccacctgggagctgttcccctggcggggctattgtagtcagaaggcaaaaggggaactttgtcgggactttgtcgaggccctcaaagctgtggtgggcggcagtcacgtctcaacggcggcagttgttagagagcagcatggacgcgacgagagcgtccataggtgtgagccgcctgacgctgtcgtgtggcctcagaacgtagagcaggtgagcaggctggccgcactgtgttacagacaaggagttccgattatccctttcggcactgggaccgggctcgaggggggggtatgtgcagtgcagggcggggtgtgcgtgaacctgacgcatatggaccggatccttgagttaaaccaggaagatttcagcgttgttgtagaacctggcgtaacacggaaagcgttgaatgcccacctgcgggacagcggtctgtggttccccgtcgatcccggtgcagacgccagcttgtgcggtatggccgcaacaggagccagcgggacaaatgccgtacgttatggaaccatgagggacaacgtcctaaacctggaggtcgtcctccccgacggcaggctgctccacaccgccgggcggggacgacatttcagaaagtcagcagctggctataacttgacagggctattcgtggggtctgaaggaacactgggattgatcaccgctacaacattacgcctgcaccccgcgcccgaggccacagtggccgctacatgcgctttccccagcgtgcaagccgctgtggacagcaccgtccatatcctgcaagccgctgtccccgtcgcccggatcgaattcttggatgaggttatgatggacgcatgcaacaggtactccaaactgaactgtctggtcgcccctaccctgtttctcgaattccatgggtcacagcaggccctggaggagcagctccagagaaccgaggaaattgtgcaacagaatggggcttccgatttcagttgggcaaaagaggccgaggaacgaagccggctgtggacggcccggcacaatgcttggtacgccgcgctggcaacccgccccggttgcaaaggctacagcactgacgtgtgcgtgccaatctcccgtctcccagagatcgtagtacaaacaaaagaggatctgaatgcatcaggactgacaggaagtatagtcggacacgttggagatggaaacttccattgcattctgctggtcaaccctgatgacgccgaggaattggggcgggtgaaagcatttgccgagcaattaggaagacgcgccttagctcttcatggaacttgcactggcgaacacggcatcggcatgggcaagaggcagctgcttcaggaggaggtgggtgctgtgggcgtggaaaccatgcgtcagttgaaagccgtattggatcctcaaggcctgatgaatccaggcaaggtgctgtag

SEQ ID NO: 192643 - DNA, 2139 bp, synthetic construct
  misc_feature 1..2139: note = Description of Artificial Sequence: Synthetic coding sequence
  source 1..2139: mol_type = other DNA
atgcgggtgctgctgcacctgcccgccctgctggccagcctgatccttctccaagccgccgcatctacgacaagagcccagacgacacgcacctccgccatatccgacactgtgtcgcaggcaaaagtgcaagtgaacaaggcctttctggattccaggactcggctgaagacagctatgtccagcgaaacgcccacgtcgcggcagttgagcgaatacctcaagcatgcaaagggacgcacacgtacagctattagaaacggacaggtgtgggaggagtcactaaagaggcttagacagaaggcttccctgactaatgtgactgatcccagtctcgacttgacctcgctttcactggaggtgggatgcggtgcgccagctcctgtagtccgctgcgacccctgctctccttacaggactatcacaggagattgcaacaaccgccgcaaaccagctcttggcgccgcgaaccgggcgcttgcccggtggctgcccgccgagtatgaggacggcttgtccctccctttcgggtggaccccaggcaagacacggaatggatttccactgcccctggccagagaggtgagcaataagatcgtgggctacctgaacgaagaaggagttcttgatcaaaatagatcactcctgtttatgcaatggggtcaaatagtggatcacgatcttgattttgcacccgacaccgagctcggaagctctgaatacagcaaagcccagtgcgatgagtactgcattcagggcgacaattgctttcctatcatgtttccgcccaacgacccaaaggcgggaacccaggggaaatgcatgccattcttccgtgctgggtttgtgtgtccgactccgccatacaagagtctggcaagagagcagatcaacgccctgacctccttccttgacgcgtcatttgtatactcgtcagaaccaagcctggcaagccggctcaggaatctatcatcacctcttggcctgatggccgtaaatcaggaagtctctgatcacggcctcccttacctcccttacgacagcaagaagccttcaccctgtgaattcataaacacaacagccagggtgccatgctttttggcaggggatagtcgcgcctccgagcacatcctacttgcaacttcccataccctgtttctccgggaacataatagactggcacgggagctcaagcggctgaatccacaatgggacggcgagaaactgtatcaggaagcacgaaaaatactcggagcatttgtacaaatcataacttttcgggactatctgccgatcctgcttggggatcatatgcaaaaatggatcccaccataccaggggtattccgaaagcgtagatcctaggatctcaaacgtgttcacatttgcattccggttcggtcatctggaggtgccaagtagcatgttcaggctggacgagaattaccagccctggggtcccgagcctgaattacctttacataccctttttttcaacacttggagaatggtcaaggacgggggtatcgatcccctcgtccgtggacttctggccaagaagtccaagctcatgaaacaaaataagatgatgaccggagagcttaggaataaactctttcagcctacgcatcgcatccacggctttgatctggccgctataaatactcagcgttgccgggatcacggacagcccggttataactcctggcgggccttttgtgatttgtcccagccccaaaccctggaagaactcaacactgtgctgaagtccaagatgttggccaagaagttactgggcctgtatggcactcccgacaacatcgatatatggattggggctattgcagagcctttagtggagcgaggtcgtgtgggtcccctcctggcctgtttattaggtaaacagttccagcaaattagggacggcgatcgcttctggtgggaaaatcccggagtgttcacaaatgagcagaaggattccctgcaaaagatgtcattctcacggctcgtttgtgataacacacggataaccaaagtccctagggaccccttctgggcaaactcctacccctacgactttgtggattgcagcgcaatagacaaactggatctgagcccttgggcctcagtcaagaactag

SEQ ID NO: 192644 - DNA, 1374 bp, synthetic construct
  misc_feature 1..1374: note = Description of Artificial Sequence: Synthetic coding sequence
  source 1..1374: mol_type = other DNA
tgcttccccgtgcagttcccccccaacgaccccaaggccggcacccaggggaaatgtatgcccttcttccgcgcagggttcgtctgtcccaccccaccatataaaagtctcgctagagagcagattaatgctttgacctcttttcttgatgctagcttcgtgtacagtagcgagcccagtttagcttcccgcctgcgaaatctgtcttcccccctcggtctgatggcagtgaatcaagaggtgtcagatcatggactcccatatctgccctacgatagtaaaaaaccaagtccttgtgagttcatcaacactaccgcgcgagtcccttgcttccttgcgggtgacagccgggcgtctgagcatatcctccttgccacatcccacacgctgttcctcagggaacacaaccgcttggctcgggaactgaagcggctgaatccccagtgggacggagaaaagctgtaccaggaggcccggaaaatccttggtgcgtttgtgcagattatcaccttcagagattacctgccaatactactaggggatcatatgcagaaatggatccctccataccagggctacagcgagtctgtggaccccaggattagcaacgtgtttacttttgccttccggtttggtcatctggaggtgccatcttcaatgttccgtcttgacgaaaattaccagccatgggggccagagccagagcttccgctgcacaccctctttttcaatacctggcgcatggtgaaggacggcggcatagacccgctcgtgagggggcttcttgctaaaaagtccaaactcatgaagcagaataagatgatgacaggcgagttacggaacaagttattccaaccgacgcatcggatacatggtttcgacctggcagctattaacacccagcgctgtcgagaccatggacaacctggctataacagctggagagccttctgcgatctcagccagcctcaaacgctggaagagttgaacaccgtcttgaaatccaaaatgctggccaaaaagctcctaggactctacggaacacccgacaatatcgacatttggattggagccattgctgaacctctcgtcgaaagaggacgggtggggccattactcgcctgcctcctcggcaaacagttccaacagatcagggacggcgaccgattctggtgggagaaccccggggtgttcaccaatgaacagaaagattcgctacagaaaatgagctttagccgcctcgtttgcgacaatactcggatcacgaaagttccaagagatcccttctgggccaactcctacccttacgacttcgtcgattgctctgcgatcgacaaactggacttaagcccctgggcatccgtgaagaactag

SEQ ID NO: 192645 - DNA, 1890 bp, synthetic construct
  misc_feature 1..1890: note = Description of Artificial Sequence: Synthetic coding sequence
  source 1..1890: mol_type = other DNA
atgcgggtgctgctgcacctgcccgccctgctggccagcctgatcctgctacaggcagccgctagtaccacccgtgacccttcactagacctaactagcctaagtctggaagttggttgtggcgcccctgcgcctgtcgtgagatgcgatccatgctcaccttaccggacaatcacaggggactgcaataatcgccggaagccggctctgggtgcagccaatcgcgcactggcgcggtggttgcctgcagaatacgaggatggtctgtctcttccctttggctggacacctgggaaaacccgaaatggcttccccttgcccctggctagagaggtgagcaacaagattgtcggctatctgaatgaagagggcgtacttgatcaaaataggtccctcctattcatgcaatggggacagatcgttgaccacgacctggattttgctcccgacacagagctagggagctccgagtactcaaaagcccaatgtgacgagtattgcatccagggagacaactgctttcctataatgttcccccctaatgatcctaaagcgggcacacagggaaaatgtatgccatttttcagggctggcttcgtttgcccaactccgccttacaagtccctagcaagggagcagattaatgccctcaccagttttctagatgccagttttgtgtactcaagtgagccgtctcttgcttcacgtctacgtaacctgagtagcccgctggggctcatggctgtgaaccaggaagtctcggatcacggtttgccatatctgccctacgattcaaagaaaccctctccatgtgaatttatcaacacaactgcacgcgtgccgtgttttctagcaggagattcaagagcatccgagcatatcctattagccacatcacacactctgtttttgagagagcataaccgactggctagagagctgaagagactaaacccccaatgggacggagagaagctgtaccaggaggcgcgcaagatacttggcgcctttgtccagattatcacattccgagactatttaccaattctcctgggcgatcacatgcagaaatggattccgccatatcagggctattccgagtctgtggatccccgtatcagtaacgtgttcaccttcgcttttcgtttcggtcatttggaagtgccatcctctatgttccgcttagacgaaaactaccagccctggggtcccgaacccgagttaccgctgcacaccctcttctttaacacctggcgtatggtgaaggatggtggcattgaccctctcgtccgcgggctgctcgctaagaagtccaaattgatgaaacagaataagatgatgactggcgaactcaggaataagctcttccaaccgactcatcggatacacggttttgacctggccgcgatcaacacccaaagatgcagggaccacgggcagccaggatacaactcctggagagccttttgtgaccttagtcagcctcagacattggaggagctgaataccgtcctcaaatctaaaatgctggccaagaaactgctggggctatatggcacccccgataacatcgacatctggataggcgcaatagctgagcccctcgtggaacgaggacgtgtgggccccctgctcgcctgtctcttgggtaagcaatttcagcagatccgggacggggatcggttttggtgggagaatcctggtgtgtttacgaacgagcagaaggattccctgcaaaagatgtcgttttctaggttggtttgcgacaatactcgcatcactaaagtccctagagatcccttttgggctaacagctatccctatgatttcgtggattgcagtgcgatcgataagctggacctgagcccttgggctagtgtcaagaattag

SEQ ID NO: 192646 - DNA, 1962 bp, synthetic construct
  misc_feature 1..1962: note = Description of Artificial Sequence: Synthetic coding sequence
  source 1..1962: mol_type = other DNA
atgagcagcgagacccccaccagccggcagctgagcgagtacctgaagcatgcaaagggccgcacacggaccgcaatccgtaatgggcaagtatgggaggagtctctgaagcggctccggcagaaagcctcactcacgaatgtcaccgatcccagtcttgatctgacatctctttcactggaagttgggtgtggcgctcctgcgcccgtagtgcgctgtgacccatgttccccttacagaacaatcaccggagattgcaataacagacgcaaaccagccctgggcgctgcgaaccgggctctagcccgctggttgccagccgaatacgaagatggacttagtctgcccttcgggtggaccccggggaagactcggaatggatttcccctgccactggccagagaagtcagcaataagatcgttgggtacctgaatgaggagggggtgctcgaccagaatcgctcactgcttttcatgcagtggggacagatcgtagatcatgacttagatttcgctccagacacagaactggggtcttcagagtacagcaaagcacaatgtgacgagtattgtattcagggggacaactgtttccccatcatgtttcctcccaacgatcccaaggccgggacacagggcaaatgcatgcccttctttcgggccgggttcgtgtgtccgacccccccttataagagtctcgcccgcgaacagatcaacgccctgacctcgttcctggatgctagctttgtctactcatcagagccatcacttgcatcacgcctgaggaatctctcatcccccctgggattaatggctgtcaaccaagaggtatccgaccatggactgccctacttaccatacgactctaagaaaccatccccttgtgaattcattaataccaccgctcgcgtgccttgtttcctggccggagacagccgggcaagtgagcatattctgttggctacctctcataccctgttcctgagagaacataatcgcctagcaagagagctcaagaggctcaacccacaatgggacggggagaagctatatcaggaagctcgcaagatcttgggagcctttgtgcaaattattacatttcgagattacttgccgatccttctcggagaccatatgcagaagtggatcccaccttatcagggctattccgaaagtgtagaccctagaattagcaacgtgtttacctttgccttcagatttgggcatctagaggtcccatcttctatgttccggctggatgagaattatcagccctggggccctgagccagaactgcctctgcacacactatttttcaatacttggcggatggtgaaagacgggggtatcgatccccttgtgaggggcctgttagccaagaagtctaaattaatgaagcagaataagatgatgacaggagagctaaggaataagctgttccagccaacacacagaatccacggatttgacctcgccgcaatcaacacacagcgatgtcgagaccacgggcagcccggatacaactcatggcgcgccttttgcgatctgagccagccccagacattggaagaattaaacacagtgctaaaaagcaaaatgctggccaagaagctgcttggtctatatgggacacctgataacatcgacatatggatcggagctattgctgaaccactagtggagagaggccgagtggggccacttctggcttgcctattgggaaagcaattccagcagattagggatggcgataggttttggtgggagaacccaggtgtgtttacaaatgagcagaaggatagtcttcagaagatgtcattttctcgattggtctgtgataacacacggatcaccaaggtccctagagaccccttttgggccaattcatacccatacgattttgtcgactgttccgcaatcgataagctggaccttagcccttgggcttctgtcaagaactag

SEQ ID NO: 192647 - DNA, 1323 bp, synthetic construct
  misc_feature 1..1323: note = Description of Artificial Sequence: Synthetic coding sequence
  source 1..1323: mol_type = other DNA
atgggcgacctggagctgctgctgcccggcgaggccgaggtgctggtgcgggggcttagaagcttcccattaagggagatgggatctgaaggctggaatcaacagcacgagaatctcgagaaactcaacatgcaggcaatcctagacgccacagtctctcagggggagcccatacaggagcttctggttacacatggcaaggtgccgaccctggtggaggagttaatcgcagtggaaatgtggaaacagaaggtctttccagtcttctgtagggtggaggatttcaagcctcaaaatacatttcccatctatatggtcgtacatcacgaagcgagcatcatcaacctgctggagaccgtgttcttccataaagaagtgtgcgaatctgcggaagataccgtactggacctcgttgattactgtcacagaaaattaactttgctagtcgcgcaaagcggttgcggggggcccccagagggcgagggcagtcaggactctaatccaatgcaggagctgcagaagcaggctgagctgatggagtttgaaatagcgctgaaggcactgagcgtactgcggtacatcactgattgcgtcgacagcctgagtttatcgactctttctcggatgctttcgacccacaatctgccttgtctgttggtggagctacttgagcactcaccttggtcaagacgggaaggcgggaagctgcaacagttcgaagggtctcggtggcacaccgtggctcctagcgagcagcagaaactctcgaagctcgatggtcaggtctggatcgccttatacaatttactgctgagtcccgaggcacaagcacggtactgcctgacctcatttgctaagggccggttgctaaagttaagagcatttctcacggacaccctcttagatcagcttcccaatttggctcacctgcaatccttcttggcgcacctgacccttaccgagacccagcccccaaaaaaggatcttgtcttggagcagattccagaaatctgggaaagacttgaacgcgagaatagaggcaaatggcaagcaatagctaagcaccagttacagcacgtcttcagcccttccgagcaggatctccggttacaggctcgcagatgggctgaaacctatcgtctcgacgttctcgaggcggtggcaccggagcggcctaggtgcgcttactgctccgcagaagccagcaaacgatgttccaggtgccagaatgagtggtactgttgcagagaatgtcaagtgaagcattgggaaaaacatggcaaaacctgcgtgctggccgctcaaggtgacagggcaaaatag

SEQ ID NO: 192648 - DNA, 2001 bp, synthetic construct
  misc_feature 1..2001: note = Description of Artificial Sequence: Synthetic coding sequence
  source 1..2001: mol_type = other DNA
atgcggaaggtgcggggcccccccgtgagctgcatcaagcgggactcacccatccagtgcattcaggccatcgccgagaaccgcgcagacgctgtaactcttgacggcgggttcatctacgaagctggattggccccctacaagcttcggcccgtcgccgccgaagtgtatggaacagaaagacagccaagaacacactattacgccgtagccgtcgtgaagaagggcggaagctttcaactgaatgagctccagggcttgaaatcatgccacactggccttcggcgcacagctggttggaacgtgccaattggaactctacggcccttcctaaattggacaggccctccggagcccatcgaggcagccgtagcaaggttcttttcagcatcatgtgttcctggggccgataaagggcagtttcctaacctctgtagactttgtgctgggacaggagaaaataagtgtgcatttagctcccaggaaccttactttagttactctggtgcctttaaatgcctcagagatggggccggcgatgtggcctttatacgggagtccaccgtttttgaggatctctccgatgaggccgagcgtgatgagtatgaattgctctgtcccgataatacaagaaaacctgtggacaagtttaaagactgccatttagccagggttccctcacacgccgttgtcgcgagaagcgtaaacgggaaagaggacgcgatttggaatctgctgcgacaggcccaggaaaaattcggtaaggacaagtcacccaagtttcaactgttcggctctccctcaggccagaaggacttgcttttcaaggactccgccatcgggttttctcgggttccacccaggatcgacagcggcctgtatctcgggagcggctattttacagctattcaaaacctgaggaagagcgaggaggaagtcgccgcccgaagagcacgtgttgtttggtgtgccgtcggcgaacaggagctccgaaagtgcaaccagtggagtggactgtccgaaggcagcgtgacttgcagctcagcctctaccacggaagattgtatcgctttagttctcaaaggggaggcagatgccatgagcctggacggtggttatgtgtacactgcaggcaagtgcggactggtgccagtactcgctgaaaactacaaatcccaacaatcttcggatcctgaccccaattgcgtggacagaccagttgaaggatacctcgctgtggccgttgtgaggcggtccgatacaagtttgacctggaactctgtcaaaggcaagaagtcatgtcacactgctgtggatcgtaccgccgggtggaatattcccatgggcttgctattcaaccagacaggttcctgtaagtttgacgagtacttttctcagtcatgtgctcccggcagcgaccccaggtcaaacctgtgcgccctttgtatcggggacgaacaaggggaaaataaatgtgtgccaaactccaacgaaagatattatggatacactggcgcattccgttgcttggctgaaaacgctggagatgtggcatttgtgaaagatgttacagtccttcagaacaccgatggcaacaataatgaagcttgggcaaaggatttaaagctggccgacttcgccttgctgtgcctagacgggaagcgcaagccggttactgaagcacgatcctgtcatcttgcaatggcgcctaaccacgccgtagtgtcacggatggataaggtcgagagattaaagcaggtgttactgcaccaacaggctaagtttgggaggaacggctctgactgtcctgacaaattttgcttatttcagagtgaaacaaagaacttgctgtttaacgataataccgaatgcctggcccggctacatggcaaaaccacttacgaaaagtatctgggtccgcaatatgtcgccggaattacgaatctgaagaagtgctccacatctcccttgctcgaggcctgcgaatttctacgtaagtag

SEQ ID NO: 192649 - DNA, 453 bp, synthetic construct
  misc_feature 1..453: note = Description of Artificial Sequence: Synthetic coding sequence
  source 1..453: mol_type = other DNA
atgaagctggtgttcctggtgctgctgttcctgggcgccctgggcctgtgtttggccggccggcggcggtctgtccagtggtgcgcagtctcacagcccgaggcaacaaaatgcttccagtggcaacgtaatatgcgcaaagtgagagggcctccagtgtcatgcatcaaacgcgactccccaatccaatgcatccaagcaatcgccgaaaatcgcgcagacgccgtgactctggacggcggattcatctatgaggcgggactggctccttacaagcttcgaccggttgccgcagaggtgtatggaactgagagacagcccgctgtgtttcccgtgcaaataaaagactcatcacctacctgcgtggcatgcgttcggggtcaggggaagacaaatgttccgtctccaccccggaatcgtacttccgcaactctggttccatctagcgtgtag

SEQ ID NO: 192650 - DNA, 846 bp, synthetic construct
  misc_feature 1..846: note = Description of Artificial Sequence: Synthetic coding sequence
  source 1..846: mol_type = other DNA
atgaccagcaaggaggacggcaaggccgcccccggcgaggagcggcggcgatccccgctagaccatctgcccccacctgctaacagtaataagcccttaacccctttctctattgaggacattctaaacaaaccaagcgtgagacggagttacagcctgtgcggtgctgcccacctgctcgccgccgcggacaagcatgcccaaggaggactgcctctggccggccgggccttgctgagccagaccagcccactctgtgctctagaagagttggcctccaagacctttaagggactggaagtatccgtgctgcaggcagccgagggaagagatggaatgacaatatttggtcagcgccagacacctaagaaacggagaaagtcccggacagcattcacgaaccaccaaatttacgagctcgaaaagcgtttcctttaccagaaatatctctcaccggccgatcgcgatcaaattgcccagcagctgggtctcacaaatgctcaggtgatcacgtggtttcagaaccgccgcgccaagctgaaacgggatctagaggagatgaaggccgatgtggaaagcgccaaaaagctcggcccgagcggccagatggacatcgtggcgttggctgagctagaacaaaacagcgaagccacggcaggaggagggggcggttgtggccgcgctaaaagtcgccctgggtcccctgttctccctccaggcgccccaaaggcgcccggagcaggcgccctgcagctgagcccagccagcccactgacggaccagcccgcctcttctcaggattgctctgaagatgaagaagatgaggaaattgatgtagacgattag

SEQ ID NO: 192651 - DNA, 597 bp, synthetic construct
  misc_feature 1..597: note = Description of Artificial Sequence: Synthetic coding sequence
  source 1..597: mol_type = other DNA
atgaacagcggccgggagccccggaccccccggaccctgctgagcattgcggatatcctggctccacggatggtgcctcgagcaccctctgcacctcagcttccagagtccgggcccgggccaacttcccctctatgtgcgctggaggagctgacttctaagactttccgggggttagatgctcgagccctacagccgtcagagggcagggctgggcccgacgccctgggaccaggtccatttggccggaagagacgaaagtcgcgaacggcctttaccgcccaacaggtgttggagctcgaaagacgctttgtgtttcaaaaatatctggcacctagcgaacgggacggcctggctacacgtcttgggctggccaacgctcaagtagttacctggtttcagaataggagagccaagctcaaaagagatgtggaggaaatgcgcgctgacgtggcctccctgagagctctgagtcccgaggttttgtgttcgctggctcttccagagggtgctcctgacccaggcctgtgcttaggccctgccggaccagattcgcgcccacacctgagtgacgaagagatccaggtggacgattag

SEQ ID NO: 192652 - DNA, 585 bp, synthetic construct
  misc_feature 1..585: note = Description of Artificial Sequence: Synthetic coding sequence
  source 1..585: mol_type = other DNA
atgggcaagcggaccagcctggaggtgagcctgggcgagctgggcggcgagaagtgccgcggtggacggagatcgtttccccccctcgccgcttcacgcccagctcgacctggcgggtggcgctgggcccgtagggatctgtgcaaaactgcaagccgggcggaaaacaatagccaggcctgtcggccacaacgccgcgctggacccgatgctctggggccggggccattcggaaggaagaggaggaaatcgcgaacagcattcacagctcagcaagtactggaattggaacggcggttcgtattccaaaagtacctggccccctctgaacgcgacggacttgctactagactcggactcgccaatgcacaggtggtaacatggttccaaaacagaagggcgaagctgaagcgagacgtggaagagatgagggcggatgtcgcctcacttcgtgcgctgtcccctgaagtgctgtgctccctggccttacccgagggagctcccgatcccggtctctgcctaggccccgccgggcctgacagtagacctcacctttcagacgaggagatacaggtggacgactag

SEQ ID NO: 192653 - DNA, 1398 bp, synthetic construct
  misc_feature 1..1398: note = Description of Artificial Sequence: Synthetic coding sequence
  source 1..1398: mol_type = other DNA
atggagacccccagccagcggcgggccacccggagcggcgcccaggccagctctacgcccctatcccctaccaggatcacccgcctacaagagaaggaggacttgcaggaactgaacgaccggctggcagtgtacatcgacagggttaggagcctggaaaccgaaaatgccggactgcgtctgcggatcaccgaaagtgaggaagtagtctctcgcgaggtgtccggaattaaagcagcctatgaggctgaactgggagatgcccgaaagaccctggattcagtcgcaaaggagagggcaagactccaactggaattgtccaaggtgagagaggagtttaaggaacttaaagcacgcaatacaaaaaaagaaggggacctcatcgctgcccaggcccggcttaaagatctggaggctctgctcaattcaaaagaagccgccttaagtactgctttgtccgaaaagagaactctagagggcgagctgcacgacctcagaggacaggtggccaagctcgaggccgcattaggggaggccaagaagcagctgcaggacgaaatgctgaggagggttgacgctgaaaaccgactgcagacgatgaaggaggaactggacttccagaagaacatctattccgaggaactaagagagacgaaaaggcgacacgaaactcggcttgtggagattgacaacgggaagcaacgggagttcgaaagccgactggccgacgctctacaagagctccgcgctcagcacgaggaccaagtggagcagtataagaaagaactcgagaaaacttacagtgcaaagttagacaacgcgcggcaatccgcggagcggaatagcaatcttgtgggtgctgctcatgaggagcttcagcagtcgcgtatccgtatcgattcattgtcagcgcagttatcccagctccagaagcaactcgccgccaaggaggcgaaactgcgcgatttggaagacagcttggcgagggaaagggatacgagccggagattactggccgagaaggagagagagatggctgagatgcgggcccggatgcagcagcagctcgatgaatatcaggaacttcttgacatcaagctcgcactggatatggagatccacgcttaccggaagctcctcgagggcgaagaggagagactgaggctttcgccgagccctaccagccagcggagtcgcggcagggcatcaagccatagctcccagactcaaggtggcgggtccgtgacgaagaagagaaagttggaaagtactgaaagtagatccagcttcagccagcatgcccggacttctggccgcgtcgctgttgaggaagttgatgaagatgaagacggggatgatcttctgcatcaccatcatgtgtccggcagtcgcaggtag

SEQ ID NO: 192654 - DNA, 1905 bp, synthetic construct
  misc_feature 1..1905: note = Description of Artificial Sequence: Synthetic coding sequence
  source 1..1905: mol_type = other DNA
atggagacccccagccagcggcgggccacccggagcggcgcccaggcgtccagtacacccctgagtccaactagaatcacccggctccaggaaaaggaggacctgcaagagctcaacgacagactggcagtttacatagatcgggtgcgcagtctcgagactgagaacgccgggttgcggctgagaataactgagagtgaggaagtagtgtcaagagaggtgtccgggatcaaggctgcctacgaagccgagcttggagatgcgcgtaaaaccctggattccgtcgccaaagaacgagccagactgcagttggaattgagcaaagtgagagaagagttcaaggaactaaaggcccggaacacaaaaaaggaaggggatttaatcgctgcccaggcgcggctcaaagacctggaagccttactcaactccaaggaggctgccctgtctaccgccttgtctgagaagcgcaccttggaaggggagctgcacgaccttcgaggccaggtagctaagttagaagccgctctgggcgaggccaaaaagcagctgcaggacgagatgctcagacgcgtcgacgcggagaatcgcttgcagaccatgaaggaggagttggactttcagaaaaacatctatagcgaggaactgagagagactaaacggcggcacgagactcggttggtcgagatcgacaacggcaaacaaagagagtttgaatccaggctggccgacgctttacaggaactcagagcccagcacgaggaccaggttgaacagtacaagaaggaactggaaaagacctattccgcaaagctggataacgcaaggcagtccgccgaaagaaacagtaacctcgtgggcgcggcccacgaagaactccaacagtctaggatacggatagattcgttgtcggcccagttgagccagctgcagaagcaactcgccgccaaggaagccaaactccgcgacctcgaggattccctcgccagagaaagggatacctctcgtagactcctcgctgagaaggagcgggagatggctgaaatgcgggcccggatgcaacagcagcttgacgagtatcaggaactgctggatatcaagctcgcccttgatatggagattcatgcgtacaggaagctgctggaaggtgaagaagagcgcctgcgtctgtcaccctctcccacttcccagagatcacggggccgagcttcctcccactcatctcagacccaaggcgggggttctgtcaccaagaagcggaagttagaatccaccgagtccagaagtagcttttcacagcatgcacggacctctggacgcgtcgcagtggaggaagtcgatgaagagggcaagtttgttagactgaggaataaatcaaatgaagatcagagtatgggcaattggcagataaagagacagaacggtgacgatcccctgcttacctatcggttcccccccaagtttactctgaaggctggccaggtcgtcactatatgggctgccggggccggcgcaacccattcgcccccgacggacttggtgtggaaagcgcagaatacctgggggtgtggaaacagcctgcggaccgcgctgatcaactcgacaggagaaggctcacactgctcctcctcgggtgaccccgcggaatacaacctgcgatcaagaacagtactatgcggtacctgcgggcaacctgcagataaagcctccgcttccgggtctggtgcccaggtgggtgggccaatctcctctggaagtagcgcctcaagcgtaaccgtgaccagaagttacagaagcgttggcggcagcgggggtgggtccttcggcgataacctcgtcacaagatcctacctcctcgggaattcttccccccgcacccagagcccacagaactgttcaataatgtag

SEQ ID NO: 192655 - DNA, 1719 bp, synthetic construct
  misc_feature 1..1719: note = Description of Artificial Sequence: Synthetic coding sequence
  source 1..1719: mol_type = other DNA
atggagacccccagccagcggcgggccacccggagcggcgcccaggccagttctacgcccctctccccgacacggataacgagactgcaggagaaagaagacctgcaggaattaaatgaccgcctggccgtgtatatcgaccgcgtgcgctccttagaaacggagaacgctgggcttaggctacgcattacagaaagcgaagaagtggtgtcgagggaagtttcggggataaaggcggcatatgaggccgaactcggagatgcccggaagacacttgacagtgtcgctaaagaacgggcgcgcctccaactcgagcttagtaaagtgagagaagagttcaaggagctgaaagcccggaataccaagaaggagggggaccttattgccgcccaggcccggctcaaggacttggaggcacttctcaacagcaaggaggctgctctgtcaaccgcgttgtccgagaagaggactttggaaggcgagctgcacgatctgagaggccaagtggccaaattagaagcagccctgggggaagccaaaaagcagttgcaggatgagatgttacggcgtgtggatgccgagaaccgcttacagacaatgaaggaagaattggacttccagaagaacatatactcagaagaacttcgcgagacaaagcgcaggcacgagacgcggttagtagaaattgacaacggaaagcaaagagaattcgaaagtagactggccgacgctttgcaggagctccgggcgcaacacgaagatcaggtcgaacaatacaaaaaggagctggagaagacttatagcgccaagctggataacgctcgccagagtgccgagcgaaactctaatctagtaggagcggcccatgaagaactgcaacaatcacggatacgtattgattctctctccgcccagctgtctcagcttcagaaacagcttgccgcaaaggaagcaaaactgcgcgatcttgaagactcactggcacgggaacgagatactagtcgccgcctgcttgctgagaaagaaagggagatggcagagatgcgagctcggatgcagcagcagcttgacgaataccaggagttgctcgatataaaactggcgcttgacatggaaatacatgcctatcggaagctgctggagggagaagaggagcgtctgagactgtctccatctccaacctctcagcgatcccgaggccgggcctcaagccacagctcccagacccagggcggaggttccgtgaccaagaagaggaagctcgaatcaactgaatctaggagttctttcagtcagcatgcacggacatcaggtcgggtagcagtcgaagaagtcgacgaggaggggaagtttgtacgcttgcgaaacaagtctaatgaagaccagtcgatgggcaattggcagattaaacggcagaatggagacgatcccctgctgacgtaccgcttcccacccaaatttaccctgaaggcaggccaagtggtgaccatctgggccgctggagctggagccacccacagcccgccgactgatctggtctggaaggcacagaatacgtggggatgtggcaatagtctgagaaccgctctaattaactctaccggggaagaggtggctatgcgcaaacttgtgcggtccgtgacagttgttgaagacgacgaagacgaggacggtgatgaccttttacaccaccaccacgtgagcggatcgcgacgatag

SEQ ID NO: 192656 - DNA, 1476 bp, synthetic construct
  misc_feature 1..1476: note = Description of Artificial Sequence: Synthetic coding sequence
  source 1..1476: mol_type = other DNA
atgcagcccctgctgtgcctgggcaacctggaggacgcccgggagcggacagggacattgctggcacagcatcccgcatggggccggactcgtgctaaacctggatcacctctcaatacaaagaaggagggcgatctgatagctgcacaggcccgcctcaaggatctggaagctttgttgaatagtaaagaggccgccctgtccaccgctcttagcgaaaagcggacactagagggcgagctgcatgacctgcgcggacaggtggcaaagctcgaagcagccttgggcgaagctaaaaagcagcttcaggacgaaatgttacggcgcgttgacgcagagaatcggttacagaccatgaaagaggagctagacttccagaagaacatctattcagaggaactgagagaaaccaagagaagacacgaaacccggctagtcgagattgacaatgggaaacagcgagagttcgaaagcaggttggctgacgcccttcaagaactgagagcccagcacgaagaccaggtggaacaatacaaaaaggagctggagaaaacatattccgctaagctggacaacgctcgacagagcgctgaacggaattcgaaccttgtcggggctgcccatgaggagcttcagcagtcaaggataaggatcgattcactaagcgcgcagctcagtcagctacaaaaacaactggcagccaaggaggctaaactgcgtgatttggaagactccctggcaagagagcgagatacctcccggaggttactggccgagaaagagagagaaatggcagaaatgcgggcccgcatgcagcaacaattggacgagtaccaagagctcctggatatcaaactcgctctggacatggagatccacgcctataggaagctcctcgagggcgaggaggaaagacttaggctctccccctctccgaccagccagcggtcccgcggcagggccagtagtcatagctcacagactcagggcggaggcagtgtaaccaaaaagagaaagttggagagcactgagtctcgttcatcattcagtcagcacgccagaacatctggaagggtggccgtcgaagaagtggatgaggaaggaaagttcgttcggctccgcaacaagagtaacgaagatcagtctatgggtaattggcaaatcaaaagacagaacggggacgatccccttcttacctaccgattccccccaaagttcactctcaaagcagggcaggtggtcaccatttgggccgctggcgctggggctacacacagccctcctaccgatcttgtttggaaggcccagaatacctggggatgtggcaacagtctccgaacggccctcataaacagcacgggagaggaggtggcgatgaggaaacttgtcagaagtgtgactgtggtagaagatgatgaagatgaggatggggatgaccttctccaccaccaccacgtgtccggcagccgccgctag

SEQ ID NO: 192657 - DNA, 1845 bp, synthetic construct
  misc_feature 1..1845: note = Description of Artificial Sequence: Synthetic coding sequence
  source 1..1845: mol_type = other DNA
atggagacccccagccagcggcgggccacccggagcggcgcccaggcttcatctactcccctttctccaacgagaattacgaggctccaagaaaaagaggatctgcaggaactcaatgaccgcctcgccgtttatatcgatagagttcgctccctggaaaccgaaaacgcaggcttgaggctgaggatcacagagtctgaagaagtcgtctcccgcgaagtctcagggatcaaagccgcatatgaggcggagctaggcgatgcccgcaaaacattggacagcgtcgctaaagaacgtgccagactgcaattggagctcagcaaagtcagagaggagtttaaggaacttaaggctcggaacaccaagaaggaaggcgatctgatcgcggcccaggccaggctgaaggatctggaggccctattaaactctaaggaggcagcgctgtcgacggcactatctgagaagaggacactcgagggtgagctgcacgatctgcgcggacaggtagccaagctcgaagcagcactcggcgaggccaaaaagcagctgcaggatgagatgctccggagggtggacgctgagaacaggctgcagaccatgaaagaggaactggatttccagaaaaatatctacagtgaggagctccgggaaactaaaaggcgtcatgaaactaggcttgtggagatcgacaacggaaaacagcgcgaattcgaaagtaggctggccgatgccctgcaggagcttcgggcccagcacgaggaccaagtggagcagtacaaaaaagagctggaaaagacctatagcgccaagctagacaatgccaggcagagcgccgaaagaaacagcaatttagttggcgcagcccacgaagaacttcagcagtcacgtatcaggatagactcgctgtctgcacagctctcccaactgcagaagcagcttgccgctaaggaggccaaactgagagacctagaggacagcttagcacgcgagagggacacctctagacgactcctcgctgagaaggagagagagatggcagagatgcgcgcccgaatgcagcaacagctggacgaataccaggagctgttggacattaagctggccctggatatggagatacacgcgtaccgcaaattgcttgagggagaggaagagagacttcgcttgtcgccctctcccacatctcagcgttcacgaggcagggcttcgagccattcatctcaaactcaaggcggaggaagtgtgactaaaaaacggaaactcgagtcaacagagagcagatcttctttcagtcaacacgccagaacgtccggcagagtcgcagtggaggaagtggacgaggagggcaaatttgtgagactccgcaataagtccaacgaagatcagtccatgggaaactggcagatcaaaagacagaatggggacgatccattacttacttaccggtttcccccaaaattcaccctaaaggctggccaagtcgtgactatatgggcagccggggcgggcgccactcattctccgcctacagatttggtatggaaggcccagaatacatggggctgcgggaattccctacgaacagccctgatcaactcaacaggcgaggaagtggccatgcgcaaactggtacggtcagtcacagtggtagaagacgacgaggacgaagacggcgacgatttgctgcatcatcaccacggctcacactgttcctcttccggagatcctgcagagtacaacctccgcagcaggaccgtgttgtgcggtacttgcggacaacccgcagataaggccagtgcgtctggctcaggggcacaaagtccccaaaattgtagcattatgtag

SEQ ID NO: 192658 - DNA, 1995 bp, synthetic construct
  misc_feature 1..1995: note = Description of Artificial Sequence: Synthetic coding sequence
  source 1..1995: mol_type = other DNA
atggagacccccagccagcggcgggccacccggagcggcgcccaggcttcaagtacccccctctcacccactcgcataacccgcctacaagaaaaagaagatctgcaggaactgaatgatcggctggcagtctacattgatagagtaagatcactggagactgaaaatgctggactccgtttacggattactgagtcagaagaggtcgtgtcacgggaggtatccggcatcaaggcagcctatgaggcagagcttggcgacgctcggaaaacattggattctgtggccaaggagagggccagattgcagcttgaactgagcaaggttcgagaagagttcaaagagctaaaagctcggaacaccaagaaagagggggatcttatagccgctcaagctcggctgaaagatctggaagctctgctgaattccaaggaagcggccttatccaccgccttgagcgaaaagagaacactggaaggagagctgcatgacctccgggggcaggtagcaaagctcgaggctgcgctgggagaggccaagaagcagcttcaggacgaaatgctgagaagggtggacgcggagaaccgattacagaccatgaaggaagaactcgacttccagaagaatatttacagcgaagagctccgagaaaccaaaagaagacacgagacacgtcttgtggaaatcgataacggcaaacagcgggagttcgaatctcggctcgccgacgcgctccaggagctgagggctcagcacgaggaccaagttgagcaatataaaaaagagttggagaaaacctactccgcaaagttggacaatgccagacagtccgccgagagaaatagtaatctggttggcgcggcccatgaggaattgcagcaaagccgtatccggatcgacagcctgagcgcacagctttcgcaactgcagaagcagctcgccgccaaggaagctaagctcagagatcttgaagatagcttggcccgtgagcgagatacctcaagacgcctgttagcagagaaggaacgggaaatggccgaaatgcgggctaggatgcagcagcaactagacgagtaccaggagctgctcgacattaagctggctttagacatggagatacacgcctatagaaagttgctggagggggaggaggagagactgagactgagcccctcacccacctcccagcgctcacgaggaagagctagctctcacagctcacagacccagggcggagggtctgtgacaaagaagcggaaactagagtctactgagtccaggtcctcatttagccagcacgccagaaccagcggtagggtcgcagtggaggaggttgacgaggagggaaagttcgtgcgactccgcaataaatctaacgaggaccaaagcatggggaactggcagatcaagcgccagaatggtgatgaccctctcctaacgtacagatttcccccaaaattcacactcaaggccggccaagtggtgaccatctgggctgctggcgccggggccacccattcaccccctacagatctggtatggaaagcccaaaacacctgggggtgtggaaatagcctgcgcacagctctgatcaatagcacgggggaagaggtggcgatgagaaagctagtgcgcagcgtaacagtggttgaagatgacgaggacgaggatggagacgacttgctgcatcaccaccacggctcccactgcagcagttcgggcgatcctgcagaatataatctccggtcccgtaccgtcctctgcggtacatgcggacaacctgctgataaagcatcagcttccggaagtggtgcacaggtgggcgggcccatcagtagtggttcctccgcatctagcgtgacagtcaccagatcctatcggagcgtcggggggtctgggggaggatcctttggagacaatttagttacacggagctatttactgggaaactccagcccgcgcacacagagcccacagaattgcagcattatgtag

SEQ ID NO: 192659 - DNA, 1719 bp, synthetic construct
  misc_feature 1..1719: note = Description of Artificial Sequence: Synthetic coding sequence
  source 1..1719: mol_type = other DNA
atggagacccccagccagcggcgggccacccggagcggcgcccaggcctcttcgacgccgctgtccccaactcggattacacgcctccaagaaaaggaggacttgcaggaactcaatgataggttggcagtctatatcgaccgtgtccgaagtctggagactgaaaatgccggcctgcggttgaggatcaccgaatctgaggaggtggtgtcaagagaggtatcgggtattaaagcagcctacgaagcagaacttggggatgcccggaagaccctagattcagttgcaaaggaaagagcccgactgcaactcgagcttagcaaagtgagggaggagtttaaagaactgaaggcaagaaatacgaagaaggaaggtgatttaatcgctgctcaggcccgcttaaaggacctggaagcgctgcttaacagcaaggaggccgctctgagtaccgctctgagcgaaaagaggactctggagggtgaacttcatgacctcagaggccaggtcgcaaagctagaagcagcccttggggaagccaaaaagcagctgcaagacgaaatgttacgacgggtggacgcggaaaacagattgcagaccatgaaagaagagttggacttccagaaaaacatctatagtgaagaactcagggaaacaaagcgccgacatgagactaggttggtagaaatagacaacggcaaacaacgtgagtttgaaagcagactggccgatgcactgcaagagttgcgcgcccagcatgaagaccaagtggaacaatacaaaaaagagttagaaaagacgtattctgccaaactcgataatgcccggcaaagtgctgagagaaactccaaccttgtgggcgctgcccatgaagaacttcagcaatccaggataaggatagacagcctatcggctcagctatcacagctgcaaaagcagctcgccgcaaaggaggcgaagctgcgggatcttgaggattctctggctcgcgaacgagacactagtcggcggctcctcgccgagaaagagcgcgaaatggctgagatgagagcccgcatgcagcagcaactcgacgaataccaggagctgctcgatataaagctggctttagatatggaaatccatgcatatagaaagctcctcgagggggaggaggagcgcctgaggcttagcccaagccccacttctcaacggagtaggggtcgagcgtccagtcacagttcccagacacagggcggagggtccgtaacgaaaaaaaggaagctggagtcaactgagagccgctccagtttctctcagcacgctaggacaagcgggcgagtggcggtggaggaggtggatgaggaggggaaatttgtccgtctaaggaacaaatctaatgaggaccagtcaatggggaactggcagattaaacgccagaatggcgatgaccccctcctgacatacaggttccctccaaaatttaccctgaaggcaggccaggttgttactatctgggcagcaggggctggggccacccattccccccctactgatctcgtttggaaagcccagaacacatgggggtgtgggaacagcctgaggacagccctgattaattccacaggagaggaagtcgctatgagaaagctggtgagatcagttaccgtggtcgaggatgacgaggatgaagacggagacgacctgcttcaccatcaccatgtgtccgggagtcgcaggtag

SEQ ID NO: 192660 - DNA, 1476 bp, synthetic construct
  misc_feature 1..1476: note = Description of Artificial Sequence: Synthetic coding sequence
  source 1..1476: mol_type = other DNA
atgcagcccctgctgtgcctgggcaacctggaggacgcccgggagcgtacaggcactctactcgcccaacacccagcttggggcaggactcgagccaagcccggtagccctctcaacacaaaaaaggagggggacctgattgctgcccaggctcgcctgaaggatctcgaggcgctgctgaactccaaagaggccgccttgagcaccgccttgagcgagaaacggaccctagaaggcgagctgcacgatcttcgggggcaggtggccaaactagaagcagctctgggggaggcgaagaaacagctgcaggacgagatgctgcgacgggttgacgccgagaatcgcctgcagacaatgaaggaagagcttgatttccagaagaatatctacagcgaggaactgagagaaactaaaagaaggcacgagacgcgcctggttgagatcgataacggtaagcaaagggaatttgaatcccggctagccgatgccttgcaggaactccgagcacaacatgaagaccaggtcgagcagtacaaaaaagagctcgaaaagacatacagcgcaaaattagacaacgctaggcaaagtgctgaacggaactcaaaccttgtcggcgccgcccacgaggagctgcagcagtccagaattcgtattgatagcctgtccgcacagctcagccagctccagaagcagttagccgccaaagaggccaagttacgagatttggaggacagcttagctcgagagcgtgacactagccgaagattgctggccgaaaaggagcgcgaaatggcagagatgagagcgagaatgcaacaacagctagatgagtatcaggagttgttagatatcaaattagctctcgatatggagattcacgcttatcgtaagttattagaaggggaggaggagagactgcggcttagcccgagccccacatctcagaggtctcgcggcagggcgtcctcccatagctcacagacacaaggtggagggagcgtgacaaagaagagaaagctggagtcaactgaatcgcgctcatccttctcccagcatgccagaacatctggacgcgttgcagtggaggaggtcgacgaggagggcaaattcgtccgcttaaggaacaagtcaaatgaggaccagtccatgggcaactggcagatcaagcgacaaaacggcgatgaccccctcctcacttatagattccctcctaaatttaccctgaaagcaggccaggtcgtgaccatatgggcagccggagcaggtgccactcattctccccccaccgaccttgtgtggaaggcccagaatacctggggctgcgggaactcactgcgcaccgccctgataaattccacgggcgaagaggtggccatgcggaaattagttaggtcagttactgtagtcgaggacgatgaagacgaggatggagatgatctactacaccaccatcacgtcagcggaagccggaggtag

SEQ ID NO: 192661 - DNA, 1464 bp, synthetic construct
  misc_feature 1..1464: note = Description of Artificial Sequence: Synthetic coding sequence
  source 1..1464: mol_type = other DNA
atggagacccccagccagcggcgggccacccggagcggcgcccaggcatcaagcacacccctcagccctacacgaattacgagattgcaagaaaaagaagacttacaagagctgaatgatcggcttgccgtgtacatcgacagggtgagatctttggagactgagaatgccggtctacggctgagaattaccgaatcagaagaagttgtgagccgggaggtaagcggcatcaaggcggcctatgaagcagagctgggcgatgcaagaaagaccttagacagcgtcgccaaggaaagggcccgcctccagctggagctgtctaaagtacgcgaagaattcaaagaactgaaggcgaggaacacaaaaaaggaaggtgatctgatcgcagcccaggctaggctcaaggatttagaggcgctgctgaattccaaggaggccgccctatctacagcactctccgagaagagaaccctcgagggagaactccacgatttgcgcggccaggtggcgaaactggaagcagcccttggcgaggccaaaaagcagctgcaggacgaaatgcttagacgagtcgacgcagagaatagactgcagacgatgaaggaggaactcgatttccagaagaacatatatagcgaagaattgcgcgaaaccaaaagacggcacgagacacgtctggtggaaatagacaacgggaagcaaagggagttcgagtcacggttggccgacgcgcttcaggagttacgggcccaacatgaagatcaggtcgagcagtacaagaaagagttggagaaaacttacagtgcgaagctcgacaacgctcggcagtctgccgaaaggaattcaaaccttgttggggccgcccatgaagagttgcagcagagtcgtatccgcatagacagcctgtctgcccagctcagccaattacagaagcaactggctgctaaagaagcaaaactccgagacctggaggactccttagcgcgcgagagggatacatctagacggcttctggccgaaaaggagagagaaatggctgagatgcgtgcccgtatgcagcagcaactggacgagtatcaagagttgttggatatcaagctggccttggacatggagattcacgcctatcgcaaactgctcgagggcgaggaagaaagattgcgtctgtcaccaagcccaacttcccaacgaagcagggggagggcaagttctcactctagtcagactcagggtgggggcagcgttacaaagaaacgcaaactggagtcaacggagtcccgctcgtccttctctcagcatgcaagaaccagcggtaatagcctgcgaacagctttaatcaactctacaggggaggaagtggcgatgaggaagctggtgagatccgtcactgtcgtggaagatgacgaagacgaggacggagacgacttacttcaccaccatcacgtcagtgggagtcgaaggtag

SEQ ID NO: 192662 - DNA, 1725 bp, synthetic construct
  misc_feature 1..1725: note = Description of Artificial Sequence: Synthetic coding sequence
  source 1..1725: mol_type = other DNA
atgggcaacagcgagggctgcaacaccaagaaggagggcgacctgattgctgcacaggcacgtctgaaggacctggaagccctgttaaactccaaagaggccgcactgagcacagctctgtccgaaaaacgaaccctggagggcgaactgcacgacctgcgaggccaggtcgcgaagctggaagcggctctcggcgaggcaaaaaaacagctgcaggatgaaatgctgcgccgcgtcgatgcagaaaaccgcctgcagacaatgaaagaggaacttgactttcaaaaaaacatctacagcgaagagctgcgcgagacaaaaagacggcatgagacaagactggttgagatagataatggaaagcaacgcgagttcgaatctcggcttgccgatgccctgcaggaactgcgagcccagcatgaagaccaggtggagcagtacaaaaaagagttggagaaaacttatagcgccaagcttgacaacgccaggcagagcgccgagcgcaacagcaatctggtcggagctgcccacgaagagcttcagcagtctaggatacggattgactctctgagcgcccagttgtctcaactccagaagcaacttgccgctaaagaggcaaagctgagggacctggaggatagtcttgccagagagcgggacacaagcaggcggctgctcgctgaaaaagagagagaaatggccgaaatgcgagcgcggatgcagcagcagctcgacgaataccaagagctgttggacattaaactagccctcgacatggagattcatgcttaccgcaagttgttggagggcgaggaggaaaggctgcggctgtctccatccccaacctcgcagcgctcccgcggcagggcctcaagccattcctcccagacccaaggcggaggcagcgtcacaaagaaacgaaagctcgaaagcactgagtcgcggtcctctttctctcagcacgcacgaacgagtgggcgcgtcgccgtcgaggaggttgacgaagagggcaaattcgttcgcctgaggaataaatccaacgaagatcagagcatgggtaattggcagatcaagcgccagaatggagacgatcctctcctgacatacaggtttcccccaaagttcactctgaaggctggacaggtggtgactatatgggccgccggtgccggcgctacccactctcctccaactgacctggtgtggaaggcccagaatacctggggttgcggaaactccctgcgaacagcccttatcaactccaccggcgaagaagtggccatgcgaaagctcgtccggagtgtaacggtcgtggaggatgatgaggatgaagacggggatgatttgttacatcatcaccatgggtcgcattgtagttctagcggtgaccccgctgagtacaacctgcggagcaggaccgtgttatgtgggacatgcggccaacccgccgataaggctagcgcgagcggatccggcgcccaggtcggtggacccatcagctccggctcgtcagcgagcagcgtgactgtgacccggagctatagaagtgtgggggggagcgggggcggatcgtttggggacaacctggtgactagaagttacttgctcgggaatagctcacctcggacccaatcgccccaaaattgctccattatccaggagatgggaatgcgctgggaggtcgaggagggcagacgtaaagtttcactaagttgtctgccgtag

SEQ ID NO: 192663 - DNA, 1848 bp, synthetic construct
  misc_feature 1..1848: note = Description of Artificial Sequence: Synthetic coding sequence
  source 1..1848: mol_type = other DNA
atgcccagccggaagttcgccgacggcgaggtggtgcggggccggtggcccggcagctcgttgtattatgaagtcgagatactctcgcacgattccacttcccagttgtacacggtcaaatataaagatgggactgagctggaactcaaagagaatgatattaagcctttaaccagcttccggcaacgaaagggagggagcacatcctccagtccgagcagacgccgtggaagtagatccagaagccggagcaggagccctgggagacccccaaaatccgctagacgctccgcctctgcatcccatcaagcagatattaaagaagcgcgccgtgaagttgaggtcaaattaaccccccttatcctgaagcctttcggcaattctatttcacggtataacggagagccggagcatattgagcgcaatgatgctccccacaagaatacacaggaaaagttctctctgtctcaggagtcgtcttatatagccacacagtattccctgaggcccagacgcgaggaggtgaaactgaaagagattgactcgaaagaggaaaaatacgtggcaaaagaactcgccgtgcggacctttgaggtgaccccgattcgcgccaaggacctggagttcggaggggttcccggggtttttctgataatgtttggacttccagtcttcctgttcttgctgctccttatgtgtaaacagaaagacccttccctgttaaacttcccccctcctcttcctgctctgtacgaactctgggagacgcgggtcttcggggtatacctgctgtggttcttgattcaagttctgttctacctgttgcctattggtaaggtggtggaaggaactccccttatcgacggaaggagattaaagtataggctaaatggattttacgcatttatcctgaccagcgccgtgattggaaccagcctctttcaaggtgttgaatttcattatgtttattcacacttcctccaatttgcacttgccgccactgtgttctgtgtggtgttatcagtgtacctgtatatgcggtccctgaaggcaccccggaacgatttaagcccagcctccagcggcaacgccgtatacgacttctttataggacgggagctcaaccctcgcatcggaacgtttgatttaaaatatttttgcgaactgcggccaggcctgataggttgggtggtcattaatcttgtcatgctgctcgctgagatgaagattcaggacagggcagtcccatccctggctatgatcctcgtaaatagtttccagctgctgtacgtggttgatgccctgtggaacgaagaagctctgctcacaaccatggacataatccacgacggcttcggttttatgctggccttcggcgatcttgtctgggtccccttcatttacagtttccaagcattttatcttgtatcccaccctaatgaggtgagctggcctatggcctctctcattatcgtgctcaaactctgcggttatgtcatctttaggggagcgaacagccagaagaatgcgtttcggaaaaaccccagcgacccaaagctggcccatctgaagacgattcatacttccactggaaaaaacctgcttgtatctggctggtgggggtttgtgcgccaccccaattacctgggggatctgataatggcgctggcctggagcctgccttgtggcttcaatcacattctgccttacttttacatcatctacttcacaatgcttctcgtacaccgagaagccagagatgagtaccactgcaagaagaaatatggcgtcgcatgggagaaatattgccagcgggttccttacagaatttttccttatatctactag

SEQ ID NO: 192664 - DNA, 1848 bp, synthetic construct
  misc_feature 1..1848: note = Description of Artificial Sequence: Synthetic coding sequence
  source 1..1848: mol_type = other DNA
atgcccagccggaagttcgccgacggcgaggtggtgcggggccggtggcccggcagctccctgtattacgaggtggaaatcttgagccacgacagtacatcccaactgtataccgtgaagtataaggacggaaccgagttggaacttaaagagaatgatatcaagcctctgacttcctttagacagagaaagggcggatccactagttcttcaccctctcgccggagaggctcaagaagcaggagtagatctcggagcccaggtcgcccgcctaagtccgcgagacggtcggcatctgctagccatcaagcagacatcaaggaggcccgaagggaagtagaggtgaaactgacccccctgatccttaagcctttcgggaatagcatttccaggtataacggcgagcccgagcacattgagcgcaatgacgccccacacaaaaacacacaggaaaaattctcactgtcacaggagagctcttacatagccacacagtactcgcttcgaccaaggcgggaggaggttaaacttaaggaaatcgacagcaaagaagagaagtatgtggcgaaagagctcgcagtccgaacattcgaagtaactcctattcgggctaaagacctcgagttcgggggagttccgggcgtctttctcataatgtttggactgccagtctttctcttcctgttgttactgatgtgcaagcaaaaagatccttctctgctcaacttccctccacctctccctgcattatacgaactgtgggaaacccgcgtgttcggagtgtacttgctgtggttcctcatccaggtgctcttttatctactgcccatcgggaaggtcgtcgaggggactcctttaatcgacgggagacggctgaaataccggctaaacggattctatgcctttatccttacaagcgccgtgattggcacatctttattccagggcgtggagttccattacgtgtactctcatttcctgcaatttgcgctagcagccacggtcttttgcgtggttctgtcagtgtatctttatatgagatctctgaaagcacccagaaatgacctctcacccgcatctagcggcaacgcggtctacgacttcttcattggcagagaacttaacccccggatcggcacctttgacctgaaatacttttgtgaattgagacctgggttgattggttgggtggtcatcaacctggttatgttgctagctgagatgaagattcaggaccgcgctgttccctctctcgccatgatactggtgaattcttttcagctcctttatgtggtagacgccctctggaacgaagaggccctgctgacgacgatggatattatccatgatgggttcggattcatgctggccttcggtgatctggtgtgggtgccctttatatattcttttcaagccttttatctcgtgagtcatccaaacgaggtgagttggcccatggcctccctaatcattgtccttaagctgtgcggatatgtgatctttaggggcgctaattctcaaaaaaacgcttttcggaaaaatcccagcgatcctaagctcgctcacttgaaaactattcacacaagcaccggcaagaacctcctcgtttccggctggtggggcttcgtgagacaccccaactaccttggagacttgatcatggcactcgcctggtccctcccgtgcggttttaatcacatattgccatacttttacatcatctattttactatgcttctcgtccaccgtgaagctagagatgagtatcactgtaagaaaaaatacggcgtggcttgggagaagtactgtcaacgtgtgccctatagaatatttccctacatatactag

SEQ ID NO: 192665 - DNA, 156 bp, synthetic construct
  misc_feature 1..156: note = Description of Artificial Sequence: Synthetic coding sequence
  source 1..156: mol_type = other DNA
atgcccagccggaagttcgccgacggcgaggtggtgcggggccggtggcctggcagctccctttattatgaggtggagatcctgagccatgactccaccagccaactgtacacggttaaatacaaagacgggaccgagctggaattaaaggagtag

SEQ ID NO: 192666 - DNA, 387 bp, synthetic construct
  misc_feature 1..387: note = Description of Artificial Sequence: Synthetic coding sequence
  source 1..387: mol_type = other DNA
atcggccgggagctgaacccccggatcggcaccttcgacctgaagtacttttgtgaactgcgccccggcctgattggatgggtcgtcattaatcttgtgatgctgctggccgagatgaagattcaggaccgtgcggtcccatccttggccatgatcctggtgaacagctttcagctcctatatgtagtggacgcactttggaacgaggaggccttgctcaccacaatggatataatccacgatgggtttggatttatgctggcgttcggcgatctggtgtgggtccctttcatttactcatttcaggcattctacttagtatctcaccctaacgaagtcagttggcccatggccagtctgataattgtgctaaaacgcgaatattag

SEQ ID NO: 192667 - DNA, 642 bp, synthetic construct
  misc_feature 1..642: note = Description of Artificial Sequence: Synthetic coding sequence
  source 1..642: mol_type = other DNA
atgcccagccggaagttcgccgacggcgaggtggtgcggggccggtggcccggaagttcattatattatgaagtggaaatactatcccacgattcaacaagtcagctgtatacggtcaaatacaaagacggtaccgagctggagttaaaagagaacgatattaagcctttgacttcattccggcagcgcaaggggggctcaacatcaagtagtccctctcggcggcgaggctctaggtcgagatcacgctcacgcagcccaggacggccccctaagagtgccaggaggagcgcgtccgctagccaccaagctgacattaaggaagccaggcgtgaagtggaagtgaagcttacaccactcatcctgaagcccttcgggaacagcatctctagatacaacggagaaccagagcacatagagcggaatgatgctccacataaaaatacacaagaaaagtttagtttgagtcaggagagcagctacatagcaactcaatactcactgcgacccagaagagaggaagtgaagttgaaggagatcgattccaaagaggagaagtacgtcgctaaggagttagccgtccgcacctttgaggtgactcctatcagggcaaaagatttagagtttggtggcgtgccttag

SEQ ID NO: 192668 - DNA, 324 bp, synthetic construct
  misc_feature 1..324: note = Description of Artificial Sequence: Synthetic coding sequence
  source 1..324: mol_type = other DNA
tgaagcaccagcctgaagatgtacttctacttctacatcgacctgaagaccatccacacttcaacaggcaagaacctcttagtcagtggctggtgggggtttgtacgtcacccaaattatctcggggacctgataatggcactcgcttggagcctgccgtgtggctttaatcatatcctcccttacttttatataatctactttacaatgcttctggtccaccgcgaggcccgggacgaataccactgcaagaaaaagtacggggtggcttgggagaagtattgccagagagttccctaccgaatattcccatatatatattag

SEQ ID NO: 192669 - DNA, 1761 bp, synthetic construct
  misc_feature 1..1761: note = Description of Artificial Sequence: Synthetic coding sequence
  source 1..1761: mol_type = other DNA
atggccaccgccacccccgtgcccccccggatgggcagccgggccggcgggcccacaacgcccctgtccccaacaaggctgtctcgcttacaggagaaggaggagctgcgtgagctcaacgaccggttggcggtttatatcgacaaagttcggagtcttgaaacggaaaactctgccctgcagctgcaagtgacagagcgggaggaagtgaggggacgcgagctgactggtttgaaggcgttgtacgaaaccgaactggctgacgcccgacgggctttggatgacacagcacgcgagagggctaaacttcagatagagctggggaaatgcaaagcagaacatgatcaactgctcctgaattatgcaaagaaggagtcagacctgaacggggcccaaatcaaattaagggagtacgaagcagccctgaattcaaaggacgcagcattggctacagcgttgggggacaaaaagagcttggagggcgacttggaggatctgaaagatcagattgctcagctagaggcgagcctggcagctgcaaaaaagcaactggccgatgagaccctgctcaaggtcgacctggagaatcgctgtcagagtctgaccgaggatctagaatttcggaagtctatgtacgaggaggagatcaatgagacccgtcgaaaacacgagactcgtcttgtggaggtggattccggccggcaaatcgagtatgaatacaaactggctcaggccctacatgagatgagggagcaacacgatgcccaagtgagactttataaggaagagttggagcaaacttatcacgctaaattggaaaacgcacggctttccagcgagatgaacacatctaccgtcaactctgcaagagaagaattaatggagagccgcatgcggatagagagcctgagctcgcagctgtcaaatcttcaaaaagaaagccgggcgtgcttagaacggatccaagaactggaagacctcctggccaaggaaaaggacaattcccgtaggatgttgacggataaagaaagagaaatggctgagatacgggatcagatgcaacagcagcttaatgattatgagcagcttctggatgtgaagttggccctggacatggaaatatcagcttaccgcaaattactggaaggggaggaggagcgactgaaactcagcccttctccatcgtctagggtgacggtgagcagagcctccagttctcgctccgttcgtacaacaagggggaagcgcaagcgcgtggatgttgaagagagcgaagctagctcttctgtgtctatttcccattctgcaagcgccacgggcaacgtttgtattgaagagatcgatgtggacggcaagttcatccggctgaagaacactagtgagcaggaccagccgatggggggatgggagatgattagaaagattggtgacacttctgtgtcatataagtatacctcaagatatgtgctgaaggcaggccaaaccgtgaccatttgggccgctaacgcaggagtcactgcctcgccgccaacggacctcatttggaagaaccagaacagttgggggactggtgaggatgtgaaggttattttaaaaaattctcaaggcgaggaggtcgcacagaggagtactgtcttcaaaacaactatcccagaagaggaagaggaggaagaggaggccgcaggcgtggtggtggaggaggagctcttccatcaacagggaacaccacgggcaagtaatagaagctgcgctatcatgtag

SEQ ID NO: 192670 - DNA, 1803 bp, synthetic construct
  misc_feature 1..1803: note = Description of Artificial Sequence: Synthetic coding sequence
  source 1..1803: mol_type = other DNA
atggccacccccctgcccggccgggccggcggccccgccacccccctatccccaacccgtctaagccggctgcaagagaaagaagagctaagagaattaaatgataggcttgcacactacatagacagagtaagagcgctggagctggagaatgaccgtctgttgctgaaaatttctgaaaaagaagaggtcactaccagggaggtctctgggataaaggcgctgtacgagtctgagctcgccgatgcccgccgggtgctagatgaaacggcccgtgagagggctcgcctgcagatcgaaataggcaagctgcgtgccgagcttgacgaagttaacaaatcagccaaaaaaagggagggcgaactgactgtcgcccagggacgggtcaaggaccttgagtccttgttccacaggtcggaggtggagttggcagctgctctctcagataaacggggcctggaatcagacgttgctgaactacgcgcccagttagcaaaggccgaagatggacatgccgtagcaaagaagcagttggagaaggagacattaatgagggtcgacctggagaaccgctgccaaagcctccaggaggaactggacttcagaaagagtgtcttcgaagaggaagtgagggaaactagaagacggcatgagaggagattagtagaggtcgatagctctaggcagcaagagtacgactttaagatggcacaggccctcgaggagctgaggtcccagcatgatgaacaagtgagactctataagctggagcttgagcagacgtatcaggccaaacttgactctgcaaagctctcgagtgatcagaatgacaaagcagccagtgcagctcgcgaagaactgaaggaggcccgaatgcgactcgaatctctgagctaccagctgagcggtctgcagaagcaagctagcgcggcggaggatcgcatccgcgaactagaagaggcaatggcaggtgaaagggacaagttcaggaagatgctagacgctaaagaacaagaaatgactgagatgcgggacgtgatgcagcaacagctcgccgaataccaagagctgctcgacgtgaaacttgcactcgatatggagatcaacgcctatcgcaagctgctagagggggaggaggagcgcctgaagttatctccaagcccaagcagtcgggtaaccgtctctagggccacctccagctcaagcggctccctctcagcaacaggccgcctggggcggtcaaagcgtaagcggctcgaggttgaggaaccgctgggctctgggccgtccgttttagggaccggtacagggggctctggaggcttccatctggctcagcaggccagtgccagtggctccgttagcattgaggagattgatctggaaggtaagttcgtccagttgaaaaacaatagcgacaaagatcaatccttaggtaattggcggatcaagagacaggtgttagagggtgaagaaattgcatataagttcaccccaaagtacatcctgcgggcggggcagatggtcaccgtgtgggcggcaggagccggtgttgcacactctcccccatccacactggtgtggaagggccagtcaagctggggtactggagaatcctttcggacggtcctcgttaacgcagatggagaggaggtcgccatgcggacagttaaaaagagcagtgtaatgagagaaaatgaaaacggggaggaggaggaagaggaggctgaatttggggaggaggatctgtttcaccaacagggggatccgagaactacctcccgggggtgctacgtcatgtag

SEQ ID NO: 192671 - DNA, 1803 bp, synthetic construct
  misc_feature 1..1803: note = Description of Artificial Sequence: Synthetic coding sequence
  source 1..1803: mol_type = other DNA
atggccacccccctgcccggccgggccggcggccccgccacccccctcagtcccaccaggcttagccggctccaagaaaaggaggaactccgcgaactgaatgacagattggcccactacatcgatcgggtgcgggctctggaacttgagaatgatagactccttctaaagatttctgaaaaggaggaagttactaccagggaggtgagcggcatcaaggcgctctatgaaagcgagctcgccgatgcaagaagggttctggacgagacagcccgcgagagggcccgtcttcagattgagatagggaagctccgtgcagaacttgacgaagtaaataagagcgcaaaaaagagagagggcgagctgacagtagcgcaggggcgcgtgaaggatttggagagtctgttccaccgttccgaagtggagctggcggctgctctgagcgataagcgcgggttggagtccgatgttgcagaattacgggcacaattggccaaggcggaggacggccacgccgtcgctaagaagcagctggaaaaagagaccctcatgcgagtggacctcgaaaatcggtgccagtccttgcaggaggaactcgacttcagaaagagtgtctttgaagaagaagtcagagagacccgcagaaggcacgagaggaggttggtggaggtcgactcctcccggcaacaggagtacgacttcaagatggcacaggccctggaggaacttaggagccagcacgacgaacaagtgcggctctataaactcgagctagaacaaacctaccaagccaagctggatagtgcgaaactatcaagtgaccagaatgacaaagccgcaagcgcagcccgggaggaactgaaggaagctcgaatgagactcgagtcactgagctatcaactgagcggcttacagaagcaggctagtgcagccgaagatcgcataagagagttggaagaggctatggctggagaaagggacaagtttcgcaaaatgctggatgcaaaagagcaggagatgaccgaaatgagagatgtgatgcagcaacagctcgcagagtaccaagagctgttagatgtcaagctggccctcgatatggagatcaacgcttatcgaaagctcctggagggtgaggaggagcgactgaaactgtccccatcaccatcatctcgcgtgaccgtcagtagagcgaccagttccagctcgggctctctgtcagccaccggcaggctcggacggtccaaaaggaagagattagaggtcgaagaacccctggggtcgggtccatccgtactcggtaccggcacaggcgggagcgggggcttccatctggcccagcaggccagtgctagcgggagcgtcagcattgaggagattgacctcgagggcaaattcgtgcaactaaagaataattccgataaggatcagtcactgggcaactggaggattaagcgccaggtcctggagggagaggagatagcctacaaatttacaccaaagtatatcctgcgtgcaggccagatggtcacagtgtgggcggctggtgccggagtggctcactcaccccctagcactctggtgtggaaagggcaatcaagttgggggaccggagaatcattccgtacagtgctggtgaacgctgatggtgaggaggtggccatgcggaccgtgaagaaatcctccgttatgagagaaaacgagaatggagaagaggaggaggaggaagcagagtttggggaggaggacttgttccaccagcagggggatccaagaacaacatcaaggggatgttacgtgatgtag

SEQ ID NO: 192672 - DNA, 651 bp, synthetic construct
  misc_feature 1..651: note = Description of Artificial Sequence: Synthetic coding sequence
  source 1..651: mol_type = other DNA
atgctgatcggcggcaacatcgaggtgcacgtgaaccccggcgacggcacgggcctgaggaaggctcttctccacgcccctaccgggacttgctcggacgggcaggcacactcaatatcgctggtgaggaacagacgtatcatcaccgtgcagctggatgaaaacaatccggtggagatgaaactggggaccctggtggagagccggacgattaacgtttctaatttatacgtaggcggcatcccggaaggcgagggcactagcctgctgacgatgaggaggagcttccatggctgtattaaaaatctcattttcaatctggaactgttggattttaacagcgccgtcatgtctaagtctacctggacaccagccggctgtcagaaagggttgtcttggcttccgatgcagcgtactaaactgctccccgagcctcgggccttccctgtaggcgccgccagtttcactatcagccaggtgcagtctgcaaaagagggtctaggccaaagagaattaaaatggggattagcagtcaaggtgccagcaaaggctggcgccggcgctggggcaggcgcagtactaaagattcgagccggcaccggcagggaacgcgtgccacaggctactcaaatgacacgcccaaatccctag

SEQ ID NO: 192673 - DNA, 9228 bp, synthetic construct
  misc_feature 1..9228: note = Description of Artificial Sequence: Synthetic coding sequence
  source 1..9228: mol_type = other DNA
atgcggggcggcgtgctgctggtgctgctgctgtgcgtggccgcccagtgcagacagcgtgggttgttccccgcaatcctaaacttggcgtcaaacgctcacatcagcacgaacgcgacatgcggggaaaaaggccccgaaatgttctgcaaactggtggagcacgttcctggtcgacctgtgcgcaatccacaatgtcgaatctgtgacgggaatagcgcaaatccgcgcgagcggcaccccatttctcatgctatcgatggcactaataattggtggcaaagcccttcaatacagaatggaagagaataccattgggttaccattaccttggacctgagacaggtgttccaggtcgcctacgttattatcaaagcagccaatgcccccaggccaggtaactggatcctagagcggtcactcgacggcaccaccttctccccctggcaatattatgcagtgagcgactctgagtgtctttcccggtacaacattacaccccgccggggacctcctacgtaccgggccgatgatgaggttatttgtacgtcttattattctcgcctggttcccctggagcatggcgaaatccatacctcacttatcaatggcagacctagtgccgatgatttgtcccctaaactcctggagtttacctctgccagatacattcgactccggctccaacgaatacgtactctaaatgccgatttgatgactttaagccatcgggaacctaaggagctggatccaatcgttactcggcgctactattactcaatcaaggatatatctgtcggaggcatgtgtatctgctacggccacgcatccagttgcccctgggatgagaccaccaagaaactacagtgccagtgcgaacataacacctgtggggagtcctgtaatcgctgctgccccggctaccatcaacagccgtggcggcctggaacggtttcctctgggaatacgtgtgaggcgtgcaattgccacaacaaggccaaggactgctattatgatgagagcgtggccaaacagaagaagtccctgaacacagcaggacagttcagaggggggggcgtctgcatcaattgtcttcagaacacgatgggcatcaactgtgagacctgtattgatggttattaccgcccccataaagtctcaccttacgaagatgaaccttgtcgcccatgcaactgcgacccagtgggttcactatctagtgtctgtattaaagatgatctgcatagcgacctgcacaatggaaagcaaccaggtcagtgcccatgtaaagaaggatacaccggcgagaagtgtgatagatgccagctgggatacaaggactaccccacctgtgtcagttgcggatgtaatcccgtaggatcagcaagtgatgaaccctgtacaggaccctgcgtatgcaaggagaatgtggagggtaaagcttgcgatcgatgcaagccagggttctataatttaaaagagaagaatccgcgggggtgctccgagtgtttttgctttggcgtctccgatgtctgcagctccttaagttggccagtgggacaggtgaacagcatgagtgggtggctagtgaccgaccttatttcacctaggaagatacccagtcagcaggacgctctcggggggaggcaccaggtgtcaatcaacaatactgccgtcatgcagaggctggcacccaagtactattgggcagctcctgaagcctatcttggcaataaacttaccgcatttggcgggtttctgaaatacacagtctcttacgatatccctgtggagacggtggacagcaatcttatgagccatgcagacgtgattattaaagggaacggtcttaccctgtcgacacaggccgagggtctgagtctgcagccgtacgaagaatacctgaacgtcgtgagactcgtcccagagaattttcaggactttcacagcaagaggcagatagaccgcgaccagctgatgacggtgctcgcgaatgttacgcacctgctgattcgggccaactacaattccgctaagatggccctttacagactcgaaagcgtgagtctcgatattgccagcagcaatgcaattgacctcgtggtggccgcagatgtggagcactgcgaatgcccccaagggtacacgggcacaagttgtgaaagctgtctaagtggatactaccgcgtggatggcattctcttcggggggatctgtcaaccatgcgagtgtcacgggcacgcagccgaatgtaacgtgcatggggtttgtattgcctgcgctcacaacacgactggggtgcactgcgaacagtgcctgcccggattctacggagaaccatcccgaggcaccccaggcgactgtcagccttgcgcgtgccccttaacaattgcctcgaataactttagtccaacgtgtcacctcaatgacggggacgaggtggtctgcgactggtgtgcccccggctactctggcgcctggtgtgagcgctgtgctgacggatattacgggaatcccactgtcccaggcgaaagttgcgtaccatgcgattgctccggtaatgtcgacccatccgaggcggggcactgcgattccgttacaggggagtgtctgaagtgccttgggaacaccgatggggcacattgcgaacgctgtgcagacgggttttatggcgatgcggtaacagccaaaaattgtcgggcctgtgaatgtcatgtcaaggggagccactccgccgtatgtcaccttgaaacggggctctgtgactgcaagccaaacgtcacgggacaacagtgcgaccaatgtcttcatggctactatggattggactcgggacacgggtgccgcccctgcaactgttccgtggcgggctctgtgagtgacggctgtaccgacgaagggcagtgccactgcgtgcccggagtcgcaggcaagagatgcgataggtgtgcccatggattctacgcttaccaagatggatcttgtaccccatgtgactgtcctcatactcaaaatacgtgtgaccccgagaccggggagtgtgtgtgtccgcctcacactcagggggtgaaatgcgaggaatgtgaagacgggcactggggctacgacgccgaagtggggtgccaggcgtgtaattgctccctcgtggggtccacccatcatcgctgcgacgtcgtgaccgggcactgccagtgcaagtctaaattcggcgggagggcctgtgaccaatgcagcttgggctatcgggacttccccgattgtgtcccatgcgactgtgacctccggggaacatctggggacgcatgtaatctcgagcaggggctgtgtggttgcgttgaggagaccggcgcttgcccttgcaaagaaaatgttttcgggccccaatgcaatgaatgtcgggaggggaccttcgcactccgtgctgataacccgctgggctgctccccatgtttctgtagtggcctatcccacttgtgctcagaactagaagattacgtgcggactcctgtcactctaggatccgatcagcccctgcttcgggtggtcagccagtcaaatctgaggggtactactgaaggagtgtactatcaggcgccagatttcctgctcgatgccgccacagtaagacagcatataagggccgagccattctactggcggctgcctcagcaattccagggggatcagctgatggcctacgggggcaaactgaagtactctgtggctttctactctctggacggggtagggaccagcaattttgaaccgcaggtgctgatcaagggcggcagaattaggaagcaggtgatctatatggacgcaccagcgccggagaacggggtgcggcaggagcaggaggtggctatgcgtgagaacttttggaagtacttcaactctgtgtcggagaagccggtgacaagggaagatttcatgtccgtgctctctgacatagagtatattctcatcaaagccagctacggccagggactacagcagagcaggatctccgatatctccatggaagtgggaagaaaagccgaaaagttgcaccccgaagaggaggtggcctctctgttggaaaactgcgtgtgccctccaggaactgtggggttttcatgccaggattgcgcccctgggtatcaccgaggaaagctgcctgccggctcggaccgtgggcctaggcctctggttgccccctgcgtgccttgcagttgcaataaccatagcgacacgtgcgatccaaacacaggaaaatgcctgaactgcggggataacaccgccggcgatcactgcgatgtgtgtacaagtggctactacggaaaagtcactggctccgcctctgattgcgccctgtgcgcgtgcccgcattcaccccccgccagcttcagccctacctgtgtgcttgaaggcgaccatgattttcgctgcgacgcctgtctgctcggatacgaaggaaaacattgtgagaggtgttcgtcaagctattacggtaatcctcagaccccaggcggtagttgccagaaatgtgattgcaaccctcacggcagtgtgcatggagactgtgataggacctccgggcagtgtgtgtgccgacttggcgctagcgggcttaggtgcgatgagtgtgagcccagacacatccttatggagaccgattgcgtctcatgcgacgacgaatgcgttggtgtgttgctgaatgaccttgacgagattggcgatgccgttttatccttaaaccttactggcatcattccagtgccttacggaatactgtcaaatctcgaaaacaccactaagtacctccaggagtcgctgctgaaggaaaacatgcaaaaggacttaggcaagatcaaacttgagggcgtggccgaagaaacagataatctgcaaaaaaaactcacacggatgctggcatctacacaaaaggtgaaccgcgcaaccgagcggatcttcaaggagagccaggacttggccatagccatcgagaggctgcaaatgagcattaccgaaattatggaaaagacaaccctgaatcaaactctagatgaagactttctgctgcctaatagcacattacagaatatgcagcaaaatggtacttcactgcttgagattatgcaaatccgagatttcacacagctgcaccagaacgcgacactggaactcaaagcagcagaggaccttctgtctcagatccaagagaactatcaaaaaccactcgaagaactggaggtgctaaaagaggccgcaagtcatgtactgagtaagcataataacgagctaaaggctgccgaggcgctggtgagagaagccgaagccaaaatgcaggaaagcaatcacctgctgctgatggtgaacgccaatcttagagagttctcagacaagaagttgcatgttcaagaggaacagaatctgaccagcgagctaatcgtccagggtagagggctgatcgacgcagcagcggcccagacagacgctgtacaggacgcccttgagcacctggaggaccatcaggataaactgctactgtggagtgccaagatcagacaccatattgacgacctcgtaatgcatatgagccaaagaaatgctgtggatctcgtgtacagggcggaggatcatgcagccgagttccagaggctcgcagacgtgctgtactctggcctggaaaacatccgcaatgtgagcttgaatgcaacctcagccgcttacgtacactacaacatccagagtctaatcgaagagagcgaggagcttgcccgggatgctcacagaactgtgactgagactagcctcctaagcgaatcgctggtctcaaacggcaaagccgccgtccagcggagttctaggtttctgaaagagggtaataatctgtccaggaaactcccaggaattgcccttgaactgtcggaactcagaaacaaaaccaatcggttccaggagaatgctgtcgaaatcacccgtcagaccaacgaatcattgctgatacttagagcaattccaaaaggtataagagacaagggcgccaagaccaaagagttagccacctcggcttcacaatctgccgtgtctacgttaagggatgtcgccggcctctctcaggagcttcttaatacgagcgcatccctaagcagagtgaataccactctccgcgagacccatcagctcctgcaggattcaaccatggctacactgctggccggtagaaaggtcaaagacgtggagatccaggcaaacctactgttcgacaggctcaaaccccttaagatgttggaggaaaatctctcccggaatctgagtgagataaaacttctcatatctcaggccaggaagcaggctgctagcatcaaggtggccgtgtctgctgaccgggattgtatacgagcataccagccacagatttcgagtactaattacaacacgctgactctgaacgtgaagacccaagagcctgacaacttactcttctatctggggagtagcacggcgagcgacttcctggcggtggagatgcgccggggccgggtagccttcctctgggacctggggtctgggtccactcgcctggagtttccggatttcccgatcgacgataatcgctggcacagtattcacgttgctcgctttggtaacatcggttccctctcagttaaggagatgtcaagtaatcagaagtctccgactaagacatctaaatcccctggcactgccaatgtgctggacgtcaacaattctacactgatgttcgttggcggtctgggcggacagataaagaaaagtccagctgtgaaagtaacccatttcaaggggtgtttaggagaagcatttttaaatgggaaaagtattggtctttggaattatatagagcgtgaggggaaatgtagagggtgttttggctcttctcagaacgaagatccttcctttcattttgacggaagcggatactccgtcgttgagaagtctctgccggccacagtgactcagattatcatgctgttcaatacatttagccctaatggattactcttgtacctgggttcctacggtacaaaggacttcctgagcattgagctcttcagagggcgagtaaaagtgatgacggatctgggaagcggacctatcacactgctcacagatcggcggtataacaatggaacttggtataaaattgccttccagaggaatcggaaacagggtgtcctcgctgtgatcgatgcctataacacttccaacaaagagaccaagcagggggagactccaggtgcttccagtgacctgaatagactggacaaagatccaatatacgtcgggggcctaccaagaagtcgagtggtgcggagaggagtgaccaccaagtcttttgtgggttgcataaagaacctagagatcagcagatccaccttcgacctccttaggaacagttatggagtgcggaaggggtgtctgctggagcccatcaggagtgtctcatttctgaaaggcggctacatagagctgccccctaaaagtctttcaccagagtcagagtggcttgtgacctttgctaccacaaactccagcggaattatcttggccgccctcgggggcgatgttgagaaaagaggagaccgagaggaagcccacgtgccctttttcagcgtcatgctcatcgggggcaacattgaagtccacgttaatcccggagacgggaccggccttcgcaaggcactgctccacgcgcccacaggcacctgttccgatgggcaggcgcactcgatctctctggtacgaaataggaggattattacagtgcagctggatgaaaacaatcctgtggagatgaaactggggactctggtggagagccggacaataaatgtctctaatctatacgtgggcggaatccccgagggtgaggggaccagtctgttaaccatgaggcgaagctttcatggctgtattaaaaacctgatcttcaacctagaactgcttgacttcaatagcgctgttggccacgagcaggtcgacctcgacacctgctggcttagcgaaagacccaagctggccccggacgccgaagatagtaagttgctgcccgagccccgagccttcccagagcagtgtgtggtggatgctgcattggagtacgttccaggggcccaccagttcggccttacccagaatagccactttatcctgcccttcaaccaatcagcggttcggaaaaagctgtcagttgagctgtccattaggacctttgcatccagcggtctcatctattatatggcacatcagaatcaggctgattacgctgtcctgcaattacatgggggcaggctccatttcatgtttgacctggggaagggcagaactaaagtcagtcaccctgccttactgtccgatgggaaatggcatacagtgaaaaccgattatgtgaaacgcaagggtttcatcaccgtggacggccgggaaagtccaatggtcactgtggtgggtgacggtaccatgctcgatgtcgaaggtctgttttacctgggagggctgccatctcagtaccaagccaggaagatcggcaacataacgcacagcatccctgcctgtatcggagacgtgaccgtcaactcaaagcaactagataaagattcgcccgttagcgcatttacggtgaataggtgctatgcagtcgcacaggagggcacttattttgatgggtccgggtacgccgccttagtcaaggaggggtacaaggtgcagtccgacgtaaatattactctcgaatttagaacatcttcacagaatggggtcctcctcgggattagtaccgctaaggtggatgccattggcctggaattggtcgacggcaaggtgctgtttcatgtcaataacggagcggggcgcattacagccgcttatgaaccgaaaacagccaccgtgttatgcgacggaaagtggcatacactgcaggctaataaatccaagcacaggattactctcatcgtcgatggcaatgccgttggggccgaatctccacacacccagtcaacgtccgtggacactaacaacccaatatatgtgggcggttaccctgcgggggtcaaacagaaatgtctccgctctcagacaagcttccgcggctgcctgagaaaactggccctcatcaaatccccgcaagttcagagctttgatttctctagagcctttgaattacacggagtgtttctgcactcatgcccgggcaccgagagctag

SEQ ID NO: 192674 - DNA, 9366 bp, synthetic construct
  misc_feature 1..9366: note = Description of Artificial Sequence: Synthetic coding sequence
  source 1..9366: mol_type = other DNA
atgcccggcgccgccggcgtgctgctgctgctgctgctgagcggcggcttagggggcgtacaagcccagcgaccacaacagcagcgccagagtcaggcacaccagcagaggggcctcttccccgcggtgctgaatctcgcctctaacgcgcttatcaccaccaatgccacatgtggagagaagggccctgagatgtattgcaaactggtggagcacgtgcccggtcagccggtacgaaacccccagtgccggatttgtaaccagaactcttctaatccaaatcagaggcaccctatcactaacgccattgacggaaaaaatacttggtggcagagccccagtatcaaaaacggtattgaataccattacgtaactataacactggatttgcagcaggtcttccagatcgcctacgtgattgtgaaagccgccaacagtccacggcccgggaactggatcctggaaaggtcgttagatgatgtcgaatacaagccttggcagtaccatgccgtgacagacacagagtgcttgacactctacaacatataccctagaacagggccaccgagttacgcaaaagacgacgaggtcatatgtacctccttttactccaagatccatcctcttgagaacggagagatccacatcagcctgattaatggccgcccgtccgctgatgatccctccccagagctgctcgagttcacatctgctcgatacatccgactcaggttccagagaatcaggactcttaacgcagatctgatgatgtttgctcacaaggatccgagagagatcgaccccattgttactaggcgatattattatagcgtaaaagacatctctgtggggggtatgtgtatttgttacggccatgcccgtgcttgtcccctggatcccgctacgaataagagcagatgcgagtgcgagcacaatacatgtggagattcatgtgatcaatgttgccccggcttccaccagaagccatggagagcgggcaccttcttgacaaagaccgaatgcgaggcgtgtaactgccatgggaaagctgaggagtgctattacgatgagaacgtggcaagacggaacctgagcctgaatatacgggggaaatacattggagggggtgtctgtattaattgtacacaaaatacggcaggcatcaattgcgagacatgcaccgatggctttttccggcctaagggcgttagccctaattaccctcgcccatgccagccttgccactgtgacccaattggatctctgaatgaagtgtgcgtcaaggatgaaaaacacgcccggcgaggactggctccaggctcctgccattgtaagaccgggtttggcggcgtaagctgcgacagatgcgctcgtggctacacgggctatcccgattgtaaagcctgtaactgctctgggctaggctccaagaacgaagacccatgttttggcccttgtatatgcaaggagaatgtggaggggggcgattgctcacggtgtaagagcggcttcttcaacctgcaggaggataattggaagggatgtgatgagtgtttctgcagcggcgtttctaatagatgtcagtcctcttactggacatacggcaagattcaggacatgtctgggtggtacttgacagacttgcccggtcgcatccgggtagcaccccagcaggacgatttggatagtccacagcagattagcatcagcaatgctgaggctcggcaggcactgccccacagttactattggtctgcccctgcgccttacctggggaataagctgcctgcggtcggggggcagctgactttcaccattagctatgatctcgaggaagaggaggaagatacagagcgagtcctccagctcatgatcattctggaaggaaacgatctcagcatcagcactgcccaggatgaggtgtatcttcatccatccgaggagcacactaatgtgctgttgttgaaggaggagagctttaccatccatggaacacacttccccgtccggcggaaagagtttatgaccgtactggcaaatctcaaaagggtacttctgcagatcacctattcattcgggatggacgccattttccgtctctctagtgtcaatctcgagagcgccgtcagttaccccacagatggttcaatagcagccgcagtggaagtttgccagtgtccacctggctatacaggaagcagctgcgagagctgttggccacgtcaccgaagagtgaatggtaccatctttgggggaatatgtgaaccctgtcagtgcttcggacatgccgagtcttgcgacgacgtgactggcgaatgccttaactgtaaggatcacacaggaggcccctattgcgataaatgcctcccaggattctacggtgaaccaaccaagggcacttctgaagattgtcaaccgtgcgcttgtccgcttaacattcccagcaataacttcagccctacgtgccacctggacagatctttgggactgatttgcgatgggtgccccgtgggatacacggggcccagatgcgagcgctgtgctgagggatacttcggccagccgtccgtgcccggtggtagctgccagccatgtcagtgtaacgataatcttgacttttcgattcccggatcatgcgactccctttcaggctcctgtctgatctgtaaaccaggcacaaccggccgatattgcgaactttgcgccgacggctactttggtgatgctgtagacgctaaaaattgccagccctgtcgctgcaatgcaggtggtagtttctcagaggtatgtcactcccagacaggacaatgcgagtgcagagctaacgttcaaggacaaagatgtgacaagtgcaaagccggtacattcggcttgcagtctgctcgaggctgtgtgccatgtaactgcaattcctttggctccaagtcctttgattgcgaagaaagtggccagtgttggtgtcagccaggggttactggcaaaaaatgcgatagatgtgcccacggctactttaatttccaagagggcggctgcaccgcatgtgagtgtagtcacctaggtaataactgcgacccgaagactggtagatgtatctgccctccgaacaccattggtgaaaaatgcagcaagtgtgcgcccaacacatgggggcatagcattacaactgggtgtaaagcatgcaattgcagtaccgtgggctccctggattttcagtgcaacgtgaataccggacagtgcaattgtcaccccaaatttagcggagccaagtgcactgagtgtagcagaggccattggaactacccgaggtgcaatttatgtgattgcttcctgccagggactgacgccaccacctgcgactccgagacaaagaagtgctcttgttctgatcagaccgggcagtgtacctgcaaggttaacgtcgaggggatacattgcgacagatgcaggcctgggaagttcggtctggacgccaaaaatcccctgggatgttccagctgttactgctttggcaccactacccagtgcagtgaggccaaaggccttatcagaacatgggtcacccttaaagccgaacaaactattctccccctggtggatgaggcactgcagcatacgaccaccaaagggatcgtgttccagcatccagagattgtggcccacatggaccttatgcgagaagatcttcatttagagcctttctattggaaactgccagagcaattcgagggcaagaagctgatggcctacggaggcaagttgaaatacgcgatttatttcgaagctcgcgaagagaccgggttctcaacgtacaaccctcaggtgatcatccggggtggtacgcccacacacgcccgcattatcgtgcgccatatggccgctccactcatcggacagttgacccgccacgaaattgagatgactgaaaaagagtggaagtactacggagatgatccccgcgtgcacaggaccgtgacacgagaagacttcctcgacatactttatgacattcattacattctgataaaggctacctacggcaacttcatgcgacagtctcgaatttctgagatttccatggaggtcgcggagcaaggccgagggacaaccatgacccctcccgcggatttgatagagaaatgcgactgtccacttgggtattcaggactgtcctgtgaggcctgcctgcctggcttctatagactgagatctcagccagggggccggacgcccggcccaacattaggtacctgtgtgccgtgtcaatgtaatggacacagttccttatgtgacccagagacgagcatctgtcagaactgtcagcaccatacagccggagacttttgtgagagatgcgctctgggctattatggcatcgtcaaaggtttgcccaacgactgtcagcagtgtgcttgccctctgattagctcaagcaataatttctcccccagctgtgttgccgagggactggacgactaccgctgcacagcatgtccccgcggttacgagggtcagtattgcgagaggtgtgcccccggctacactggatctccagggaaccctggaggtagttgtcaggagtgcgaatgtgacccctatggttcactcccagttccatgtgaccccgtcacggggttctgcacctgtaggcccggcgccaccggtcggaaatgtgacggatgcaaacactggcatgcccgtgaaggctgggaatgcgtcttctgcggagatgaatgtaccggcttgttgctaggtgatcttgcacggctcgaacaaatggtgatgtcaattaatctgactgggcctttgccagctccctataagatgctatacggtttagagaacatgacccaagagctgaagcacctacttagtccgcagcgggcccccgagagactaatccagcttgcagaggggaacctgaatacactggtcactgagatgaatgagttgctcacaagagcaacaaaggtgaccgcggatggtgaacagacggggcaggatgctgaacgcaccaatacaagagctaagagcctcggcgaatttattaaagagcttgccagagacgcagaggccgtcaacgaaaaagcaatcaagctcaatgagacgcttggaaccagagatgaagcattcgagagaaatctcgaaggactccagaaagaaatcgatcaaatgatcaaagagctccgccggaaaaacttggagacgcagaaggagatcgccgaagatgaattggtcgctgccgaagcactgctgaagaaagtaaaaaaactgtttggggagagccgaggggaaaacgaggagatggagaaggatctgagggagaaactggccgattacaagaacaaagtggacgacgcatgggaccttctcagggaggccactgacaagatcagagaggctaataggttgtttgctgtgaatcaaaagaatatgacagcacttgagaaaaagaaagaggccgtggagtcaggtaaaaggcaaattgagaatacgctaaaggaaggaaacgatatcctcgacgaggccaaccggcttgcagacgaaattaattcaattatagactatgtggaagacatacagaccaagctccccccgatgtcagaagaattgaacgataagatcgatgatttgtctcaggagatcaaagacaggaagctcgctgaaaaagtttcacaggccgaatcccacgccgcccaactgaacgatagtagtgctgttctggatggtatcctggatgaggccaaaaatatttctttcaacgcgacagctgcattcaaagcttactccaacattaaagactacatcgacgaggccgaaaaagtggccaaggaagctaaggatcttgcgcatgaggccacgaagttggctactgggccccgcggactcttgaaagaagatgcaaaaggctgcctccagaagtccttcagaattctcaatgaggctaagaaactggcaaacgacgtgaaagagaatgaagatcatctcaacggcctcaaaactaggatcgagaacgccgatgccagaaatggagacctgctgcggactttgaatgatacactcggcaaattgtccgctatccccaacgatacagcagccaagctccaagcggtgaaagataaagcccgtcaggctaacgacacggccaaagacgtgctagctcagatcactgagctgcaccagaatctggatggcctgaaaaagaattacaacaagctggctgactccgttgcgaaaactaatgctgtggtaaaggatcccagcaagaatacagtggccgatgccgacgctacggttaagaacctcgaacaggaggccgacagactcattgacaagctgaagcccattaaggaactcgaggacaacctcaagaaaaacataagtgagatcaaagagttaatcaaccaggctaggaaacaggccaattctataaaggtcagcgtgagttccggcggagactgtataaggacgtacaagcctgaaattaagaaaggaagctataataacatagttgtcaacgttaaaaccgctgtggctgacaacctgctgttttatttagggtccgcgaaattcattgactttctcgcgatcgaaatgcggaagggaaaggtgtcattcttatgggacgtgggatccggagtgggacgagtggaataccccgaccttactatcgatgacagttactggtatagaattgtggcttcaaggacgggtaggaacggcaccatctctgttagggctctggacggacctaaagcttcgattgtacccagtactcaccatagcacaagcccacccggatatactatactagatgtagatgccaatgcaatgctgttcgtgggtgggttgaccggaaagctcaaaaaggccgatgctgtgcgggtgataactttcactggatgtatgggcgaaacctatttcgataataaacccatcggcctttggaattttcgggagaaagaaggcgactgtaaagggtgcacagtgagcccacaggtagaggactctgagggaacaattcagtttgatggcgaagggtatgccctcgtcagcagacccataaggtggtatcccaatatctcaacagtgatgtttaaattcaggacgttctctagttccgctctcctgatgtatctggccacccgagatctccgggatttcatgtctgtggaattgaccgacggccacatcaaagtgtcctacgacttagggagtggaatggcatccgtagtgagtaaccagaatcataacgacgggaagtggaagtctttcacgctgagccgcatccagaaacaggcaaatattagtattgtcgacattgacacgaaccaggaggagaatattgcaacatcttcctctggcaataacttcggcttggatttgaaggcagacgacaaaatttatttcggcgggctacctacccttcggaacctcagtatgaaggccagacccgaggtgaatctgaaaaagtactccggctgccttaaggatatcgagataagccgaacaccatacaacatcctatcctcccccgattatgtaggcgtgactaaagggtgctctctggagaatgtgtatactgtctcattcccaaagcctgggtttgtagagctcagccccgtcccaatcgatgtgggaacagaaatcaacctttcgttttccactaaaaacgaaagcggcatcatcctgcttggatctggcggaactcccgcccctccacggcgcaagcggagacagactgggcaggcctattatgccattcttttgaacagaggtcgattagaagtgcatctcagcacaggggcacggacaatgagaaagatagtcatccgtcccgaacctaacctgttccatgacgggcgcgaacacagcgtccatgtagagcgaaccaggggtatctttacagtacaggttgatgagaataggcgttatatgcagaatctgactgttgaacagccaattgaggtaaagaaattatttgtaggtggagccccaccggagtttcagcccagcccccttcgcaatataccaccctttgagggatgcatctggaacctcgtgattaactcagttcctatggactttgcacgccctgtgtccttcaagaacgctgatatcggccggtgcgcacaccagaagctccgcgaggatgaggatggcgcagcccccgccgaaatagttatacagcctgagccagtgccgacacccgcttttcccacccccacgcccgtcctcactcatggcccctgcgccgcagagtcagagccagccctgctcataggtagcaaacagttcgggctgtctcgaaactctcacattgccatcgcatttgacgacacaaaggtgaagaacaggctcaccattgagctggaagtcagaaccgaagccgaatccgggctgctcttctacatggcgagaatcaaccacgccgactttgcaactgtccagctacggaatggactcccctattttagttatgatctgggatctggtgatacgcacactatgatacccacaaagataaacgacggccaatggcataagatcaaaattatgcgttctaagcaggagggtatcttatacgtggatggagcgtctaataggacgatttctcctaagaaggcagatattctggacgtggtcggcatgctttatgtggggggactgcccataaattacacgactcgacgcatcgggcccgtgacttatagtatagatggctgtgttcggaatctgcacatggcagaggctcctgccgatctggaacagccgacttcctccttccatgtcggtacatgctttgcaaatgctcagcgaggaacgtactttgatggaactggctttgcaaaggccgtaggcggttttaaggtcggcctggacctgcttgtggaattcgagttcaggaccaccacaactacgggtgtccttctgggaatcagttcacagaagatggacggaatgggcattgaaatgatagacgagaaattgatgttccacgtcgacaatggggccgggcggttcactgctgtgtacgatgctggcgtgccgggacacttgtgcgacggtcagtggcacaaagttaccgctaataagattaagcatagaattgagctcaccgtcgacgggaaccaagtggaagctcagtcccctaatcccgccagtacaagtgccgacaccaacgacccggtgtttgtgggagggtttcccgacgacctgaagcaatttggacttactacgagtatccctttccgagggtgcatcaggagcctgaagttaaccaagggcacgggcaagccactggaagtcaattttgctaaagctcttgaactgagaggagtccagccagtatcttgccccgctaactag

SEQ ID NO: 192675 - DNA, 9369 bp, synthetic construct
  misc_feature 1..9369: note = Description of Artificial Sequence: Synthetic coding sequence
  source 1..9369: mol_type = other DNA
atgcccggcgccgccggcgtgctgctgctgctgctgctgagcggcggtttaggtggcgtgcaggcacagaggccccagcaacagcgccagagccaagctcatcagcagcgcggccttttcccagccgtgttgaacctggcatccaacgctctcattaccactaacgctacatgcggggagaagggaccagagatgtactgcaaacttgttgagcacgtaccaggacagccggttaggaacccacaatgccggatatgcaatcagaacagctccaatcctaatcaacgacatcccattaccaacgcgattgacgggaaaaatacatggtggcagtcaccttcaattaaaaacggcatcgaataccattacgtgactataacgctggaccttcagcaagtttttcagatcgcctacgtgattgttaaagcggctaactctccaagacctggtaactggatcctggagcggtccctggatgacgtagagtacaaaccatggcaataccatgccgtgacagacacagagtgcctcactctttataatatctatccgcgcacaggcccacccagttacgcgaaggacgacgaggtcatttgcacaagtttctactcaaagatccatcctcttgagaatggagaaatacacatttcactgattaacggtagacccagcgccgacgacccgagcccagaactgctagagtttacttcggctagatacatccgccttcggtttcagagaatccgcacattaaatgccgatcttatgatgtttgcccacaaggacccacgggaaatcgaccctattgtgaccagacgctactactacagtgtcaaggatatcagcgtcggcggcatgtgtatttgctatggccacgctagagcatgcccactggatcctgcgacaaataagagtcgctgtgagtgcgagcataacacctgtggggacagctgcgaccagtgttgcccaggctttcatcagaagccatggagagcagggaccttcttgaccaagactgagtgtgaggcatgtaactgtcacggaaaagcggaggagtgctattatgatgaaaatgtcgcccggaggaacctctccctcaatattcggggcaaatacatcggaggcggtgtttgtatcaactgcacccaaaacaccgcgggcattaattgtgagacctgtacagacggctttttcagacctaaaggagtctctccaaactaccctcgaccctgccagccctgtcattgcgacccaatcggctcccttaacgaagtgtgcgttaaggatgagaaacatgcccgacgaggattggcgcccggttcatgtcactgcaagaccggtttcggtggcgtcagttgcgaccggtgtgctcgcggatatactggatatcctgactgtaaagcctgcaactgcagtggattgggtagcaagaatgaagacccctgttttggcccttgtatctgcaaagagaatgttgagggcggggattgtagcaggtgtaagtcaggatttttcaatctgcaggaggacaattggaagggttgcgacgagtgcttctgcagcggagtgtcgaatcgttgccagtccagctattggacttacggcaagattcaggatatgtcgggatggtacttgacagaccttcccggacgtatccgcgtcgcaccacagcaggatgatctggattctcctcagcagatctcaatttcaaacgctgaggcaagacaagccctgcctcattcctattactggtctgcacccgccccttatttgggcaacaaacttcctgcagtcggagggcagttaacctttaccattagctacgacctggaggaagaggaagaagatactgagcgggtcctacaactcatgatcatcttggaggggaacgacctgagtatctctacagctcaggatgaggtctacctacatccgtcggaagaacatactaatgtactgcttctgaaagaagagagttttacgatccacggcacacattttcctgtgcggagaaaggaattcatgaccgtgctcgcgaacctgaagagagtcctgctgcagatcacctattctttcggtatggatgccatatttcggctaagctcagtcaacctggagagtgccgtctcataccctacagatggcagcattgctgctgctgtcgaggtttgccaatgccctccaggctacacgggctccagttgtgagtcatgttggccaagacaccgcagggtgaacgggaccattttcggtggcatctgcgagccatgccagtgtttcgggcatgccgagagttgtgacgacgttaccggggaatgcttgaactgcaaagatcatactggaggcccatattgcgataaatgcctccccggattctacggagagcccacaaaggggacatccgaagactgccaaccatgtgcttgccccctcaatatacctagcaacaatttcagtcccacctgtcacctcgatagatcattgggactgatttgcgacggctgccccgtgggatacaccggaccaaggtgcgagcgctgtgctgaaggctactttggtcagccgtctgtcccaggcgggagctgccagccctgtcagtgcaacgataacttggacttttccatacctggctcttgcgactctctgtcaggatcatgcctgatctgtaagccgggaactacaggacgctattgtgagctgtgtgcagacggttatttcggagacgccgtggacgcaaagaattgccagccctgcagatgtaacgctggcgggtctttttccgaggtctgccactctcaaactggtcagtgtgaatgtagggccaatgttcagggccagagatgtgataagtgtaaagccggtaccttcgggctccaatctgctagaggctgcgtcccttgcaattgcaactcctttggttccaagtcatttgattgtgaggaaagcggacagtgctggtgtcagcccggtgtgactgggaagaagtgtgataggtgtgcccatgggtactttaatttccaggagggcggatgtactgcctgtgagtgctctcaccttgggaataactgcgacccaaagactggtagatgcatatgccctcctaacacaattggagaaaagtgttccaaatgcgcaccgaacacgtgggggcacagtatcaccaccggctgtaaggcatgcaactgcagtaccgttgggagtctagattttcagtgcaatgttaacactgggcagtgcaattgccatcccaagtttagcggcgccaaatgtaccgagtgctccaggggtcactggaactatccaagatgcaatctgtgtgattgttttttgccaggcactgatgccaccacttgcgactctgaaaccaagaagtgctcatgctctgaccagaccggacagtgtacctgcaaagtgaacgttgagggcattcactgcgaccgatgtcggcctggaaaatttggcctggacgccaaaaatcccctggggtgcagctcatgttactgcttcgggactaccacccagtgtagtgaggcaaagggtctgattcgaacctgggtcacgctcaaggccgaacagaccatcctgcccttggtagacgaagcgctccaacataccaccaccaaagggattgtcttccagcaccccgaaatcgtggcccatatggatctgatgcgagaagatctccatctggagccattctattggaagctgccagaacagtttgagggaaaaaaactgatggcctacggcggcaaactgaaatatgctatttactttgaggcccgggaggagacaggatttagcacctacaatcctcaggtaatcatccggggtggaacccctacacacgctaggattatagttagacacatggcggcgccgctgattggtcagttgacaaggcatgagatcgaaatgacagaaaaggaatggaagtactacggggatgatccacgagtccatagaacagtaactcgtgaagactttctcgacattttgtacgacatccattatatactgataaaggccacatatggaaattttatgcgtcaatctcgtatctccgagatctcgatggaggtggcagagcagggtaggggcacaacaatgaccccccccgccgacctgattgaaaagtgcgattgccctctgggctacagcggtctgtcctgtgaggcttgtctgcctggcttttatcgccttagatctcagcctggaggccggacacctgggcccacactcggaacctgcgtaccttgccaatgcaatgggcattcttcgctttgtgacccggagaccagtatctgccaaaattgccagcatcatactgctggcgatttttgcgaaaggtgcgccctcggatattacggaatcgtcaaaggactgccaaacgattgccagcagtgtgcatgcccactgatatcatccagcaacaactttagcccctcgtgcgtggccgagggactggatgattatcggtgtacggcgtgcccgagggggtacgaggggcagtactgtgaacgctgcgctccagggtacacaggttctcctggcaatccgggcggtagttgtcaggaatgtgagtgcgacccatatggctcactccccgtgccctgcgatccagtgacggggttttgtacttgccgaccaggcgctaccggccgaaaatgtgacggctgcaagcactggcatgcgcgggaagggtgggagtgtgtattctgcggggatgagtgtacaggactgctgctgggcgacttagccagacttgagcagatggtaatgagcattaatctgaccgggcctctgccagcaccgtacaaaatgctgtacggcctggaaaatatgactcaggaattgaagcatttgctgtctcctcagcgtgctccagaaaggctcatacagctggctgagggaaatttaaacaccttggtgactgagatgaatgaactgcttacgagggcaacaaaggtcaccgcagacggtgagcaaacagggcaggatgcagagcgcactaatactcgtgctaagtccctgggggaattcataaaggagttggcccgggatgcggaggccgtgaacgagaaggcaatcaagcttaatgaaacccttggcacaagagacgaagcgttcgagcggaacctggagggtttacagaaggagatagatcagatgattaaggaacttcggcgcaagaacctcgaaacccagaaagagatagccgaggatgagctggtcgcagctgaagccctgctgaagaaggtgaagaagctgtttggggagtcacggggcgagaatgaagaaatggaaaaggatctgagagaaaagctcgccgactataaaaataaagtcgatgatgcatgggatctgctgagagaagctactgataagatacgcgaggcgaatcgactgttcgctgtgaaccagaagaacatgacagccctggaaaaaaaaaaagaggcagtggagtccggaaaacgccaaatcgagaacacactgaaagagggaaacgatatcctggacgaggctaatagactcgcggacgagattaactcaatcattgattacgtggaagacattcagactaaactgccacccatgtccgaagagctgaatgataagatagacgatctatctcaggagattaaggatcgaaagctggccgaaaaagtgtcacaggccgaatcccacgcagctcaactgaacgactcctccgctgtgctagacggtattttagacgaagccaaaaacatatcattcaacgcaaccgccgcctttaaagcatactcgaacataaaagattacattgacgaggctgagaaggttgccaaggaagcaaaggatctagcacacgaggccaccaagctggccacagggccacgagggttactgaaggaggacgccaaaggctgtctgcagaaaagttttcgcatcctcaatgaagccaaaaaactggccaacgacgttaaggagaatgaggaccacctaaacggactaaaaacaagaatcgagaacgccgatgcccggaacggagatctgctgagaactctcaatgacacccttgggaagctgtccgccatccccaatgataccgccgccaaactgcaggccgtgaaagacaaggctcggcaggcaaatgacacagctaaggatgtgctcgcacagatcacagagctccatcagaatctcgatggactaaagaagaattacaataagctggcagatagcgtggccaaaaccaacgccgtggtaaaggacccttctaaaaataagatagttgctgacgccgatgcaacggtgaaaaatctcgaacaggaggcagaccggttaatcgacaagttgaagccaattaaagagctggaagacaacttgaagaaaaatatctccgagatcaaagaacttataaaccaggccaggaagcaagccaattcgattaaggttagcgtctcctcaggcggggactgcattagaacctacaaacctgaaataaaaaagggctcctacaataatatcgtggtcaatgtcaaaaccgcagtggccgacaatctgctgttttatctgggctcagccaaattcattgatttcctggctattgaaatgagaaagggaaaggtcagctttctttgggacgtcgggtccggtgtgggccgtgtcgaataccctgacctcaccatagacgattcatactggtatcggatcgtggcctctagaacgggtcgcaatggaaccataagcgtgcgggcccttgacgggccaaaggccagcatagttccctccactcatcacagcaccagccctcccgggtataccatcctggacgtagacgccaatgcaatgctatttgtcggcggactgacaggcaagctgaaaaaggccgacgctgtcagggtcatcacctttaccggttgcatgggagaaacatacttcgacaataagcccatagggctgtggaattttcgtgaaaaggagggcgactgcaaggggtgcacggtgtctccgcaggtggaagattccgaaggcacaatccaattcgatggggaaggctatgcccttgtaagccgacctatcagatggtatccgaacattagcactgtgatgttcaaattccgcaccttcagctcctccgccctgctgatgtaccttgcaactagagacctccgggactttatgagcgtggagctaactgatggacatattaaggtaagctatgatcttgggagtggcatggcctccgtcgtatcgaaccagaatcacaacgacggcaagtggaaatcattcactttgagccggatacagaaacaagcaaatattagcattgtggatatcgatactaatcaagaggagaacattgctaccagctcaagtggcaataactttggactggacctgaaggccgacgataaaatctacttcggaggcctccccacccttagaaatctccgcctattcaacaggcccgaagtcaacctgaaaaagtactctggttgtctgaaagacatcgagatctctcgaaccccttacaacattctttcttcacctgactacgtgggggtgaccaagggttgctctttagagaacgtgtatacggtctccttcccaaagcctggtttcgttgaactgtcgcctgtcccgatcgacgtcgggaccgaaatcaacctttctttcagcactaagaacgaaagcggtatcatcctgctgggctccggcggtacacctgctcccccccggcggaagaggcgacagacaggacaggcatactatgctattctgctgaatcgggggcgcttggaagtgcatctctccacaggagcgaggacaatgaggaagatcgttatccgacccgaacctaacttatttcacgatggacgcgagcatagcgtacatgttgagcgtacgaggggcatctttacagtgcaagtggacgagaacaggaggtatatgcaaaatctgaccgtcgaacagcctatcgaagtcaaaaaactcttcgtgggtggagcaccacccgagtttcagccctctcctttgcgcaacattcctccctttgagggttgtatttggaatctggttattaattccgtgcccatggattttgctcgccccgttagctttaaaaatgctgacatcggtagatgtgcacaccagaaattgcgggaggacgaggacggggccgcacctgcagagatcgtgatacagcctgagcccgtacccacccctgcttttcctactccgaccccagtattaacccacggcccatgtgctgccgaatctgaacccgcactcctaatcggaagtaaacagttcggcttgtcgcggaactcccatatcgccattgccttcgacgacacaaaagtaaagaacaggttgacaattgaactggaagtgcgcacggaagcagaatctggcctgctgttctacatggccagaatcaaccacgccgacttcgcaactgttcaactacgcaacggattgccgtattttagttacgaccttgggtcaggtgatactcacaccatgattcccacgaagatcaatgatgggcaatggcacaaaattaaaatcatgcggtctaaacaagagggtatcttgtatgtggatggcgcttcaaaccggaccatttcacccaagaaggccgacattctggacgtcgtggggatgctctacgtgggcggcctgcccataaattacacgacgaggcgcattggacctgtcacttactcaatagatgggtgcgttagaaacttacacatggcggaggccccagctgatctcgagcagcctacatctagctttcacgttggtacatgtttcgctaatgcacagaggggaacctatttcgacggcacaggcttcgctaaggcagtcggcggctttaaggtgggattagatctgctggttgaatttgagttccgcaccacgactactactggagtccttctcggcatatcatcccagaagatggatggcatgggcattgagatgattgatgagaaactgatgttccatgtggacaacggcgcaggcagattcacggctgtgtacgacgccggggttccaggccacctgtgcgacggacagtggcacaaggtaacagccaacaaaatcaagcaccgcatcgagctgactgtggatggtaatcaggtagaggcccagagcccaaaccccgcttccacaagtgccgacaccaatgaccccgtgttcgtcggaggcttccctgacgatttaaaacagttcggattgaccactagtattccatttcgtgggtgtattcgcagtctgaaactgaccaaagggaccgggaagcccctcgaagtgaactttgcaaaagccctggaactacgcggggtgcagccggtctcgtgccctgctaattag

SEQ ID NO: 192676 - DNA, 9369 bp, synthetic construct
  misc_feature 1..9369: note = Description of Artificial Sequence: Synthetic coding sequence
  source 1..9369: mol_type = other DNA
atgcccggcgccgccggcgtgctgctgctgctgctgctgagcggcggcctgggcggggttcaggcgcaaaggccacagcagcagcgtcagagccaagcacatcagcagcgaggtctgttcccagccgttcttaatctggcctctaatgctctgattaccactaatgcaacatgcggagagaagggcccagagatgtattgcaagctcgtcgagcatgtgcctggacagccagtgagaaatccacagtgccgcatctgcaaccagaactcctcaaacccgaatcagcgccatccaattaccaatgcgatagacggaaagaatacctggtggcagagtccctcaatcaagaatgggatcgagtaccactatgtaactatcaccttggaccttcagcaggtgttccagattgcttacgttatagtcaaggcagccaactcgcctagaccaggtaactggattctggaacgttcacttgatgatgtggaatacaagccttggcagtaccacgctgttacagacacagaatgcctgactttgtataatatttatccacgcactggacccccaagttacgccaaagatgacgaggttatttgcacgtcattctatagcaaaatccaccctctggagaatggggagatccatattagtctgattaatggtagaccatcagccgacgatccttctcctgagttacttgagtttacctcagcccgctacatacggttacgcttccaacgcattagaacactgaatgcggacctgatgatgtttgcccacaaggacccacgcgagattgaccctattgtgacccgccgctattactattctgttaaagatatcagtgtggggggaatgtgtatctgctatggccacgcccgcgcatgtccactcgatcccgcaaccaataaatccagatgcgaatgtgaacacaatacttgtggtgatagttgcgatcagtgttgcccagggtttcaccaaaagccctggagggcgggaaccttcctaacaaagaccgaatgtgaagcttgcaattgccacggtaaggctgaagagtgctattatgatgaaaacgtggcaagaaggaatctgagtctgaatatccgcggtaaatatattggtggtggtgtgtgtataaattgcacccagaatactgctggcatcaactgtgagacttgcacggatggcttcttcaggccaaaaggtgtgtcccctaattaccctagaccatgccagccctgccattgtgaccctattggttccctaaatgaagtgtgcgtcaaggacgagaaacatgcacgaagagggctcgcacctgggagctgccattgtaagacgggttttgggggcgtgagctgtgaccgatgtgccaggggatacaccggctaccctgattgcaaggcatgtaactgttcagggctcggtagtaaaaatgaggatccatgctttggtccctgcatttgcaaagagaacgtggagggaggggattgctcgaggtgtaaatcaggctttttcaatcttcaagaggacaactggaaagggtgcgacgaatgcttctgcagtggcgtcagtaatagatgccagagttcgtactggacctatggaaaaatccaagatatgtcaggatggtacctgaccgaccttccaggcagaatccgagtggcccctcagcaggacgatcttgattctccccagcagattagtatctccaatgccgaagctagacaggcgcttcctcacagctactactggagtgcacctgcaccttacctcggaaataagctgcccgctgtcggcgggcaactcacgtttacaatctcttatgacctcgaggaggaggaggaagatactgagcgcgtcttgcagctgatgattatcctcgaagggaatgacctgtctatctcaaccgcccaggatgaagtttacttgcacccatcggaagagcacacgaatgtgcttcttctcaaggaagaaagttttacaattcacggcacgcatttccctgtccgtcggaaggagttcatgaccgtcttggcaaaccttaagagggtgctgttgcagataacctattcctttggaatggacgccattttccggctgtcatcagttaatctggaatcggccgtgtcgtacccaacagatgggagtatcgctgcagctgtcgaagtgtgccagtgtcctccagggtacacgggaagtagctgcgagtcctgttggccacgtcatagacgcgtgaatggtacgatcttcggaggaatctgcgaaccctgtcagtgtttcgggcatgctgagtcttgcgatgacgtcaccggagagtgcctaaattgcaaggatcataccggtggtccgtattgtgataagtgtctgcctggattttacggcgagcctacaaaagggacttccgaggattgccagccctgcgcctgccccctcaatatcccaagcaataacttctctcctacgtgccacctagatcggtctttaggtctgatttgcgatggatgtcccgtaggctacactggcccccgttgcgagcgatgcgcagagggttacttcggacaaccttctgttccaggaggcagctgccaaccatgccagtgcaatgataatctggactttagcattcctggcagctgcgattctctctctggcagttgtctgatatgtaaaccagggactacaggccggtactgcgaattgtgtgcggatggttatttcggagatgcagtggacgcgaaaaactgccagccttgtaggtgtaacgctggcggaagctttagcgaggtctgtcactcccagactgggcagtgcgaatgcagggcgaatgtccaggggcagcggtgtgacaaatgtaaagctggtacttttggtcttcagtccgctcgcggatgtgtcccttgcaactgtaattccttcggtagtaaatcctttgactgcgaggaatcgggtcagtgctggtgccagcctggagtgacaggaaagaaatgtgatagatgcgcccatggatacttcaatttccaagagggggggtgcaccgcttgtgagtgctcccatctaggcaacaactgtgacccaaagaccggacgatgtatctgcccaccaaatacaataggagaaaagtgtagtaaatgcgcccccaacacttggggccacagtatcactacgggatgcaaagcctgtaactgttccaccgtcgggagcctcgactttcagtgtaacgtgaataccgggcagtgcaactgtcacccaaagttttctggagctaagtgtacggagtgcagccgtggtcattggaactaccctaggtgcaacctgtgcgactgctttctcccgggtaccgacgcaacaacatgcgactctgaaactaaaaagtgtagctgctctgaccaaaccggccaatgcacctgcaaggtgaacgtggagggaattcattgtgaccgctgccggcctggcaagttcggacttgacgccaagaatccgctcggttgcagctcgtgctattgcttcggaacgacaacacagtgttcagaagctaaaggactcattaggacttgggtgaccttaaaagccgaacagacgatcctcccgctcgtcgacgaggctctccagcacacaacaactaagggtatagtcttccaacaccctgaaattgtggctcacatggatctgatgcgggaagatctccacttggaaccgttctattggaagttaccggaacagttcgaaggaaagaagctaatggcatatggggggaagctgaagtatgctatatactttgaggcgcgcgaggagacagggttctcaacctacaaccctcaggtcattattagggggggcaccccaacccatgctagaatcattgtgcggcatatggctgcccccctgatcggccagttgacacggcatgaaattgagatgaccgaaaaagagtggaaatactacggcgatgaccccagagtccaccgtacggtcacccgcgaagattttttggacatcttatacgacattcattacattcttatcaaggcaacgtacggcaacttcatgagacaatctcgcatttctgagatttctatggaggtggcagaacaggggcgcggcaccacaatgacaccacctgcagacttaatcgagaagtgtgactgtccattaggctatagtggcttaagttgcgaggcttgcttgcctggattttaccgactgaggtcgcagccgggtggcagaacgcccggccctactctggggacctgtgtgccttgccagtgcaacggccactctagtctgtgcgaccccgaaacctctatttgtcagaattgtcagcaccacaccgcgggagatttctgcgaaaggtgtgccctgggttattacggtattgtgaaaggccttccaaatgattgccagcaatgtgcttgtcctctgatctcaagcagtaataatttttcaccatcctgcgttgccgaggggctagacgactacagatgtactgcctgcccccgaggatatgaaggccaatattgcgagaggtgtgcaccaggttacacaggttcccccggtaatccaggaggatcctgccaggagtgtgagtgtgatccctatgggtctttaccagtcccctgtgaccctgtgacggggttctgcacctgtagacctggggctactggtcggaagtgtgacggttgtaaacactggcatgcgcgggaagggtgggagtgcgtgttttgcggggacgaatgcactgggttactcctgggtgaccttgctcggctggagcagatggtgatgtccatcaatttaaccggacccttgcccgccccatacaaaatgctctacggccttgaaaacatgacacaggaacttaagcatctactctctccccagcgggcgcccgaacgtttgattcagctggccgaaggaaatctgaatactttggtgaccgaaatgaacgaacttctgacaagggccactaaagttacggcggatggagaacagacaggtcaagacgccgaacgcacaaatacaagggccaagtctttaggtgagttcataaaagaactggcgcgcgacgccgaggcagtgaatgagaaggccatcaaattaaacgagactctaggaactagagacgaggccttcgagagaaatctggaaggattacagaaggaaatagaccaaatgattaaggaactgaggagaaaaaatctcgagacccagaaggagatagcagaagacgagctggtggctgcagaggctctgctgaagaaagttaagaagctgttcggcgaatcccgaggggaaaacgaggagatggagaaggatttaagagaaaaactcgctgattacaaaaacaaggtggatgatgcctgggacctgcttagagaagccactgacaagattagggaagcgaacaggctgttcgctgttaatcagaaaaatatgaccgctctggagaagaagaaggaagctgtcgaaagcggtaaaaggcagatcgaaaacaccctaaaagagggtaatgacatcctggatgaggccaacaggctcgccgacgagattaatagtattattgattacgtggaggacattcagaccaaactgcctcccatgtcagaggaactcaatgacaaaatcgacgatttgtcacaggagattaaggaccggaagctggccgaaaaggtgtcacaggccgagagtcacgctgcccagctcaatgattcttccgcggtgctggacggaatactcgatgaggcgaagaatatcagtttcaacgctacggccgcatttaaggcttattccaatatcaaagactacatcgacgaggccgaaaaagtggcaaaggaagcaaaggatctagctcacgaagctaccaagctcgccacgggtcctcgggggttgctgaaggaggacgctaagggctgtctgcagaagtcctttcgtatcctgaatgaggctaagaaactcgccaacgatgtaaaggaaaacgaggaccacttgaatggactgaaaacaaggatcgagaatgcagatgctaggaacggggatctgctgcggacactcaatgacacccttgggaagctctctgccataccaaacgataccgcagcaaagctgcaagctgtgaaggataaggccaggcaggctaacgataccgctaaagacgtgctcgcgcagatcactgagctgcaccagaacctggatggacttaaaaagaattacaataaactcgcggactctgttgcgaaaaccaacgccgtcgtgaaggatcccagtaagaacaaaataattgcggatgccgacgccactgtcaaaaaccttgaacaggaggcggaccgactcattgacaaactcaagcccataaaggagctggaggacaatcttaagaaaaatatttccgagattaaggagctcatcaaccaggccagaaagcaggccaattctattaaggtttcagtttcctccggcggagattgcattcgcacctataagcctgagattaagaagggcagctataataacattgtggtgaatgtgaaaacagccgtagccgacaacttgttattctacctggggtctgcgaagttcattgatttcctcgccatcgagatgcgcaagggcaaagtcagctttctgtgggatgtcgggagcggagtgggaagggtggaataccccgacctcaccattgatgactcttactggtatcggattgtggccagtaggacaggaagaaatggaactatctccgtgcgggctttggatggtccgaaagcctcaattgttcccagcacacaccattcaacctctcctccagggtacacaattcttgacgtagacgcaaacgcaatgctgttcgtcggcggcttgacaggtaaactgaagaaggcagatgctgtacgggttattactttcaccggatgtatgggcgagacgtactttgataacaagccaatcggactctggaacttcagagaaaaagagggggactgtaagggatgtaccgtaagtccacaggtcgaggattctgagggcaccatccagtttgatggggagggctatgcactggtgagcagacctatccgttggtatcccaacattagcaccgttatgttcaagttccgtaccttcagctcttccgcgttactgatgtacctggccaccagagacctcagggatttcatgtctgtcgaactcacagacggtcacattaaggtctcctatgacctcggatctggcatggcctccgtggtgagcaatcagaaccacaatgacgggaaatggaaatcctttacactctcccggattcaaaaacaggccaatatcagcatcgtggacatcgataccaatcaggaagagaatattgcaacctcaagctccgggaacaatttcggactggacctgaaagccgatgataagatttacttcggcggcctccctacactcagaaatctgagtatgaaggccagacctgaagtcaacctgaaaaagtactctggttgtctcaaagatatcgaaatttcccgcaccccatacaacatactgtcttcacccgactatgtaggggtcactaaaggatgtagcttggaaaacgtgtataccgtctccttcccaaaacccggtttcgtggaattgtcccccgtaccaattgacgtgggcaccgagatcaatctctctttttccacaaaaaatgagtccggcattattctgctcggctctgggggcacccccgcacctcctagacggaagcgacggcagactggacaagcctattacgctattctgctgaaccgcggcaggctcgaggtacatctctccaccggagcccgcactatgcgcaagatcgtgatccgaccggaaccgaatctatttcacgatgggcgagaacactcagtgcacgtggaaaggacccggggcatattcaccgtccaggtagacgaaaaccgcagatatatgcagaatctcactgtggaacagcccattgaagttaagaagttgttcgtgggaggcgccccacccgaattccagccatctccactgagaaacatccctccttttgagggatgcatttggaatctcgtgatcaactctgtgcccatggactttgcaagacccgtctctttcaaaaatgccgatatagggaggtgcgcccaccagaaattgcgagaagatgaagatggagccgcgccagccgaaattgtgatccaacctgagccagtgccaacacccgccttccccactcctactcctgtgttgacccatgggccatgcgccgctgagtccgagccagccctgctgatcgggtccaagcagttcggcttgtctcggaacagtcatattgccatagcatttgacgatacaaaggtgaaaaaccggctgaccatcgagcttgaggtgcggaccgaagccgagtccggactgctcttttacatggctaggattaatcatgccgatttcgccactgtgcaacttcggaacggactgccgtattttagctacgacctcggctctggagatactcatacgatgatcccaactaagatcaacgacggccagtggcacaaaattaaaatcatgagaagcaagcaggaggggattctctacgtagacggggcttcaaacagaactattagtccaaagaaggcggatatcttagacgtggtgggtatgctctacgttggaggactgccaataaattacaccacccggcggattgggcctgtgacctatagtatagatggctgcgtgagaaacctccacatggccgaggctcccgccgacctcgagcagccaacctcctccttccatgttgggacttgcttcgccaacgcacagcgaggtacatactttgacggcaccggttttgctaaagccgtgggcgggtttaaagtgggactggacctcttggtggagttcgaatttcggactaccacgactactggggtccttctcggcatctcctcccagaaaatggacggcatgggaatcgagatgatcgatgagaagctgatgttccatgttgacaatggagctggccgcttcacagcagtgtacgacgcgggcgtacctgggcacctgtgtgatggacagtggcataaggtcaccgcgaacaagataaaacacagaattgagcttacggttgatggtaatcaagtcgaagcccagagtcccaatccagcgagcacatcagctgatacaaacgaccctgtgttcgtgggggggttccccgacgacctaaaacagtttggcttgaccacaagtattcctttccggggatgcatcagaagtctgaagctgacaaagggtaccgggaaaccgctggaggtgaactttgctaaggcactcgagctgaggggagtgcagcctgtcagttgtcccgctaattag

SEQ ID NO: 192677 - DNA, 3387 bp, synthetic construct
  misc_feature 1..3387: note = Description of Artificial Sequence: Synthetic coding sequence
  source 1..3387: mol_type = other DNA
aagaagctggccaacgacgtgaaggagaacgaggaccacctgaacggcctcaagactcgcatagagaacgccgacgcacggaacggtgacctgctgcgcaccctcaacgacacactgggtaagctatctgctatcccaaatgacaccgcagccaaacttcaggctgttaaggacaaggccaggcaggccaacgacaccgcaaaagacgtcctcgctcagatcaccgaactccaccagaacttggatggtctgaaaaagaattataacaaactggctgactctgtagccaaaaccaacgccgtggtgaaggatccctctaagaacactgtggcagacgcagatgccactgtgaagaatctggaacaggaagctgacagactgatcgacaaactcaagcctattaaggagctcgaggataatctgaagaaaaatatttccgagattaaggaactaataaaccaggcccggaagcaggccaactctattaaggtctctgtgagcagtggcggcgactgcatacgaacatataagccagagattaagaaaggaagctacaacaacatcgtggttaacgtgaagaccgccgtggccgataaccttttgttctatctgggctcggcgaagtttatcgattttcttgccatcgagatgaggaagggcaaagtatcattcttgtgggacgtggggtccggagtcgggagagtcgaatacccggacctaactatcgacgacagctactggtaccggattgtggctagccgaactggtcgaaacggcactattagcgtgcgcgcactggacggccctaaagctagtatcgtgcctagcacccatcacagcacgtctccaccaggctacacaatcctggatgtcgatgccaatgcgatgctgtttgtgggaggcctcacggggaagttgaaaaaagcagatgccgtccgggtgattacatttaccggatgcatgggtgaaacctacttcgataacaaacctatcggcctatggaactttagagagaaagagggagactgcaagggctgcacagtatcaccccaagtcgaagacagtgaaggcaccatccagttcgacggcgaaggctacgctctcgtatcccgacccattcgctggtatcctaacattagtaccgttatgtttaagttccgcactttctcctccagcgctctgctaatgtatctggccaccagggatctccgcgatttcatgagcgtggaactgaccgacggccacatcaaagtgtcttacgatctcggctccggtatggcctccgtggtatcaaatcagaatcacaacgacggtaagtggaagtccttcaccctgagccgaatccagaaacaggcaaacattagcatagttgacatagataccaatcaggaggagaacattgcaaccagttcctccggaaacaacttcggtctggacttaaaagccgatgacaaaatatacttcgggggattgcccaccctcaggaacctgtcaatgaaggctcgaccagaagtgaacctgaagaaatattctggctgcctgaaggatatcgaaatctctaggaccccctataacatcctctcaagtccagactatgtgggagtgacgaaggggtgttctttggagaatgtctataccgttagttttccgaagcctggatttgtcgaactgagtcctgtcccaatagatgtgggcacagagatcaacctgagttttagtacaaagaacgaaagcggcatcatcctccttgggagcggaggtactccagcccctccacgccggaaacgtcggcagaccggacaggcctattacgccatcctattgaatcgcggaagattagaagtgcaccttagtaccggtgcacggactatgagaaagatcgtcatacggccagaacctaacctctttcatgacgggagggagcatagcgtgcacgtggagagaacgcggggcatcttcacagtgcaggtggatgaaaatcgcaggtatatgcagaatctcaccgtagagcaacctattgaggtcaagaagctatttgtcggcggtgcgccccccgaattccagccaagtcccctgcggaacatcccgccttttgaagggtgtatttggaatctggttattaatagtgtacccatggactttgcacggcctgtcagctttaagaacgctgatatcggtagatgcgcgcaccaaaagctgcgcgaggacgaggatggagccgcccccgccgagatcgtgatccagcccgaacctgttccaacccccgcctttccaacacccacccctgtccttactcacgggccctgcgcagctgaatctgagccagctcttctaatcggcagcaaacagtttggactgagtcgaaacagccatattgctatagctttcgatgataccaaagttaagaaccgcttgaccatcgagttagaagttagaacagaagcggagtccggcctgttattttacatggctcgcattaatcacgccgattttgcaaccgtgcagctgaggaacggtctgccttatttcagctacgatcttggatctggcgacacacatacaatgattcccactaagattaatgacgggcagtggcacaagatcaaaattatgcgaagtaagcaggaaggcattctctacgtggatggagcctctaatcggacaattagccctaagaaggccgacattctcgacgtggtcggcatgttatatgtgggcgggctacctattaactataccacaagacgaatcggtccagtgacctacagcattgacggctgtgtacgcaacttgcatatggccgaggcccctgcagacctggaacagccgacttcgtctttccacgtggggacctgtttcgccaatgcccagcgggggacttatttcgatggtaccgggtttgcaaaagccgttggaggttttaaagtgggtctcgatctgctagtggagtttgaattccggacgaccactacgaccggtgtgctgctgggaatctccagccagaagatggacgggatgggaatcgaaatgattgatgagaaacttatgtttcacgtagacaatggcgccggaaggtttacagctgtctatgatgccggcgtacccgggcacttatgcgatggccagtggcataaagtgactgccaataagataaagcatcggatagagcttaccgtagatggaaaccaagtagaggctcagagtcctaatcccgcctccacctccgcagataccaatgacccggtgtttgtgggaggcttccccgatgatctaaagcagtttggtctaaccacttctatcccattccgcgggtgtatccgcagcctgaagcttaccaagggaacagcttcacactggaggctgatattacctagaccctggaactag

SEQ ID NO: 192678 - DNA, 5175 bp, synthetic construct
  misc_feature 1..5175: note = Description of Artificial Sequence: Synthetic coding sequence
  source 1..5175: mol_type = other DNA
atgccccccgccgtgcggcggagcgcctgcagcatgggctggctgtggatatttggagcagccttgggtcagtgtctggggtattcgagccagcagcagcgggtgccattccttcagccccccggccagagccagctgcaggcctcttacgtggagtttcgacccagccaaggatgtagcccaggttactaccgggatcacaaaggcctatataccggcagatgcgtaccatgcaactgcaatggacattccaaccaatgtcaggatggatcggggatctgtgtgaattgtcagcataataccgctggcgagcactgtgagagatgccaggagggctactacggcaatgccgtgcacggatcttgtagggcctgcccttgccctcacactaacagtttcgctactggctgcgtcgttaacgggggagatgtgcgctgctcatgcaaggcaggatacaccggcacacagtgcgagcggtgcgctcccggttacttcggcaacccccaaaaattcggtggaagctgccagccctgctcgtgtaacagcaatggccagctgggtagctgtcaccctctgaccggggactgcatcaaccaggaacctaaagactcgagccctgccgaggagtgtgatgactgcgactcctgcgtgatgaccctactcaatgacttggcaacaatgggcgaacagcttcggctggtcaaaagccagctccagggactctcggcttcagcggggctcctggaacagatgcgacatatggagactcaagcgaaagacttaagaaatcagttgctgaactatagaagcgcaatctcaaatcatggatccaagatagagggcctcgaacgggaattgacggatttgaatcaagaatttgagaccctccaggagaaagcgcaggtaaactccagaaaggctcaaactcttaacaacaacgtgaatagggccacccagtcagcaaaagaactggatgttaagattaagaatgttatcagaaacgtgcacatcctgctgaaacagatctctggaactgacggtgaaggaaataatgtcccatccggtgattttagccgggagtgggcggaagcgcagcggatgatgagggaactcaggaatcgaaatttcggcaaacatctgcgggaagccgaggcagataagcgcgagtcccagctcctgctaaatagaatccgcacttggcagaaaacacaccaaggtgaaaacaatggacttgcaaatagcatccgagattcactgaatgaatatgaagcgaagctctccgaccttagagcaaggctgcaggaggcagccgcccaggccaaacaggctaacggcctaaaccaggagaacgagcgagccttaggagccattcagagacaggtgaaagagataaactccctgcagagcgattttacaaagtacttaaccaccgccgactcgagcttgctccagacaaatatcgctcttcaacttatggagaaatcccagaaggagtacgagaagcttgccgcttccctcaatgaagcccgtcaagaactgtctgacaaagtgcgggagctcagtagaagtgccggcaaaacttcgttggtggaagaagccgagaagcatgctcggagcttgcaggagcttgctaagcaacttgaggagattaaacgtaatgcaagcggggacgagctagtcagatgtgccgtggatgctgcaacggcctatgaaaatatcctgaatgcgatcaaagcagcagaggacgctgccaatcgcgctgcatctgcctcggaaagcgctctgcaaactgtcatcaaggaggatttgcctaggaaagctaaaaccctgtccagcaatagcgacaaactactcaacgaagccaagatgacccagaagaaactgaagcaagaggtctctcccgctcttaataacctacagcagaccctgaatatcgtgaccgtgcaaaaagaagtgatcgatacaaatctaaccactctaagagatggcttgcatggaatccagcgcggcgatatcgatgctatgatctctagcgcgaaatcaatggtacggaaagcaaacgatataacagacgaagtcctggatggactaaatcccattcagactgatgtggagcggatcaaagacacatatggacgaacccagaacgaggatttcaaaaaggcactgaccgatgcggacaattctgtaaacaagctaacaaataaactgcccgatctatggcgcaagatagagagcatcaatcagcagcttttacctctgggaaacatcagcgacaatatggaccgaatcagagagctcattcagcaggcccgagatgctgcaagcaaagttgctgtgcccatgcggtttaacggaaagtcaggagtggaggtccggctgcctaatgatttggaggacttgaaaggatacactagcctgagtctgtttttgcagagaccgaactcgagagaaaacggcgggactgaaaacatgttcgtgatgtacttaggcaacaaggacgcctcccgcgactacatcggaatggctgtggtggacgggcaacttacatgcgtatacaatctcggtgaccgggaggctgagctgcaggtggaccagattttaacaaaaagcgagactaaagaagccgtcatggaccgggtaaagtttcagaggatctaccagttcgccagattgaactatacaaagggcgccacgtcatccaaaccagaaaccccgggcgtgtacgatatggacggcagaaactctaacactctgctgaatctcgaccctgaaaacgtagtcttttacgtaggaggctatccccccgactttaaactgccctcaagattgagcttccctccgtataaggggtgtatcgagctggatgacctgaacgaaaacgtgctgagcctctataatttcaaaaagacgttcaaccttaacactactgaagtagaaccctgtcggcggcggaaggaggagtcagacaaaaattacttcgagggaacaggctatgcgcgggttccaacccaaccccatgccccaatcccgacattcggccagaccattcagacgactgtggaccggggcctgctattctttgccgaaaatggcgatagattcatctctctaaacatcgaggacggaaaactgatggtgaggtacaaactgaactcagaacttcccaaagagcggggagttggagatgccataaataatggcagagaccacagtatccagatcaagattggcaaattacagaaaaggatgtggataaacgtggatgttcagaatactatcatcgacggggaggtatttgatttttccacgtactatctgggcgggattccgatcgccatccgagagaggtttaatatctcaactcccgctttccgggggtgcatgaagaacctgaaaaagaccagcggagtcgtgaggctcaacgatactgttggagtgactaagaagtgcagcgaagactggaaattggtccgctccgccagtttttccagggggggacagctgtcatttaccgatttaggactacctccgaccgaccacctccaggcctcttttggcttccagacgtttcagcctagcggcatcttattggatcaccagacttggacccgcaatttgcaagtgactttagaggatggttatatcgagctgagtaccagcgactcaggatctcctatctttaaaagtccccagacctacatggatggacttcttcattatgtctcagtgatttctgacaacagcgggcttaggctgcttattgacgaccaactgctccggaattcgaagcgcctgaagcatataagctcaagcaggcagtccctgcggttgggcggcagcaactttgaggggtgtatatccaatgtatttgtacaacgactgtccctgtccccggaagtcctggacttgaccagtaatagcctcaaacgcgatgtgtcccttggcggatgcagcctcaacaaacctccttttttgatgttacttaaaggctctacacgattcaacaaaacaaagacctttagaatcaatcagttactgcaagatacccctgtggcctccccgagatctgtgaaagtgtggcaggatgcctgttcgccgctaccaaaaacccaggccaatcatggggctcttcagttcggtgatatccccacctcacacttgcttttcaaacttccccaggagctgcttaagcccaggagccagtttgctgttgatatgcagacaacaagttccagggggctggtgttccacaccgggactaagaatagcttcatggcgctttacctcagtaagggcaggcttgtgtttgccctgggtacagacggtaagaaactgcgaatcaagagcaaagagaagtgtaacgatggaaagtggcatacagtcgtctttggccacgacggagaaaaggggagattagtcgttgacggactgcgagctagagaggggagtttacccggaaacagtaccattagtataagagcaccggtttacctgggttctcctcccagtgggaaacctaaatcactccctaccaattccttcgttggctgcctcaaaaacttccaattagattctaaacctctctataccccatcatctagctttggggtatcctcctgcctcggaggccccctggagaaaggaatatacttctctgaggagggaggacatgtagttttagcccacagcgtcctgctgggacctgagttcaaactcgtgttcagcattcggcctcgctcgctgaccggcatcctgattcatatcggttctcagcctggtaaacatctatgcgtgtatctcgaagccgggaaagtgactgcttcaatggacagtggcgcaggcgggacttcgacctccgttacaccaaaacaatcactttgtgacggtcagtggcactcagttgcggtgaccattaagcaacacattctccacctggagctggacaccgacagttcatacacagcagggcagatcccattcccaccagccagcacccaagagccgctccacctgggcggggcgcccgcaaacctgacaaccttaagaattcctgtgtggaagagcttttttggttgcctgcggaacattcatgttaaccatattccagtcccagtgaccgaggccttggaggtacaggggcctgtgagtctgaacggttgccccgaccagtag

SEQ ID NO: 192679 - DNA, 10002 bp, synthetic construct
  misc_feature 1..10002: note = Description of Artificial Sequence: Synthetic coding sequence
  source 1..10002: mol_type = other DNA
atggccgccgccgcccggccccggggccgggccctgggccccgtgctcccaccgactccgctgctgctgttggtcctgagagtgttacccgcttgcggagcaacggcccgcgaccccggggcagctgcgggactgtcactgcacccgacgtacttcaatttggccgaagcagccagaatttgggccaccgctacgtgtggcgagcgtggtcccggggagggtcgaccgcagccagaactgtattgtaaattggtcggtgggcccactgccccggggtctgggcatacaatccagggtcaattctgcgactattgcaacagcgaagacccccgtaaggcccaccctgttaccaacgctatagatgggtcagaacgctggtggcagtcccctccactctcgagtgggactcagtacaatcgggtgaatctcaccttagacctcggacaactgtttcatgttgcttacatcttgataaagttcgctaatagcccgcggcctgatctatgggtcctggaaaggtctgtggactttggaagcacttatagcccctggcagtattttgctcactctaaggtagattgtctgaaagagttcgggcgggaagccaatatggctgttactagggacgatgacgtcctgtgtgttaccgaatatagtcggattgtgcctctcgagaacggagaggttgtggtctcgcttatcaacggtcggcccggggcaaagaacttcacattctcgcataccttgcgcgaattcacaaaagctaccaatataaggcttcgctttctgcggacaaacaccttgctggggcacctgatttcaaaggcccagagagatcccacggtgacacggcgctattattacagcatcaaggatatcagcatcgggggacaatgcgtgtgtaatgggcacgctgaggtttgcaatattaacaacccagagaagctgtttcggtgtgagtgccagcaccacacctgcggagagacttgtgacaggtgctgtacaggctacaaccagaggaggtggaggccagccgcttgggagcagagccacgagtgcgaggcctgcaattgtcacggccacgcgagcaattgttactacgatcctgacgttgagcggcagcaagcctccctgaatacccagggtatatacgccggaggaggagtgtgtatcaattgtcagcataatacagccggggtaaattgtgagcagtgcgccaagggatactatcgtccatacggggtccccgtcgacgctcccgacggctgtattccttgcagttgcgatcctgaacatgctgatggatgcgaacaaggttctgggcgttgccattgcaaacccaactttcacggcgacaactgcgagaaatgcgctattgggtattacaactttccattttgcctgcggatccccattttcccagtgagcactccctccagcgaggaccccgtcgccggtgacattaagggatgtgattgcaatttggaaggagtgctgccagaaatctgtgatgcccacggccggtgcttatgtcgccctggggtagagggaccacggtgcgatacgtgtcgttccggcttctacagctttcccatctgccaggcttgctggtgtagtgcacttggcagttatcaaatgccttgctcctcagtcacagggcagtgtgaatgcagacctggcgtgacaggccagagatgcgatcgctgcctgagtggagcttacgatttccctcactgccagggttcgtcgtccgcctgtgaccctgccggaacaattaactcaaacttgggttattgccaatgtaagctgcatgttgaaggccccacttgctccaggtgcaaattattgtactggaatttggataaagaaaatccatcaggctgttcagagtgcaagtgtcacaaagccgggacagtttctgggactggagagtgcaggcagggagatggagactgccactgcaagtcgcatgtaggcggagattcttgcgacacatgtgaagacggctactttgcactggagaagagtaactattttgggtgccaaggctgccaatgtgatataggaggagccctctcaagcatgtgctctgggccctccggcgtgtgccagtgtcgggaacacgtagtggggaaagtttgccagcgccctgagaataattattattttccggacctgcatcatatgaagtacgagattgaggatggatctacccccaatgggagggacctcaggttcgggttcgatcctctagcatttccagagtttagttggagaggctatgcgcaaatgaccagcgtgcagaacgacgtccgcatcaccctgaacgtcggtaagtcctctggatcgctgttccgggttatattgcgatacgtcaaccccgggactgaggcggtgagtgggcacataacaatttacccttcatggggtgctgcgcaaagcaaggaaataatcttccttccctcaaaggaaccagctttcgtgacagtgccaggtaacggctttgccgatccgtttagcattaccccaggtatctgggtggcctgtatcaaggctgagggcgtcttactggactacctggtgctgctgccacgggactactacgaggcgagtgtgttgcaattgcctgtgactgagccttgtgcatatgccgggcccccccaggaaaactgcctcttataccagcatctgcccgtcacacgattcccatgtacactggcttgtgaagcgcggcatttcctgctggacggagagccccggccagttgccgtccgtcaacctacccccgctcaccctgtgatggtcgacctgtcggggcgcgaagtcgagctgcacctgcggctaagaatcccccaggtgggacattacgttgtggtagtggagtattctacagaggcggcacaactgtttgtcgtggatgttaacgtgaagtccagcggctcagttctggcaggccaggtcaatatctactcttgtaattactctgttctgtgcaggtccgctgtgatcgatcatatgtcccgcatcgccatgtacgagctccttgcagatgccgatatccagctcaaaggacatatggcccgatttcttctgcatcaggtttgcatcatcccaatcgaggagttttcggcggaatacgtccgaccgcaagtgcactgtatagcctcatatggcaggtttgtgaaccagtcggcaacctgtgtctctctggcacacgaaactccgcccactgctctgatcctcgatgtgctcagtgggaggccttttccgcatctgccccagcagagtagcccttccgtcgacgttcttcccggggttaccctgaaagcccctcaaaatcaggtcacactacggggccgggtgccacatctgggtcggtacgtcttcgtgattcatttttaccaagccgctcacccaactttccctgctcaggtgagcgtggatggggggtggccccgagctggaagttttcacgctagcttttgtcctcatgtgctgggctgtagggatcaagtcattgcggagggacaaatagaattcgatatttctgaacccgaagtcgcagccaccgtcaaggttcccgaaggtaagtctctcgtcctcgttcgtgtcctggtcgttcccgcggagaattacgactaccaaattctacacaaaaagagtatggataaaagcctagaattcattactaattgtggcaaaaattcattttacctggaccctcagacggcctccagattttgtaagaacagtgctcgttcattagtggcattctaccataagggagcactgccatgcgagtgccaccctaccggcgccaccggaccacactgtagcccggaaggcgggcagtgcccctgccaaccaaatgtgattggccgtcagtgcacgagatgcgccacaggacattatggattccccaggtgcaaaccctgctcatgcggacgcaggctgtgtgaggaaatgactggccagtgtaggtgcccgccaagaaccgtccggccacagtgcgaagtgtgtgaaacacactctttcagcttccacccaatggccgggtgtgagggatgcaactgttctcggcgcggtaccattgaggcggcaatgcctgaatgcgacagagattcagggcaatgccgttgcaagccacgtatcacaggtcgccaatgtgaccggtgcgccagcggtttctatagattccctgagtgcgttccatgcaactgtaatagggatggtacagaacctggagtttgcgacccaggaaccggcgcgtgtttgtgtaaggaaaatgtcgaagggaccgaatgtaatgtctgtcgcgaaggcagttttcatctggaccccgccaacttgaagggttgcacatcatgcttctgcttcggggttaataatcaatgtcactcatcccacaaaagaaggactaaattcgtggacatgctcggatggcacctggagaccgccgacagagtagatattcccgtatcgtttaatccagggtcaaacagcatggtggccgatcttcaagaattgccagccacaatacattcagcgtcttgggtggcccccacgtcatatttaggggataaggtctccagctacggggggtaccttacgtaccaggccaagtcattcgggctgcctggggatatggtactactggagaagaaaccagatgtgcaacttactgggcaacacatgagcatcatttacgaggagaccaacacacccaggccagataggctgcaccatggccgggttcatgtggtggagggaaacttccgccatgcctcatcccgggcccctgtctctcgggaggaactgatgacggtgctgtcccggctggccgacgtccgtattcaaggtttatatttcacagaaacacaaaggctgactctgtcggaggtcggactggaagaagcctcagacactggatccggcagaatagctttagccgttgaaatttgtgcctgtccgcccgcatacgccggggactcctgccaaggttgcagcccagggtactatagggaccataagggtctgtacacagggcggtgcgtaccctgcaattgcaatggacactctaatcaatgccaggacggatcaggcatctgtgtgaactgtcagcataataccgcaggcgaacactgtgaacggtgccaagaggggtattacggtaacgctgtgcacggctcatgtagagcctgtccatgcccgcacaccaacagtttcgcgacagggtgtgtggtaaatgggggcgacgtgcggtgtagctgcaaagccggctacacaggcacccagtgcgaacgctgtgccccagggtacttcgggaacccccagaaatttggagggagttgccaaccttgctcatgtaactctaacgggcaattagggtcctgccatcctcttacaggcgactgcataaaccaggagccaaaggattcgagccctgcagaggagtgcgacgactgcgacagctgtgtcatgacactcctgaatgatcttgcaacaatgggagaacagctgcgtctcgtgaagtcccagctgcagggactgtctgcatcagcgggacttctcgagcaaatgaggcacatggagacccaggccaaagaccttaggaatcagttgttgaactatagaagcgcgatctcgaaccatggctccaagatcgaaggactcgagagagagttgacggaccttaaccaggagttcgagactctccaggagaaagcccaggtgaattcccgcaaggcccagaccctgaataataatgttaaccgggcaactcagtcggccaaggaacttgacgttaaaattaagaatgtgattaggaacgtccacatccttctgaaacagatcagcgggactgatggtgaaggcaataacgtccctagtggtgactttagccgtgaatgggcagaggcccaaaggatgatgagagaactcagaaaccggaatttcgggaagcatctgcgcgaagccgaagccgacaagcgcgaatcacagctgctgctcaatagaattagaacatggcagaaaacgcaccagggcgagaacaacggcctcgccaattcaatccgcgactcgttaaatgagtacgaggcaaagctgtctgatttaagagctcgattgcaggaggcggcagctcaggccaagcaggccaacgggttgaatcaggaaaatgagcgcgcacttggagccatccagcgccaggttaaagagataaacagcctgcaatccgacttcaccaaataccttaccacggcggactcaagccttctgcagaccaacattgccctacaacttatggaaaaaagtcaaaaagagtatgagaaattggccgcatctctgaacgaggcccgacaggagctctcggacaaagttagggaactttcacggagtgccggtaagactagccttgtagaggaggctgagaagcacgcccgcagcctgcaggaattggcgaagcagctggaagagataaagcggaacgctagcggggatgaattagttagatgtgcagtcgatgctgcgactgcgtacgagaatattctgaacgctatcaaagcggccgaggacgccgccaatcgagctgcgtcggcttctgagagcgccttacagaccgtcattaaggaagatctccctaggaaagctaagaccttgagtagtaactcagataagcttcttaatgaggcaaagatgacccagaagaaattaaaacaagaggtgagtccagctttaaacaacttacagcagactttgaacatcgtgacggtgcagaaagaagtgatagataccaacctgacaaccctcagggacggtctgcacggcatccagaggggcgatattgacgcaatgatcagttctgctaaatctatggtgaggaaagccaatgacataacagatgaggttctcgacggtctgaatcctatccagacagacgttgaaaggataaaagatacctatggtcgcactcagaacgaagatttcaagaaagcactgactgacgctgataacagcgtgaacaaattgacgaacaaactcccagacctttggcggaagattgagagtatcaatcagcagctgctccctctcggaaatatatccgataacatggataggatccgcgagctgatccagcaggccagggatgccgcttctaaggttgcagtgcctatgaggtttaacgggaaatctggcgtggaggtccgcctgccaaacgatttggaagatttgaagggttatactagtctctctttgttccttcagaggcctaatagtagggaaaatggaggcaccgagaacatgttcgtgatgtacctcgggaacaaggatgcaagcagggattatattggcatggccgtggtggacggtcaactcacatgcgtgtataatttgggcgatcgagaggctgagctccaagtggatcagattctcactaagtctgaaaccaaggaggccgtgatggacagagtgaagttccagcggatataccaattcgcccgcctcaactacaccaaaggcgcgacctcctcaaagcctgagacaccaggggtgtacgatatggacggaaggaacagtaatacactgttgaacttggaccctgagaacgttgtgttttacgtgggaggataccctccggactttaagctgccctcacggttatccttcccgccctacaagggttgtatcgaactggacgatctcaatgagaatgtgttgtccctctataatttcaagaaaacatttaacctgaacacaactgaggtggagccatgccgacgcagaaaggaggaatcagacaaaaactacttcgagggcaccggatacgctcgtgtgcccacccagccccatgcccctatcccgaccttcggccagaccatccaaacaactgtggatcgtgggctgttgttctttgctgagaacggtgacaggttcatctcacttaacatcgaggatggcaagttaatggtgcggtataagctgaattcagagttgcccaaggagcggggcgtcggagatgcgatcaataacgggagagaccatagcattcaaattaagatcggcaagctacagaaaaggatgtggattaacgttgacgtccaaaatacaatcattgacggcgaggtctttgacttttctacctattatctgggaggaattcccattgccatccgggagcggttcaatattagcacccctgcatttaggggctgcatgaagaatctgaaaaagacgagcggagtcgtgagactaaatgatacggtcggggttaccaagaagtgctccgaagactggaagctagttcgctcagccagtttctcacggggagggcagttgtcattcacagatctgggcctgcctcccacggaccacttacaggcgtcctttggattccagacctttcagccgagcggaatcctgttggaccatcagacatggaccagaaatcttcaggtcactcttgaggacggttatattgaactgtctactagcgatagcgggtcaccaatcttcaagtctccccagacttacatggatggactactccactacgtttcggtaattagcgacaacagcgggctgcgcttgctgatagatgaccagctgttgaggaacagtaagaggttaaagcacatctctagcagccgacagagcctacgcctgggcggttctaacttcgagggctgcatttctaacgtcttcgttcaaaggctgtctcttagccccgaggttttagacctgacttcaaatagtttgaaaagggacgtgtcactcggcggttgctccttgaacaagccccctttcctgatgctgctcaaagggtccactagattcaacaagaccaaaactttcagaataaaccagcttctacaggacactccggtggcctccccacgttccgtgaaggtttggcaggacgcctgcagtcctcttcccaaaactcaagccaaccacggtgccttgcagtttggagatatccctacctcacacctcctctttaagttgccgcaggagctgctgaaaccaagaagtcagtttgccgtggatatgcagaccacatctagtaggggcctggtattccatacaggcactaaaaatagctttatggcgttatatctctctaagggcaggctcgttttcgctctgggcactgacggtaagaagctgagaatcaagtccaaggaaaagtgcaatgacgggaagtggcacaccgtcgtgtttggccatgatggggagaagggcagactggttgtggacggcctgcgagcacgggaggggagtctccctggaaactcaaccatttctattagggccccggtatacctggggtccccacccagcgggaaacctaaatcactgccaaccaactccttcgtgggctgcctgaagaacttccaattagattcgaagcccttgtacactccttcaagtagcttcggcgtaagcagctgtctgggaggccctcttgagaaaggcatttatttctctgaggaaggaggacacgtggtactggctcattcagtcctgttgggccccgagttcaaactggtgttttccatccgaccccgttccctgaccggaatcctgattcatatcgggtctcagcccggcaagcacctatgcgtgtaccttgaggccggaaaggttaccgcctccatggacagcggggctggagggacaagtacctccgttactcccaaacagagcctatgtgatggccagtggcattctgtggctgtgactataaaacaacatatcctgcacttggaactagacacagattcctcctatactgcaggccagatcccatttccaccggcctccactcaggaacccctacatctgggcggtgcacctgccaacctgaccaccctgcggatccccgtatggaagtcgtttttcggatgtctgaggaatatccacgttaatcacatccccgtcccagtaactgaagccctggaggtgcaaggccctgtgtcgctgaatggatgcccggatcagtag

SEQ ID NO: 192680 - DNA, 9834 bp, synthetic construct
  misc_feature 1..9834: note = Description of Artificial Sequence: Synthetic coding sequence
  source 1..9834: mol_type = other DNA
atggccgccgccgcccggccccggggccgggccctgggccccgtgctgcctcccacacctttgctattgctcgtccttcgcgtgcttcccgcctgtggcgccacagcccgcgatccaggagctgctgctggtttgtcactccaccctacgtatttcaatctcgcagaggcagctaggatctgggccacggctacatgcggtgaacgaggacccggtgagggccgtccccaaccggaattatactgcaagctcgttggcgggccaacagcgcctggctcaggccacacgattcaaggacagttctgtgactattgcaactctgaagatccccgcaaagcgcacccggtgactaatgcaatcgatggttcggaaagatggtggcaatctccccctctgtctagcgggacacagtacaaccgggtgaatctgactcttgatttgggtcagctgtttcatgtcgcctacattctgatcaaattcgccaattctccacgccccgacctgtgggtgctcgaaagaagcgtggacttcggttctacatacagcccctggcagtattttgcccactcaaaagtggattgcctcaaggagttcgggagggaggccaacatggccgtgacaagagacgacgatgtgttgtgcgtgactgaatacagccgcatcgtgccactggaaaatggcgaagtggtggtgtcgttgatcaacggacggcctggcgcaaaaaacttcactttctcacacacactacgcgaatttacgaaggcaactaacatacggctgcgctttctgagaaccaacaccctactgggccacctgatttccaaagcacagagagaccctaccgtcacacgccgctactactacagcatcaaggacatctccatcggaggtcagtgtgtttgcaacggccatgccgaggtttgcaacatcaacaatcctgagaagcttttcagatgtgagtgtcagcatcacacatgcggggagacctgtgaccggtgctgcactggatataaccaaagacgttggcggcccgccgcttgggaacaatctcatgaatgcgaggcctgtaactgccatggccatgcaagtaactgctattacgacccagacgtggaacgacagcaggcatccttaaatacccaaggtatctatgctggtggcggggtttgtattaactgtcagcataacactgcaggagtaaactgcgaacagtgcgcaaagggatactatcgaccttacggggttcctgtagacgcccctgacggatgtatcccttgcagctgtgatcccgagcatgcggatggatgcgagcaggggtcggggagatgccattgtaagcctaactttcacggggataactgtgaaaagtgtgcaatagggtactacaattttccgttctgtctaagaatccccatcttccccgtgtccacgccctcttcggaggatccagtagctggcgacatcaaaggttgcgattgtaatctggaaggcgtcctgcccgaaatctgcgatgcccatggccgatgcctgtgcagacctggggtcgaggggccgaggtgtgatacttgtcgatctggcttctatagttttccgatttgccaggcctgctggtgttctgccttgggaagttatcagatgccatgcagctctgtgaccggccagtgtgaatgtagaccaggcgtgacgggccagcgctgcgacaggtgcttgtcaggagcatacgacttccctcattgccagggctcatcctcagcctgtgatcctgcaggcaccattaactctaatttagggtattgccagtgcaaacttcacgtcgagggccctacctgctcccgctgcaagcttttgtactggaatctcgacaaggaaaacccatcaggctgctcagagtgtaagtgccataaggcaggaaccgtgagtggcactggtgagtgcagacagggcgacggagactgtcattgtaaatctcacgtgggcggtgacagctgtgacacctgcgaagacgggtattttgctcttgagaaatcaaattattttggttgccagggatgtcaatgcgatatcggaggtgccctgagcagtatgtgttctgggccgtctggcgtttgccagtgtcgcgagcatgttgtcgggaaggtgtgccagagaccggagaacaactactatttcccagatctgcaccatatgaaatatgagattgaggacgggagcacaccaaacggtagagacctgcgtttcggattcgatcccttggcttttccagaattcagttggagggggtacgcccaaatgaccagcgtgcagaacgacgtgcgaatcactctgaacgtgggcaaatcttcagggtcactctttagggttattctcagatacgtcaaccccggcaccgaggctgtgagcgggcacattaccatctatccaagttggggcgcagcacagagtaaagagatcattttcctaccatcgaaggagccagcgttcgtaaccgtccccgggaatggattcgccgacccattcagtatcacaccaggaatctgggtggcatgcatcaaagcagagggcgttctactcgactacttagtgcttctgccccgcgattactatgaggcctctgtgcttcagctgccagtcaccgagccatgtgcctacgcgggcccccctcaggagaattgtctgctgtaccagcatttgcctgtcacccgatttccctgcaccctggcatgcgaggcacggcactttctcctcgatggcgagccgcgccccgtcgctgtgagacaacctacacccgcgcaccctgtcatggtggacttgagcgggcgtgaggtagagttacacctcaggctacgaatacctcaggtgggccactacgtggttgtggtggagtatagtacagaggccgcccagctgttcgtggtggatgtgaacgtgaaatcttcggggtcagtgttagcgggacaggtgaatatctactcctgcaattatagtgtgctgtgccggagtgccgtcattgatcatatgagccgaatcgcaatgtacgagttgctggctgacgctgatattcagttgaaaggacacatggcacgatttcttctccaccaggtctgcatcattcctattgaggaattttctgccgaatacgtgaggccacaggtccactgtatcgcatcttacggcaggtttgtgaatcagtcagctacctgtgtgagcctagctcacgagacgccccccacagcgctgattcttgacgtgctgagcggtcgcccgtttccccacctcccgcagcaaagttcccctagcgttgacgtcctgcccggggtgacactgaaggcacctcagaatcaggtgactttacggggccgggtcccccacctcggccggtacgtattcgtgattcacttctaccaggctgcacatccaaccttcccagcacaggtgagcgtggacggcgggtggccaagggcgggctcgttccatgccagcttctgcccacatgttctgggttgtagagaccaagtaatcgcagagggtcagatcgagttcgatatctctgaacctgaagtagccgctacagtgaaagtaccagagggcaaaagtctggtgctggtgagagtgctggttgtacccgccgaaaactacgactatcagatcctccataaaaagagcatggacaagagccttgagttcataaccaactgcggaaaaaatagcttctatctcgacccgcagacagcctcaagattttgtaagaatagcgctcgctctctggtggcattttatcacaagggagccctgccgtgcgaatgccacccgacaggcgccacaggtccccactgctctccagagggtggccagtgcccctgccagcccaacgttatcggcaggcagtgcacacggtgtgctacaggacactatggtttccctcgatgtaagccttgttcttgcggaaggagactgtgtgaggaaatgaccggtcagtgcaggtgtccgcctcggactgtgcggccccagtgcgaggtgtgtgagactcactcattttcatttcaccccatggccggatgtgaaggctgcaattgttcacgtaggggcacaatcgaggccgccatgcctgaatgcgatagagattcgggtcagtgccgttgtaaacccagaatcacaggcagacagtgtgataggtgtgcctccggcttctataggtttcctgagtgtgtcccatgtaactgtaatcgggacggcacagagcccggcgtctgcgatccgggaaccggagcttgtctgtgtaaggaaaatgtcgaagggaccgaatgtaacgtttgtagggaggggtctttccacttggatcccgcaaatctgaaaggatgcacgtcctgtttctgcttcggggttaataaccaatgtcacagcagtcataagagacgtaccaaattcgtggacatgctaggttggcacttggaaactgcggatcgggtagatatccctgtgagttttaatccaggcagcaactctatggtcgcagatcttcaggagcttcccgctaccatacacagcgcctcctgggtcgcaccaacgtcatacttgggagacaaagtctcttcttacggtggttatctgacctatcaagcaaagtcgttcggtctgcccggtgatatggtgctcttggaaaagaagcccgacgtgcaattgactgggcagcacatgtcaattatttatgaagaaaccaacactcctcggcccgacagactgcaccatggccgggttcacgtcgtagagggaaattttcgacacgcaagcagcagagcccccgtctctcgcgaggaactgatgacggtgctgtcgcgcctggcagacgtgaggattcagggtctgtacttcaccgagacccagcgattgacccttagcgaagtgggcctggaagaagcatcagatactgggtcaggccgcatcgcactggcagttgagatttgcgcatgccctccagcctacgccggcgactcatgtcagggatgtagccccggatactaccgggatcacaagggactgtacacgggcagatgcgtaccatgtaactgtaacggccattctaaccagtgccaggacggatcaggcatttgtgtcaattgccagcacaacaccgcaggagagcattgtgaacgatgccaggagggctattatggtaacgccgtccacggatcatgtagggcctgcccatgtccgcacacaaattcctttgctaccggctgcgtcgttaacggtggcgacgtgaggtgctcatgtaaagctgggtacaccggcactcagtgtgagcgatgcgctcctgggtattttggaaacccccaaaaattcggtggttcctgtcaaccttgttcatgtaactctaatggacaactaggctcatgccatccgctgactggcgattgtatcaaccaggaacccaaggattctagcccagccgaagaatgtgatgattgtgacagctgcgtgatgactctcttgaacgacctggctaccatgggagaacagctccggttagttaaaagccagcttcaggggctatcagcctcggccggactgctggaacagatgaggcatatggaaacacaagccaaagacttgagaaaccagctgttgaactacagatcagctatctcaaatcacggatctaagatcgagggattggaacgcgagctcactgacctgaatcaggagtttgagacacttcaagagaaagcacaagtgaacagcaggaaagctcagacgctgaacaacaatgtcaatagagccactcagtccgccaaggaactggatgtcaaaattaagaacgttatccggaacgtgcacatgcttaaccgtatacgtacctggcagaaaacccatcagggagaaaacaacggtctggcaaattctatacgcgatagcttgaacgaatacgaagccaagttgagtgatctgagggcaagacttcaggaggctgccgctcaggccaaacaagctaacgggctgaatcaggaaaatgaacgcgctttgggcgcaatccagcgacaggtgaaagaaattaatagtctgcagtccgatttcaccaagtaccttacaactgcagactctagcctgcttcaaacaaacatcgccctccagctcatggaaaagtctcagaaggaatacgaaaaacttgccgcctcactaaacgaagccaggcaggagctctccgataaggtgagggagctatctaggtctgcaggcaaaacaagcctcgtggaagaagccgagaaacacgccagaagcctgcaggaactggccaaacaattagaggaaatcaagcggaacgcttcaggcgatgagctcgtgaggtgtgcagtggacgccgctactgcttacgagaacattctgaacgccatcaaggccgcggaagacgccgcgaatcgcgctgctagcgcctcagagagcgctctccagacagttataaaagaggatctcccacgaaaagcaaagacactgtctagcaactcagataaactattgaacgaagccaagatgacacagaaaaagctgaagcaggaagtatcccctgctttgaacaatttgcagcagactctcaatattgtgacagtgcaaaaagaggtgatcgataccaatctgaccaccctgagagatggtctgcacggaattcagagaggagacattgatgccatgattagtagtgctaaatccatggttcggaaggccaacgacatcactgacgaagtcttggatggcctgaatccgatccagacagatgtggaacgaatcaaggatacttacggtcggacacaaaatgaagattttaaaaaagccctgaccgatgccgataatagtgtgaataaactcaccaacaagctccctgacctttggcgcaaaatcgaatcaatcaaccagcagctcctgcccctcggcaacatcagcgataatatggaccgcatccgtgaattgatccaacaggctagagacgctgctagcaaagtggcggtcccaatgcgtttcaacggcaaatccggagtcgaagtgaggttaccaaatgacctggaggatttaaagggatatacctccttgtcccttttcctgcagcgccctaattctcgcgagaatggggggactgaaaacatgtttgttatgtatcttggaaacaaagatgccagtcgtgactatattggtatggccgtcgtcgatggccagctcacctgtgtgtacaaccttggagatagagaggccgagctgcaagtggaccagatcttaactaagtcagagacaaaagaagcggtcatggacagagtgaaatttcagcggatctatcaattcgcacggctgaattacacaaagggcgccacctcttcaaaaccagagactcccggagtgtacgacatggatggtcgcaattctaacaccctgctgaacttggatccagagaatgtcgtgttctatgtgggcggttacccaccagacttcaagctgcctagccggttgagctttcccccttataaagggtgcattgaactggatgaccttaacgagaatgtgctttctctctacaactttaaaaaaaccttcaatctgaacacgactgaggtggagccttgtaggcggaggaaggaggaaagtgacaaaaactattttgaagggactggctacgcgcgcgtaccaacccagccacacgcaccgattcctaccttcggccagaccatacagacgactgtggatagaggcctcctgttttttgccgaaaatggggatagatttatctccctgaacatcgaagacgggaagttaatggtccggtataagctgaattcagagctgcccaaggaaagaggcgtgggtgacgcaatcaataacggcagggaccacagtattcagattaagattggaaaattgcagaagcggatgtggataaatgtagatgtgcaaaacacgattatcgatggtgaggttttcgattttagtacgtattacctcggggggattcctatcgcaatcagagagcggtttaacataagcacacccgcgttccggggatgcatgaagaacttgaagaagacctctggggtggtgcggctgaacgatacagtaggggtgacaaagaagtgttctgaggattggaaactggttagatccgccagctttagtcgagggggacaactgagcttcaccgacctgggactgccgcccaccgaccatcttcaggcatccttcggcttccagacgttccagccgtccggcatcttgttggaccaccaaacatggactcgaaatttgcaggtcacactggaagatggctacatcgagctatctacaagcgattctggaagcccgatttttaagagtccccagacgtacatggatggcttgctgcattacgtttccgtgatctctgataacagcggtttgcggcttctgattgatgatcagctgttgcgcaattctaagcgactcaagcatatttctagtagtcggcaaagtctcagacttggaggctccaatttcgaggggtgcataagcaacgtgtttgtgcaaagactgagcctgagtcccgaggtgctggatctcactagtaactctcttaagagagacgtcagcctgggcggatgctctctgaacaaaccaccctttctgatgctgctgaaaggctccacgcggttcaataaaactaagaccttcaggatcaaccagttgctccaggacacgccagtggcctctcctagaagcgtgaaagtctggcaggacgcttgttctccgctgcccaaaacccaggctaaccatggcgcgctacaatttggcgacatccccacctctcatcttctgtttaaacttcctcaggagctgctgaagcctaggagtcagttcgcagtagatatgcaaaccacttcatccagggggctggtgtttcacacagggaccaaaaactccttcatggcactttatctttcaaagggtcgcctggtgtttgccttgggaaccgatggaaagaagctgagaatcaaaagcaaggaaaagtgcaatgacggtaaatggcataccgtggtgttcggtcacgatggagagaagggacgcctagttgtggacggtctgagagccagagagggttccctgcccggaaactcgactattagtattcgggcacctgtttatctgggaagtcccccttcggggaaaccgaagtcattgcctaccaatagttttgtgggatgcttgaaaaatttccagctcgattctaagccactatatactccatccagcagcttcggcgtttctagctgtctgggaggtccactggaaaaaggaatctacttcagcgaggaagggggacatgtggtgctagcccattcagtgttactaggacccgaattcaaattggttttcagtattcgcccccgtagcctcaccggaatcttgatccacatcggatctcagcccggaaagcacttgtgcgtttatctggaggccggaaaagtcacggcaagtatggactcaggggctgggggtacatccacaagtgtaacacctaaacagagcctgtgtgatggccagtggcatagcgtggccgtgaccattaagcaacacatcctccacttggagcttgacactgactcttcctacaccgcggggcagattcccttcccccccgcatctacgcaagaaccgcttcacttaggcggggccccagcaaacctgaccactctccgtatccctgtgtggaaatccttcttcggctgtcttcggaacatccacgtcaatcatatccctgtcccagtaacagaggcccttgaggtccaggggccagtgtccctaaacggatgccccgaccagtag

SEQ ID NO: 192681 - DNA, 4560 bp, synthetic construct
  misc_feature 1..4560: note = Description of Artificial Sequence: Synthetic coding sequence
  source 1..4560: mol_type = other DNA
atggccgccgccgcccggccccggggccgggccctgggccccgtgctccctccaacacctctgctactcctggttctgagagttttacccgcctgcggcgctaccgctagagatccgggggcggccgccggactcagtctgcatcctacttacttcaatctcgccgaagcagcaaggatatgggctaccgctacctgtggagaacgcggaccaggcgagggtcggccccagccagaactgtactgtaaattagtgggtggaccaactgcacccggttccgggcatacaatccaggggcagttctgcgactattgtaactctgaggacccgaggaaagcccatccagttacaaacgccattgacgggtctgaacgttggtggcaatctccaccgttgagctcaggcactcaatacaaccgagtgaacctcaccctggatctgggccagctgttccacgtggcttatatattgatcaaatttgccaatagcccacggccggatctgtgggtcttggagcggtccgtagactttggatccacttacagtccttggcaatattttgcccactcaaaagttgactgcctcaaagaattcggccgggaggccaatatggctgtgacacgggatgatgatgtgctctgtgtcacggagtacagtaggatcgtgcctctagagaatggagaggtggtggttagcctgatcaatgggcggcccggggccaagaacttcacttttagccatactctcagggtgtatcaaggtaataagcatccactgttcctgaggacaaacactctcttagggcatctgatttccaaagctcaacgggatcccaccgtaacacgccgctactattattccatcaaggatatatcaattggcgggcaatgcgtctgtaacggccacgccgaggtctgcaatataaacaatcccgagaaactgttcaggtgtgagtgtcaacaccatacatgcggggaaacatgcgatcgatgctgcaccgggtataatcagagaaggtggagacccgccgcctgggaacagtcccacgagtgtgaagcttgtaattgccatgggcatgccagcaattgttactacgacccagatgtcgagaggcagcaggcttccctgaacactcagggaatttatgcaggcggcggagtgtgtattaattgtcagcataacaccgccggagtgaactgcgaacaatgcgcaaaaggttattatagaccgtacggggtcccagtcgacgccccggacggctgtattccatgctcatgtgatcccgaacacgcagacggttgcgagcagggatcggggaggtgccattgtaaacccaatttccacggggacaattgcgaaaagtgcgcgattggctactataatttccccttttgtctcaggatcccaatcttccctgtgagtacgccctctagcgaagacccggttgcaggagacataaagggttgtgactgtaatctcgagggcgtactgcccgaaatctgtgacgcacatggtcgttgtctctgtagacctggagtggagggtcccagatgcgatacatgccgcagtggcttctactcctttccaatttgccaggcgtgttggtgttccgcgctagggagctaccagatgccctgcagctccgtgaccggtcaatgcgagtgcaggcccggcgtaaccgggcagcgctgcgatcgatgcctctctggagcctatgactttccgcactgtcaaggcagttcatctgcttgcgacccagccggcaccatcaactctaatcttggctactgtcagtgtaaacttcacgtcgaggggcctacctgcagccggtgcaagcttctgtactggaatcttgacaaagaaaaccccagcgggtgcagtgagtgtaagtgtcacaaggccggtacagtatcaggaactggcgagtgtcgccagggcgatggagactgtcactgcaaatcacatgtcggcggggattcttgtgacacatgtgaggacgggtacttcgccctggaaaagtcaaattatttcggatgccaaggatgccagtgtgatattggcggcgccctgtcctcaatgtgtagtgggccgagcggcgtctgtcagtgtagggaacacgtcgtcggcaaagtgtgccaacgaccggagaacaattattacttcccggacctgcaccacatgaagtacgaaatagaagacggatcaactcctaatggccgtgacctgcggttcggatttgatcccctagccttccccgaattctcttggcgagggtacgcgcagatgaccagtgtgcagaatgacgtgagaatcaccttgaacgttgggaaatcaagcggatcgcttttccgggtgatactccgctacgttaaccctgggaccgaggccgtgtcagggcatatcacaatctacccatcatggggcgcagcccaaagtaaagaaatcatcttcctgcccagtaaggagcctgccttcgtgacagtgcctggcaacggcttcgccgatccattctcaatcactcctggcatctgggtagcctgcattaaggcggaaggcgtattgctcgattacttggtcctgttgccaagggattactacgaagcaagcgtattgcagttacccgtgacagaaccatgtgcctacgctggaccacctcaggagaactgcctgctgtatcagcatctgcctgtgactcgtttcccctgcaccctcgcatgtgaggcgcgccattttctgcttgacggggagcccagaccagtagccgtgaggcagcccactcctgctcatcccgtgatggtggatctgtctggaagggaagtcgagctgcacctgaggctgagaattccccaggtgggccattatgttgtggtggttgaatattcaaccgaggccgcacagcttttcgtagtcgatgtcaatgtgaaatcctccggttccgttctggcggggcaggtgaatatctactcttgcaattattcagtgctttgtagatccgctgtgattgatcacatgtcacgcattgctatgtacgagctcctagccgacgctgatattcagctcaagggccacatggcccgctttctactgcaccaggtgtgcataatcccaatagaggaattcagcgccgaatatgttaggccccaggttcactgcatcgcaagctatgggaggttcgtgaatcagtcagcgacgtgcgtgtccttagcccacgaaactcctcctaccgcactcattttggacgttttgtctggccgcccgtttcctcatctgccgcagcagagctcaccttccgtggacgtgctgccaggtgtgacacttaaggccccgcagaaccaagtgacactcaggggtcgcgtgccacatctggggagatatgtgttcgtcatacatttctatcaggcagcccacccaacctttcctgctcaagtgtccgtcgacggcgggtggccacgcgctggctcctttcatgcttcattctgcccacatgtcctggggtgcagggatcaggttatagcggaaggccagattgagtttgacatttctgagcctgaggtggctgcgaccgtcaaggttcctgagggcaagagcttagtgctggtcagagtgctggtggtgcccgccgagaactatgactatcagatactgcacaaaaagtccatggacaagtccctagaatttataactaactgtggaaaaaactcattctatctagatccccagaccgccagccggttttgcaagaactccgctaggagcttggtggccttttaccacaagggagcactgccgtgcgaatgtcatcccacaggggctacagggccccattgtagccccgaaggcggtgcccacgctagcccgacatctagcgggggctcagcccctgccgtacaacaggcttacggcttccccagatgcaagcggaagagctgctcatgcggcaggcggctgtgcgaggagatgaccggacagtgcaggtgcccaccaaggaccgtccggccacagtgtgaagtgtgtgaaacacatagtttcagctttcatcctatggccggttgcgaagggtgcaattgctcacggaggggcacaatcgaagctgccatgcctgaatgcgatagagatagcgggcagtgtagatgcaagcccagaataaccgggcggcagtgtgaccgatgcgcctccgggttttatcgtttccccgagtgtgtgccttgcaactgcaaccgggacgggacagaacccggcgtttgcgacccaggtactggagcatgtctgtgcaaggagaacgtagaaggaaccgagtgcaatgtgtgccgcgagggatcctttcatcttgatcccgctaacctcaagggatgtactagctgcttctgctttggagtgaacaaccaatgtcatagtagccacaagcgcaggaccaaatttgtcgatatgctgggctggcatcttgaaactgcagacagggtggacatccccgtgtcgtttaatccagggagtaatagcatggtggccgacttgcaagagttgccagccacgatccacagcgcctcatgggtggccccatag

SEQ ID NO: 192682 - DNA, 1743 bp, synthetic construct
  misc_feature 1..1743: note = Description of Artificial Sequence: Synthetic coding sequence
  source 1..1743: mol_type = other DNA
atggccgccgccgcccggccccggggccgggccctgggccccgtgctgccaccaacacccctgttgctgctggtgctcagggtgctgccagcatgcggtgcaactgccagggatccaggagccgcggcgggattgtccctgcaccccacatattttaaccttgccgaggccgccaggatttgggcgacagcaacatgtggcgagcggggcccaggagaaggtcggccgcaaccagagttatattgcaaattagtggggggacctaccgctcctggaagcgggcacacaattcagggtcagttctgtgattactgcaatagtgaggaccctcgtaaggcccatcctgtgacaaatgctatcgatggctctgagcggtggtggcagagccctccattatccagtggcacccaatacaacagggttaacctgacactggacttggggcagctgtttcatgtagcctatatacttatcaaatttgcgaactctcccagacccgacctgtgggtcctggaaagaagcgttgactttggatcaacatatagtccatggcaatacttcgcacattctaaggtcgactgtctgaaggagttcggcagagaggcgaacatggcagtcaccagagacgatgatgtgttgtgcgtcacggagtattctagaattgtgccgctggaaaacggcgaggtggtagtgtctctgatcaacgggagacctggtgccaagaactttacatttagccataccttaagagagtttacaaaggcaactaacataagactccgctttttgcgaactaacactctcctcggacatttaatttctaaggctcagcgggacccgactgtgacccggaggtactactacagcatcaaggatatctcgatcggaggtcagtgcgtttgcaatgggcatgccgaagtttgtaacattaacaaccctgaaaagctgtttaggtgcgaatgtcagcaccatacatgcggcgaaacgtgcgacagatgttgcacaggctacaaccagcgtaggtggcggcctgctgcatgggaacaaagccacgagtgtgaagcctgtaattgtcatggccatgcgtctaattgctattacgatcccgatgttgagaggcagcaggcatcattgaacacacagggtatatacgcaggaggaggtgtgtgcattaactgtcagcataacacagcaggcgttaactgtgaacaatgtgccaagggttactataggccttacggtgtcccagttgacgcccccgacggatgcattccttgctcgtgcgaccctgaacacgctgacgggtgcgagcaaggtagtgggagatgtcactgcaagcccaacttccacggtgacaactgcgaaaagtgcgcaattggctactataacttccctttttgtttgagaattcctatctttcccgtgtccaccccttcctcagaggatcctgtggctggagatatcaaaggcaactggtgcgactgcaatctggagggtgtgctacctgaaatttgcgacgctcatggacggtgcctgtgcagacccggcgtcgagggaccacgatgtgatacctgccgaagcggcttctactcattccctatatgccaaggcccttccgaaaaggtggccatatataaaccagaatccagaccctcagccgaaacggaacccgcctcgacgtggatccttgattttcccgcatctagaacaggagagatcaacttttattgtctatcaccatag

SEQ ID NO: 192683 - DNA, 5007 bp, synthetic construct
  misc_feature 1..5007: note = Description of Artificial Sequence: Synthetic coding sequence
  source 1..5007: mol_type = other DNA
atgccccccgccgtgcggcggagcgcctgcagcatgggctggctgtggattttcggcgctgccctcgggcagtgcctggggtacagcagccaacagcagcgtgtacccttcttgcagccgccggggcaaagtcagctgcaggcttcatacgtcgagttccgaccttcgcagggttgcagtcccggctattatcgggatcacaaaggattatatactggacgctgtgttccatgtaactgcaacggtcactcaaatcagtgccaggatggcagcggcatttgcgtgaattgccagcacaacaccgccggcgaacattgtgaacggtgccaagaaggttactatggaaatgctgtgcacggcagttgcagagcctgtccttgcccacatactaatagcttcgccactggctgtgtggtgaacggaggcgatgtgagatgcagttgcaaggccggttacacagggacacagtgtgaaagatgtgcacctggctacttcggcaatccgcagaagtttggcggtagctgccagccttgcagctgtaacagcaacgggcagctgggctcttgtcatccacttactggagactgcatcaatcaagagccaaaggacagctctcccgctgaggagtgcgatgattgtgatagttgtgtgatgacactgctgaatgatctcgcaacgatgggagagcagctgagacttgtgaaatcccagctgcagggactgagtgccagtgcggggctgttagaacagatgcgtcatatggagacacaggctaaggatttaaggaaccagctactaaactacaggagcgctatatctaaccacgggagcaaaatcgaaggtcttgaacgggagcttaccgatctcaatcaggagtttgagactctccaggaaaaagcccaggttaactcacggaaagcacaaacattgaacaacaatgtgaatagggctacacaatccgcaaaggaactggacgtcaaaattaaaaatgtgatccgtaacgtgcatatgctgaaccggattagaacatggcaaaagacccaccaaggcgagaataacggcctggccaattcaatccgcgattctctcaatgaatacgaggctaaactttctgatctccgcgcccgactccaggaggcagccgcccaggccaaacaggctaacggactcaaccaggagaacgagagagctctcggcgccatccagcggcaggtcaaggagattaattctctgcaatctgattttactaagtacctcacaaccgcggatagcagcctgctgcagacaaatattgctttacaattgatggaaaagtctcaaaaagagtacgaaaagcttgctgcgtccctgaacgaggctcgccaggagctttcagataaggttagggagttgtcaagatctgccggtaagactagcctggtggaggaggctgagaagcatgctcggtcattgcaagagcttgccaaacagctggaagaaatcaaaagaaacgccagcggcgacgaactggttagatgcgctgtggatgccgccaccgcttatgagaacattctgaatgccatcaaggcagccgaagacgcggctaaccgggccgctagtgcgtctgaaagtgctctgcagactgttatcaaagaggatctgcctcggaaagccaagactctgagttcaaattcggataaactgctgaatgaggctaagatgactcagaagaagctcaagcaagaggtgtctccagcactgaataaccttcagcagactctcaatatcgtcaccgtgcaaaaggaggtgatcgacacgaacctgaccaccctacgtgatggactccatgggatccagaggggtgatattgatgccatgatctcctccgcaaagtctatggtgcgcaaggccaacgatattaccgatgaagtgctggatggtctgaatccaatccagaccgacgtagaaaggataaaagatacttatggtaggacgcaaaacgaagatttcaagaaggcactaaccgacgctgataattctgttaacaaactcaccaacaagctgccagacctgtggagaaaaatcgagagcatcaatcagcagttgctgccgctcgggaacatttccgataacatggatcggatcagagaactgattcaacaagcaagagacgcggcctcgaaagtcgctgtccctatgcgtttcaatgggaaaagtggagtggaggtccgcttaccaaatgacctcgaggatctgaagggttatacatcactgtcactgtttttgcaacgaccaaactccagggaaaatggcggcaccgaaaatatgtttgttatgtatctcggaaataaagatgcatcccgggactatattggcatggccgtggtggacgggcagctaacgtgcgtctacaacctgggtgacagggaagctgagctgcaggtcgaccagatacttactaagtctgaaactaaggaagccgtgatggatagggtgaaattccaacgcatctatcagttcgcacgactcaattacacaaagggagctacttccagcaagcccgagaccccaggagtatacgacatggatggacgcaacagcaacacgttgcttaacttggaccctgagaacgtcgtgttctacgtcgggggatatccccctgatttcaagctaccttcacggctctcctttcccccttataaaggctgtatcgagctggacgacttgaatgagaatgtgctgtctctttataatttcaagaagacctttaatctcaatacgaccgaggtggagccttgtagaaggaggaaagaagagtctgacaaaaactacttcgaaggcaccgggtacgcaagagtccctacgcagccgcatgctcctatacccaccttcgggcagacaattcagactaccgtggacagaggcctgctcttctttgccgaaaacggcgatcgatttatctctttaaacatagaagacggtaagctgatggtacggtacaaacttaacagtgaactgccaaaggagagaggcgtgggcgatgcgattaacaatgggagggaccatagtatccaaattaaaattggaaagctgcagaaacgcatgtggatcaacgtggacgtgcagaacaccataatcgacggagaagtattcgattttagcacatactacctaggcggcatcccaattgccattcgtgagaggttcaacatctccacccctgctttccgtggatgcatgaagaatctgaaaaagaccagtggcgtggtccggctgaatgatactgtgggggtgaccaaaaagtgttccgaggactggaaactggtccggtctgcttccttttcccgcgggggccagctctctttcaccgatctgggactccctccgacggaccacctgcaggcctcctttggctttcagaccttccagcctagtggtatcctgcttgatcaccagacctggactaggaacctgcaggtgacactggaagatggctatatcgagctttccaccagcgatagtggatcaccgatttttaagtctccgcaaacttacatggacggcctattgcactatgtgagcgtaattagcgataatagcggccttcgcctccttattgacgaccagctcctcagaaactccaagcggttgaaacacatttcctctagccggcagtccttgagactcggcggcagcaactttgaaggttgtatttccaacgtctttgtacaacgcctatcgctgtctcctgaggtcctcgacctaacctcaaacagtttgaaaagagacgtgagccttggcgggtgttctctgaataagcccccctttctgatgttgctcaagggcagcacgcgattcaataagaccaaaacctttcggatcaaccaactgctgcaagacactccggttgcgtctcctcgctcggtaaaagtctggcaagacgcctgcagcccactaccgaagacccaggcaaatcacggcgctctgcaattcggcgatataccaacctcacacttactctttaagctacctcaagagctgctcaagccccgctctcagtttgccgttgacatgcagaccaccagtagccggggattagttttccatacgggaacaaagaatagctttatggccctctacctctccaagggtaggctggtgtttgcactgggaactgatgggaagaagctccgcatcaaatccaaagagaagtgtaatgatgggaaatggcataccgtcgtgttcgggcatgacggcgagaaaggcagactggtagttgatggtctcagagctagggaagggtccctcccggggaattcaactatctctatcagggccccagtgtatctcggctccccgccctccggcaagcccaaatccctgcctaccaatagcttcgtcgggtgtctgaagaacttccaactggacagcaagcccctctatactccaagctcatctttcggggtctcaagctgtctgggaggcccactcgaaaaagggatttactttagtgaggaaggaggacacgtagtcctagcgcactccgttctcctgggtccagaattcaagctggtctttagtatccgtcctcgctctttaactggcattctgatccacatcggctcccagccagggaaacacctatgcgtgtatctggaggccggaaaggtaacggcatctatggacagcggagccggaggcacatcgacaagcgtgacccctaagcagtctctttgtgatgggcagtggcatagtgtggcagtcactattaagcagcatatccttcatttagaactggataccgactcttcctacactgccggtcaaattccatttcctcccgccagcacacaggaacccctgcacctgggaggcgcacccgctaatctgaccacactgaggattccagtctggaaatcatttttcggctgcctgaggaacattcatgtgaaccatattccggtccccgtaacggaggcactcgaagtccaaggcccagtcagtctgaacggttgtccggaccagtag

SEQ ID NO: 192684 - DNA, 1065 bp, synthetic construct
  misc_feature 1..1065: note = Description of Artificial Sequence: Synthetic coding sequence
  source 1..1065: mol_type = other DNA
atgcagggcctgctgttcagcaccctgctgctggccggcctggcccagttttgttgcagagtgcagggtacaggaccgctcgacacaacgcccgagggaaggccaggggaagtgagcgacgctccgcagagaaaacagttttgccactggccatgcaagtgtcctcagcaaaaacctcgttgcccacctggcgtctctctggtaagagacggatgcggatgctgtaagatctgcgcgaagcagccaggtgaaatttgcaacgaagccgacttatgtgacccacacaaggggctgtattgcgattattctgtagataggcccagatacgagactggagtgtgtgcttatctggtggccgttggatgcgaatttaatcaagtccactaccataatggccaggtgtttcagcctaatcccctattcagttgtttatgtgtgagtggtgctatcggatgtaccccactgtttattccaaaactcgccggatcccactgtagcggtgccaagggcggtaagaagtccgaccagagtaattgtagtctggagcccctgttacaacagctgtcgacctcatataagacaatgccagcttatagaaacctcccgctaatctggaagaagaagtgcctcgtccaggccaccaagtggaccccgtgctcccgcacctgtgggatggggatctcaaatagggtcactaacgaaaactcaaactgtgagatgcgcaaagagaaaagattgtgttacatccagccttgcgatagcaatattttgaagactattaaaattcccaagggcaaaacctgtcagcccacgttccagttatccaaagccgaaaagtttgtcttcagtggctgttcaagtacacagtcgtacaagcctacattttgcggtatctgtctggacaagcggtgttgcatccccaataaatctaaaatgatcaccatccagtttgactgccccaacgagggcagttttaagtggaagatgttatggataactagttgtgtgtgtcagcgcaactgtagagaaccaggtgacattttcagcgaactaaagatcctatag

SEQ ID NO: 192685 - DNA, 267 bp, synthetic construct
  misc_feature 1..267: note = Description of Artificial Sequence: Synthetic coding sequence
  source 1..267: mol_type = other DNA
atggccctgagcagcgcctggcggagcgtgctgcccctgtggctgctgtggtccgccgcctgctctcgcgccgcttccggcgacgacaacgcctttccattcgacatcgaaggatcctcagccgttggtagacaggacccaccggagacctcagagccgagagtcgccctgggcaggctgccgcctgcagcagagaagtgcaatgctggattttttcataccttgagtggcgagtgtgttccatgcgactgtaacggtaatagctag

SEQ ID NO: 192686 - DNA, 363 bp, synthetic construct
  misc_feature 1..363: note = Description of Artificial Sequence: Synthetic coding sequence
  source 1..363: mol_type = other DNA
atggccctgagcagcgcctggcggagcgtgctgcccctgtggctgctctggtccgccgcctgtagtcgtgctgctagtggggatgataacgcttttccttttgacattgaaggatctagcgccgtggggcgccaagatcccccagagactagtgaaccacgtgttgctttaggccgtctgccacctgccgctgaagtacagtgtccatgccattgccaccccgcaggggcccccgcgccgcccagagctgtaccgcacagcagcttttcgctgtcccctccacttagcagcccacaatgtcttgagtcgtttacatgggctcggtctgtgcggaagttagaaataaaatccttcccactctag

SEQ ID NO: 192687 - DNA, 549 bp, synthetic construct
  misc_feature 1..549: note = Description of Artificial Sequence: Synthetic coding sequence
  source 1..549: mol_type = other DNA
atggccctgagcagcgcctggcggagcgtgctgcccctgtggctgctctggtccgccgcttgcagtcgcgccgccagcggagatgacaacgcgttcccatttgatatagagggctcgtccgccgtaggacgacaggaccccccggagacctctgagccacgggtcgcactcggaaggctcccccctgcagcagagaagtgtaacgcggggttttttcacacactttctggagagtgcgtgccttgtgactgcaacgggaatagcaacgagtgcctggatggtagtgggtactgtgttcattgtcaacgcaacacgaccggggagcactgcgagaagtgtctagatggttacattggagacagcatcagaggggctcctcaattttgccagccctgcccttgtcctttgcctcatctggccaattttgcggaaagctgctacaggaagaacggtgccgtaagatgcatatgcaacgaaaactacgccggtcccaattgcgagagaccatctccccaatcaacaaggggctttcccctgaacgacagctag

SEQ ID NO: 192688 - DNA, 537 bp, synthetic construct
  misc_feature 1..537: note = Description of Artificial Sequence: Synthetic coding sequence
  source 1..537: mol_type = other DNA
tgaatcttcgaggactgcgacgaggtgaccggccagtgccggaactgcctgcggaatacgaccggcttcaagtgtgaaaggtgtgctccaggttattacggcgatgccagaatagctaaaaattgcgccgtctgtaactgtggaggagggccttgcgatagcgtgactggcgagtgcctcgaggaaggattcgaaccccctacgggtatggattgtcccaccatcagttgcgataaatgcgtctgggacttgacagacgccctcagacttgcagccctgtccatcgaggaagggaagagcggcgtgctcagtgtaagctctggtgccgccgcccacaggcacgtaaacgagatcaatgccactatctatctcctaaaaacgaagttgagtgagagagagaaccaatatgctctccgaaagattcagattaataatgccgagaataccatgaaatcgctactgtcagacgttgaagagttggtggagaaacattggaataaaccacgccgtcgcctggaactccaggagggggtctag

SEQ ID NO: 192689 - DNA, 5451 bp, synthetic construct
  misc_feature 1..5451: note = Description of Artificial Sequence: Synthetic coding sequence
  source 1..5451: mol_type = other DNA
atggccctgagcagcgcctggcggagcgtgctgcccctgtggctgttatggagcgctgcttgctcgcgggccgcatccggtgatgacaacgcattcccctttgacatcgaaggcagctccgcagtgggcaggcaggacccgcctgagacaagcgagcctcgcgtcgcacttgggcggctacccccagccgccgagaagtgtaatgctggatttttccacaccctttctggagagtgtgtgccctgtgactgtaatggcaacagcaacgaatgcttggacggttcaggctactgtgtccactgccaaagaaacaccaccggagagcattgtgagaaatgtttagacggatacataggcgattcgattaggggtgcaccacagttttgccagccctgcccttgtccgctgccacacctcgcaaatttcgctgagagctgttaccggaaaaacggggccgtaaggtgcatctgtaatgagaattacgcgggcccaaattgtgagagatgtgccccaggatactatggcaaccctttgctaatcgggtctacatgtaaaaagtgtgactgttcagggaatagcgatcccaacttgatattcgaggactgcgatgaagttactggacagtgcaggaactgtctgcgcaacacaaccgggttcaaatgtgagaggtgcgctccgggctactacggcgacgctaggatcgctaaaaactgtgcagtgtgtaattgcgggggcgggccttgcgactctgtcacgggcgagtgcttggaagagggttttgagccccccaccgggtgtgacaagtgtgtttgggacttaactgatgcactccgccttgcggccttgtccattgaggaaggaaagagcggggttctgagcgtatccagcggcgctgctgcacacagacacgtcaacgaaatcaacgccaccatatacttgttgaagaccaaactatccgagcgcgaaaatcagtatgccctgcgtaaaatccagataaataacgctgagaatacgatgaagtccctgttgtctgacgtcgaggaactcgtcgaaaaggaaaaccaggccagtcggaaggggcagttagtacagaaagaaagtatggacaccataaaccatgcaagccagctagtggagcaagcccacgacatgcgcgacaagatccaggagatcaacaataagatgctgtactatggagaagagcatgaactgagtcccaaggagattagcgagaagttggtattggctcagaaaatgttggaggaaatccggtcaaggcagccattttttacccagcgggagctggtagatgaggaggctgatgaagcctatgaactgctgtcgcaggcagaaagctggcagaggctccataatgagactcgcaccctctttcccgttgtgcttgagcagctggacgattacaacgccaagctgagcgacctgcaggaagccctggatcaggcattaaactatgtcagggatgccgaggacatgaacagggcaaccgcagcccggcagcgagatcacgaaaaacagcaggaaagggttcgggagcagatggaggtggtcaacatgagtttgtcaacaagtgccgactccctgaccactcctagattgacgctctcagagctggacgatatcattaagaacgcctcaggtatttatgccgagattgatggggccaaatccgagctccaggtaaagctcagtaatctaagcaacctttcccacgatttggtgcaggaggctattgatcatgcacaggacctccaacaggaggcaaacgagcttagtcgcaagctccattcatctgacatgaatggcctagtgcaaaaggccctggatgcttctaatgtgtatgaaaacatagtaaactatgtttctgaagcaaacgagacagcagagttcgctctcaacaccactgaccggatttatgatgctgtctccgggatcgacacacagatcatctaccacaaggatgaatccgaaaatctgctgaaccaggcacgtgagttgcaggcaaaggcggagtcgtcatctgatgaggccgttgccgacaccagccgcagggtgggtggagccttagctcgcaagagcgccctgaaaactcgcctctccgatgccgttaaacaactgcaggccgccgagcgtggcgacgcccaacagcgactcggccagtcccgtctcatcaccgaggaggccaaccgaaccacaatggaagttcaacaggccaccgctccgatggctaataatctaacaaattggtcacagaatttgcagcacttcgactccagtgcctataatacagctgtgaactctgcgcgtgatgccgtccggaatctcacggaggtggtcccacaactgctagaccagctccggaccgtggaacaaaagaggcctgcaagtaacgtatccgcttccatccagagaatcagggaattgatcgcccagacacggtccgtggcgagcaagatccaggtctctatgatgtttgatggtcaatccgctgtggaggtgcattccagaacaagcatggatgatctcaaagccttcacttcacttagcttatacatgaaaccacctgtaaagcgcccagaactgacagagacggccgaccagttcatcttgtatctggggagcaagaacgccaagaaggagtatatggggcttgcaatcaagaacgacaaccttgtttacgtttataatctaggaaccaaggatgtggaaattcccctggattctaaacccgtgtcaagctggcctgcgtatttctcgattgtgaaaatcgagagagttggcaagcacggaaaggtgtttctaaccgtccccagtttgagcagcacagctgaagaaaagtttataaagaaaggagaattttcaggcgatgactccctgcttgacctagatcccgaggacactgttttctatgtgggtggagtcccaagtaactttaaactgcctacatccctaaatttgccgggattcgtaggctgcctcgaactcgctactctgaacaacgacgtcatatccctgtataatttcaagcacatctacaacatggatccgagcaccagcgtgccatgcgcacgtgacaagttggcatttactcagagtagagcagccagctactttttcgacgggagtggctatgcagtcgttcgggacattacaaggaggggtaaattcggacaggttactcgctttgatatcgaggtgcgcactcccgccgacaatggtctgatattgctcatggtgaacggctctatgttctttagactagagatgcgaaatggataccttcacgttttctatgatttcgggttttccggaggcccggtgcacttggaagatactctcaagaaagctcagattaacgacgctaagtaccacgagatttctatcatctatcacaacgacaaaaagatgatcctagtcgtcgatcgacgtcacgtcaagagtatggacaacgaaaagatgaagattccattcacagatatttacatcgggggagccccaccagagatattacagtcccgcgctctgagagctcacttacctttggacattaacttcagaggttgcatgaagggtttccaattccaaaagaaagactttaacctactagaacagactgaaacactgggggttgggtacggctgtccagaggattctctgatctctagacgcgcctatttcaacgggcagagcttcatcgcttccatccagaagatctcgtttttcgacggctttgaaggtgggttcaatttcagaacgctacaacccaacggcctgctgttctactacgctagtggttctgatgtcttcagcatttccctggacaacgggacagtgattatggacgtgaaggggatcaaggtgcaaagcgtggacaaacaatacaacgacggcctatcgcattttgtaatttcttcagtgtcccccacaaggtatgaattaatcgttgataagtccagagttggaagcaagaaccccacaaaggggaaaatagagcaaacccaagcttcggagaagaaattttactttggaggtagtccaattagcgcgcagtacgctaatttcacgggttgtataagtaatgcttattttacccgtgtcgatcgagatgtggaggtagaggatttccagaggtacacagagaaagtccacacctctctgtatgagtgcccgatcgagagctcaccactctttttgctgcacaaaaaggggaagaacttatcaaagccaaaagccagccagaataaaaaaggcgggaagtcaaaggacgcaccaagctgggacccggttgccctgaagctgcccgaacgcaacactcccaggaatagtcactgtcacctgtccaacagtcctagggcaattgagcatgcctaccagtacggcgggacagccaactcccgccaggagttcgagcatttaaaaggcgatttcggcgctaaaagccagttctctattcgcctacgcactaggtcttctcatggtatgatcttttatgtttccgaccaggaggagaacgatttcatgacgctgttcctggcacacggcaggttagtgtacatgtttaatgtggggcacaaaaagctcaagatccgtagccaggaaaagtataacgatgggctgtggcatgatgtcattttcattcgtgagaggtctagcggtagactggttatcgacgggctaagggttctcgaggagtcccttcccccgacggaagctacctggaaaattaaagggcctatttacctgggtggagttgccccaggcaaggcagtgaagaatgtacaaatcaactccatttatagcttcagtggatgcctgtcgaatctgcaactgaatggagcttcaattacttcagcgtcccaaaccttctccgtcacaccctgttttgagggccccatggagactgggacatactttagtaccgaaggcggatatgtggtgctcgatgagagtttcaatatagggctcaaatttgaaatcgcattcgaggtgaggccccgcagcagtagcggaacactcgtccacggccattcggtgaatggcgaatatctgaatgtgcacatgaagaatgggcaagttattgtgaaagtgaataatgggattagggacttcagcacttcagttacccccaaacagagtctttgtgacggccggtggcaccggattacagtaattcgcgacagcaatgtggtgcagctcgatgtcgactctgaggtgaatcacgtggtgggacctcttaacccaaagccaatcgatcacagagaacctgtttttgtcgggggggtgcctgagtccctccttactccgagactagcgccttccaaacccttcactggatgtatacgccatttcgttatcgacgggcatcctgtgagcttttccaaggccgcactggtcagcggagcagtgtctattaacagttgtcccgcagcatag

SEQ ID NO: 192690 - DNA, 5451 bp, synthetic construct
  misc_feature 1..5451: note = Description of Artificial Sequence: Synthetic coding sequence
  source 1..5451: mol_type = other DNA
atggccctgagcagcgcctggcggagcgtgctgcccctgtggctgctgtggtcagcagcctgctcgcgagccgcatctggagatgataatgcattcccgtttgatatagagggcagttctgccgtcggccggcaagatccccccgaaacctccgagcctagagttgcactgggccgcctgccaccggccgctgagaaatgcaacgccggattcttccatacactttccggtgaatgcgtgccttgtgattgtaacggaaatagtaatgaatgcctggatgggagtgggtactgcgtgcactgtcagcgaaacactacaggagagcattgcgaaaagtgtttggacgggtacatcggagactcaattaggggcgcccctcagttctgtcaaccctgtccttgccccctgccacatctagccaactttgcagaaagctgttaccgtaagaacggggccgtgcgctgtatttgcaacgagaactacgccggacccaattgcgaacgctgtgcccctggctattatggcaacccccttctcatcgggtcaacatgcaaaaagtgcgattgttccggtaatagtgaccctaatcttatcttcgaggactgtgacgaagttaccggtcagtgtcgcaactgccttaggaataccacaggttttaaatgtgagcgatgcgccccaggttactacggcgacgctaggattgccaagaattgtgcagtgtgcaactgtggcggcggcccctgtgattcagtaactggggaatgcctggaagaaggcttcgaaccacccaccggatgtgataagtgtgtctgggatctgacagatgctctgaggctcgctgcattatccatcgaagaagggaagtcaggagtcttatcagtgtcttccggtgccgccgcccatcggcatgtgaatgaaatcaacgccactatctaccttctgaagacaaaactgagcgagagagagaatcagtacgctttacggaaaatacagatcaacaatgcagagaacacaatgaagagtctgctgtctgacgtggaagaactcgtggagaaggagaatcaagcttcccggaagggacaactcgtccaaaaagaaagtatggataccattaatcatgcatcccaactggttgaacaagcacatgacatgagagacaagatccaggagataaacaacaagatgctttactatggggaagaacacgagctctcgccaaaagagattagtgaaaagttggtgctggctcaaaagatgctggaggagatccggtcgaggcagccgtttttcacacagcgggagctggtcgatgaagaggcagacgaagcctacgagctcctctcccaggcggagtcttggcagcgcctccataacgagactaggacccttttcccagttgttttagagcagctggatgactacaacgccaaattatccgaccttcaagaggcactggaccaagccctgaactatgtgcgcgacgcagaggatatgaatcgcgccacggccgcacgccaacgggaccacgagaagcagcaggaacgcgtccgagaacaaatggaggtggtcaacatgagcctaagtacttctgccgatagcctcacaacaccccgcctgaccttgtctgaactcgatgatatcataaagaatgcaagcgggatttacgcggagattgatggggctaagtcagaactccaggttaagctttccaacctctctaatctctcccatgacctggtgcaggaggctattgatcatgcccaggacctacagcaggaggccaacgaactgtcccgcaagctgcattctagtgatatgaatggattggtgcagaaagccttagacgctagtaatgtctacgaaaacattgtcaactacgtttcagaggccaacgaaaccgccgaattcgcactgaacacgactgataggatctacgacgctgtgtcaggcatagatactcagatcatctatcacaaagatgagtcagaaaacctcctcaaccaagctcgcgaacttcaggccaaggctgaatcatccagtgatgaagctgtggccgatacgtcccgcagagttgggggcgccttggcaaggaagtccgccttaaagactcgcctcagcgatgctgtgaaacagttgcaggccgccgaacgaggggacgcacagcagagactcgggcagagccggttaatcacagaggaagcaaacaggaccaccatggaggtccagcaagccaccgcccccatggctaataatcttaccaattggagccagaatcttcagcattttgattcctctgcttataacacagccgtcaacagcgctcgtgatgctgtgcgaaacctgactgaggtcgtacctcagcttttggatcagctgcggaccgtcgaacagaagcgtccagcctccaatgtgtcagccagcatccagcggatcagggaactcattgcccaaaccaggtcagttgcaagcaaaattcaggtttcaatgatgttcgatgggcagtctgccgtcgaagtgcactcccgtacatccatggacgaccttaaggctttcaccagcctgtccctgtatatgaagcctcctgtgaaaaggcccgagctgactgagaccgccgatcaattcattttgtatttaggcagcaaaaacgctaagaaggagtacatggggcttgcgattaaaaacgataacctagtgtacgtctacaatctggggacaaaggatgtggagatacctctggactccaaaccagtttctagctggccggcatatttttccatcgtcaaaattgagagagtgggcaaacacggtaaggtctttctcaccgtgccatcactctcatctaccgcggaagagaagtttattaaaaaaggagagttcagcggtgatgactccctgctggaccttgaccccgaggacacagttttttacgtgggcggcgtgccctcaaatttcaaactgcctacctccttgaatctgccaggcttcgttggctgtctggaactcgccactctgaataacgatgtgatttccctttacaattttaaacatatatacaatatggacccctccacctctgtcccatgcgcacgcgataagctggcgttcacacagtcccgagcagccagctatttctttgacggcagtggctacgctgtggttcgggacattaccagacggggcaaattcggccaggtgacaaggttcgatatcgaggtcaggaccccagcagataatggccttattctcttgatggtgaatgggagcatgttctttcggctggagatgcgcaacgggtatctgcacgtgttctacgactttgggtttagcggtggcccagtccatttagaggacaccctgaagaaagcgcagatcaacgacgcaaagtaccatgagatcagcattatctatcacaatgataagaagatgatcctggtagttgacaggcgacacgtgaaaagtatggacaatgaaaaaatgaagatcccatttacagatatttatatcggaggggcaccgccagaaattcttcagagcagagctctgagggcgcatctccccttggatataaatttccgtggatgcatgaaaggcttccaattccagaagaaggatttcaatctgttggaacaaactgagactctcggagttggatacgggtgccccgaggacagcctcatttcgaggagagcctattttaacgggcagtcctttattgccagtattcagaagataagcttttttgatggcttcgagggcggtttcaacttccgcactctgcagccaaacggccttctcttctattacgcttccgggagcgacgttttcagcatctcccttgacaacggcaccgttatcatggatgtcaaaggaatcaaggtgcagtccgtggacaagcagtacaacgatggactttctcatttcgttatatcatctgtttcccccaccagatatgagctgatagtcgacaagagtcgtgtcggatctaagaaccccacgaaaggcaaaatagaacaaacgcaggcctccgaaaagaagttctactttggcggcagtccaatttccgctcaatatgctaacttcacagggtgcattagcaacgcctactttaccagagtggatcgggacgtggaggtcgaggacttccaacggtacaccgagaaggtccacactagcctgtatgaatgccctatcgagagtagccctttatttctgctgcataagaagggcaagaaccttagcaagcctaaagcttcccagaataagaaaggggggaaatctaaggacgcaccatcctgggatccagtcgccctgaagctccccgaaaggaatactccaaggaatagtcactgtcatttgtcaaattctccacgtgccattgaacacgcataccagtatggaggaactgccaactctcgtcaggagtttgaacaccttaaaggtgactttggagctaaatcccagtttagcatcaggctgcggaccaggtctagccatgggatgatcttctacgtgagtgatcaggaggaaaacgatttcatgacactcttcttggcgcacggcaggctagtatacatgttcaacgtaggtcacaagaaattgaaaatccgcagtcaggagaagtataacgatgggctgtggcacgacgtcatattcatccgcgagagatcctcaggccggctcgtgatcgacggactccgcgtattggaggaaagcctcccacccacggaggccacatggaagataaaggggccaatttacctggggggagtcgctcccggaaaagctgtaaaaaacgttcagattaattccatatattccttctcaggctgtctctccaacctccagctgaacggtgcctcaatcacgagtgcatcgcagaccttcagtgtgacgccctgtttcgaggggcctatggagacgggaacttatttttcgaccgagggcggttacgtggtgctcgacgaatccttcaacatcggcctcaagttcgagatagcgttcgaagtgagaccgcggtcctcttcaggcaccttagtccatgggcatagcgtgaacggagagtacttaaacgttcatatgaaaaatggacaggtgatcgtgaaggtgaataacggcatccgagattttagcacgagtgtcacccccaagcagtcattatgtgatggaagatggcacagaattaccgtgatccgggattcaaacgtagttcagcttgacgtggactccgaggttaatcatgtcgttgggcctctcaacccaaagccaatcgaccatagggagcctgtatttgtgggcggtgtgccggaatcactgctcacacctcgactggctcctagcaagccttttacaggatgtattagacatttcgtgattgacggacatcctgtcagctttagcaaggcagcgctcgtgtctggagccgtctcaattaattcctgtcctgctgcctag

SEQ ID NO: 192691 - DNA, 390 bp, synthetic construct
  misc_feature 1..390: note = Description of Artificial Sequence: Synthetic coding sequence
  source 1..390: mol_type = other DNA
atggccctgagcagcgcctggcggagcgtgctgcccctgtggctgctatggagcgccgcttgcagtagggccgctagtggcgatgataatgctttcccctttgatatagagggatccagcgccgtgggtaggcaggaccctcctgaaacaagtgaaccacgggtggcactgggacgcctgcctccagctgcagagaagtgtaatgctgggttcttccacaccctgtcaggcgaatgtgtcccttgcgattgtaatggtaactctaatgaatgtttggacggcagcgggtactgtgtcacaaccgatggcgaggaccctggattttctgcaagtgcgttaagttttatcctgtcctcacaaggcgcacgggaagcccgcgctccgacctag

SEQ ID NO: 192692 - DNA, 363 bp, synthetic construct
  misc_feature 1..363: note = Description of Artificial Sequence: Synthetic coding sequence
  source 1..363: mol_type = other DNA
atggccctgagcagcgcctggcggagcgtgctgcccctgtggctgctgtggtccgcggcatgctcacgggccgcctctggtgatgataacgcctttccattcgacatcgagggatcttctgccgtagggaggcaggaccccccggagacgtcggagccccgggtagccctggggagattgcccccagccgctgaagtccaatgcccatgccactgtcaccctgctggagctccggcgcccccccgggcagtgcctcacagttcattctccctaagcccgcccctcagtagccctcaatgtctggagtcttttacctgggcccgatccgtgcggaaacttgagataaagtcattccccctgtag

SEQ ID NO: 192693 - DNA, 1125 bp, synthetic construct
  misc_feature 1..1125: note = Description of Artificial Sequence: Synthetic coding sequence
  source 1..1125: mol_type = other DNA
atggccctgagcagcgcctggcggagcgtgctgcccctgtggctgctgtggtccgccgcctgtagtagagccgctagcggcgatgataatgccttcccgttcgacatcgaaggttcctccgccgtagggcgacaagacccacctgagacaagcgagcccagagtggcgctggggcgcttacccccagccgccgaaaaatgtaacgccgggttcttccataccttatccggggagtgcgtgccttgcgactgcaatggaaattcaaacgagtgcctggatgggtccggttactgtgtacactgtcagcggaatacaacaggggaacattgcgaaaagtgcctggatggatacattggtgactctataaggggcgcccctcagttctgtcagccatgtccatgtcccttgccacacctggccaacttcgctgaatcatgctataggaaaaatggcgcggtccgatgcatctgcaacgagaattacgccggccccaattgtgagcggtgcgccccaggatactacgggaatcctctgctcataggctcaacttgcaagaagtgcgactgttccggcaactctgatccaaatctgatctttgaggattgcgacgaggtgaccggccaatgtcgcaattgcctcagaaacaccacaggcttcaaatgcgagaggtgtgccccgggttattacggagacgcacggatcgccaaaaattgcgctgtgtgcaattgtgggggaggcccttgcgacagtgtgactggcgagtgcctggaggagggctttgagccccccacaggcatggactgtccgacgatatcctgcgataagtgcgtttgggacctcaccgatgcactccgcttagccgccttatcgatagaagaagggaagagcggagtgctatcagtaagctccggcgcagccgctcatcgccatgtcaatgagattaatgccaccatctacctgcttaaaactaaactgagtgaacgggagaatcaatacgcactccggaagatacagataaacaacgctgagaatacaatgaaaagtctattgtccgatgtagaggaactcgttgagaagcattggaacaaaccgcgcagaaggctggagttgcaggagggggtttag

SEQ ID NO: 192694 - DNA, 363 bp, synthetic construct
  misc_feature 1..363: note = Description of Artificial Sequence: Synthetic coding sequence
  source 1..363: mol_type = other DNA
atggccctgagcagcgcctggcggagcgtgctgcccctgtggctgctgtggagcgctgcctgtagccgggcggcgtcgggcgacgataacgccttcccctttgatatcgagggctcaagtgcagtggggcgacaagatcccccagaaacatcagaacctagagttgccttgggccgtttgccacctgccgcagaagttcaatgcccttgtcactgccaccctgcaggtgcccctgctccacccagggcagtgcctcactcgagcttcagcctttcacctccccttagcagcccccaatgccttgaaagttttacttgggcccggtccgtgaggaagctcgaaatcaaatcctttccactgtag

SEQ ID NO: 192695 - DNA, 324 bp, synthetic construct
  misc_feature 1..324: note = Description of Artificial Sequence: Synthetic coding sequence
  source 1..324: mol_type = other DNA
atggccctgagcagcgcctggcggagcgtgctgcccctgtggctgctatggagcgctgcctgcagtcgtgctgcgagcggagatgacaatgcttttccatttgatatcgagggcagctccgcagttggcagacaggatccccccgagacatcggagcctagggtggcactggggcgactgcctccagccgcagagaagtgtaatgccggttttttccacacactgagtggcgagtgtgtcccatgcgattgtaacgggaactcaaacgagtgtttagatggttccgggtattgtgtgcattgccagaggaataccacagggtag

SEQ ID NO: 192696 - DNA, 996 bp, synthetic construct
  misc_feature 1..996: note = Description of Artificial Sequence: Synthetic coding sequence
  source 1..996: mol_type = other DNA
atggccctgagcagcgcctggcggagcgtgctgcccctgtggctgttgtggagcgcggcctgcagcagggctgctagcggcgacgacaatgcctttccatttgatatagaggggtccagcgctgtcggaaggcaagatcctcctgagacaagcgaaccccgggtggctctggggagactgccccccgccgcagagaaatgtaacgcaggtttcttccatactctgtcaggggaatgcgttccgtgcgactgcaatggcaattccaacgaatgtcttgatggatctgggtattgtgttcactgccaacggaacacgactggcgagcactgtgaaaagtgcctggacggctatattggtgatagcattcgtggcgcaccccagttttgccagccatgtccctgccctctgccgcatctggccaactttgctgagagttgttaccgcaagaacggagccgtgaggtgcatttgtaatgagaactatgccggccccaactgtgagcgctgcgctccaggttactatggaaaccccttactgatcgggtctacatgcaagaagtgcgactgctccggtaatagtgatcctaatttgatctttgaagactgcgatgaagtcacaggccagtgtagaaactgtttgcggaacactacagggtttaaatgtgagagatgcgcacccggctactacggagacgcccgtattgcaaagaactgtgccgtttgcaactgtgggggaggcccatgcgactcggtcactggagaatgcctggaggaagggttcgagccacctaccggaatggactgccctacaataagctgtgacaagtgtgtgtgggacctcaccgatgccctacggctcgcggcgctatcaattgaggaaggcaagtccggcgtcctcagcgtgtcatccggggccgccgcgcacagacacgtgaatgaaatcaacgccacaatctatctcttaaagacaaaactgagcgagagggagaatcagtag

SEQ ID NO: 192697 - DNA, 246 bp, synthetic construct
  misc_feature 1..246: note = Description of Artificial Sequence: Synthetic coding sequence
  source 1..246: mol_type = other DNA
atggccctgagcagcgcctggcggagcgtgctgcccctgtggctgctgtggtccgctgcttgcagtcgtgctgcttctggtgacgataatgcctttcccttcgacatcgagggctcgtccgccgtggggcgacaggatccccctgaaaccagtgagccgcgcgtggccctagggcgcctgcccccagccgccgagaaatgcaatgctggcttcttccacacgttgtctggagagtgcgtcccgtag

SEQ ID NO: 192698 - DNA, 5451 bp, synthetic construct
  misc_feature 1..5451: note = Description of Artificial Sequence: Synthetic coding sequence
  source 1..5451: mol_type = other DNA
atggccctgagcagcgcctggcggagcgtgctgcccctgtggctgctttggagcgcggcctgttctagggcagcatctggggacgacaacgcattcccgttcgacatagagggctcttcagctgttggtcggcaggaccctccagagacatccgagccccgtgttgccctaggaagacttccacccgccgccgagaagtgcaacgcggggttttttcataccctttccggtgaatgtgttccctgcgattgcaacgggaatagtaatgaatgtctggacgggtccggatactgtgttcattgccagcggaacacaaccggcgaacattgtgagaagtgcttggacgggtatataggcgacagcattagaggagctccacagttttgccagccatgcccttgtccgcttccccacctggcaaacttcgccgagtcatgttaccgcaaaaatggcgcagtgagatgcatttgcaacgagaactatgcaggccccaactgcgaacggtgtgcacccggctattatggaaacccccttctcatcggttccacatgtaagaaatgtgattgctccgggaattcagatccaaacctaattttcgaagactgcgacgaggttaccgggcagtgtcgcaactgtctgcgtaacaccaccggatttaaatgcgaaaggtgcgcacctggatactatggcgatgcacgtatcgcgaagaattgtgcggtgtgtaattgtggtggcggcccttgcgactctgtaacgggtgagtgtctggaggaaggatttgaaccccccaccggctgtgataaatgtgtgtgggacttgacggatgcgctcagactcgctgccctcagcatagaggaggggaagtctggcgtgctctcagtgtcgtccggcgcagcagcccacagacacgtcaacgaaatcaatgcaaccatatatctgctgaaaacaaaactcagcgaacgggagaatcaatatgctctcaggaaaatccagatcaacaacgccgaaaacaccatgaagtcactgcttagcgacgtcgaggagctcgttgaaaaggagaatcaggctagccgcaaaggccagctggttcagaaagagagcatggacactatcaaccacgcatctcagctggtcgaacaggcacacgacatgcgcgataagatacaggaaattaacaacaaaatgctctactatggcgaggagcatgaactatctccaaaagagatcagcgagaaattggttttggcccagaagatgcttgaggagatccgctcgagacagccttttttcacgcaacgcgagctcgtcgatgaagaagctgacgaggcgtatgaactgctctcccaggctgagtcctggcagaggcttcacaacgaaactcgcacgctttttcctgtggtcctcgaacaactcgacgactataatgctaaactgtccgacctgcaggaggcgctggaccaggcactcaattatgttagagacgctgaagatatgaaccgcgcaaccgctgccagacagcgcgaccacgaaaagcagcaggaaagagtgagggagcagatggaggtagtgaatatgtcattgtccacttccgcagactctctgaccacccctagactcaccctttctgagctcgacgacataatcaagaacgcttcaggcatctacgctgagatcgacggggctaagtctgagctacaggttaagcttagtaatttatcaaatctgtcccacgaccttgtccaggaggctattgatcacgcacaggatctacagcaagaagcaaacgaactgtctaggaagctccattcctcagacatgaatggcctcgtgcagaaggccttagacgcctccaacgtctatgaaaatattgtcaactatgtcagcgaggctaacgagactgcagagttcgcgctgaacactacagaccgtatatacgacgccgtatccggaatcgatacacagattatctatcataaagacgaaagcgaaaatctccttaatcaggccagggagctccaagccaaggccgaaagcagctccgacgaggccgtagccgatacctcccgtagggttggtggcgccctcgcacgaaagtctgcgctgaaaacccgattgtctgacgccgttaaacagctgcaggctgctgaacgcggagacgcccagcagcggctagggcagagccgtctaatcacagaggaggcaaatcgaacgacaatggaagtacagcaagctactgctccgatggctaataacttaacaaattggtctcagaacctgcagcatttcgattcctctgcctacaacaccgccgtcaattctgcccgcgacgcagtccgcaatcttacagaagtcgtgccacaactcctagatcagttgcgtaccgtggagcaaaagcgtcccgcctccaacgtgagtgcatcaattcagcggatcagagaattgatcgctcagaccagatctgtggcaagcaaaatccaggtgagtatgatgtttgacggccaatccgcagtggaggtgcactcacgcacaagtatggatgacctcaaagcttttacaagcctgagcctatacatgaagccacctgttaagcgccccgaattgacggagacagctgatcagttcattctgtaccttggctctaagaacgccaagaaggagtacatggggctggctattaaaaacgataacctcgtgtacgtgtacaacctggggacaaaggacgtcgagatcccgcttgattccaagccagttagttcttggcctgcctacttcagtatcgtgaagattgagagggtggggaagcacggcaaggtgttcctaactgtgccctcactgtcttcgaccgctgaagaaaaatttattaaaaagggagaattctccggtgacgattccttattagacctcgacccagaagatacagtgttctatgttggtggtgtaccgagtaacttcaagctcccaacctccctgaacctgccagggtttgtaggctgcctggaactggctacacttaacaatgatgttatttccctgtacaatttcaagcatatctacaatatggacccaagcacaagtgtgccgtgtgcgagagacaagctggcttttacacaatcaagggccgcgtcttatttcttcgatggctccggatacgcagtggtgagagacataacaaggcggggcaagtttggccaagtgactcggtttgacatcgaagtgaggacacccgcggataacggcctgattctactgatggttaatggttccatgttctttaggcttgaaatgcgcaatggttatcttcatgtcttctacgactttggcttctcaggcggaccagtgcatctggaggataccctgaaaaaggcacaaattaacgacgcgaagtaccacgaaatctctattatataccacaacgataagaaaatgattctcgtcgtggatcgtcgccacgtcaaatcaatggacaatgagaagatgaaaataccatttactgatatttacataggaggtgccccgcctgaaatcctccagagccgagctctccgggcccatctccccctggacatcaatttcaggggttgcatgaagggcttccagtttcagaagaaggatttcaaccttctggagcaaacagagaccttaggcgtgggctatgggtgccctgaggactctctgatttcgagacgcgcgtattttaacgggcagagctttatcgcctctatccagaagatcagtttctttgatggctttgagggcggcttcaactttcggactctacaaccgaacggcctgttgttttattacgccagcgggtccgatgttttctctataagcctggataatgggacggtcatcatggatgtcaagggcattaaggtccagtctgtggataagcagtataatgacggcctgtcccattttgtgatcagcagtgtgtctccaaccagatacgaacttattgtggacaaatcaagagtggggagcaaaaaccccaccaaaggcaaaattgagcaaactcaggcttccgagaagaagttttatttcggaggaagcccaatcagcgctcagtatgcaaactttacaggatgtatctctaacgcctattttacgcgtgtggatcgggatgtggaagtggaggactttcagaggtatactgagaaagtgcacaccagtttgtatgaatgtccaattgaatccagccctttgtttttgctccataaaaaagggaagaaccttagcaaacctaaggcatcacagaataaaaaaggaggtaaatccaaggatgctccctcgtgggaccccgtggccctgaaactgccagaacgcaatacgccgaggaatagccactgtcatctaagtaattccccccgcgctatcgagcatgcctaccagtatggcggcaccgccaattcccgccaggagtttgagcaccttaagggggatttcggcgccaagagccagttctcaatccggctacgcactcgttcctcacacggaatgattttttacgtttctgatcaagaggaaaacgatttcatgaccctcttcttggcacatgggcggcttgtttacatgtttaacgttggacataagaagttgaaaatccgtagccaagaaaaatataacgacggactgtggcacgacgtcatattcattagagaacgctcctcaggcaggcttgtgattgatgggctgagggtccttgaggaatccctgccaccaacggaggctacttggaagatcaagggaccaatttacctcgggggtgttgccccgggtaaagcggtcaagaatgttcaaatcaatagcatctactctttcagcgggtgcttgtcgaatttacagctaaacggtgcatccatcacatctgcgagccaaactttttcagtgactccctgtttcgaaggacccatggagacgggcacctacttttctacagagggtggctatgtggtcctggacgagtcattcaatatagggctcaaattcgaaatagcatttgaggtgcggcccaggtcatcatctggcacccttgtacatggtcactcagttaatggagaatatctgaacgtgcacatgaaaaatggtcaggtcatcgtcaaggtgaataatggcatacgcgacttctcaacatccgtgacacccaaacagtcattgtgtgacgggcggtggcatcgcatcacggttataagagattcgaacgtggtgcagctggacgtggactcagaagtaaaccacgtggtcggaccacttaaccccaaaccaattgaccaccgcgaaccagtatttgttggaggcgtcccagaaagccttttgactccgcgtcttgcccctagcaagccctttacgggctgcatccgccatttcgtgattgatggccatcccgtgtcattttccaaggccgcgctcgtttcaggggctgtatcaataaattcatgccccgcagcatag

SEQ ID NO: 192699 - DNA, 975 bp, synthetic construct
  misc_feature 1..975: note = Description of Artificial Sequence: Synthetic coding sequence
  source 1..975: mol_type = other DNA
atggccctgagcagcgcctggcggagcgtgctgcccctgtggctgctctggtcggcggcctgcagtagggccgcctcaggcgacgataatgcctttccattcgatatagaggggagcagtgcagtcggtaggcaggatccaccagagacttctgagccacgggtggccctgggacgtctcccaccggccgccgaaaagtgcaacgccggttttttccacaccctgtcaggtgaatgtgtgccatgcgattgtaatggtaattcgaacgaatgcttggacgggagtggatattgcgttcactgccagcggaacaccaccggggagcactgtgagaagtgtctcgacggatatatcggggatagcattcgcggggctcctcaattttgccagccttgtccctgtccgctacctcaccttgctaacttcgctgagtcctgctataggaagaatggcgccgttcgatgtatctgtaatgaaaattacgcagggccaaactgcgagaggtgcgctcccggatactatgggaaccccctgctgattgggtccacttgcaagaaatgtgattgttcgggcaacagcgacccaaacctgattttcgaggactgcgacgaggttactgggcaatgtaggaactgtctgcggaataccacaggcttcaagtgtgaacggtgcgcccctggatactacggggacgccagaatcgctaagaattgtgctgtctgcaactgcgggggcggcccatgcgacagcgttaccggtgaatgtctggaagaggggttcgagccaccaactggatgcgataagtgtgtgtgggatttaactgacgccctgcgtctagcagctttgtctatcgaggaaggaaagtctggagtgctttccgtatcctccggcgccgctgcccacaggcatgtcaatgagatcaacgcgaccatttacttgctgaaaaaaaccaaacagaaaaataacaaaaagtag

SEQ ID NO: 192700 - DNA, 11088 bp, synthetic construct
  misc_feature 1..11088: note = Description of Artificial Sequence: Synthetic coding sequence
  source 1..11088: mol_type = other DNA
atggccaagcggctgtgcgccggcagcgccctgtgcgtgcggggcccccgcggacctgcccccctgctgctggtgggactcgcgcttcttggtgctgcccgcgcccgagaagaggctggcgggggtttctcgttgcaccccccatatttcaacctcgcagagggcgctaggatcgccgccagcgccacctgcggggaagaggcacctgccaggggcagcccacggcctacagaggacctatactgtaagttggtgggaggaccagttgctggcggtgatcctaatcagacaattcgcggtcagtattgcgatatttgcaccgcagccaacagcaataaagcgcatcccgcatccaacgctatcgacgggactgagagatggtggcaaagcccccctcttagtcgcgggctcgagtataacgaagtgaacgtgaccctagatcttggccaggtgttccatgtcgcttacgtcctcatcaaattcgcaaattctcctcggcccgatctgtgggtgctggaacggagcatggactttggcaggacatatcagccctggcaattcttcgccagctccaaaagagactgcctggagaggttcggccctcagaccctggagaggatcacacgagacgatgctgccatttgcaccaccgagtattccaggatcgtcccgttagagaatggcgagattgtggtttctctggtaaatgggagacccggggctatgaatttcagctattctcccctgctgcgcgagtttacaaaagctaccaatgtgcgattgagattcctgcgaacaaacacgttactgggtcacctaatgggaaaagccctgagggatccaacagtcaccagaaggtactactactcgatcaaggacatctcaattggtggccgctgtgtgtgtcatggacatgccgacgcctgtgatgctaaggaccctacagacccctttagacttcagtgtacttgccagcacaacacttgcgggggcacctgtgataggtgttgtcctgggtttaaccaacagccttggaaacccgctacggctaactcagctaacgagtgtcagtcatgtaattgttacggacatgccacggactgctactacgacccagaggtggacaggaggagagcatcccagagcctggacggaacataccagggcggaggagtgtgtattgattgccagcaccacactactggggttaactgtgagagatgcttgcctggattttataggtctccgaatcaccctctcgactcaccacatgtgtgcagacgctgtaactgcgagtctgatttcacagatggaacatgcgaggacctgacaggtaggtgctactgtcggccaaacttttctggcgagcgctgcgacgtttgcgccgaagggttcaccggcttccccagctgctacccaacaccgtcgtcatctaacgacactcgggagcaggtcctccctgcggggcaaatagtgaactgcgattgcagcgccgccggtacgcaggggaacgcatgtagaaaagacccccgagtgggaagatgcctctgcaaacccaattttcaaggaacccattgtgaactttgcgctccaggcttctacgggcccggctgccagccttgccaatgctcttccccaggggtggcagatgaccgctgtgaccctgatacagggcaatgtaggtgccgagtgggctttgagggggcgacctgcgaccgatgtgcacctggatacttccatttccccctgtgtcagttgtgcggatgctcaccagccgggacgttgccagagggatgtgatgaggcaggacgctgtctgtgtcagcccgagtttgccgggccccactgcgatagatgccgaccaggctaccatggcttcccaaattgccaggcttgcacttgcgatccacggggcgctctcgatcagttgtgcggcgccggaggcctgtgccgttgcaggccgggatataccgggaccgcatgccaggagtgcagccctggtttccatggattcccttcctgcgtgccatgtcattgctctgctgaagggtccttacatgccgcatgtgaccctaggagcggacaatgtagttgccggcctagggtgaccggactcaggtgtgatacctgcgtgcccggcgcctacaacttcccctattgtgaggctggaagttgccaccccgcaggattagccccagtagacccggcgctgcccgaagcccaggtgccctgcatgtgtagagctcacgtagaggggcccagttgtgacagatgcaagcccggattttgggggcttagtccctcaaaccccgagggatgtacccgttgttcgtgcgacctacggggtactctggggggtgtggccgagtgccagcccgggacaggccagtgcttttgtaaaccacacgtttgtggtcaggcgtgtgcatcgtgtaaggacggttttttcggtcttgatcaggcagactactttggatgtcggagctgtcgatgtgatattggcggtgcccttgggcagtcatgcgaaccaaggaccggtgtatgtaggtgtcgccctaatacccagggccccacatgctcagagcccgcacgggatcattacttacctgacctccaccacttgcgcttagagcttgaggaagctgcgacaccagaagggcacgccgtgcgattcgggttcaaccccctagagttcgaaaatttcagttggcgaggctacgcacaaatggctcccgttcagccacgaatcgtggccaggctgaatcttactagccccgatctgttctggctggttttcaggtatgttaacaggggagccatgtccgtgtccggtcgagtctccgtaagggaggaaggacggagtgctacctgcgctaactgcaccgcccaaagtcagccagtagcgttcccccctagtactgagccagcatttatcacagtgccacagagaggtttcggggagccgttcgtgctgaatcccggcacttgggccctgcgggtggaggctgaaggcgtcctgctggattatgtcgtgctccttcccagcgcgtactatgaggcagccctactccagctgagggtgaccgaagcttgcacgtacaggccatctgctcagcaatctggggataactgtctactgtacactcaccttccactggatggctttccctctgcagcagggctggaggccctttgccggcaagataacagcttaccaaggccttgtccaaccgagcagctgagcccaagtcacccaccattgataacctgcaccgggtccgacgttgacgtgcagctccaggtggctgtcccccaacccggaaggtacgccctggtggttgagtacgccaacgaagacgctaggcaggaggttggcgtggcggtgcatactccccaacgggccccgcagcaggggctgctttccctccacccatgcctgtattccacgctgtgtaggggtactgccagggacactcaagatcaccttgcagttttccatctggactcagaggcaagcgtccgcctcaccgccgagcaggctcgattctttctgcatggagtcacgcttgtgcctattgaggaattcagcccagagtttgtggagccgagggtgagctgtatctcaagccacggcgcttttgggcccaactctgccgcatgtctgccgagccgattccccaagcctccacagcctattattttaagggattgtcaggtgattccacttcctccaggactgccgctgacgcacgctcaggacctcactcctgcaatgtccccagccggtcccagacctagacctcctactgccgtcgaccctgacgccgaaccgacgctcttgcgggaacctcaggccacagtggtgtttaccacccacgtgcctactctgggaagatatgccttcctgttgcatggttaccaacctgctcaccctacctttccagtggaggtgttgatcaatgccggcagggtgtggcaaggccacgctaatgcaagtttctgtccacacggatacggttgtcgcacattagtggtctgcgaagggcaggccctcctagacgtgacacacagtgaactgacggttaccgtgagagtgcctaaggggcggtggctctggctggattacgtccttgtcgtgcccgagaacgtgtattctttcgggtatttgagagaggagccactcgacaagtcttatgatttcatttcccactgtgccgcccagggataccatatatcgcccagttcctcttcactgttttgcaggaatgcagcagctagcttgtcattgttctacaacaatggagctaggccatgcggctgccatgaggtgggtgcaaccgggccaacttgcgagccctttggagggcaatgtccatgtcatgcccacgtcattggcagagactgtagccggtgtgctacaggctactggggattcccaaactgtcgaccttgtgactgtggtgctcgactctgcgatgaactcacaggtcagtgtatatgtccacctcggacaatcccacccgattgtctgctctgccagccccaaacttttgggtgccatccgttggtagggtgcgaggagtgcaattgctctgggcctggaatccaggaacttaccgaccccacttgtgataccgactctggacagtgcaagtgcagacctaatgtgacagggagaaggtgtgatacatgcagtcctgggttccatggatacccccggtgtcgaccttgtgattgtcatgaggcagggaccgcccctggcgtgtgcgatcctttaacggggcaatgttattgcaaagagaatgtgcagggtcctaaatgcgaccaatgctccctgggtacattctcgctggacgcggccaaccctaaaggctgtactagatgcttttgttttggagcaacagagcgttgcaggtcaagtagctatacccggcaagagtttgtggacatggagggctgggtcctcctttcgaccgaccgtcaagtagtgcctcacgagcggcaacccggcactgaaatgctcagggccgaccttcgacacgtgcccgaggctgtcccagaagcttttcctgaactgtattggcaagcccccccctcttacctcggagaccgggttagctcatacggtgggactctacgctatgaactacactccgagacacagaggggcgacgtctttgtcccaatggagtcgcgcccagacgttgtactgcagggaaaccagatgagcattacctttttggaaccagcttacccaacacctggacacgtccatcgcggccagcttcagcttgtcgaggggaacttccggcacaccgagacgagaaacaccgtgagtcgtgaggagctgatgatggtgcttgcatccttggaacagctgcaaatcagagcccttttcagccagatatcctccgcagtgttcttgaggagagtggctttggaggtggcttcacctgctggccaaggagcactggcctccaacgtggagctgtgcctctgcccagctagctacagaggcgattcttgccaggagtgcgcccccgggttttacagagacgtgaaaggtctgttcttaggaagatgtgtcccatgtcagtgccatggtcactccgatcgatgccttccagggagcggggtttgcgttgactgccagcacaacaccgagggcgcccactgtgaacggtgtcaggccgggttcgtgtcttcgagagacgaccccagcgcaccatgcgtatcttgtccttgtcccctctccgtaccctccaataactttgccgaagggtgcgtgctcagaggcggccgcacccagtgtctgtgtaagcctggttacgccggcgcaagctgcgagagatgtgcaccaggattctttgggaatccgcttgttttaggaagttcttgccagccttgtgattgttcggggaatggcgatcctaacctgctgttctctgactgcgatcccctgacaggcgcatgccgagggtgtctgagacatacaacggggccccggtgcgagatctgtgcaccgggcttttatggaaacgccctcctcccagggaattgtaccagatgcgattgtactccctgtggaacggaagcgtgtgaccctcatagcggacactgcctttgtaaagctggagtcaccgggcggagatgtgataggtgtcaggaaggccatttcgggttcgacggatgtggcggctgtcggccctgtgcttgtggacctgctgctgaaggctccgagtgccacccacaatccggtcaatgtcactgccggcccggtaccatgggaccacagtgtcgtgaatgtgccccaggttattgggggttgcccgagcagggatgccgaagatgccaatgcccagggggccggtgtgacccccataccggaagatgcaactgcccccctgggctaagcggtgagcgctgtgatacatgtagtcagcagcaccaggtccccgttccaggtggccccgtgggccactctattcactgtgaagtgtgcgatcattgtgtggttctacttttggatgatctggagcgcgctggcgccctgctcccggcaatacacgaacagctcaggggcatcaatgcctcttctatggcatgggctcggctgcatagactgaatgccagcatcgccgacctgcagtctcagctccgatcacccctagggcctagacacgagaccgcacagcagctggaagttttagagcaacaatcaactagcctgggccaggacgcacgtaggctaggcggacaggctgttgggacaagagaccaggcaagccagctgctggcgggaaccgaagccaccctgggccacgcaaagactctcctggcagcaattcgggccgtggatagaaccctctccgagttgatgagccagacgggccacctcggcttggcaaatgccagcgctcctagcggcgaacagcttctgcgaacattggccgaagtcgagcgcctgctgtgggaaatgcgggctcgggatcttggggctcctcaggccgctgccgaagccgaacttgctgccgcacagcgcctcttggcacgcgttcaggaacagctgtctagcttgtgggaagaaaatcaggctcttgctacccaaactcgggacagactcgctcagcacgaggccggtctgatggatttgcgtgaagccctcaacagggctgtcgacgccacgcgggaggcacaggagctaaactcaagaaatcaagaacgcctggaggaggctctgcagagaaaacaagagctcagccgggacaacgcaacccttcaggcaacactccatgctgcacgcgacacacttgcaagcgtatttaggctgctgcacagtttagatcaggctaaggaggagctggagcggctggcggcgtccctggatggggcacggacccctctgctgcaaaggatgcagacattctcccccgccggatccaaactgcgccttgtggaagcggcagaagcccatgcccagcaactcggccagctggctcttaacctcagctctattatccttgacgtgaatcaagaccgccttacacagcgcgccattgaggctagcaatgcttattcccgaattttgcaagccgtacaagccgcagaggatgccgctggccaggctctgcaacaggccgatcacacctgggccacagtggttaggcaggggctggtggatagagcacagcagctcctggcaaattctacagcgctggaggaggcgatgctgcaggagcaacaaaggctgggtctcgtgtgggcagctcttcaaggcgcccggacacagctgcgagacgtgcgcgcgaagaaggaccagcttgaggctcacatccaggcagcacaggccatgctcgcaatggatacggacgaaacctccaaaaaaattgcccacgccaaagccgtggcagcagaggcccaggacacagccacacgtgtccagagccagctgcaggctatgcaggagaatgtggagcggtggcagggccagtacgaagggttaaggggccaggatctggggcaggccgtcctcgatgcagggcactctgtctctactctggagaagacacttccgcaactgctcgcaaagctttccatcctggagaaccggggagtacacaatgcaagtttggccctgtcagcaagtatcgggagggtgagggaattgatcgctcaggcacgtggggcagcaagtaaggtgaaagtgccaatgaagttcaatggtagatccggcgtgcagttacggacgcctcgggatttagccgacttggccgcgtataccgccttgaagttttacctgcagggcccagaaccagagcctggccagggaaccgaagaccgttttgttatgtatatgggctctagacaggcaacaggtgattacatgggcgttagtcttagagataagaaagtccactgggtttaccaactcggggaggcagggcctgccgtcctctcaattgatgaggatatcggggaacaattcgccgcggtgagtttagacagaacactccagtttggacatatgtccgtgactgtggagcgccaaatgatccaggagactaagggcgatacagtggccccaggggcagagggactgctgaacctcaggcccgatgacttcgtgttctacgtcggcggctaccccagtaccttcactccaccaccacttttgaggtttccgggctacaggggctgcatcgaaatggatacactcaatgaggaagtggtctctctgtacaacttcgaacggacatttcagctggacacagctgtcgataggccctgcgcgaggtcaaaatcaaccggggatccctggcttaccgatggttcttacctagatggcaccggtttcgcccgaataagtttcgattctcagatcagcactactaagaggttcgaacaggagctgcggctggtctcctactccggcgtgctcttttttctgaagcagcaatcccagttcctgtgcctggccgtgcaggagggatccttagttctgctatacgatttcggggcaggactgaaaaaggccgttcccctgcaacccccgccacctctgacctccgcctccaaggcaattcaggtcttcctgttggggggcagcaggaaacgcgtgttagtgcgggtagaacgagcaactgtgtactccgtggagcaggataacgaccttgaactagcggatgcctactaccttggcggggtccctccggatcagctcccgccgtcactgaggcgcttgtttcccactggggggagtgtgcgggggtgtgtaaagggcattaaggctctgggcaaatatgtcgaccttaagagactgaatacaacaggcgtttccgctgggtgtaccgccgatctgttggtgggcagggccatgacattccatggtcatgggttcttgagactggcattatcgaacgttgctccactcactggcaatgtctattctggttttggtttccattctgcgcaagacagtgcgctcctgtactaccgagcctctcccgatggactgtgccaagttagtcttcaacagggccgcgtttcactccagctcctcaggactgaggtgaaaacccaagctggattcgcagatggtgccccccactatgtagctttctattcaaacgccactggagtttggctgtacgtcgatgaccagctgcagcaaatgaagcctcatcgagggccacccccggagttgcaaccacagcccgaaggtccccctaggttgttactgggaggtttgccagagtcaggcacaatctataacttttcaggatgcataagcaatgtcttcgttcaacgcctcctggggccccagcgcgtgttcgatcttcagcagaatctgggctctgtaaatgttagcaccgggtgcgcccccgccctacaagctcagactcctggcttgggcccacggggtctacaggctaccgcaaggaaggctagtagacgttctagacagcccgctagacacccagcgtgcatgctaccgccacacctgcggactacacgcgattcctatcaattcggcggaagtctaagtagccacctggaatttgtaggcattctggctcggcacagaaattggccatctttaagcatgcacgtccttccgcggtcttctcgcggtctactcctgttcactgctcggctgagacccggcagcccctcacttgctctgttcctgtccaacgggcatttcgtggctcagatggagggacttggtactcgcctgcgtgcccagagccggcagaggagcaggcccggccgctggcacaaagtaagcgtgagatgggagaagaaccgcatactgctggtgacggacggggctcgcgcgtggtctcaggagggacctcatcgccagcaccagggggccgagcacccgcagccccacacattatttgtaggcggattgcccgcaagctcgcattctagcaaactaccggtaaccgttggtttctccgggtgcgtcaaaaggcttaggctgcatgggcgcccattaggggccccaactcggatggccggggtgacaccatgtatcttgggacccttggaagcaggtctgttctttcctggctcagggggcgtcatcaccttggatctgccaggtgcaactcttccagacgtcggtctcgaacttgaggtgcgccccctcgccgtgaccggtctgatatttcatctcggtcaggcacgcacacccccgtacctgcagctgcaggtgaccgaaaagcaggtactgttgagagctgatgacggagcaggcgagtttagcacgtctgttacgagacccagtgtgctttgtgacggacagtggcaccgattagccgttatgaaaagtggcaacgtcctgcgccttgaggtggacgcacagtctaaccacacagtcggacccctgctagccgcggcggccggagccccggcaccattgtacctgggcggcctcccagagcccatggctgtgcagccatggccacccgcttactgtgggtgcatgaggcgccttgccgtaaatcggtcacctgtggccatgactcgatccgttgaggtgcacggcgcagtgggcgcctctgggtgcccagcagcatag

SEQ ID NO: 192701 - DNA, 1503 bp, synthetic construct
  misc_feature 1..1503: note = Description of Artificial Sequence: Synthetic coding sequence
  source 1..1503: mol_type = other DNA
atggccaagcggctgtgcgccggcagcgccctgtgcgtgcggggccctcggggtcccgcaccactgttgttggtaggcctcgcgctgctgggggctgcaagggctcgagaggaggctggagggggctttagcctgcacccaccttatttcaaccttgccgagggcgcacgcatcgccgctagcgccacatgcggggaggaagcacctgcacgggggagtccccgacctaccgaggacctttattgcaagctggttggggggccggttgctggtggcgatcctaaccagacaatcagaggtcagtattgtgatatatgcacagccgccaattccaacaaagctcacccagcgtctaacgcaattgacgggaccgaaaggtggtggcagagccctccactgagtcgggggctggagtataatgaggtgaatgtcacattggacctcggccaagttttccatgttgcatacgtgctgatcaaatttgctaactcgccacgtcccgacctatgggtactggagcgctctatggactttgggagaacgtatcagccatggcaattctttgcgtcatcgaaacgggactgtctcgagcgtttcggtccgcagacactcgaaagaatcacgagagacgatgctgcaatttgcaccactgagtacagtcgcatcgtgccactcgagaacggggaaatcgtcgtcagcttggtcaacggtagacctggcgctatgaatttttcttattccccgctgctgcgggaattcacaaaagccacaaatgtgcggctccgcttcttgcggactaacactctcctaggccatttgatgggtaaggctcttagggacccgacagtaaccaggagatactactacagtatcaaggacatctctattggtggaagatgcgtttgtcatggccacgctgatgcctgcgacgcaaaggaccctaccgacccattcaggctgcaatgcacatgtcaacataacacatgcggaggaacctgtgacaggtgctgtccgggatttaatcaacagccttggaagcccgccactgccaactctgccaacgagtgtcagtcttgcaactgctacggtcatgctactgattgctactacgacccagaggttgaccggaggagagcaagtcagagtctggacggcacatatcaaggaggtggtgtgtgtatcgactgccagcaccacacaactggagtcaattgtgaacggtgtctgcccggattctatcggtcgcctaatcacccactcgacagtccgcatgtgtgtaggaggtgcaattgcgagtctgatttcaccgatggcacctgcgaggatctgacaggcaggtgttactgtaggcccaacttcagtggagagcggtgcgacgtttgcgctgagggctttacaggattcccttcctgttacccgacgcctagctcatccaacgacacgagagagcaagtgctgcccgcgggccagattgtgaccaacaccaagatctcctgggtctag

SEQ ID NO: 192702 - DNA, 1587 bp, synthetic construct
  misc_feature 1..1587: note = Description of Artificial Sequence: Synthetic coding sequence
  source 1..1587: mol_type = other DNA
atggccaagcggctgtgcgccggcagcgccctgtgcgtgcggggccccagaggccctgcccccctgttgctggtggggctcgccctcctgggagccgcccgggcccgcgaagaagccggcgggggcttcagcctccacccaccttactttaacttagctgagggagctcgtatagcagcgtccgccacctgcggcgaagaagcccccgccaggggctccccccggcctactgaagatctttactgtaagctggtgggtgggccagtcgctggcggggatcccaatcaaacaatccgagggcagtactgcgacatatgcactgcggctaattccaataaggcacacccagcatccaatgctatcgatggcacagaaagatggtggcaaagccctcccctgtcaagaggacttgagtacaatgaagtgaacgttacactggatctgggccaggtgtttcatgtagcttatgttcttatcaagttcgctaactctccacgtcccgatttgtgggtgctggaacggtctatggactttggaaggacttatcagccgtggcagttcttcgcatcctcgaagcgggactgcctagaaaggttcgggccacagacgttggagcggatcacacgtgacgacgccgccatctgcactacggagtattctcgaattgtcccactcgaaaacggagaaatagtggtgtctctggtaaatggcagacctggcgcaatgaacttctcctactctcctctgcttcgggagtttaccaaagctacaaatgttcgactgcgctttctccgaactaataccctgcttggccatctgatggggaaggcgctgagggatcccaccgtcaccagacggtattactactctataaaggatataagtatcggcgggcgctgtgtgtgccacgggcacgctgatgcgtgcgacgccaaggatcccacagatccttttcgcctgcagtgtacctgtcagcataacacgtgtggagggacgtgcgaccgatgttgccctggatttaaccaacagccctggaagcccgccactgccaactcagcaaacgagtgtcagtcttgcaactgctacggtcacgcgaccgactgctactacgatccagaggtggatcgcaggcgagcttctcagagtctggacggaacctaccagggtggaggagtgtgtatcgattgtcagcatcacacaacaggcgtgaattgtgaaaggtgtctcccagggttttacaggagccccaaccaccctctggattctccacatgtgtgcagaagatgcaattgtgaaagtgatttcactgatggcacctgtgaggacttgactggtagatgctactgtcggcctaacttcagtggtgagcgttgcgatgtttgtgctgagggattcaccggctttcctagttgttacccgacaccttcgtcaagtaatgatacccgcgaacaggttctgcctgcaggacaaatagtgaatggcgtgtcgttatgtcgtccagggtggtctgccgttgcccgttcacgcctgacttcaacaagcgcctcctgggttcaagctatactcctcccacagagtccagagtag

SEQ ID NO: 192703 - DNA, 2187 bp, synthetic construct
  misc_feature 1..2187: note = Description of Artificial Sequence: Synthetic coding sequence
  source 1..2187: mol_type = other DNA
atgtgggtgaccaagctgctgcccgccctgctgctgcagcacgtgctcttgcatctgctgctgctccctattgctataccatacgccgagggccagcggaagaggcgcaacacaatccacgaattcaagaaatccgccaagaccactctgattaagatagatcccgccctcaagatcaaaacaaagaaagtgaacaccgccgaccaatgtgcaaatagatgtacaaggaacaaggggctaccctttacctgcaaagcctttgtgtttgacaaggcaagaaagcagtgtctgtggttccccttcaattcaatgagttctggcgtgaaaaaagagtttggccacgaatttgatctgtacgaaaacaaagactacataaggaattgcatcatagggaaaggccggagttataaagggacagtgagtattaccaaatcagggatcaagtgtcagccttggagcagtatgatccctcatgagcacagtttcctgcccagcagctaccgggggaaagacctccaggagaactattgtcgtaacccgagaggggaggagggagggccttggtgtttcacatccaaccctgaggtccgctacgaagtgtgcgacatccctcagtgtagtgaggtggaatgtatgacctgtaacggcgaaagctaccgcggattaatggatcataccgaaagcggtaagatttgtcagcggtgggaccaccaaacacctcaccgccacaagtttttaccggaacgctaccccgataaggggttcgatgacaattactgccgtaatcctgatggccagcctcgcccttggtgctacaccctcgatccacacacgcgctgggaatattgcgccattaagacttgcgcggacaacaccatgaacgacacagatgtgccccttgagactacagagtgcattcagggacagggcgaggggtaccgggggaccgtgaataccatctggaatgggatcccttgtcagaggtgggattctcaataccctcacgagcatgatatgacgccagagaatttcaagtgcaaggacttacgtgaaaattactgcaggaaccccgacggctccgaaagcccttggtgttttactacggaccccaacatacgcgtcgggtactgtagccagattccaaattgtgacatgtcgcatggacaagattgctacagagggaatgggaaaaactacatggggaacctcagtcagacccgcagcggcttgacctgtagcatgtgggataaaaacatggaggatttacatagacacatcttttgggagcccgatgccagtaagctcaatgagaattactgtaggaatcccgacgatgatgcccacgggccatggtgctacaccggcaatccacttatcccctgggactattgtcctatatcgcgctgcgaaggcgacacaaccccaacaatcgttaatctggaccatcctgtgatcagctgtgctaaaactaaacagctgcgagttgtaaatgggattcccactagaaccaacattgggtggatggtgtcactgcggtatcgtaacaagcatatctgtggagggtccctgattaaagaatcttgggtacttacagcacgacagtgtttccccagtagggacctcaaggactatgaggcatggttgggcattcacgacgtgcatggcaggggcgacgagaaatgcaaacaggtgctgaacgtctcccagcttgtgtacgggcctgagggcagtgacctggtcttaatgaagctggcaagaccggctgtcctggacgacttcgtctccacaatagacctgcccaactacgggtgcacaatcccagaaaaaacctcctgctcagtatatggctggggatataccgggctgatcaattacgatgggcttttgcgggtggctcatttatatatcatggggaatgaaaagtgcagtcaacaccatcgtggcaaagtgactctaaatgagtcagagatctgcgctggtgccgaaaagatcgggtctggaccttgcgaaggtgattacggtgggccgttggtgtgcgaacagcataagatgagaatggtgctcggcgtcattgtcccaggtcgcggttgtgcaatcccaaacaggcccgggatcttcgtgagagtggcctattacgctaagtggatccacaagattatactgacatataaggtgccccaatcctag

SEQ ID NO: 192704 - DNA, 276 bp, synthetic construct
  misc_feature 1..276: note = Description of Artificial Sequence: Synthetic coding sequence
  source 1..276: mol_type = other DNA
atgggcctgctgcagctgctggccttcagcttcctggccctgtgcagggcccgggtgagggctcaggagcctgagttttcctacgggtgcgcagaggggtcttgctaccccgcaacaggagatctgttgatcgggagagcccaaaaactcagtgttacatcaacatgcggactgcataagcctgaaccctactgtatcgtgagccatctgcaggaggacaagaagtgcttcatctgcaactcacaggacccataccatgagactctgaatccatag

SEQ ID NO: 192705 - DNA, 2553 bp, synthetic construct
  misc_feature 1..2553: note = Description of Artificial Sequence: Synthetic coding sequence
  source 1..2553: mol_type = other DNA
atgggcctgctgcagctgctggccttcagcttcctggccctgtgccgggcccgggtaagggcccaggaaccggagtttagctacgggtgtgcggaggggtcctgctatccagccacaggcgatttgctcattggcagagcccaaaagctgagtgttacttccacgtgtggcctgcataaacccgagccctattgcatcgtgagccaccttcaggaggacaaaaaatgctttatatgtaactcacaggacccttatcacgagacgctaaacccagatagccacctgatcgagaacgtggtgacgacctttgctcctaaccgactgaagatttggtggcagtcagaaaatggcgtggagaatgtgaccattcaactggatttggaagcagaattccatttcacgcacttaattatgaccttcaagacttttcggccagctgccatgctgatcgagcgcagctcagatttcggaaagacctggggagtgtacagatactttgcatacgactgtgaagctagcttcccgggcatctctacagggccaatgaagaaagttgacgacatcatttgtgattcgcgatattctgacattgagccgtcaaccgagggcgaagtgatctttagagcactggatccagcgttcaagattgaagacccatactccccccgcatccaaaacttactgaaaattactaatcttcgaattaagttcgtgaagctgcacacgctgggcgacaatctcctggactcgcggatggagatccgcgagaaatactattacgcggtgtacgatatggttgtaaggggtaattgcttttgttacggccatgcttcagagtgtgctcccgtggatgggttcaacgaagaagtcgaggggatggtgcatggacactgcatgtgtaggcataacacgaaggggctaaattgtgaactctgcatggacttttaccacgatctgccttggcgtcctgccgaaggccgtaattctaacgcctgcaaaaaatgtaattgcaatgaacactccatctcctgccatttcgacatggccgtttacctggccacagggaacgtgagcgggggcgtgtgcgacgactgccagcataacactatgggtagaaactgtgaacaatgcaagccgttttattaccagcaccccgaaagagacatcagggatcccaatttctgcgaacgctgtacttgcgaccctgccgggtcacagaacgaaggcatctgcgactcatacaccgatttttctacgggcctgattgccgggcagtgtcgatgcaagctgaacgtagagggcgaacattgcgatgtatgcaaggaaggcttctacgacctgtctagcgaggacccttttgggtgcaagtcttgcgcctgtaacccgcttggcaccattcccggcggcaacccatgtgactcggaaaccggccattgctactgtaaacgcctggtgactgggcagcactgcgatcagtgcttgcctgagcactggggtctctctaatgacctggacgggtgcaggccctgtgactgtgacttgggtggcgccctcaacaattcctgtttcgctgaatcaggccaatgttcgtgccgcccccatatgataggcagacagtgtaatgaagtggagccaggctattactttgcgacccttgaccactacctgtatgaggccgaggaagcgaacctcggacccggggtgagcatagtagagcggcagtatatccaagacaggatcccctcgtggaccggggccggttttgtccgggtgcctgagggagcatacctggaattttttatagataacatcccgtactctatggaatatgatattctgatccgctatgagccacagctcccagaccactgggagaaagctgttatcacagttcagcggcctggccggattcccacctcatcacgctgcggaaatactatccctgacgatgacaaccaggtggttagccttagccctggctcccgctacgtagtattgcctaggcctgtctgttttgagaaaggcactaattatacagttagactggagctgccacagtacacaagttcagatagcgatgtcgagtctccatacaccctaatcgatagccttgtattgatgccatattgtaagagcctggatatcttcaccgtcggaggttcaggggacggtgtggtgactaactcagcttgggaaacgtttcagcgatatcgctgcttggagaactcccgctccgttgttaaaacacctatgactgatgtctgccgcaacattatattttccatcagtgccctcctgcaccagacaggtctggcctgtgagtgcgacccccagggctccttgagcagtgtgtgtgatccaaacggcgggcaatgtcaatgcaggcccaacgtcgtaggccgaacttgcaataggtgcgctcccgggaccttcggctttgggccgagcggctgtaagagaagatttttgaaatcgatagtgatgcatagttttcggctaacccagcccctgtggcaaggaagtattgccgcagaaccaatgttgccatcttag

SEQ ID NO: 192706 - DNA, 5397 bp, synthetic construct
  misc_feature 1..5397: note = Description of Artificial Sequence: Synthetic coding sequence
  source 1..5397: mol_type = other DNA
atggagctgaccagccgggagcggggccggggccagcccctgccctgggagctgcggttgggcctgcttctgtccgtgctggccgccacactggctcaggcccccgcccctgacgtgccaggatgcagtagaggctcttgctaccctgccacaggcgatttactggtcggaagagctgatcgtctcactgctagctctacttgtgggctgaacggcccccaaccctactgcatcgtcagccatctacaggacgaaaagaagtgcttcctgtgcgactctcgtaggcccttctcagccagagataatccgcactcccatcgaatacagaatgtggtaacaagctttgcaccacagagaagagctgcctggtggcagagcgagaatggaatacccgccgtcaccattcagctcgaccttgaagctgagtttcacttcacccatttgatcatgaccttcaaaaccttcagacccgctgcaatgttagtggaacggtcagccgatttcggccggacttggcacgtgtatcggtatttttcgtacgactgtggggccgatttccctggcgtccctcttgcaccaccgaggcactgggacgacgtggtttgtgaatcgcgttatagtgagattgagccctcaacagagggtgaagtgatctatagggtgctcgaccctgcaattccgatcccagacccttactcttctcgcattcagaatctgttgaagattacaaacttgagagtgaatctgactaggctgcacacgctaggggataaccttctggatcctcggcgcgaaatacgcgagaagtactattacgctctgtacgagcttgtggtgcgcgggaattgtttctgttacggtcacgctagtgagtgtgctcccgccccaggggctcctgctcacgcagagggcatggtccacggcgcgtgtatctgcaagcacaacactagggggctgaattgtgagcaatgccaagatttctacagagatctcccttggcgccctgctgaagatggacatagccatgcatgcagaaagtgtgagtgccatgggcacacacactcctgtcacttcgatatggcggtttatctcgctagcggcaatgtcagcggaggagtctgcgacgggtgtcagcataataccgcgggacggcactgtgaactgtgccggccttttttttacagagatccaacaaaagacctgcgcgatccagccgtttgtcgcagttgtgactgtgaccccatgggctcccaggatggaggcaggtgtgactcccacgatgaccctgcgctcggtttggtctcagggcagtgccggtgcaaggagcacgtcgtcggaacgcgttgtcaacaatgtcgcgatggtttctttggtctgtctatctccgacagattgggctgccgcagatgtcagtgtaacgccagaggaacagtgccagggtcgacgccttgtgacccgaacagcggatcttgttactgtaagcgactggtgaccggccggggatgtgacaggtgcctccccggtcactggggactcagccacgacttgctgggctgccgcccctgcgactgcgatgtcggcggggccctggatccacagtgtgacgaggggactgggcagtgtcactgtcgtcagcacatggtgggtcggagatgcgagcaagttcaacccggctattttcgcccgttcttggatcatctgatctgggaagcagaggacacacgcggacaggtgctcgacgtcgtggagcgcctggtcacccccggagagaccccatcatggactggcagcggctttgtgcgcctccaagaaggtcaaactttggaattcctcgttgccagtgtgccaaaagcaatggattatgatctattgcttaggctagagccccaggtgcctgaacagtgggctgaattggagttaattgtacagcgccccgggcctgtgccagcgcattcgctgtgcgggcatcttgtgcccaaggatgatagaattcaaggcacactccagcctcatgcccgctatttaatcttccctaaccctgtgtgccttgaaccgggcattagttataaactgcacttaaaactagtgcgcaccggcggaagcgctcagcccgagaccccctattctggacctggcttattgattgactccctcgtcctgctgccacgtgtcttggtgttagagatgttctccgggggggacgctgctgcactagaacgccaggctacctttgaaagatatcaatgccatgaggagggcctcgtcccgtctaagaccagtcctagcgaagcctgcgcccccctgctgatctccctgtctacactgatatacaatggcgccctaccgtgccagtgcaatcctcaagggtctctgtcatcagaatgcaatccacacggcggccagtgtttgtgtaagcctggggtcgtgggaagaaggtgcgatctgtgcgcccctggttactatggctttggcccaacagggtgccaggcatgtcagtgtagccacgaaggtgcattaagctctctgtgcgaaaaaacctcggggcagtgcctgtgtcgtacaggagcctttggccttcggtgtgaccgctgccagcggggccagtggggcttcccttcttgtagaccttgcgtgtgtaatggccatgccgatgaatgcaacactcatacaggggcttgcctcgggtgccgggatcatacaggaggagagcactgcgaaagatgtatagctggcttccacggcgatcctagactgccctatggcggtcaatgccggccctgtccctgcccggaaggaccagggtcacagcggcacttcgcaacctcatgccatcaggacgagtactctcagcagattgtgtgccactgtcgggccgggtacacaggcctgaggtgtgaggcatgtgctccagggcacttcggggacccgtccaggccaggaggcaggtgccagctgtgcgaatgctcgggaaatattgatcccatggatccagatgcttgcgaccctcacacgggccagtgcctgcgatgtctccatcatactgaggggcctcactgtgcccattgtaaacctggcttccatggccaggctgcgcgccaaagctgccaccgctgtacgtgtaacctgctgggcaccaatccccaacagtgtcccagtcccgatcagtgccactgcgatccgtcatcgggccagtgtccatgccttccaaatgtacaaggcccaagctgcgaccgatgtgcccccaatttttggaatctcacttccgggcacgggtgtcagccatgcgcatgccaccctagccgtgctaggggccctacctgcaacgaattcaccgggcagtgccattgtcgagccggattcggtggacggacctgttctgagtgccaggaactgcactggggagatcctggactccagtgtcacgcatgcgattgcgattcgcgaggcatcgatacaccacagtgccacaggttcaccgggcactgctcctgtcggcctggagtaagtggcgtgaggtgcgaccaatgtgcgaggggcttcagcgggatttttccggcatgtcacccttgccacgcctgctttggtgactgggacagagttgttcaggacctggctgctaggactcagagacttgaacagcgtgcccaggagctgcagcagactggggtgctgggagcattcgaatcttctttttggcacatgcaagaaaagttggggattgtgcaaggtatagtgggagctcggaacactagcgccgctagcacagcccagctggtcgaagcaactgaagagctgcgcagggaaattggcgaggcaactgagcatttgacacagttagaggctgatctcacagatgtccaggacgagaattttaatgccaaccacgccctgagcggactggaaagagacaggttagccctgaatttaactctgcgccaactggaccagcacctggatctgctgaagcactcaaactttctcggcgcctacgactctatccgtcatgctcattcccagtctgcagaggccgagagaagggcgaatacatcagcgctggccgttccatcccccgtgagcaatagtgcctcagcaagacatagaacagaagccttgatggacgcccaaaaagaggattttaactctaaacacatggctaatcagcgggccctcgggaaattaagcgctcacacacacaccctgtccctcactgacattaacgaattagtgtgcggggccccaggggacgcaccttgcgccacgagcccgtgcgggggcgccgggtgcagagacgaggacggccagccccgatgcggaggtctttcctgcaatggcgctgccgcaactgccgatctggcactaggccgggcaaggcatactcaggcagagctccagcgagccttggccgaagggggatccatccttagccgagtggcagaaaccagaaggcaggcctccgaagcccaacaacgagcccaggcagccctcgacaaggcaaatgccagcagaggccaagttgaacaggcaaatcaggagctgcaagaactgatacaatctgtcaaggatttccttaaccaagagggtgcggatcctgattcaatcgagatggtcgccacgcgggtcctggagttgtccatcccagctagcgccgagcagatacagcatctggcaggcgccatcgcggagagagtgaggagtctggctgatgtggacgccatattggcccgcacagtcggagacgtccgaagggctgaacagttgttacaggatgctcggcgcgcccgcagttgggcagaagatgaaaagcagaaggctgaaacagtacaagccgctctcgaagaagcacagcgggcccagggcatagcccagggcgccatccgcggagcggtggccgatacgagagataccgagcagacactgtaccaggtgcaggagcggatggcaggggcagagagagcactgtcctccgcaggggaaagggctcgtcagctcgacgcactactggaagccctaaagctgaagagagctggcaattcgctggccgccagcacagccgaggagaccgcaggatccgcccaggggcgcgcacaggaggccgagcagctgctcagggggccactaggcgaccagtaccagaccgtgaaggccttggcagagcgcaaggcacagggggtgcttgcagcccaggcccgcgccgaacagttacgtgacgaggcccgagatttattgcaggccgcccaggataagctgcaacggctgcaggagcttgagggaacatatgaggagaatgaacgggcactggagagtaaggcagctcaactggatgggcttgaggcgcgaatgagatccgttctccaggccatcaacctgcaagtgcagatttataatacatgtcagtag

SEQ ID NO: 192707 - DNA, 1143 bp, synthetic construct
  misc_feature 1..1143: note = Description of Artificial Sequence: Synthetic coding sequence
  source 1..1143: mol_type = other DNA
atgcaggagaagctgggcatcgtgcagggcatcgtgggcgcccggaacacttctgcagcgagcacggcgcagttggtggaagctaccgaagagctgcgtcgagagataggcgaggctaccgagcacctgacacagctggaagctgacctcactgatgtccaagacgagaacttcaacgcaaatcatgctctgtccggactggagagggataggctcgctctcaatctcaccctccggcaactggatcaacacttggatttgctgaaacacagtaactttctcggcgcatacgattctatcaggcacgcgcactcacaatccgccgaggccgagcgaagagccaatactagtgctctggcagtaccttctcccgtgagcaacagcgcgtctgctagacaccggaccgaggcactcatggacgcccagaaggaggacttcaattctaagcatatggccaatcaaagagcattgggtaaacttagtgctcacactcatacactcagcctgacagatattaatgagctcgtgtgtggcgcacctggcgatgccccatgcgccacgtccccctgtggaggggccgggtgcagggacgaagacgggcagccacggtgcgggggccttagctgtaacggggcagccgcgacagcagatcttgccctgggaagagcccgtcacactcaagccgagctgcagcgggccctggccgaagggggaagcatcctgagcagagtggccgaaacgcggcgtcaggcttcagaggctcaacagcgagcacaagcagcattggataaagcaaacgcgtctcggggtcaggtcgagcaggctaaccaggagctccaggagttgattcaatccgtgaaggatttcttaaaccaagagggcgcagatccagatagcatcgaaatggtggccacccgcgtactggagctgagcatacctgccagtgccgagcagattcagcatctagcaggcgcgatcgccgaaagagtgcgctccctggcagatgtggatgccatcttggctcaaggaattgcccagggcgcgattaggggagccgtggcagacacacgggataccgaacagcccgtgcccgggactggagaggacggacgatgcagagccggcacagagctttgtcggtag

SEQ ID NO: 192708 - DNA, 5397 bp, synthetic construct
  misc_feature 1..5397: note = Description of Artificial Sequence: Synthetic coding sequence
  source 1..5397: mol_type = other DNA
atggagctgaccagccgggagcggggccggggccagcccctgccctgggaactccgcctgggcctgcttctctccgtactagcggcaaccctggcgcaggcccccgctcctgacgtgcctggttgctctaggggatcctgctatcctgccaccggcgacctactagtcggaagggctgacaggctcaccgcaagcagcacatgcggactgaacgggccacagccctattgtattgtgagtcatctgcaggacgagaagaagtgcttcctgtgcgactccaggcgaccattctcagcccgtgataatccccactcacatagaatccagaatgtggtgactagtttcgcccctcagcgtcgcgcagcctggtggcagagtgagaacggaatccctgcagttactatacagctggacctcgaggcggaatttcactttacgcatttgatcatgacatttaaaacctttaggcccgctgctatgttagtggagcgatccgctgatttcggaagaacgtggcacgtctatcgatattttagttatgactgcggcgcggattttcctggagtgccgcttgcaccaccccgtcactgggatgatgtcgtctgtgagtcgaggtactctgaaattgagcctagtacggagggagaggtgatttacagagttttggaccctgcgattccgatacctgacccatactcctctcggatacagaatctgttgaaaataaccaatttaagggttaatctaaccagactgcacacactgggagacaacctcttagatcctcgacgtgaaatcagggagaagtactactatgcactctatgaacttgtggtacgggggaactgtttctgctatggccacgcaagtgaatgtgctcccgcccctggggccccagctcacgccgaaggcatggtccatggcgcctgcatttgcaaacacaatacgcgaggtctgaattgcgaacaatgccaggatttctatagggatttaccatggcgtcccgcagaagacggacatagccacgcttgccgcaaatgcgagtgtcatggccacacacattcctgtcattttgacatggccgtttacctcgcgtcagggaatgtgtccggaggagtttgtgacgggtgccaacacaataccgctgggcgccattgtgagctgtgccgcccatttttttacagagacccgaccaaggatttgagggatcctgcagtgtgccgctcttgcgactgcgatcccatggggtcccaagatggtggtcggtgtgactctcatgatgaccccgctctcgggctcgtgagtggccaatgccgatgcaaggagcatgtagtgggtacacgatgccagcagtgtcgcgacggttttttcggcttgtccatcagtgacagactcggatgtcgccggtgtcagtgcaatgccagaggaactgttccaggcagtaccccatgcgacccgaacagcggcagctgctactgtaagcgcctcgttaccggacgcggctgtgatcggtgcctgcccggtcattggggcttgtctcacgatttactaggctgtagaccctgtgactgtgatgtgggaggagctctggacccccagtgtgatgaaggtactggccagtgccactgtaggcaacatatggttggccgacgctgtgagcaggtgcaacctggatacttccgccctttcttggaccacctcatctgggaggcagaagacacgagggggcaagtgctcgacgtggtggaacgacttgtgacccccggagagactccttcttggactgggtccggctttgtcagattgcaggaggggcagacgctggaattcttggtggcatctgttcctaaggccatggattacgacctgttattacggctggagccgcaggtgcctgaacagtgggctgagctcgaactgattgtacaacgacccggccccgtccccgctcacagcctctgtggccacctggtgcctaaggacgatcggatccagggtactctgcagccacatgctcgttaccttatcttccccaaccctgtgtgcctggagccggggatctcctacaaacttcacttgaaattggtgaggaccggcggaagtgcacagccagaaacaccctacagcgggcctggactgctgattgactctctggtactgctcccccgggtgctggttttagagatgtttagcggcggtgacgctgcggctctggaacggcaagctactttcgagcgataccaatgtcacgaggaaggcttggtcccctcgaagacctcaccaagcgaggcttgtgcaccgcttctaattagcctctcgaccttgatctataatggtgcgctcccatgtcaatgtaatcctcaaggtagccttagcagcgagtgtaacccccatggaggacaatgcctatgcaagccaggtgtcgtgggtaggcggtgtgatctgtgtgctcccgggtactacggctttggtccaactgggtgtcaggcttgtcagtgctcacacgaaggagcattgtcatcgctctgcgagaagacctccggccagtgcctctgtcgaacaggggccttcggcctgaggtgtgaccgatgccagaggggacagtggggcttccctagttgccgcccttgcgtgtgcaacggccatgcagacgagtgtaatacccacactggtgcttgcttgggatgtcgggaccacactggcggtgagcactgtgagagatgtattgccgggttccacggggatccaaggctcccatacgggggccaatgcaggccctgtccatgtcctgagggccctggttcccagcggcattttgcaacctcatgtcatcaggatgaatattcccagcagatcgtctgtcattgccgtgccgggtataccggcctgcggtgcgaggcctgtgccccggggcattttggcgatccttcccgacccggcggcagatgccagctgtgcgagtgttctgggaacatcgatcccatggaccccgatgcgtgtgacccacataccggacagtgcctgagatgtctgcatcacactgagggcccacactgcgctcattgcaagccaggctttcatgggcaggctgctaggcaaagttgccatagatgcacatgcaatctgctcggaactaatccacagcagtgtccaagccccgatcagtgccattgtgatcccagctcaggacagtgcccttgtctgccaaatgtgcagggtccctcctgcgaccgatgtgccccaaatttttggaacttgacctctggccacggatgtcagccttgcgcctgccatcccagtagggcccgcggtcccacatgcaatgagtttacaggccaatgccattgcagagcgggcttcggcggccgcacctgcagcgagtgtcaggagctccactggggggaccccggcctccagtgtcatgcttgcgattgtgacagtcgcggaatcgatacaccccaatgtcaccgcttcacggggcattgctcctgtcgacctggcgtctctggtgtgagatgtgatcagtgtgcccggggcttcagcggcatcttcccagcatgccacccctgtcacgcctgtttcggagactgggaccgtgtggtgcaggatctcgcagcccggacccagcgcctcgagcagcgggcacaggagttgcagcagaccggcgtcctgggcgccttcgagtcctccttctggcatatgcaagagaagctcggcatagtgcagggtatcgtaggagcccgcaatacttccgctgcatctactgcccaactggtggaagccacagaggagttacgcagggaaatcggcgaggccacagagcacctcacccagttggaggctgatctgaccgacgttcaggatgagaactttaacgcaaaccatgcgctgtccgggctcgagcgggacaggttggcgttgaacctgactctgagacagttggaccagcaccttgatctactgaagcacagcaactttttgggagcctacgactctatacgtcacgcgcattcccagagcgcagaagcagagcggagggcaaacacttcagcacttgccgtgccatctccggtgtccaactcagctagtgcacggcacaggacggaggcactgatggacgcacagaaagaagacttcaatagcaaacacatggctaaccagcgggcccttgggaagctgagcgcacatacacataccctctcacttacagacatcaacgaactggtgtgcggagctcctggcgacgctccgtgcgctacatctccgtgcggcggcgctggctgcagagacgaggatggacagccaaggtgtggcggccttagctgcaacggggctgccgccacagctgatctggccctaggccgcgctcggcacactcaggccgaattacaacgagctctggcagaagggggatctatcctgtctagagtggccgaaaccagaaggcaggccagcgaggcccagcaaagagctcaggcggcactggataaggctaacgcttctaggggacaggtggagcaagcaaaccaagaacttcaggaactgatccagagtgtcaaagactttttgaaccaggaaggtgccgatcctgattccatcgagatggtggcaaccagggtactggaactatcgatccctgctagcgctgagcagattcaacacctggctggcgcaatcgccgaacgggtacggtccctggccgacgtggacgctatcctggctaggacggtgggggatgtgcgtcgcgcagaacagttgctgcaggacgcaagacgagccaggtcttgggcagaggacgagaaacagaaagccgagacagtgcaggcggccttagaggaagcgcagcgggcacagggcattgcgcagggagccatccgtggagccgttgccgataccagagatacggagcagaccctctaccaggtccaagagcgtatggctggggccgaacgggccctgagttcggccggtgagcgggctcgccagttggacgccctgcttgaagcgttaaaactcaaaagagcaggcaattctctcgcagctagcacagccgaggaaaccgccggctcggcccaaggtcgggcacaggaagcagagcagctactcagggggcccctgggtgatcagtaccaaaccgtaaaagctctggctgaaaggaaggctcagggggtcctagcagctcaagccagggcagagcagctgagagatgaagccagggatctattgcaagctgctcaggacaagctgcagaggctccaagaacttgagggcacctacgaagaaaacgagagagccctggaaagtaaggcagcccagctggacgggctggaggcccggatgcgcagcgtacttcaggctatcaacctccaggtgcaaatctacaatacttgtcagtag

SEQ ID NO: 192709 - DNA, 3519 bp, synthetic construct
  misc_feature 1..3519: note = Description of Artificial Sequence: Synthetic coding sequence
  source 1..3519: mol_type = other DNA
atgcggcccttcttcctgctgtgcttcgccctgcccggcctgctgcacgcccagcaggcgtgctctagaggcgcctgttacccaccagttggggatctcctggtaggccgtacccggtttttgcgggcctcgagcacatgtggactcaccaagccagagacctattgcacacaatacggggagtggcagatgaaatgctgtaagtgcgacagtcgtcagccccataactactattcccaccgagtcgagaacgtcgccagctcctcaggacccatgcgctggtggcagtcgcagaatgacgtaaacccagtctccctccagctcgatctcgataggagatttcagctgcaagaggtcatgatggagttccaggggccaatgcccgctgggatgctgatcgaacgctctagtgatttcgggaagacctggcgtgtctaccagtatctggccgctgattgtacatcgaccttcccccgtgtccgccagggcaggcctcaatcttggcaggacgtccgctgtcaaagcctcccccagcgccccaatgccagactgaacggtgggaaggttcagctcaacctgatggatttggtgagtggaattcctgctacccaatctcagaagatccaggaggttggcgagattaccaacctgcgcgtcaattttacaagactggctccagtgccgcaaagaggatatcatcctccttctgcgtactacgcagtcagccagttgaggttgcaagggtcctgcttttgccacggacatgccgacaggtgcgcccccaaacccggcgctagcgccggccccagtactgcggtgcaggtgcacgatgtgtgtgtgtgtcagcataatacggccggccctaactgcgagaggtgtgctcccttttacaacaacaggccctggcgacccgccgaaggccaggacgcccatgagtgccaaagatgcgattgtaacggccactccgagacatgccactttgatccagctgtgttcgccgcatcacagggggcctatgggggagtgtgcgacaattgcagggatcacaccgaggggaaaaattgcgagaggtgccaactccactacttcagaaacaggcgacctggggcaagcatccaagagacatgcatctcatgcgagtgcgatcctgatggtgctgtgcctggcgctccttgcgacccggttacgggccagtgtgtctgtaaagaacacgtccagggtgagcgctgtgatctttgcaagcctggattcacaggcttaacttatgctaaccctcagggctgtcatcgttgtgactgcaacattctgggaagcaggcgagatatgccgtgtgacgaggaatcgggaagatgcttatgcctgccaaacgtcgtaggcccgaaatgtgatcagtgcgcgccgtaccattggaaactcgcctcgggccaggggtgtgagccttgcgcatgcgaccctcacaattcacttagcccccaatgcaatcagttcactggccagtgtccctgtcgcgagggattcggaggcctgatgtgttctgctgctgcgatccggcagtgtccagaccgtacgtatggcgacgtcgctactggctgcagagcctgtgactgcgattttcgtgggaccgaagggccggggtgtgacaaggccagcgggcgatgtctgtgccgtcccggtctcacaggcccacggtgcgatcagtgtcagcgggggtattgcaatcgctaccccgtgtgcgtggcctgccacccgtgcttccaaacttatgacgccgacttgcgtgaacaagccctgcgattcggccgtctgaggaatgccacggcctccctgtggagcggccccggcctagaagatagaggcctggcctccaggatcctcgacgctaagagcaagattgaacagatcagggccgttctttcctctcctgcagtgaccgagcaagaggtggcccaggtggcttctgcaatactctccctgcggcgcactctgcagggacttcaactcgatctaccactcgaggaagagaccctctcccttcctagggatctcgagtcactcgacagatccttcaacggactgttaactatgtatcaaagaaaacgcgagcagtttgagaaaatcagcagcgccgacccttccggggccttcagaatgctgagcactgcatatgagcaatccgcacaggcagctcagcaggtgtccgacagcagtaggcttttagatcagttgcgcgacagtcgtcgcgaggcagaacgccttgttcgacaggcagggggcggcgggggcactggctctccaaagctggtggccctgagattagagatgtcttcactgcctgatcttacccccacatttaataaactttgcgggaattcgagacaaatggcgtgtactccaatcagctgtccgggtgaactctgcccccaggacaatggtaccgcatgcggcagccgctgtcggggcgtattacccagggctggcggtgcatttcttatggctggccaggtggccgaacaactgcgcggattcaacgcccaacttcagagaacacgccagatgattagagctgcagaagaatccgccagccagatccaatcgtccgcacagagactggagacacaggtgtccgcctctcgttctcaaatggaagaggacgtcaggagaaccaggctactgatccagcaagttagagactttctcacagacccagataccgacgccgctacaatacaggaagtttccgaggctgtgttggccctgtggttgcctaccgatagcgctaccgtgctccaaaaaatgaatgagattcaggccatcgccgccaggctccccaatgtagatctcgtgctcagccagactaagcaagatattgcgcgcgctcgccgcctgcaggcggaggctgaggaggctcggtccagggcacatgcagtggaagggcaggtagaggatgttgtaggaaatctaaggcagggtactgtcgccctgcaggaagcccaggacacgatgcaaggcacatccagaagtctgcgactcatccaggacagagtcgctgaagtccagcaggtgctcagacctgcagaaaagctggttacctctatgaccaaacagctgggtgatttttggacccgaatggaagagttaagacaccaagcccgacagcagggcgccgaagcagttcaagcccagcagctggccgagggcgcatcagagcaggctctgtcagcccaggaaggatttgagcggatcaaacagaagtatgccgagctgaaggacagacttgggcagtcatcgatgctcggagagcagggtgcgaggatacaatcggtcaagactgaggccgaagagctctttggtgagaccatggagatgatggacagaatgaaggatatggaacttgagcttctgagagggtcccaggctatcatgctgcgaagcgctgatctgaccgggctagagaagcgtgtggaacagattcgcgatcatataaacggacgcgtgctgtattatgccacctgtaagtag

SEQ ID NO: 192710 - DNA, 3519 bp, synthetic construct
  misc_feature 1..3519: note = Description of Artificial Sequence: Synthetic coding sequence
  source 1..3519: mol_type = other DNA
atgcggcccttcttcctgctgtgcttcgccctgcccggcctgctgcacgcccagcaggcatgctcacgaggagcatgctatccccccgtaggagatctgttagtggggaggactcgcttcctgcgcgcatcctcaacttgtggattaaccaaaccggaaacatactgcacacagtatggcgaatggcaaatgaaatgttgtaagtgtgatagcaggcagcctcacaactactactctcatcgggttgagaacgtggcttcatcttccggccccatgcgctggtggcagagccagaatgacgtaaatcccgtctccctccagctggatctcgacagacgttttcagttgcaagaggtaatgatggagtttcaagggcccatgccggctggaatgctgattgaaagatctagtgacttcggaaagacttggcgcgtgtatcaatacttggccgccgattgtacctcaacttttcctcgtgttcgccaggggaggccgcagtcttggcaggatgtccgctgccaatccttaccacaaagacccaacgcaagactgaatggggggaaggtgcagctgaatctcatggatctcgtgagcgggattcctgcgacccagtctcagaagattcaggaggtcggagagattaccaacctgagggtcaactttactcgactggcgccggttccccagcgcggttaccacccaccctcggcatattatgctgtgagccaacttagacttcaaggatcatgtttctgccacgggcacgcagaccgctgtgccccaaagcccggagcctctgcaggaccatctactgctgtgcaggtgcatgacgtttgtgtatgccagcataacacagcgggcccaaattgtgaaaggtgtgctccattctacaataaccgtccgtggcgccccgcagaagggcaggatgctcacgagtgtcagcggtgtgattgtaatggccattctgaaacatgtcatttcgatcccgccgttttcgcagcttcccagggggcttatgggggcgtgtgcgataattgtagagatcatacagaagggaaaaactgtgagcgttgtcagctgcactatttccgtaacaggaggccaggggcttctattcaggagacctgcattagttgcgagtgtgatccagacggagcggtgcctggagctccctgcgatcctgtgactggccagtgtgtttgtaaggaacatgtgcagggcgaacggtgtgatctttgtaaaccaggattcacaggcctcacctatgccaacccacaaggctgtcatagatgtgactgcaatatcttgggttctcgcagggatatgccttgtgatgaggagagcggcaggtgtctatgcctacctaatgtcgttggacccaagtgcgaccagtgtgccccataccactggaaactcgcgagcggtcaaggatgcgagccttgcgcctgcgacccccataattcacttagtcctcagtgcaatcagttcactggtcagtgtccttgtagagagggatttggtggactcatgtgcagcgccgccgctattcgccagtgtccagaccgcacatatggcgatgtggctacggggtgccgagcctgtgactgcgacttcaggggaacagaagggccgggttgtgataaggcttctgggaggtgcctctgccgacctggccttacaggcccacgttgcgatcagtgtcaaagaggttattgtaataggtatcctgtgtgtgtcgcttgccatccttgtttccagacatatgacgctgacctgcgagaacaggccttaagatttggaagactgcgcaatgccactgcctccctctggtcagggcccggtctggaggatcgtggtcttgcttcgaggattctggatgctaagtccaagatcgaacagatccgggcggttctcagttcccccgcggtgactgaacaggaagtggcccaagtggctagcgccattctgagcctgcggaggacactgcagggactgcagctggacttaccactggaagaggagaccctcagcctcccgcgcgatctggagtccctcgaccgaagcttcaacgggctgctgacaatgtaccaacgtaagcgggaacagttcgagaagatatcctctgccgacccctcaggggctttccggatgctctccaccgcctacgagcagtcagcccaggccgcacagcaggtgtccgactcatcacgcctcttggatcaattacgagacagccggcgcgaagccgagagactcgtgagacaggccgggggggggggtggcaccggatctccgaagctcgtcgctctgcggctggaaatgagttctctgcccgatctaacaccaactttcaacaaactgtgtggcaactcaaggcagatggcatgcactccaatctcctgcccaggagaactctgcccccaggacaatggtaccgcttgcggcagcagatgtagaggagtcttgccaagggccgggggcgcctttcttatggccggtcaggtcgcagagcaattgcgaggatttaatgctcagctgcagcgtacccgtcagatgatccgagccgctgaggaatccgccagccagatccagtccagtgctcagaggctcgaaacgcaggtaagtgcttcaagatcccaaatggaggaagacgtgagaagaactcgtctccttatccagcaggtgcgcgactttttgaccgatccggatactgacgccgccactatccaggaagtttccgaggctgtgctcgcattgtggttgccaaccgattcggcaaccgtgcttcagaaaatgaatgagatccaggccattgcagcccggctgcccaatgtggacttggtgctgtcacagacaaaacaggatatcgctcgagcaagaaggctccaggcagaggcggaggaagctcgctctcgggctcacgcagtagaagggcaggtggaagatgtggtgggcaacctgcgccagggtaccgtcgctctgcaggaagcccaagatacaatgcagggcacttctagaagcttacggctgattcaggatcgggtggctgaagttcagcaggttcttcggccagctgaaaagctagtgacctcgatgactaagcagcttggtgatttttggacacggatggaggagctccggcatcaggccagacaacaaggcgctgaggctgtgcaggctcaacagcttgctgaaggggctagcgaacaagccttaagcgcgcaggaaggttttgaaagaattaaacaaaagtatgccgagcttaaggataggctggggcagagcagcatgctgggagaacaaggagctcgtattcaatccgtgaaaactgaagccgaggaattatttggcgaaaccatggagatgatggaccggatgaaggacatggagctggaactgctgagaggttcccaggctattatgctgcgaagtgccgacctaaccgggctggaaaagagggtggagcagattcgagatcatatcaatgggagggtgctgtactatgctacgtgtaagtag

SEQ ID NO: 192711 - DNA, 3519 bp, synthetic construct
  misc_feature 1..3519: note = Description of Artificial Sequence: Synthetic coding sequence
  source 1..3519: mol_type = other DNA
atgcggcccttcttcctgctgtgcttcgccctgcccggcctgctgcacgcccagcaggcgtgcagccgtggagcttgctacccaccggtgggcgatctgctcgtaggacggacccggttcctgagagcttccagcacgtgcgggttgactaaacctgaaacctactgcacgcagtatggagagtggcagatgaaatgctgtaagtgcgattccagacaaccccacaattactactcccatagagtcgagaacgtcgcctccagcagcggccccatgcggtggtggcagagccagaacgacgtgaaccccgtctctctgcaactcgacctcgaccgtagattccagcttcaagaagtgatgatggagtttcaaggccctatgcccgccgggatgctgatcgagcgttctagtgacttcggaaaaacctggcgtgtctatcagtacttagctgccgattgtaccagcaccttcccacgcgtgagacagggaagaccccagagttggcaggacgtgcgctgccagtctctgccacagcgcccaaacgccaggttgaatggtggcaaagtgcagctcaatctcatggatctggtgagcggaatccccgctacacagtctcaaaaaattcaggaagttggggaaataaccaatctcagggtgaacttcactaggctggcccccgtgcctcaacgaggctatcatccgccatccgcgtactatgcagtctcgcagttacgcctccaaggtagctgtttctgccatgggcacgcggacagatgcgcacccaaacccggtgcctccgcaggcccctcaactgccgtccaagtccacgatgtgtgcgtgtgtcagcacaataccgcaggtccaaattgtgagcgttgtgctcctttctacaacaatcggccatggcgccctgccgaggggcaggatgcccatgagtgtcagcgttgcgactgtaacggccacagcgagacctgccacttcgatcccgccgtgttcgcagcttcacagggggcttacggaggagtgtgcgacaattgcagagatcacactgaaggcaaaaattgcgagcgatgccagctccattactttcgcaacaggagacctggtgccagcatccaggagacatgtatatcatgcgagtgtgaccctgacggagccgttccaggcgccccttgcgacccggtgacaggccagtgcgtgtgtaaggagcatgtacagggtgagcgatgtgacttatgtaagcctggtttcacgggcttaacttatgctaacccacaaggatgccatagatgtgattgtaatatcctggggagccggcgcgacatgccgtgcgatgaggaatcgggtagatgtctgtgtctccctaatgtcgtcggcccaaaatgcgaccagtgtgctccttaccattggaagctcgcatccggccaaggctgcgaaccctgtgcttgtgacccgcacaacagtttgagtccacaatgtaaccaattcactggccagtgtccctgccgcgaggggttcggtggcttgatgtgctctgccgcagccattcgtcagtgccccgaccgcacctatggagacgtcgctaccggctgccgagcttgtgattgtgatttccgaggcacagagggtccgggatgtgataaagctagcgggcggtgtttgtgcagacctggcctaaccggccctcgatgtgaccaatgtcaaagaggatactgtaatagatatcccgtgtgcgtggcatgtcacccttgctttcagacctacgatgctgacctccgcgagcaggcactccggttcggcaggctcaggaacgccactgccagcctgtggagtgggccggggctcgaggacaggggattggccagccggatactcgacgcaaagagcaagattgagcagatacgtgccgtgctgagttcgccagctgtgaccgagcaagaggtggcccaggtggcctccgccatccttagcctacgaagaacactccagggcctgcagcttgatctgcccctggaagaggaaacactgtcattgccacgggatcttgaatcactcgaccgaagctttaacggcctcctcaccatgtaccagaggaagcgagaacagtttgagaaaatcagttctgccgacccttccggcgcattccgaatgctatccacggcttatgagcaatcggcacaagccgcccagcaagtctccgatagtagtagactgttggaccaattgagagatagccgaagggaggcagagaggctagtgcgacaggcaggcggcggcgggggcacaggaagccccaaacttgtggccctcaggctggagatgtcctcgctgccagacctgaccccaacctttaataagctgtgtggtaactccaggcagatggcatgtactccgatctcctgtcccggcgaactatgtccccaggacaacggcacggcctgtggttcccgctgccggggagtactgcctagggcaggcggtgcgtttctaatggcaggtcaggtggccgaacagctgcgcggcttcaacgctcagcttcagcggacaaggcagatgatccgagccgcagaagagagcgcatcacagatccagtcctcagcacagcggcttgagactcaggtgagcgcctcgcggagccagatggaagaagatgtgagaaggacccgcttgctcatccagcaagtgagagacttcctcaccgatcctgataccgatgccgccaccattcaagaagtctcagaagctgttctggccctgtggctgcccaccgattctgccactgtattgcagaaaatgaatgagatacaggccatcgcagcccggttgcccaatgtggacctcgttctgtctcagactaaacaagacatcgctagagctcgccgcttgcaggctgaagctgaagaggcccgctccagagcgcatgccgtggaggggcaggtagaagacgtagtgggaaatctacgtcagggcaccgttgccctgcaggaagctcaggatacgatgcaaggcacaagccgtagcttgcgactcatacaagatagggtcgcggaagtgcaacaagtgctgcgtcctgccgagaaactggttacctccatgacaaagcagctgggagatttttggaccagaatggaggaactgagacatcaggcacggcagcagggggccgaagctgtacaggcacagcagcttgcggagggggcatccgaacaagctctgtcagcgcaggagggatttgaacgcattaagcagaagtatgctgaactgaaggatcggctgggccagtcatccatgttgggcgagcagggcgctaggattcagagtgttaaaaccgaagctgaagaattgttcggggagacaatggaaatgatggacaggatgaaggacatggagttggagctacttcggggatcacaggctattatgcttcggtccgctgatttgactggtctggagaagagagtggaacagatccgggaccacatcaacggcagggtgttgtattatgcaacctgcaagtag

SEQ ID NO: 192712 - DNA, 567 bp, synthetic construct
  misc_feature 1..567: note = Description of Artificial Sequence: Synthetic coding sequence
  source 1..567: mol_type = other DNA
atgcggcccttcttcctgctgtgcttcgccctgcccggcctgctgcacgcgcagcaagcctgcagcaggggagcttgctatcctccagtcggagatcttttggtaggccggacccgcttccttagagcctccagcacatgtggtctcactaaaccagaaacatattgcactcagtacggcgaatggcagatgaagtgttgcaaatgcgactcaaggcagccccataactattattcacacagggtcgaaaacgtggcctcaagcagcggtccaatgagatggtggcagagccagaatgacgtgaaccctgtgtccctgcagctggatcttgaccggcgtttccaactgcaggaggtgatgatggagttccaaggcccaatgccagcaggaatgctgattgagcgctcctcagactttgggaaaacctggagagtttatcaatacttggcagctgactgcacttccacgttcccccgggtaagacagggccgcccacagagctggcaagacgtcagatgtcagtcactgcctcagcggcccaacgccaggttgaatggaggtaagtag

SEQ ID NO: 192713 - DNA, 483 bp, synthetic construct
  misc_feature 1..483: note = Description of Artificial Sequence: Synthetic coding sequence
  source 1..483: mol_type = other DNA
atgaacgagatccaggccatcgccgcccggctgcccaacgtggacctggtgctctcccagactaagcaggatatcgcaagagcgcgccgactgcaggctgaagctgaggaggcccgctcccgcgcgcacgccgttgagggccaggtggaggatgtggtgggcaacctccgtcagggaactgtggctctccaggaagctcaagataccatgcagggaacttcccgaagcctcaggttaatacaggacagggtggccgaggttcagcaggtattgcggcctgcagagaagctcgtcacaagtatgacaaaacaattgggtgacttctggactcggatggaggaactgcgccatcaagccaggcaacagggagccgaagccgtgcaagcccagcaactggccgagggggctagcgagcaggcactgtccgcccaggagggcttcgaaagaataaagcaaaaatatgccgaacttaaagacaggtag

SEQ ID NO: 192714 - DNA, 4830 bp, synthetic construct
  misc_feature 1..4830: note = Description of Artificial Sequence: Synthetic coding sequence
  source 1..4830: mol_type = other DNA
atgcggggcagccaccgggccgcccccgccctgcggccccggggccgtctctggccagtccttgccgtccttgccgccgccgcagccgctggatgtgctcaggccgccatggatgaatgcactgacgagggaggtaggcctcagaggtgcatgcccgagtttgttaacgccgcatttaatgtaaccgtggtcgccacgaatacttgcggcactcctcctgaagaatattgcgtacagacaggcgtgaccggggtgaccaaatcctgccacctctgtgatgccggccaaccacatttgcagcacggcgccgcttttttgacagattataataaccaggcggatacaacctggtggcagtctcagactatgcttgccggtgtgcagtaccctagttctattaatctcactctgcatctgggaaaagccttcgatattacctacgtcaggctgaagttccatacctctcggcctgagtcatttgcaatctataagagaacaagagaagatgggccttggattccgtaccaatactattctgggtcctgcgaaaacacctactctaaagcgaatcgtggcttcattcgtacaggtggtgatgagcaacaggctttgtgtactgacgagtttagcgacattagccccctgaccggcggcaacgtcgctttttctacgctcgagggacgaccatctgcgtacaatttcgataatagtcccgtgttgcaggagtgggtcactgccacggatattcgggtaaccttaaataggctgaacacattcggcgacgaggtattcaacgaccctaaggtattgaagtcctactattatgccatttccgactttgccgtgggaggccgttgcaagtgcaatggacacgcttcagaatgtatgaagaacgaatttgacaaacttgtgtgtaactgtaaacacaatacgtatggggtggattgcgaaaagtgtctgccatttttcaacgacaggccttggcggagggcaaccgcagaaagcgccagcgagtgtcttccctgtgactgcaacggacgatctcaggaatgctattttgacccagaactgtatcgatccaccggtcatggaggacattgtacaaattgtcaggacaacacagacggtgcacattgtgaaagatgccgggaaaatttcttcagactgggcaataatgaagcttgctcaagctgtcactgttctcctgtcggatcacttagtacgcagtgcgactcctacgggaggtgcagctgtaagcctggtgtcatgggcgacaagtgtgaccgatgtcagccaggcttccactcccttaccgaagctggctgcagaccctgctcttgtgatccaagcggaagcattgacgagtgcaacatcgaaacaggtcggtgcgtgtgcaaggacaatgtagaaggatttaattgtgagcgctgcaagccgggttttttcaacctcgaaagctccaaccctcgcgggtgcacaccctgcttttgttttggccacagctccgtgtgtacgaacgccgtcggctacagcgtctactctatatcctctaccttccaaatcgatgaagacggatggcgcgctgaacagcgggatgggtcggaagccagtttagaatggagtagcgaacgccaagatatcgccgtgatatctgattcgtacttccccagatatttcatcgctcccgcgaaattcttggggaagcaggtgctttcttacggacagaatctgtcatttagctttcgagtcgaccggcgggatactagactgagcgccgaagatctcgttttagaaggagctggcctccgagtgagcgtaccgctgatagcccaaggtaactcctatccttctgaaactaccgtaaagtacgtgttccggctgcacgaagcaacagattacccgtggaggcccgccctcacaccgtttgagttccagaagctcctgaataatctcacgagtatcaagatcagaggaacatatagtgagagaagcgccggttaccttgatgacgtcacactggccagcgcccggccgggcccaggcgtccccgctacttgggttgagtcttgcacctgccccgtcggctacggaggacaattttgcgaaatgtgcttatctggctaccgccgggagaccccaaatctggggccatatagtccgtgtgttctctgcgcatgcaacggccatagtgagacctgtgaccccgagacaggggtctgcaactgcagagacaataccgctgggccgcactgtgaaaaatgttcagatgggtattatggtgactctacagcgggtaccagtagtgactgtcaaccttgtccttgtcctggtggcagttcatgcgcggtggtgcctaaaacaaaggaggtagtctgcactaattgcccgactggcacaactggcaagagatgtgaactgtgtgatgacgggtatttcggcgatcccctgggccggaacggccccgtgcggctgtgccggttgtgtcagtgctctgacaatattgaccccaacgctgtgggcaattgcaatcgcttaaccggcgaatgcctcaaatgcatttacaatacagctgggttttattgtgacaggtgcaaagatggctttttcgggaaccctcttgctcccaacccagccgataagtgcaaagcctgcaactgcaatctgtatgggaccatgaagcaacaatcatcgtgtaaccctgttacagggcagtgtgagtgcttaccacatgttaccggacaggactgtggcgcctgcgaccctggcttctataatctgcaaagtgggcagggatgtgagcgctgcgattgccatgctctgggatccacgaacgggcaatgcgacataagaacgggacagtgtgaatgccagcccgggatcactggtcaacactgtgagcgctgcgaagtgaaccacttcggcttcggcccagaaggatgcaagccgtgcgattgccacccagaggggtcactgtctttacaatgtaaagatgacgggcgatgtgagtgtcgcgaaggatttgtggggaaccgctgtgaccaatgtgaggagaactacttttacaatcgtagctggccaggctgtcaggaatgccctgcctgctaccgattggtcaaggacaaggtggccgaccatagggtgaagctgcaggagttggagagtctgatcgctaatctcggaaccggtgatgagatggtgaccgatcaggcatttgaggataggttaaaagaggctgaacgtgaggtaatggatttgttgcgggaggcccaagacgtgaaggacgtggaccagaatttgatggatcgcctgcagagggtaaataacactctctcttctcaaatctccaggctgcagaatataaggaatacgatcgaagaaactgggaatctggctgaacaggccagggcgcatgtcgagaatactgaacggctgattgagatcgcatctagagagttggagaaagcgaaggtggcagctgccaatgtcagcgtgacccaaccagagtccaccggggacccgaacaacatgacattattagcggaagaggccaggaagctggctgagaggcacaagcaggaagccgacgatattgttcgggtcgccaagacagccaatgatacctctacagaggcctataatctgctccttcgtaccttagccggcgaaaaccagaccgctttcgaaattgaagaactgaaccggaaatacgagcaagctaaaaacatctctcaggatcttgagaaacaggccgcccgtgttcacgaggaggccaagcgagcaggcgacaaagccgtggaaatttatgcaagcgtcgctcagctatcgcctctcgatagtgagactctggaaaacgaggctaataacattaaaatggaggcagagaacttggagcaactgatcgaccagaagctgaaggattatgaggatctgagagaggatatgcgtggtaaggagctcgaagttaagaatctcttggaaaaagggaagaccgagcagcagacggccgatcaattgctggcccgggctgatgccgccaaggcattagctgaagaggctgcaaagaagggccgggatactttgcaggaggcaaacgacatcttgaacaatttaaaagatttcgatagaagagtgaatgacaacaaaaccgctgccgaggaagccctgagaaagatccccgcgatcaaccagacgataacggaggcgaatgagaaaacccgggaagcacagcaggctcttggaagtgctgcggcagatgcaaccgaagccaaaaacaaagcacatgaagccgaacggatcgcctcagctgtgcagaagaatgctaccagcacgaaggccgaggcagaacgtacattcgcagaggtgaccgatctggacaacgaggttaacaacatgctgaaacagctccaggaggctgagaaagagctgaaacgcaaacaggacgatgccgaccaggacatgatgatggccgggatggcgtcgcaggctgcccaggaggctgagatcaacgcacggaaagccaaaaactctgtgacaagcctgctgtcaatcatcaacgacctcctcgagcagctggggcaacttgacactgttgacctcaataaattgaatgaaattgaggggactttaaataaggcaaaggacgagatgaaggtgtcggacctggaccgcaaggtttctgatttagaaaacgaggctaaaaagcaagaggcagcaatcatggattataatcgagacattgaggagattatgaaagacatccgcaacctggaggatattcggaaaaccttaccctccggatgctttaataccccctcaatcgagaagccctag

SEQ ID NO: 192715 - DNA, 3582 bp, synthetic construct
  misc_feature 1..3582: note = Description of Artificial Sequence: Synthetic coding sequence
  source 1..3582: mol_type = other DNA
atgcccgccctgtggctgggctgctgcctgtgcttcagcctgctgctccccgccgctcgcgcgacttcccgtcgcgaggtctgtgattgtaatgggaaaagtcggcagtgtattttcgaccgtgagctccatagacagactgggaatgggtttcggtgtctgaattgtaacgataatacggatggtatccattgtgaaaagtgtaagaatggtttctaccgacatagggagagggatagatgtctgccttgcaactgcaactcaaaaggatcactgtcagcgcgctgtgacaatagcggtcgatgctcatgtaagccaggcgtcaccggggcccgctgtgaccgctgtctgccgggtttccacatgctcaccgacgccggctgtacacaagatcaacgtttgctggacagtaagtgtgactgcgaccccgccggtattgcgggaccttgtgacgcaggacgatgtgtatgcaagccagccgtaaccggtgaacgatgcgatcggtgccggagcgggtactataatttggacggcggaaatcccgagggttgtacccagtgcttctgctatgggcacagtgcgtcatgtcgctctagcgccgaatattcagtacataagataacaagtacattccaccaggacgtcgacgggtggaaggctgtgcaacggaacggttcacccgctaagttacagtggagccagcgccaccaggacgtgttttcctcagcccagcggctcgatccggtgtacttcgtggccccagccaagttcctcggcaatcagcaggtgtcttacggccaatctctaagttttgattaccgagtggaccgtggcggccgccatccttctgcacacgacgtgatcctggaaggggcaggtctaaggatcacggctccgctgatgccactcgggaaaaccttgccctgcggcttgaccaagacatatacttttagactgaatgaacacccatccaataactggtcccctcaactctcatacttcgagtatcggaggctcctccgcaacttaacagcccttaggattcgggccacctacggtgagtattctaccggttatatagacaacgtgacactcatttctgccaggccggtgagcggcgcccctgctccatgggtcgaacagtgtatttgtcccgtcgggtacaaagggcaattttgccaagactgcgctagcggatacaagcgtgattcagcccggctgggaccgtttggcacatgtattccatgtaactgccaagggggaggggcctgcgatcctgatactggagactgctattccggggacgagaacccagatattgagtgcgcagactgtcctattggcttctacaacgatcctcacgatcccaggtcttgtaaaccctgcccctgccacaacggtttctcgtgttccgtcatgccagaaaccgaggaagttgtgtgtaataactgcccacccggagtgacaggggctcgctgcgagctctgtgctgatggctattttggggacccattcggcgagcacggccccgtacggccatgccagccctgccagtgtaacaacaatgtagatccgagtgcgtccggtaattgcgatcgcctcactggccgatgtctgaagtgcatccataacaccgcaggaatctattgtgaccaatgcaaggcagggtacttcggtgatcccctcgctccaaatcctgctgacaaatgcagagcctgcaactgtaaccctatgggaagcgagccagtcggatgccggagcgatggcacgtgcgtctgcaagcccggcttcggtgggccaaattgtgaacatggcgctttcagctgtcccgcatgctacaaccaagtgaaaatccaaatggaccagttcatgcagcagctccagaggatggaggcgttgattagcaaggcgcaggggggcgatggggttgtccccgatactgagctggaggggcgaatgcaacaggcggagcaagcactccaggacatcctgagggacgctcagattagcgagggcgcatcccggtctctggggctccagttggccaaagtgaggagccaggagaactcataccagtctcgactggatgatctcaagatgaccgtggaaagagttagagcactggggagccagtatcagaatagggtcagggatacccaccgcctgatcactcagatgcagctgagccttgccgagtctgaggcctctctgggaaataccaatattcccgctagcgatcactatgttggccccaatggcttcaaaagtctcgcgcaggaggcgacaagattggcggaatctcacgtggaaagcgccagcaacatggagcagttaacccgggaaaccgaagattacagcaaacaggctctctcccttgtccgcaaggcactccatgaaggtgtcgggagcggcagtggttcccctgatggcgccgttgttcaggggctcgtggagaagctggagaaaaccaaatcgttggctcaacaactgaccagggaagcaacacaggccgaaatcgaagcagatcggagttaccagcactcccttcgcctcctggacagtgtctcacgtctccaaggagtaagcgatcagtcattccaagtcgaggaggccaagcgaatcaaacagaaggctgactccctgtccagcttagtgacgagacatatggacgagttcaaacggacccaaaaaaacttaggcaactggaaagaagaggcccagcaattattgcagaacggaaaaagcggaagggaaaagtccgatcagctgctgtccagagccaatctggcaaaatccagagcccaagaggctctgtccatgggtaacgcaacgttctatgaggtagaatccatccttaaaaacctccgcgagtttgacttgcaggtggataacagaaaagctgaagctgaagaagccatgaagcgacttagctatatttctcagaaggtatccgatgcaagtgacaagacccagcaagcagaacgcgctctgggttccgccgcagcagacgctcaacgcgctaagaatggcgcaggagaagctctggaaatatcctctgagatcgaacaagagataggctccttaaatctggaagccaatgtcaccgctgacggtgctctggctatggagaaagggttagcctccctaaagagcgaaatgcgagaggtggagggcgagcttgagcgcaaggagttggagttcgacaccaatatggatgctgtccagatggtcatcacggaagctcagaaggtggatacgcgtgctaagaatgccggggtgactatccaggatacccttaatacgctcgacggtctccttcacctaatggatcaacctctcagcgtagacgaggaaggactggttttactggagcagaaactgtctagagccaaaacacagattaattctcagctccgtcccatgatgtccgagttggaagagagagcgagacaacaacggggtcaccttcacctgctcgaaacctctatcgacggtatcctggcggacgtgaagaatctcgaaaacattcgcgacaatctcccaccaggctgttacaatactcaggcgttggagcaacagtag

SEQ ID NO: 192716 - DNA, 3336 bp, synthetic construct
  misc_feature 1..3336: note = Description of Artificial Sequence: Synthetic coding sequence
  source 1..3336: mol_type = other DNA
atgcccgccctgtggctgggctgctgcctgtgcttcagcctgctgcttccggccgctagggccacgtcacggcgcgaagtgtgcgactgcaacggcaagtcaagacagtgcatctttgacagagagctgcaccgccaaactgggaacggcttcaggtgcctcaactgcaacgataataccgatgggattcactgtgaaaagtgcaagaacggcttttatagacacagagagagagacagatgcctaccctgtaattgtaactcaaaaggtagcttaagcgccaggtgtgacaactctggcaggtgctcatgtaaacctggagtcactggcgcccgatgcgaccggtgtctcccgggtttccacatgttgacagatgcaggctgtactcaagaccagcgcttgctggattccaagtgtgactgcgaccctgccggcatcgccggtccttgcgatgctggtaggtgcgtttgcaagccagccgtgacaggagagcgatgtgatcggtgtcggtccggttattacaacctggatggaggtaatccagaaggctgcacacaatgtttttgttacggccattccgcaagctgccgttcaagcgccgagtatagcgttcacaaaattacctctaccttccatcaggacgtggacggttggaaggctgtgcagcgaaatggatcccctgccaagcttcaatggtcccagaggcaccaggatgtgttttctagtgctcagcgattggaccctgtctacttcgttgcgcccgccaaattcctgggcaatcagcaagtcagttatggacagtcgttgtccttcgactaccgcgtcgaccgggggggaaggcatcctagcgcgcacgacgtcatcttagagggggctggactgaggatcaccgctcctctgatgccactgggaaaaacacttccatgcggcttgacgaaaacttacacattccgcctgaatgagcatcctagtaataattggtctccgcagctgtcttatttcgagtaccgaagactgctgagaaatctgaccgcactaaggatccgtgccacctacggagaatactctactggatacattgataacgttacactgatcagtgctcgaccagtgtcaggagctccggctccttgggtggaacagtgtatatgtcctgtgggctataagggtcagttctgccaggattgtgcttctgggtataagcgcgactccgcccgtttgggaccttttggcacttgcattccttgcaattgccaaggtggcggagcatgtgacccagatactggggactgttatagtggcgacgaaaatccagacatagagtgtgcagactgtccaatcggattttacaatgatccccacgaccccagatcctgtaagccttgtccttgccataacggcttcagctgctccgtgatgcccgagaccgaggaggttgtttgtaataactgcccaccaggcgtaactggcgccagatgtgagctttgcgcggacggttacttcggtgaccctttcggcgagcacgggcctgtgagaccctgtcagccgtgccagtgcaataacaacgttgacccctccgcttcagggaactgcgatcggctgaccggccggtgtctgaagtgcattcataacacagcaggaatatactgcgatcaatgcaaagccggatacttcggtgaccctctggctcccaaccccgcggataaatgtagggcctgcaattgtaaccctatggggagcgagcctgtgggctgcagaagcgacggaacatgcgtttgcaagccaggttttggcggtcccaattgcgaacacggagccttttcctgccccgcttgctataatcaagtcaagatacagatggaccaatttatgcagcaacttcagaggatggaagccctgatctccaaagcacagggtggggacggcgtagtgccagacaccgaactggagggaaggatgcaacaggccgaacaggctctccaggacattctcagggatgcccagatctcagaaggagctagcagaagcctagggctgcagctagccaaagtgcgaagtcaggaaaactcttatcagtcacggctcgatgacctgaaaatgaccgtggaacgggtccgcgccttgggatctcaataccagaatagagttcgtgacactcaccgcctgattacccagatgcagctgtcacttgccgagtcagaggcttccctgggcaatacaaatattccagcttctgatcactatgtaggcccaaatggctttaaatctcttgcccaggaggccacacgacttgcagagagtcacgtggagtccgccagtaatatggagcagttaacccgtgagaccgaagattacagcaagcaggccctgtcccttgtgcggaaagctctgcatgaaggagtagggtctggttccggaagtccagacggggcagttgttcaaggcttggtggagaaattggagaaaactaaatcattagcacaacagttaaccagggaggccacccaggctgaaatcgaggccgatagatcctatcagcatagcctccggcttctggactctgtgagcaggttacagggagtaagcgatcagtcttttcaggtggaggaagccaagagaatcaaacagaaggcagactctctgagtagcctggtgactcgccacatggacgaatttaagcggacccagaagaaccttggtaattggaaggaggaagcccagcaactgctccagaatggtaagagcgggcgcgagaagtccgatcagttgttgagtagagctaacttggctaagtcccgggcccaggaagccctctctatggggaacgcaacgttctatgaggttgaaagtatcctcaaaaatttaagagagttcgatttacaggtggacaataggaaggctgaagcagaagaggccatgaagaggctcagctatatctctcagaaagtatcagacgcatcagataaaactcagcaggccgagagagccctgggctccgcagccgcagatgcacaacgggccaagaacggggctggtgaggcgctggaaatctcaagcgagatcgagcaggaaataggttccctgaacctggaagctaacgtgacagcggacggtgctctggctatggaaaaaggattggcatctctcaagagcgagatgcgcgaggtagaaggcgagcttgagagaaaagagcttgagttcgatactaatatggatgcggtgcaaatggtcattactgaggcccaaaaggtggacacccgggccaagaatgcaggagtgactattcaagatactttaaacactctggacggactcctacacctgatgggcatgtag

SEQ ID NO: 192717 - DNA, 3033 bp, synthetic construct
  misc_feature 1..3033: note = Description of Artificial Sequence: Synthetic coding sequence
  source 1..3033: mol_type = other DNA
atgcccgccctgtggctgggctgctgcctgtgcttcagcctgctgcttccagcggctagggcaaccagcaggagagaagtgtgtgactgtaatggtaagtcgcggcaatgcatttttgatagagaactgcatcgacagaccgggaacggtttccgatgccttaattgtaacgacaataccgatggaatacattgcgagaaatgcaagaacgggttttatcgccaccgggagagggatagatgtctaccatgtaattgtaattcgaagggaagtctttcagctcggtgcgacaactccgggcgctgttcttgcaaaccaggggtcactggtgcacgctgcgacagatgcctgcctgggtttcacatgttgacagacgctggctgcacacaggaccaaaggctcctcgattcaaaatgcgattgcgatcccgcaggtatcgccgggccctgtgacgctggacgctgcgtgtgcaagcctgcggtcacaggtgagcgatgtgaccgttgccggtcaggatactataatttggacggcggcaacccagagggctgtactcagtgcttttgctatgggcatagtgcctcatgtcgtagctctgccgagtacagtgtgcataaaatcacctctacctttcaccaggacgtggatgggtggaaagccgtgcagaggaacggttccccagccaagctgcagtggtctcagagacaccaagatgtatttagctcggctcagcggctggacccagtgtatttcgttgctcctgctaaatttctgggaaaccagcaagtctcttacggtcagtctctctcattcgactatcgcgttgaccgcggcgggaggcaccccagcgcccatgacgttatcctggaaggagccggacttagaatcacagctcctctgatgcctctcggtaagacgcttccatgtggcctaacgaaaacatatacattccgcctgaacgagcatccctctaacaactggtctccccagctcagttatttcgagtataggaggttactgcgtaatctgactgctctgaggattagagccacctatggggagtatagtaccgggtatatcgacaatgttaccctaatctcagcccgccctgtttccggtgctccggcgccatgggtagagcagtgcatatgtccggtcggttataagggtcagttctgtcaggactgcgcctcgggatataaacgggactccgcccgattgggcccattcggaacatgcatcccctgtaactgtcagggcggtggagcgtgcgacccggataccggagattgctatagcggtgacgagaatcccgacatcgaatgcgctgattgtcccataggattctataatgatcctcatgacccccgctcctgtaaaccatgtccctgtcacaatggctttagttgtagcgtcatgccagagacagaggaagtggtttgcaataattgtccacccggggtaactggcgcccgctgcgagttatgtgctgacgggtacttcggcgacccttttggggaacacggccctgtgagaccctgccaaccctgccagtgtaataataatgtggatccatctgcgtcgggtaactgcgaccggttgaccggacgatgtctgaaatgcatccacaacacggccggcatctactgtgaccagtgcaaagccgggtattttggggatccgcttgctcccaaccctgccgacaagtgccgggcttgtaactgtaacccaatgggctctgagcccgttggttgcagatctgacggtacatgcgtctgcaagccaggattcggagggccaaattgcgagcacggagccttctcctgcccggcttgctacaaccaggttaagatccagatggatcagttcatgcagcagctgcaaagaatggaggcattgattagtaaagcgcagggaggcgacggtgtggtgcctgacacagaactggaggggaggatgcaacaggccgaacaagccttgcaggacatcctccgtgatgctcagataagcgaaggcgcttcgaggtcattaggactgcaactcgcgaaggtcagatcccaggaaaattcctaccagtcgagactcgatgatctcaagatgacagtggagagggtacgggccctgggatctcagtaccagaacagagtgcgcgacactcacaggttgattacccagatgcagctctcattggccgaaagtgaggcaagcctgggtaacaccaacattcctgccagcgatcattatgtggggcccaatgggtttaagtctctcgcgcaagaggctacacggctggcagaatcacacgtcgaatccgcaagtaatatggaacagcttacacgtgagactgaggactattccaaacaagcactatctctggtgaggaaagctctccacgagggcgtgggttccgggtccggtagccctgatggcgcagtggttcagggcctcgtggagaagctcgagaagaccaagtccttagcgcagcagctgacacgcgaagctacccaggctgagattgaggcggatagatcctaccagcacagcttacgcctgttagacagcgtctcccgcctgcagggcgtgtctgaccagtcatttcaggtggaggaggctaaaaggattaaacaaaaggccgattccctgtcctcgctggtgacaaggcatatggacgagtttaaacgtactcagaaaaacctggggaattggaaggaagaggctcagcagctgctccagaacggtaagagcgggcgtgagaagagcgatcaattgctgagccgggctaacctagcaaagagccgggctcaggaagccttatcgatgggcaacgcgaccttctatgaggtggaatcgatccttaaaaatcttcgggaatttgacctgcaggtcgacaatagaaaagctgaagcctttccttctcaggaccctgatcaacagccaactgcggcacatgacgtgagagccggccgcgagggtacctctgcagaaggtccccctccctttgctggtgataagcacagatgggatagtggatag

SEQ ID NO: 192718 - DNA, 1590 bp, synthetic construct
  misc_feature 1..1590: note = Description of Artificial Sequence: Synthetic coding sequence
  source 1..1590: mol_type = other DNA
atggccgccgccgccctgctgctgggcctggccctgctggccccccgcgcggcaggtgccggcatgggagcttgctacgacggagccggacgcccccagcgttgtctgccagtttttgaaaacgccgcattcggccgtctggcacaggcttctcacacctgtggttcccctccagaggatttttgtccacatgttggtgcagcaggtgcaggcgctcattgccaaaggtgtgacgctgcagatccgcagaggcatcacaacgcatcataccttacagactttcacagtcaggatgagagcacctggtggcagagcccaagtatggcttttggtgttcagtaccctacaagtgtgaacatcacacttcggcttggaaaggcctatgagattacgtatgtgagattaaaattccatacttcacgaccagagtccttcgccatatataagagaagtcgagctgatggaccctgggaaccgtatcagttctactcagcctcctgccagaagacctatggtaggcccgaaggccaatacctgcggccaggtgaggacgagagagttgccttctgtacatcagaattttccgacatatcgcccctgagtggcgggaatgtcgccttcagcacactggaaggcaggccgagcgcatataacttcgaggaatcccccggactgcaagagtgggtaacctctacagagttactgattagcctggacaggctgaacacgtttggcgatgacatttttaaggatccaaaggtgctccaaagctactattatgccgtgtcagattttagtgttggaggcagatgcaaatgcaatggccacgcctctgagtgcgggcctgatgtggccggccaactcgcttgcaggtgtcaacacaacacaactggcactgactgtgagcgctgcttgcctttttttcaagatcgcccctgggcacgcggaactgccgaggccgcgcacgagtgcctgccttgcaactgttcaggcagatccgaggaatgcactttcgaccgtgaactgtttagatcaactggtcatggaggccggtgccatcattgcagggaccacacggccggaccacactgtgagcggtgtcaggaaaatttctaccactgggacccgcggatgccttgccagccgtgtgattgtcagtctgccggtagtctccacctgcagtgtgatgataccggtacctgcgcttgcaaacctaccgtgacgggatggaaatgtgacagatgcctcccaggttttcactcccttagtgagggaggatgccggccatgcacatgcaacccagctggatcacttgacacctgtgatccccgctcgggccgatgtccctgcaaggagaacgtcgagggcaacctctgcgaccggtgcaggcctggcaccttcaatctccaacctcacaaccccgccggccggagttgcaggtcccgggcatcccgagtcacaagtccccgctccgccccgaccaaccgaacctggaggccgttctgcaccgcttgcccgaggactgtacccgcaggctctgaagggtgcccggacccacggcacactttaccccacttacttttcacgtag

SEQ ID NO: 192719 - DNA, 4728 bp, synthetic construct
  misc_feature 1..4728: note = Description of Artificial Sequence: Synthetic coding sequence
  source 1..4728: mol_type = other DNA
atggccgccgccgccctgctgctgggcctggccctgctggccccccgcgctgcgggcgccggtatgggtgcttgctatgacggagcaggcagacctcagagatgcctgccagtgttcgagaatgcggccttcggtcgccttgcccaggcctcccacacttgcgggagccctcctgaagacttctgcccccacgtcggcgccgccggggcaggcgcccactgccagaggtgcgacgctgctgacccacaaaggcaccataacgctagttatctgaccgattttcacagccaggatgagagtacctggtggcagagccctagcatggccttcggggttcagtaccccacatctgttaacataacgctgaggctgggcaaggcgtacgagatcacctacgtgaggctgaagttccatacatctagacctgagtcgttcgccatctacaaacgcagtagagcagatggtccgtgggagccctaccagttctactcagccagctgccagaaaacttacggacgtcctgagggacaatacctgaggccaggcgaggatgaacgagtggccttttgtacttccgaattctccgacatctccccacttagcggagggaacgtggctttctcaacacttgaaggccgccctagcgcctataatttcgaggaaagtcctggattgcaggagtgggtgacatctacagagctgttaatcagcctcgataggctcaacactttcggcgatgatatttttaaggatccaaaggtgctgcagagctactactacgcagtgtccgacttctctgtcggtggaaggtgcaaatgcaacggccacgcatccgagtgcggacctgacgtcgccggtcagctagcttgtaggtgccagcacaatacgacaggaaccgactgcgaacggtgtctgcctttctttcaagatcgaccctgggccaggggcaccgcagaagctgcccatgagtgtttaccctgcaattgctcagggcgctctgaagaatgcacatttgaccgggaacttttcaggagcacagggcacggcggacgctgccatcattgcagggatcacaccgcagggccacactgcgaacggtgtcaggagaatttctaccattgggacccccggatgccatgccagccatgtgattgccaaagtgcaggctccctgcacctgcagtgcgatgatacgggaacatgtgcttgtaagcccacggtgactggctggaagtgcgatagatgcctacctggatttcacagtttgagcgaagggggttgccgaccctgcacctgtaatcccgccgggtcgcttgatacctgcgacccgcggtcggggagatgcccatgtaaggagaatgtggaaggcaatctttgtgataggtgtagaccgggcaccttcaatttgcagcctcacaaccccgccggatgctcttcttgtttttgctatggccacagcaaggtatgcgcatccactgcacagtttcaggtgcatcacatcctcagcgactttcaccagggcgccgagggctggtgggccagaagtgtgggtggcagcgagcatccaccccagtggtcccccaatggcgtgttgcttagcccagaggatgaggaggagctgaccgctcccgaaaagttcttaggggaccagcgtttcagttacgggcagccccttattctgacgttccgtgtcccgcccggcgatagcccgctgccggtccagctgcggctggagggcacaggcttggccctgtcgcttaggcacagctccctatcagggccccaggatgccggacatccaagggaggtggaactgcgtttccacctgcaggaaactagcgaggacgttgcgcccccattgccaccattccacttccagcggcttctggcaaacctgacctctcttcgcttgagggtgtcaccgggcccatcccccgctggaccagtatttctgacagaagtccggctgacaagcgctcggcccggcctgtcccctccggccagctgggttgagatctgtagttgtccgaccggatacactgggcaattctgcgagtcttgtgcgcccggctacaagcgagaaatgccgcagggaggcccttatgcttcttgtgtcccctgcacttgtaatcagcacggaacttgcgaccccaatacaggaatttgcgtgtgttcacaccatacagagggaccctcatgtgagcggtgtctccccggtttttacggaaacccattcgccggtcaggctgacgactgtcagccatgcccgtgtccagggcagtctgcttgtaccacaatccccgagtcccgggaagtcgtgtgtacacactgtccccccgggcaacggggccgccgatgcgaagtgtgcgatgatggctttttcggagaccccctgggccttttcggccacccacaaccttgtcaccagtgccagtgttctgggaatgtggaccccaacgccgtcgggaattgcgacccgctcagtggacattgtctcaggtgcctgcacaacacaaccggcgatcactgcgaacattgtcaagaaggcttctacggctcagccttagcacctaggcccgcagacaagtgcatgccttgttcttgtcacccgcagggaagcgtttctgaacaaatgccgtgtgaccccgtcaccgggcagtgctcctgtctccctcacgttaccgcccgagattgttcccgctgctatcccggtttctttgacctgcagcccgggaggggttgtcgttcatgtaaatgtcatccactaggtagtcaggaggaccagtgtcatcccaaaaccggccagtgtacctgtagacctggcgttaccggccaggcctgcgaccggtgccaactgggtttcttcggattctcaataaaagggtgcagagcatgccggtgctcacccctcggcgctgcaagcgcacagtgccatgagaatggaacgtgcgtgtgccgaccaggctttgagggctacaaatgtgaccggtgccacgataacttctttctgaccgctgacgggactcactgccagcagtgcccgtcttgctatgctctggtcaaggaagaggccgcgaaactcaaagcccggctgactcttacggaaggctggcttcagggctccgactgcggctccccctggggtcctctggatatcctgctgggcgaagctcccaggggggatgtgtatcaagggcaccatctgctgccaggtgctagagaggcctttttagagcaaatgatgtcgcttgaaggagcggtgaaggctgcacgggaacagctccaacgactcaacaagggtgcacgctgcgcccaagctggatcacagaagacatgcacccaactcgctgacctggaagccgtgctggagagttctgaggaagaaattctgcatgccgccgctattttggcaagcctcgaaattccgcaggaggggcctagccagcctaccaaatggagtcatctggccactgaggccagggctctcgcacgttcacatcgggatacggccactaagatcgccgccacggcctggagggcccttcttgcttcgaatacctcctatgcactgttatggaatctgcttgagggccgcgtcgctctggagacacagcgagacctggaagacaggtaccaggaagtacaggctgcccagaaggctcttcggacagccgtcgcagaagtgcttccagaagctgagagcgttctggctaccgtgcaacaggtaggcgccgatactgctccatacttggctttgcttgcatcccctggagccctgcctcagaaatcccgagcagaagatctcggccttaaggcaaaggctttggagaagaccgttgcctcctggcagcatatggctacagaggccgcacgcacgttacaaacggcagcccaggccaccctgcgacagacagagccactgacgaaattgcaccaggaagctcgagctgctctaacacaagccagcagctctgtccaagcagctactgtcactgtgatgggcgctagaacccttctggccgatcttgagggaatgaagcttcagtttccccgccccaaggaccaggctgcactgcagcggaaggccgacagcgtgagtgacaggctgctggcagataccaggaaaaagacaaagcaggctgagcgcatgctgggcaatgccgctcccctcagttcttctgccaaaaagaaaggacgcgaggccgaagtgttggctaaggactcagctaagctggctaaagcactgttaagggaaagaaagcaggcgcaccgtcgggccagcagacttacttcccagactcaggccacacttcagcaggcatcccagcaggtgctggccagtgaagcccgtaggcaggagctcgaagaggctgagcgcgttggagctggcctgagcgaaatggagcagcagattagggaaagcagaatctcccttgagaaagacatcgagacactttccgaattacttgcgcggttagggagcctggatacacaccaggcccccgcgcaggccctgaacgaaacccagtgggccttggaaagactgcgattacagttgggcagccctggctcgctacaaagaaaactgtctctcctcgagcaggagtcgcagcagcaggagttgcagatccagggattcgaatccgacttggctgagatcagagctgacaaacagaatttagaggctatcctgcatagtctcccagagaattgcgctagctggcagtag

SEQ ID NO: 192720 - DNA, 459 bp, synthetic construct
  misc_feature 1..459: note = Description of Artificial Sequence: Synthetic coding sequence
  source 1..459: mol_type = other DNA
atgcggctgcccctgagccacagccccgagcacgtggagatggccctcctgagtaatatcctggcagcatatagctttgtctccgaaaacccggagagggcggctctgtacttcgtctccggcgtctgcatcggcctggtattaaccctggcagcattggtcatacgtatttcttgtcacaccgattgccgccggaggccgggcaagaagtttctgcaagatagggaatcctcaagcgactctagcgacagtgaagatggatccgaggataccgtttccgacctctctgtgcggcgacatcgtcggttcgagcgcacactgaacaaaaatgtttttacttccgccgaggagttagagcgggcccaaagacttgaggagagggagcgcattatcagagaaatctggatgaatggtcaacctgaagtgcccgggaccagatcgcttaacaggtactactag

SEQ ID NO: 192721 - DNA, 1200 bp, synthetic construct
  misc_feature 1..1200: note = Description of Artificial Sequence: Synthetic coding sequence
  source 1..1200: mol_type = other DNA
atggcccagcgggccttccccaacccctacgccgactacaacaagagcttggcagaaggctactttgacgcagccggcagactgaccccagagttcagccagcgcctcaccaataaaattcgagagctattgcaacagatggagagagggctcaagagcgcggaccctcgggatgggacaggctacaccggttgggccggtatcgctgtgctgtatctccatctgtacgatgtgttcggtgacccggcgtacctccagctcgcacacggatacgttaagcagtcactgaactgtttgactaagaggagtatcacctttctgtgcggagatgctggtcctcttgccgtcgcagcggtactctaccataagatgaataacgaaaagcaggccgaagactgcatcactcggttgatacacttgaacaaaatagacccacatgcgcccaatgagatgttatacgggaggatcggctacatttatgcactgctattcgttaacaaaaatttcggcgtagaaaagataccccaatcccacattcagcagatttgcgaaaccattctcacaagcggtgaaaacctcgctcgcaagcgtaactttactgccaagagtcccctaatgtatgagtggtaccaggaatactacgtcggggctgcccacggattggccggcatctattactacctcatgcagccaagcctgcaagtgtcccaaggaaagctccacagccttgtaaaaccctccgttgattacgtgtgtcagctgaaattcccatccggcaattaccccccttgtattggggacaatagggatctcctggtccactggtgtcacggggcccctggcgttatctacatgctgatacaagcttacaaagtcttcagagaggagaagtacctgtgtgatgcgtatcaatgcgcggacgtcatatggcaatacggactccttaaaaaagggtatggcctatgccacgggtccgcaggtaacgcttatgcttttctgaccttgtacaatttgacacaagatatgaaatacctctacagagcgtgtaagtttgccgagtggtgtttggagtacggtgagcatggatgtcgtacccctgacacaccattttccctcttcgagggcatggccggaactatttactttctcgccgacctgctggttccaaccaaagcgaggttccctgcctttgagctgtag

SEQ ID NO: 192722 - DNA, 1200 bp, synthetic construct
  misc_feature 1..1200: note = Description of Artificial Sequence: Synthetic coding sequence
  source 1..1200: mol_type = other DNA
atggcccagcgggccttccccaacccctacgccgactacaacaagtcattggcagaaggttacttcgacgccgcaggaaggttgacccccgagttctcgcagaggcttaccaacaaaatccgggagcttctgcagcagatggaacgggggcttaaatccgccgaccccagagacggcactgggtacacaggctgggctggtatcgcggttctgtacttgcacctctatgatgtgtttggagaccctgcatacctgcagcttgctcacggctatgtcaagcaatccctgaattgcctaactaaaagatccatcacctttttgtgcggtgacgctgggcctctagccgtggctgcggtcttataccacaaaatgaataacgagaagcaggccgaagactgtattactagacttatccatcttaataaaattgatccccacgcccctaacgagatgttgtacggaagaatcggatacatctatgcgcttctttttgtgaataagaactttggcgtggagaagatccctcaaagccacatccagcagatttgcgagacgatactcactagcggagagaatctagctcgcaagcgcaatttcaccgctaagagcccattaatgtacgagtggtaccaggagtactacgtgggagccgcacacggactcgctggcatctattactacctcatgcagccttctctccaagtatcccaggggaagttgcatagcctggtgaaacccagtgtcgactacgtttgccagcttaagttcccttcgggcaactaccccccgtgtattggcgataacagagacctgctggtgcactggtgccacggcgctccgggtgtgatttacatgttgatacaggcatacaaagtgttccgggaagagaaatatctgtgtgacgcctaccagtgtgccgatgttatctggcagtatggtcttctcaagaaggggtacggtctgtgccatggttccgccgggaatgcgtacgcatttcttacactctataacctgacacaggacatgaagtatctgtacagggcctgcaaatttgccgagtggtgtttggaatatggagagcatggctgccgaactcctgatacacccttcagtctctttgaggggatggcaggtacaatctattttctagcagaccttctagtccccactaaggcaagattccccgcctttgagttatag

SEQ ID NO: 192723 - DNA, 1200 bp, synthetic construct
  misc_feature 1..1200: note = Description of Artificial Sequence: Synthetic coding sequence
  source 1..1200: mol_type = other DNA
atggcccagcgggccttccccaacccctacgccgactacaacaagtcattagccgagggctatttcgacgccgctgggagactaacgccagagttttcccagaggctgacgaataagatccgggaactgctccagcagatggagcgaggtctgaaatcagcagatccgagagacgggacaggctacaccggctgggctggaatagcagtcctctacctgcatctctacgatgttttcggagatcccgcatatctccaactggcccacggatacgtcaagcagagcctcaattgtctgaccaagcgatccatcacctttttatgcggtgatgccgggcccctggccgttgccgccgtcctgtaccacaagatgaacaatgaaaagcaagccgaagattgcataacccgactcatccatctgaataagattgacccccatgctccaaatgagatgttatatgggcggattggatatatctacgccctgctgttcgtgaacaagaattttggtgtcgaaaaaatcccccaaagtcacatacaacagatctgtgagaccattctaacgtctggtgagaatctagcacgtaaacggaacttcactgctaaaagcccgcttatgtatgagtggtatcaggaatattatgtcggagcggcgcacggactagctggaatctattactacctcatgcagccaagcttacaggtctcccagggaaagctgcactccttggtgaagccatccgtggattacgtgtgtcaattgaagttccctagcggtaactacccaccttgtatcggggacaacagggacctgttggtgcactggtgccatggcgctcccggcgtgatttatatgcttattcaagcatacaaggtgttcagagaggaaaagtacctgtgtgacgcgtaccagtgtgcggacgtgatctggcagtacgggctcttgaagaagggttatggactgtgtcatggctcagccgggaatgcctatgccttcctgactctctacaatctgacacaagatatgaaatatctgtatagggcttgtaagttcgccgagtggtgcctggaatacggcgagcacgggtgtaggacaccagacacacctttcagcttattcgagggaatggctggaaccatttactttcttgccgatttgttggtgccaaccaaggctaggtttccggcgttcgagctgtag

SEQ ID NO: 192724 - DNA, 591 bp, synthetic construct
  misc_feature 1..591: note = Description of Artificial Sequence: Synthetic coding sequence
  source 1..591: mol_type = other DNA
atggcccagcgggccttccccaacccctacgccgactacaacaagagccttgcggaagggtattttgacgccgctggacgactcacccctgagttcagccagaggctgactaacaagatccgcgagctgctacaacaaatggagagagggctgaagtccgctgacccacgcgatggtacggggtacaccgggtgggctgggatcgccgttctctatctgcatctatacgatgtgttcggcgacccggcatatctccagctcgcacatgggtacgttaaacaatcgctgaattgcctgaccaaaaggtcgattacctttctgtgcggggatgccgggcctctggcggttgctgcagtgttgtaccacaagatgaataacgagaagcaggctgaggattgtatcacgagacttatccatcttaataaaatcgatccccacgcccctaacgagatgttgtatggcaggatcgggtacatatacgccctgctgttcgtgaataaaaacttcggggtggagaaaattccccagagtcatattcagcagatttgtgaaaccatcttgacctccggcgaaaatctggcccgaaaatag

SEQ ID NO: 192725 - DNA, 1200 bp, synthetic construct
  misc_feature 1..1200: note = Description of Artificial Sequence: Synthetic coding sequence
  source 1..1200: mol_type = other DNA
atggcccagcgggccttccccaacccctacgccgactacaacaagtccctggccgaaggatatttcgatgccgccggcaggcttactcccgagttctcacagcgcctcacgaacaagattcgtgaactactccaacagatggagcggggcctcaagtcagctgatcccagagacggcacagggtacactgggtgggctggaatagccgtgctgtacctgcacctgtacgacgtgtttggcgatccggcatacctccagctcgcgcacggatacgttaaacagagtcttaactgtctgacgaaaaggtctattaccttcctttgtggtgacgctggacctctggctgtcgccgctgtgctttatcacaagatgaataacgaaaagcaggcagaggattgtatcacccgcttaatccacctgaataagatcgacccgcatgccccgaacgagatgctttacgggcggattggctatatctatgccctgttatttgtaaacaagaatttcggtgtggaaaagattccccagagtcacattcagcagatctgcgaaaccatacttacatcgggcgagaatctggcaagaaaacggaacttcacagccaaaagccccctgatgtatgagtggtaccaggaatattatgttggcgcagctcacggtcttgccggcatttactattacctgatgcagccttccctgcaggtgagccagggcaaactgcattcactggtaaagccgtcagtcgactacgtgtgtcagctgaagtttccatcagggaactacccaccgtgcatcggcgataaccgggatctcttggttcattggtgccacggggcccccggcgtaatatatatgctgatccaggcatataaggtctttcgagaggagaaatacttatgcgacgcatatcagtgcgcagacgtgatatggcagtatggcttgctgaagaaaggatacggcctgtgccacggatcagctgggaacgcctatgcttttctgactctgtataacctcacacaggatatgaaatatctctatcgcgcctgtaaatttgccgaatggtgtctcgagtacggagaacatggctgccgaacccctgacaccccttttagcctgttcgaaggcatggctggaactatttacttcctggccgaccttcttgtgccgaccaaagctcgattccccgccttcgaactgtag

SEQ ID NO: 192726 - DNA, 1353 bp, synthetic construct
  misc_feature 1..1353: note = Description of Artificial Sequence: Synthetic coding sequence
  source 1..1353: mol_type = other DNA
atgggcgagaccatgagcaagcggctgaagctgcacctgggcggcgaagccgagatggaggagcgagcgtttgtgaatccatttccagactacgaggccgcagctggagctctactggcctccggcgcggctgaggaaaccggctgcgtgaggccccccgccaccaccgacgaacctggccttccgtttcatcaggatggaaaaataattcataactttattagacgaatccagactaagatcaaggatctgctgcagcagatggaggagggactgaagaccgcagatcctcatgactgctcagcctacacgggctggaccggaatcgccctgctttatctacagctgtaccgagtaacatgcgatcaaacatacctactgcgctctctcgactacgtgaaacgaacactgcgaaatctgaacggcaggcgtgtcacatttctgtgcggggatgcaggtcccctggccgtgggtgcggtaatttaccacaaactgagatcagattgcgagtcgcaggagtgcgtaacaaagctactgcagcttcagcgctctgttgtgtgccaggagtccgaccttccagatgagctgctgtacggaagagccggatacctctatgcattgctgtacctgaataccgaaattggtcccggtacagtgtgcgagtccgcaattaaggaagtggtcaacgcaattatagagtccggcaaaaccctgtcaagggaggaacgaaaaacagagaggtgcccactcttgtaccaatggcatagaaaacagtatgtgggggctgcccacggaatggcaggtatttattacatgctgatgcagccagctgcgaaagttgatcaggagacactgacagagatggttaaaccatctatcgactatgttcggcacaagaagttccggtcaggcaattatccctcgtcgttatccaatgagacagacagattagttcattggtgccacggagcccctggcgttatccacatgctcatgcaggcttacaaggtgtttaaagaggaaaagtatctgaaggaggctatggagtgttctgacgtgatctggcagagagggctcttgcgcaaaggttacggcatatgccacggcaccgccgggaacggatattcctttctgagcctgtaccggctgacccaggataagaaatacctgtatagagcatgcaagttcgctgagtggtgccttgattatggggcgcatggctgccggattccagacaggccatacagcctctttgaagggatggccggggcgatccatttcctcagcgatgtgctgggacctgaaacctcacgttttccggcttttgagttggattcctcaaaaagagactag

SEQ ID NO: 192727 - DNA, 2199 bp, synthetic construct
  misc_feature 1..2199: note = Description of Artificial Sequence: Synthetic coding sequence
  source 1..2199: mol_type = other DNA
atgaccgagggcacctgcctgcggcggcggggcggcccctacaagactgaacctgccactgacctgggaaggtggagactcaactgcgaaaggggaaggcaaacctggacatatctacaggacgagagggccggtcgggaacaaaccggcctcgaggcctatgctctggggttggataccaagaactactttaaggatcttcccaaggcccacactgccttcgagggtgctttgaacggaatgactttctacgtgggtctccaagcagaggatggacattggactggcgactacgggggtcctctatttctgttgccagggctacttattacctgccacgtggcacgtatccctctgcctgcaggctaccgcgaagaaatagtcaggtaccttagaagcgttcagctgccagatggggggtggggccttcatattgaagataaatctacagtctttgggaccgcactgaactacgtgtccctgcggatcctaggggtaggaccggatgatcccgatctggtgcgggcacgcaacattctccacaagaagggaggagccgtggccatcccaagctggggaaagttttggttagctgtactgaatgtttatagttgggaggggctcaacaccctgtttccagagatgtggttatttccagattgggcacctgcacatccaagcactctgtggtgtcactgtagacaagtttatttgcctatgtcctactgttacgccgtgcgactgtctgccgccgaagacccgctggtgcagagcctaaggcaggagctgtatgtcgaggatttcgcatctatagactggcttgcgcagcgaaacaatgtggcacccgacgaactttacaccccgcatagctggctgctccgagttgtgtacgcgctgctcaatttatatgaacaccatcatagtgctcacctcaggcagcgggctgttcagaaactgtacgaacatatcgtcgctgatgacagattcaccaagtccatctctattgggccaatctccaaaaccatcaatatgctcgtgaggtggtatgtggacggtccagctagtactgcttttcaggaacatgtgtccaggatcccggactatctgtggatgggattggatggtatgaagatgcagggaactaacggcagccaaatttgggatactgctttcgccatccaagcacttttggaggctggcggccatcatcgtcctgagtttagtagctgcctgcagaaggcacacgagtttctgagactaagtcaggtccctgataaccccccagattaccaaaaatactatcggcagatgcgtaaaggcgggttttcgttcagtaccttggattgcggttggatcgtgagtgactgtacagcagaagcgttgaaggccgtactactgctccaagagaaatgcccccacgtgacggaacatatcccacgagagagactgtgtgacgcagtcgcggtcctgctcaatatgcggaatcctgatggagggttcgccacctacgagacaaagcgaggcggccatttgctggagttgctaaaccctagcgaagtgtttggagacattatgatcgactatacatatgtggagtgcacgagtgcagtaatgcaggctttgaaatattttcacaagcgtttcccagaacatcgcgccgcagaaattagagagactctcacacaagggctggagttctgtcggcgtcagcaaagggctgatggttcctgggagggatcctggggggtatgctttacatatggcacatggtttggactagaagccttcgcatgtatgggacagacctacagggacggcaccgcttgcgcggaagtaagccgcgcatgtgacttcctgctaagcagacagatggcggatggtgggtggggcgaagacttcgaatcatgcgaggagcgtagatacttacagtccgcccagtcccaaattcataacacttgctgggctatgatggggttgatggccgtgcgtcaccctgatattgaggcccaggaaagaggcgtgcgttgtctgctggagaagcagctgccaaatggcgattggccccaggagaatatagccggagtctttaacaagagttgtgcaataagctatacatcttacaggaacatattccctatttgggccctcggtcgttttagccagctataccctgagagagcgctcgccggtcatccttag

SEQ ID NO: 192728 - DNA, 2199 bp, synthetic construct
  misc_feature 1..2199: note = Description of Artificial Sequence: Synthetic coding sequence
  source 1..2199: mol_type = other DNA
atgaccgagggcacctgcctgcggcggcggggcggcccctacaagactgaacccgcaaccgacttgggccgctggcgtctgaattgtgagagagggcgccagacttggacttatcttcaggacgagcgagcgggacgggaacagacaggactggaagcgtacgccctgggcctggacactaaaaattactttaaggatctgccgaaggcccacaccgcgtttgagggggcactgaatggaatgaccttttacgtgggacttcaggctgaggacggccactggactggagactatggcggccctctgtttttgttgcccggcttactcatcacctgccacgtcgcccggattccactccccgccggctaccgcgaggaaatcgtgaggtatcttcgtagtgtgcaattaccggatggcggctggggactgcatattgaagacaaaagcacggtcttcggaacagccttgaactatgtgtcgcttaggatcttaggagtcgggcctgatgacccggatctggtcagagcccgcaatattttacataagaaggggggagcagtcgccattccttcttggggaaagttttggctggccgttctgaacgtgtatagttgggagggcctgaatactcttttccccgagatgtggctgttcccagattgggccccagcccatcctagcaccttgtggtgtcactgtcggcaggtgtacctcccaatgtcatattgttatgccgtgaggctcagcgccgcagaagaccctttagtgcagagccttagacaggaactctatgtcgaggactttgctagtatagactggctggcccaacggaacaatgtcgcgccagatgaactatataccccccatagctggcttcttcgagtggtgtatgcactcctcaatctatatgaacaccatcatagcgctcacttgcggcaaagggccgtgcagaagttatacgaacacatcgttgcagatgacaggttcacgaagagtatctctattggccctatatctaaaactatcaacatgctggtccggtggtacgtggacggtccagccagtaccgcttttcaggaacatgtcagccggattcctgactatctgtggatgggcctggatggaatgaaaatgcagggaaccaacggatcacagatttgggatacagccttcgctatccaggccttattggaggctgggggccatcacagaccagaattctcttcatgcctgcagaaagctcacgagtttcttcgattgagtcaggtgcccgataatcctccggattaccagaagtattaccggcagatgcgcaaaggcggcttttcattctcaacattggactgtggatggatcgtctctgactgcacagccgaggccttgaaagctgtgttgctgctgcaagagaagtgcccccatgtcactgaacacatccctcgggaacgcctgtgtgacgcggtggccgttttgctgaacatgcgcaaccctgacggtgggttcgccacatacgagacgaagcggggcggccacctactcgaactgctgaacccatcggaggtgtttggtgacatcatgatcgactatacgtatgttgagtgcacatccgcagttatgcaagctctaaagtactttcataagcgcttcccagagcatcgcgccgccgagattagggaaactcttacacagggactggaattttgcaggcgccaacaaagggccgatggcagttgggagggctcttggggcgtctgctttacatacgggacctggttcggtcttgaggccttcgcctgcatggggcaaacgtatagagacggcaccgcatgtgccgaagtgagcagggcctgcgactttctgctatctcgccagatggctgacggaggatggggggaggactttgagtcttgtgaggaaaggagatatctccagagtgcccagtcacaaatccacaacacatgctgggcaatgatgggtcttatggctgtacggcaccctgacatcgaggcccaggaacgcggcgtccggtgcttattagaaaaacaactcccaaacggggactggccacaagagaatatcgccggggtgttcaataagagctgcgctataagctacacatcttaccggaacatcttcccaatctgggccctgggccggttcagtcagctgtaccccgagcgagccttggctggtcatccctag

SEQ ID NO: 192729 - DNA, 1959 bp, synthetic construct
  misc_feature 1..1959: note = Description of Artificial Sequence: Synthetic coding sequence
  source 1..1959: mol_type = other DNA
atgaccttctacgtgggcctgcaggccgaggacggccactggaccggagactatggcggccccctgttcctgctgccagggctcctgataacatgccacgtcgcccgaattcctctgcctgccgggtatcgagaagagattgtgcgctaccttcggagcgtgcagttaccggatggggggtggggactgcacattgaagataagagcactgtgttcggcaccgctttgaactatgtgagtctgcggatcttgggcgtcggccccgacgatcctgatctcgtgcgcgccaggaatattttgcataaaaagggcggcgccgtggcaataccatcctggggaaagttctggctcgcggttttgaatgtgtattcctgggagggcctcaacaccctgttccccgaaatgtggctctttccagattgggcacccgcccatccatctacgttgtggtgccattgtagacaggtctatttgcctatgagctattgttatgccgtgcggctaagtgccgccgaggatcctttggtgcaaagcctgagacaggaactgtacgtggaagattttgctagcattgattggctggcccagcgtaacaacgtcgcacccgacgagttatatacaccccactcttggctcttgcgagtggtgtatgcattactgaacctgtacgagcaccaccacagcgcccatctacggcagcgtgcagttcagaaactgtatgagcacatagtggcggatgaccgattcacgaagtcaatctcaataggacctatttcaaagacgataaacatgctggtgcggtggtacgtggacggacccgctagtaccgcatttcaagaacacgtgagccgaattcccgactatctctggatgggcctggacggtatgaagatgcaggggacgaacggtagtcagatctgggacacagccttcgctatccaggcactgctggaggccggtggtcaccataggcctgaattcagtagctgtttgcagaaagctcatgagttcttaaggctaagtcaagtccccgacaatcctcctgactaccagaagtattaccgtcagatgcggaaaggtgggtttagtttctctactctagattgcgggtggattgtttctgactgtactgccgaagcactgaaagcggtcttgctgctacaggaaaagtgcccacacgtgaccgaacacatcccacgcgagcggctttgtgatgccgtggccgtgcttcttaatatgcgcaatcctgacgggggttttgctacatatgaaaccaaacggggcggacatttactggagctgctcaacccctcagaggtgttcggcgatatcatgatcgactatacgtatgtcgaatgtactagtgccgtgatgcaggcactgaagtatttccataagcgctttccagaacacagggccgccgagattagggaaacactcactcagggtttggaattttgccgacgccagcaacgagccgatggcagttgggagggctcctggggtgtctgttttacatatgggacttggtttgggctagaggctttcgcttgtatgggacagacctaccgcgatggtacagcctgtgcggaagtttctagggcttgtgattttctgctgagcagacaaatggccgatggcgggtggggcgaagactttgagtcttgcgaggagcgcaggtacttgcagagtgcacagagtcagatccacaacacttgctgggcaatgatgggtctgatggcagtccgacacccagatattgaagcacaggagagaggagtgagatgcctgctagaaaaacagcttccaaatggagactggcctcaggaaaatattgctggagtttttaataagagctgcgccatctcctatacatcttatcggaatatttttccgatttgggcacttggacgattcagccagctgtatccagagcgggcattagcaggccatccttag

SEQ ID NO: 192730 - DNA, 2166 bp, synthetic construct
  misc_feature 1..2166: note = Description of Artificial Sequence: Synthetic coding sequence
  source 1..2166: mol_type = other DNA
atgaccgagggcacctgcctgcggcggcggggcggcccctacaagacggaaccggccacagacctgggtcgttggaggctgaattgtgaacggggcaggcagacctggacctacctgcaggatgaacgagccggccgagaacagaccggccttgaggcatacgcgcttggtctagatacaaagaactacttcaaggacctgcctaaggctcacaccgcatttgagggggctcttaatggcatgacattctacgttggccttcaggctgaggatggccattggacgggtgactacgggggccccctatttctcttgcctggcctgctcattacatgccatgtggcccggattcccctccccgccggataccgagaggagattgtcaggtacctgaggcacattgaagacaagtcaactgtattcggcactgcgctgaactacgtctctctcaggattttgggcgtcggcccggacgaccccgaccttgtgagggccaggaacatcctgcacaaaaaaggcggtgcggtagcaattccgtcatggggcaaattctggctcgcagtgttgaacgtgtatagctgggaaggtttaaatactctgtttccggaaatgtggctgttccccgattgggcaccagcccacccgagcaccctgtggtgccactgcaggcaggtctacttgcccatgagctactgctacgccgtaagactcagtgccgccgaagacccattagtacaatctttgagacaggaattgtacgtggaagacttcgcttccatcgattggcttgcccagcgtaacaacgtggcacccgacgagctatacactcctcattcctggctgctgcgggtagtgtacgccctgcttaacttgtacgagcatcaccattctgcccatctaaggcaacgggcggtgcagaagctttacgagcacatcgtcgctgatgacagattcactaagagtatctcaatcggacctattagcaagaccattaacatgttggtccgctggtacgtggacgggcctgcatcaaccgcatttcaggagcatgtcagcagaataccggactacctatggatgggtctcgacggaatgaaaatgcagggtacaaatggttctcaaatctgggatacagcctttgccatccaggcgcttctcgaagctgggggccaccacagacccgagtttagcagttgtctgcaaaaggcccatgagtttctgcgcctgtctcaagtacccgataacccaccggactatcagaagtattacaggcagatgagaaagggagggttttctttcagtactctggattgtggctggattgtttctgattgtaccgccgaggcgcttaaggcggtcctgttgctccaggaaaagtgcccacacgtgacagagcacatccctcgagagagactgtgcgatgcggtggcagtcctcttaaatatgcgcaatcccgacggcgggtttgcaacttacgaaacaaagcggggcggccacctgctggagcttctcaatccatccgaagttttcggcgatataatgattgactatacttacgtagagtgcacttcggcagtcatgcaagccctcaagtacttccacaagagattccctgagcaccgtgcagccgagattagagaaacattgacgcagggtctcgagttctgtcgacgccagcaaagagctgatgggtcttgggaagggtcatggggcgtctgttttacatacggaacatggttcgggctggaggcttttgcatgcatggggcagacctaccgcgacgggacagcatgcgccgaagtgagcagagcttgcgattttctgctaagccgccagatggctgatggggggtggggggaggatttcgagtcctgtgaggagaggcggtaccttcagagtgcacagtcacagatacacaacacctgctgggcaatgatggggctgatggcagtgaggcacccagacattgaagcgcaggaaagaggcgtaaggtgtctgttggagaagcagctgcccaacggagattggccacaggaaaatatagcaggggtttttaataaatcctgtgccattagttatacttcctaccgaaacattttcccaatttgggcccttggaagattctcccagctgtaccccgaaagggccctggcaggccatccctag

SEQ ID NO: 192731 - DNA, 1977 bp, synthetic construct
  misc_feature 1..1977: note = Description of Artificial Sequence: Synthetic coding sequence
  source 1..1977: mol_type = other DNA
atgggccggcggcgggcccccgccggcggcagcctgggccgggccctgatgcgccaccaaacacaacgttccaggtcccaccggcacaccgatagttggttgcatacatccgagttgaacgacggatatgactggggccgactaaacctgcagtccgtgacagaacaatctagccttgatgacttcttagccactgcagagctggccggcactgagtttgtggccgagaaattgaacattaaattcgtgcccgcggaggcccgaacaggactactctcctttgaagagtctcaacgtattaaaaagcttcatgaagagaacaaacagtttttgtgtattcccaggcgacccaactggaaccagaacacaacgcctgaagaactgaaacaggctgagaaagataatttcctggaatggaggagacagttggttaggctggaggaggaacagaaactgatccttacaccgttcgagaggaatctggacttctggaggcaactgtggcgggttattgaacggagcgatatcgtggtgcaaatcgtggatgcgagaaaccccttgctcttcaggtgcgaggatctggagtgctacgtgaaggagatggacgcaaataaagagaatgttatcctaattaataaggcagacctgctgaccgccgaacaacgatcagcgtgggctatgtactttgagaaggaggacgttaaggtgatcttttggtcagccttggcaggtgccataccccttaacggagacagcgaggaagaagcaaacagagacgaccggcaatccaatactacaaaatttgggcacagttcctttgatcaggcagaaatatcacatagcgaatccgagcatctgccagcacgagattccccatcattgtccgaaaaccccaccactgacgaggatgacagcgagtacgaagattgccctgaagaagaggaggacgactggcaaacctgttctgaagaggatgggcccaaagaagaagactgcagccaagactggaaggagtcatccaccgcagacagtgaggctaggagccggaagacccctcagaaacgccaaattcacaactttagtcacctcgtgtccaagcaggagctactagagctgtttaaagaactccacaccgggcgcaaggtcaaggatggccagcttacagtcggacttgtgggctacccgaatgtcggtaagagcagtacgattaacaccattatggggaacaagaaggtttctgtttcagctacaccaggacacactaaacattttcagacactgtatgtcgagcccggactctgcctctgcgattgtcctgggttggtgatgccatcctttgtcagcaccaaggccgagatgacctgcagcgggatccttccaattgaccaaatgcgcgaccacgtcccccccgtctcactcgtgtgtcagaacatccctcggcacgtattggaggcaacttacggcatcaacataatcaccccacgcgaggatgaagatccacaccgcccgcctacatctgaagagctgctgacagcctacgggtacatgcgaggctttatgaccgcacacggtcagccagatcagcctagatctgcccggtacattttgaaagattacgtctcaggcaaactgctgtactgccaccctccccccggacgggacccggtgacctttcagcatcagcaccagaggctgcttgagaacaagatgaattcagacgagatcaagatgcaactcggacgcaacaagaaagccaagcagattgaaaacatcgtggacaagacttttttccatcaagagaacgtgcgggctctgactaaaggagtccaggccgtgatgggctacaagcccgggagtggggttgtgaccgcctcaaccgctagttccgagaacggtgcaggcaaaccgtggaagaagcacggtaatagaaataaaaaagaaaagtcgcggcgattatacaaacacctagacatgtag

SEQ ID NO: 192732 - DNA, 333 bp, synthetic construct
  misc_feature 1..333: note = Description of Artificial Sequence: Synthetic coding sequence
  source 1..333: mol_type = other DNA
atgagctgccagcagagccagcagcagtgccagcccccccccaagtgcaccccaaaatgtccccctaaatgccccaccccaaaatgccctcccaagtgccctcccaaatgtccacctgttagctcctgctgcagcgtaagctcaggcggttgctgtggctcctctagcggcggcggctgtagcagcggaggcgggggttgttgtctgtcacatcacaggcgccatcgcagtcaccgccacaggttgcaatcctcgggttgttgctcccaaccatctggcggatcaagctgctgcggaggggattctggccaacacagcggcgggtgctgttag

SEQ ID NO: 192733 - DNA, 333 bp, synthetic construct
  misc_feature 1..333: note = Description of Artificial Sequence: Synthetic coding sequence
  source 1..333: mol_type = other DNA
atgagctgccagcagagccagcagcagtgccagcccccccccaagtgcactccaaagtgcccccctaagtgtccaacaccgaaatgccctccaaaatgcccacccaaatgccccccagtgtcctcatgttgcagtgtttcttccggggggtgttgtggatcatcttcgggagggggatgctcttcaggcgggggcggctgctgcctgtcacatcatcgccgacatcggtcccaccggcaccggctgcagtctagcgggtgctgtagtcaaccttctggcggcagctcctgctgtgggggagactctggacagcattccggaggatgttgctag

SEQ ID NO: 192734 - DNA, 357 bp, synthetic construct
  misc_feature 1..357: note = Description of Artificial Sequence: Synthetic coding sequence
  source 1..357: mol_type = other DNA
atgagctgccagcagaaccagcagcagtgccagcccccccccaagtgcatccccaaatgccccccgaagtgccttacgccacgctgcccaccgaagtgtcctcccaaatgcccgcccgtctcaagctgctgcagtgtctcatcagggggatgttgtggctctagtagcggtggctcctgtgggagtagttcaggggggtgctgtagctcagggggcggaggatgttgtcttagtcaccacagaagacgtcgtagtcattgtcatagaccccagtcctctggctgttgttcccagccctccggcggatccagttgttgtgggggcggaagtggtcagcactccgggggctgttgctag

SEQ ID NO: 192735 - DNA, 333 bp, synthetic construct
  misc_feature 1..333: note = Description of Artificial Sequence: Synthetic coding sequence
  source 1..333: mol_type = other DNA
atgagctgccagcagaaccagcagcagtgccagcccccccccaagtgcatacctaaatgcccccctaagtgcctgacacccaggtgtccgccaaaatgtccaccgaaatgtcctccagttagcagctgctgctccgtcagctctggcggttgttgcggttcttctagcggtggctgctgctcttctgggggagggggttgctgcctgagccatcataggcggcgccgatcacactgccaccgtccacagagttccggatgctgtagccaacccagtggcgggtcatcttgctgtggtggcggaagcgggcagcatagcggaggctgctgctag

SEQ ID NO: 192736 - DNA, 357 bp, synthetic construct
  misc_feature 1..357: note = Description of Artificial Sequence: Synthetic coding sequence
  source 1..357: mol_type = other DNA
atgagctgccagcagagccagcagcagtgccagcccccccccaagtgtactcccaagtgccccccaaaatgccccactcccaagtgtcccccaaaatgccccccgaagtgcccccccgtaagctcctgctgtagtgtcagcagcggtgggtgctgcggctcctccagcggcggaagttgtggaagctcgtcaggtgggtgctgctctagtggcggcggaggctgctgcctctcccaccaccggaggcgccgttcacattgccaccggccacaaagctctgggtgctgcagtcagcccagcgggggctccagttgctgcgggggagggtccgggcaacattctggagggtgttgttag

SEQ ID NO: 192737 - DNA, 345 bp, synthetic construct
  misc_feature 1..345: note = Description of Artificial Sequence: Synthetic coding sequence
  source 1..345: mol_type = other DNA
atgagctgccagcagagccagcagcagtgccagcccccccccaagtgcacccctaagtgtactcccaaatgtccagccccaaagtgtccccccaaatgcccgcccgtgagcagttgttgcagcgtgtcctcgggcggttgttgtggatcatccagcggggggggatgtgggtctaattccggcggttgctgcagctctggcggtggcgggtgttgtttgagtcaccatcggcggcacagatcacataggaggcggcctcagtcctctgactgctgcagccagccgagtggagggagctcctgctgcggcgggggttcaagccagcattctggcggctgctgttag

SEQ ID NO: 192738 - DNA, 357 bp, synthetic construct
  misc_feature 1..357: note = Description of Artificial Sequence: Synthetic coding sequence
  source 1..357: mol_type = other DNA
atgagctgccagcagagccagcagcagtgccagcccccccccaagtgtacccctaaatgtccaccgaaatgccccactccaaagtgcccccccaagtgtcctccaaagtgtccaccagtctcttcctgttgttctgttagctctggagggtgctgtggcagcagctccggaggctcttgtgggtcctcaagtggtggctgttgctcatccggcggtggcgggtgttgcctatcacaccaccgccaccacaggagccacagacacagacctcagtcttctgactgctgttcccagcctagcgggggaagtagctgctgtggcggtggaagcggacagcattctggtggatgctgctag

SEQ ID NO: 192739 - DNA, 357 bp, synthetic construct
  misc_feature 1..357: note = Description of Artificial Sequence: Synthetic coding sequence
  source 1..357: mol_type = other DNA
atgagctgccagcagagccagcagcagtgccagcccccccccaagtgcactcctaagtgtcctccgaaatgtccaacaccaaaatgtcctccaaagtgtccccccaaatgtcccccagtctcctcttgttgtagtgtgtcaagtggaggatgctgcggctcatcatcaggtgggtcttgtggctcttcgagcggtgggtgttgctcttctggcggaggcgggtgctgcttgagtcaccatcgtcaccaccgatctcaccgccatagaccacagtccagcgactgctgttcccagcccagcggcggcagttcctgctgcggaggggggagcggccagcattcaggcggatgctgctag

SEQ ID NO: 192740 - DNA, 357 bp, synthetic construct
  misc_feature 1..357: note = Description of Artificial Sequence: Synthetic coding sequence
  source 1..357: mol_type = other DNA
atgagctgccagcagagccagcagcagtgccagcccccccccaagtgtacacctaaatgcccacctaaatgtcctacaccaaaatgtccgcccaaatgccccccaaagtgtccccctgtttcctcatgctgctctgtttcctcaggtggctgctgcgggtccagctccggaggctgttgctcatccggcggcggtgggtgttgttcctctggcgggggggggtgttgtcttagtcaccacaggcggcgccgctcccaccgccatagaccacagtcatctgattgctgcagtcagcctagcgcgggttcgtcttgttgtggtggagggtcagggcagcatagcggaggttgttgttag

SEQ ID NO: 192741 - DNA, 321 bp, synthetic construct
  misc_feature 1..321: note = Description of Artificial Sequence: Synthetic coding sequence
  source 1..321: mol_type = other DNA
atgagctgccagcagaaccagcagcagtgccagcccccccccaagtgtcctcctaaatgccccccaaagtgtccacccaagtgtaggccacagtgtccggccccatgcccgccccctgtctccagttgctgcggtccttccagtgggggttgctgtggatcgtctagcggaggatgctgctccagtggtggcggaggctgctgcctgtctcatcaccgccccaggctgtttcatcgccatcggcatcagagcccagattgctgcgagtgcgagcctagtggaggctctgggtgctgccacagttcgggtgattgttgctag

SEQ ID NO: 192742 - DNA, 333 bp, synthetic construct
  misc_feature 1..333: note = Description of Artificial Sequence: Synthetic coding sequence
  source 1..333: mol_type = other DNA
atgagctgccagcagaaccagcagcagtgccagcccccccccaagtgtccgcctaagtgcacccctaagtgcccgcccaagtgccctcccaaatgtttgccccagtgcccggccccttgtagtccagccgtgtccagttgctgcggtcctatcagtggggggtgttgtggaccaagctcaggtggatgttgcaactcaggggccggtggatgctgtctctcacaccaccgacctcgtctgttccacagacgcagacaccagagccccgactgttgtgagagcgagccaagtggtggttccgggtgttgtcatagctctggaggatgctgttag

SEQ ID NO: 192743 - DNA, 333 bp, synthetic construct
  misc_feature 1..333: note = Description of Artificial Sequence: Synthetic coding sequence
  source 1..333: mol_type = other DNA
atgagctgccagcagaaccagcagcagtgccagcccccccccaagtgtccacctaaatgtacccccaaatgtcctcctaaatgtccaccaaaatgtctaccacaatgcccagcaccatgctcaccggctgtgagctcatgttgtggaccaatttcaggcggatgttgcggcccatcatccggtggctgctgcaacagtggggccggagggtgctgtttgtcacaccacagacccaggctgtttcacagacgccggcatcagtctccagattgctgtgagtccgagccctctggggggtccggctgctgtcattcttctggcggatgttgctag

SEQ ID NO: 192744 - DNA, 333 bp, synthetic construct
  misc_feature 1..333: note = Description of Artificial Sequence: Synthetic coding sequence
  source 1..333: mol_type = other DNA
atgagctgccagcagaaccagcagcagtgccagcccccccccaagtgtccccccaaatgcaccccgaagtgtcccccaaaatgtccccccaagtgccccccacagtgcccagccccatgcttcccagccgtttcaagttgttgtggaccaagctccggatcatgctgcggcccttcgtccggaggatgctgtagcagcggcgccggtggctgttcccttagccatcaccgcccccgactctttcatcgaagaaggcaccaatctccagactgctgtgagtccgagcccagcggaggctctggctgttgccactcctccggtgggtgttgttag

SEQ ID NO: 192745 - DNA, 333 bp, synthetic construct
  misc_feature 1..333: note = Description of Artificial Sequence: Synthetic coding sequence
  source 1..333: mol_type = other DNA
atgagctgccagcagaaccagcagcagtgccagcccccccccaagtgtcctcctaagtgtaccccgaaatgcccacctaagtgtccccccaaatgtccacctcagtgccccgcgccgtgctctcccgcagttagttcctgctgcggcccttcttctgggtcttgttgtggcccaagctcagggggctgttgctcttctggtggcggaggttgctgtctctcccatcaccgccccaggctttttcaccgaagaagacaccagtcaccggactgctgtgagtccgagcctagtggagcttccggctgttgccacagttctggagggtgctgctag

SEQ ID NO: 192746 - DNA, 270 bp, synthetic construct
  misc_feature 1..270: note = Description of Artificial Sequence: Synthetic coding sequence
  source 1..270: mol_type = other DNA
atgagctgccagcagaaccagcagcagtgccagcccccccccaagtgcccagccaagagccccgcccagtgtctacctcccgcttcctcctcttgcgcacccagttcaggaggatgcggtccctcctccgaaagatcctgctgtctctcacaccaccgttgtcgtagatcgcatagatgcagatgtcagtcgtctaatagctgcgaccgcgggtcaggtcagcagggtggctccagcagttgtgggcactcttccgctggctgctgttag

SEQ ID NO: 192747 - DNA, 288 bp, synthetic construct
  misc_feature 1..288: note = Description of Artificial Sequence: Synthetic coding sequence
  source 1..288: mol_type = other DNA
atgagctgccagcagaaccagcagcagtgccagcccctgcccaagtgtcccagccccaagtgcccacccaagagctcagctcagtgtcttccccccgcttcctcctgctgcgccccacgccctggatgttgcggaggcccttcctctgagggaggttgctgcctttcccatcaccggtgctgcaggagccaccgctgcaggcgccaatctagcaactcatgtgatcgaggctcgggtcaacaggacggggccagcgattgtggatacggcagcggaggatgctgctag

SEQ ID NO: 192748 - DNA, 285 bp, synthetic construct
  misc_feature 1..285: note = Description of Artificial Sequence: Synthetic coding sequence
  source 1..285: mol_type = other DNA
atgagctgccagcagaaccagcagcagtgccagcccccccccagctgcccctctcccaagtgtccaccaaaaagtccagcccaatgtctcccgcccccgagcagcgactgtgccctgtcatctggtgggtgtggaccatctagtgaaagcgggtgctgtctgtcccatcatcggcacttcaggagccaccagtgcaggcgacagcggtcaaattcctgcgatcgaggctctggccagcaaggggggggctcgtgcaggggacacggctccggaggttgttgctag

SEQ ID NO: 192749 - DNA, 279 bp, synthetic construct
  misc_feature 1..279: note = Description of Artificial Sequence: Synthetic coding sequence
  source 1..279: mol_type = other DNA
atgagctgccagcagaaccagcagcagtgccagcccccccccaagtgccctagtccaaaatgtccacccaaatcccccgttcagtgcttacctcccgccagctccggttgtgccccttccagcgggggctgcggcccctccagcgaaggaggctgtttcctgaatcaccaccggcggcaccatcgctgccgaagacagaggcccaacagttgcgaccgcggaagcggccagcaggggggaggaagcgggtgtggccacggctccggcggctgttgctag

SEQ ID NO: 192750 - DNA, 279 bp, synthetic construct
  misc_feature 1..279: note = Description of Artificial Sequence: Synthetic coding sequence
  source 1..279: mol_type = other DNA
atgagctgccagcagaaccagaagcagtgccagcccccccccaagtgccctagccctaagtgtccccctaaaaaccctgtgcaatgtctgcccccagcgtctagcggctgtgctccctccagtggtggttgcggtccgagttctgagggaggctgttttcttaaccatcatcggcgacaccaccgctgccgaagacaaagatccaattcatgcgaccgaggaagtggccagcaagggggaggctctggctgttgtcatggatccggtggctgttgctag

SEQ ID NO: 192751 - DNA, 300 bp, synthetic construct
  misc_feature 1..300: note = Description of Artificial Sequence: Synthetic coding sequence
  source 1..300: mol_type = other DNA
atgagctgccagcagaaccagcagcagtgccagcccccccccaagtgtcctatcccgaaatatccacctaagtgtccttcgaaatgcgccagtagttgcccaccacctatctcgagctgctgcggctcctcaagcggtggctgcggatgttgttccagcgagggcggcggatgttgtctgagccaccaccggcatcacaggtcccattgccatcgcccaaagtcgagcaactgttacgggagtggcagcggccagcagtccggcgggtcggggtgctgttccggcgggggatgctgttag

SEQ ID NO: 192752 - DNA, 300 bp, synthetic construct
  misc_feature 1..300: note = Description of Artificial Sequence: Synthetic coding sequence
  source 1..300: mol_type = other DNA
atgagctgccagcagaaccagcagcagtgccagcccccccccaagtgccccattccaaaatatcctcccaaatgcccttccaagtgtgcctcttcttgccccccacccatttcctcctgctgtggaagctcaagcgggggctgcggttgttgttcctcagaaggaggaggctgttgtctctctcatcaccggcatcatcgctcgcattgtcatcgcccaaagtcttccaactgttatggttcggggtcaggacaacagtccggaggttccggttgttgttctggtggcggatgctgctag

SEQ ID NO: 192753 - DNA, 357 bp, synthetic construct
  misc_feature 1..357: note = Description of Artificial Sequence: Synthetic coding sequence
  source 1..357: mol_type = other DNA
atgagctgccagcagagccagcagcagtgccagcccccccccaagtgtaccccgaagtgcccacccaagtgtacccccaaatgccctcccaagtgtcctcccaaatgtcccccccagtgctccgcaccctgcccaccccccgtaagcagctgctgtggcagttcgtccggcggatgctgttcttctgagggtggtggatgttgtttgagtcaccatagaccaaggcaatccctgcgccgaaggcctcaatcatcatcttgctgtgggagcgggagcggacaacagtccggcggcagttcatgttgccatagtagcggagggtccggttgctgtcacagcagcggcggctgctgctag

SEQ ID NO: 192754 - DNA, 297 bp, synthetic construct
  misc_feature 1..297: note = Description of Artificial Sequence: Synthetic coding sequence
  source 1..297: mol_type = other DNA
atgagcagcgacgacaagagcaagagcaacgaccccaagaccgagcctaaaaactgcgatcccaaatgtgagcagaagtgcgaatcgaagtgtcaaccctcctgccttaagaagttgctacagaggtgctttgaaaagtgtccatgggaaaaatgccctgctccaccaaagtgcctgccatgcccttcccagtcgccgtctagttgccctccccaaccatgcacaaaaccatgtccaccaaaatgtccaagctcctgtcctcacgcatgtccaccaccatgtccccctcccgaatag

SEQ ID NO: 192755 - DNA, 1860 bp, synthetic construct
  misc_feature 1..1860: note = Description of Artificial Sequence: Synthetic coding sequence
  source 1..1860: mol_type = other DNA
atgtgcagctgccacaagggctacacccggacccccgaccacaagcactgtagggacattgatgaatgccaacaagggaacctgtgcgtgaacggacaatgcaagaatacggagggttcttttcgctgcacctgcggtcagggttaccaactatccgctgcgaaggaccaatgcgaggatatcgatgaatgccagcaccgacatctgtgtgcgcatggacagtgccggaacacagaaggcagtttccagtgtgtttgtgaccaggggtacagagcttcagggctgggagaccactgtgaggacattaatgagtgtctggaagacaaatccgtatgccagcgaggagattgtatcaacaccgcgggatcctacgattgcacttgtcccgatggattccagcttgacgataacaaaacgtgtcaggacatcaacgagtgcgagcatcccggcctctgtggcccccagggggagtgtttgaatacggagggttctttccattgcgtttgtcagcagggattcagtatatcagcggacggcaggacttgtgaagatgtcaatgagtgcgagctcttgtcaggagtgtgcggggaggctttttgtgaaaacgttgagggctcattcctgtgtgtctgcgccgacgagaatcaagaatacagccctatgaccggtcagtgtcgatcacgcacttctacagacctagacgtggacgtggatcagccaaaagaagagaaaaaagaatgctactataatttgaatgatgcaagcttgtgtgacaacgtgttggcacctaacgtgaccaagcaggaatgttgttgcacatctggggttggctggggagataactgcgagattttcccctgccccgtgttaggtaccgctgagtttacggagatgtgccccaagggcaaaggatttgtccccgcaggagaaagctcatcagaggccgggggtgaaaactacaaggatgctgatgaatgcttactctttggacaggagatctgcaagaatgggttctgcctcaatactcgacctgggtatgagtgttattgcaaacagggaacctactacgatcctgttaagctccagtgctttgacatggatgaatgccaagaccctagctcctgtatcgatggacagtgcgtcaatactgagggcagctacaactgcttttgcacacaccccatggtcctggacgcatctgagaagagatgcatccggcccgccgaatcaaacgagcagatcgaggaaactgatgtgtaccaggatttatgttgggaacacctgtcagatgagtacgtgtgtagtcgtcctcttgtcgggaaacaaacgacctacacagagtgttgttgtctgtatggggaggcttggggcatgcaatgcgcactctgccccctgaaagactctgatgattacgctcagctctgcaatataccagttactggaagacgacagccttatggacgtgatgccttagtcgacttcagcgagcagtacacccctgaggcagacccttatttcatacaggataggttcctgaatagcttcgaagagttgcaagccgaagaatgtggaatccttaatggatgcgagaatggcagatgcgtccgtgtccaggagggctacacctgtgattgcttcgatgggtaccatctcgacacggcgaagatgacatgcgtggacgtgaacgaatgtgatgagctcaacaatcgaatgtccctatgtaaaaatgccaaatgtatcaacacagatggaagctacaaatgcttatgcctgcctggctacgtgccctcggataaaccgaactactgcaccccactaaatactgccctcaatctggagaaggatagtgacctcgagtag

SEQ ID NO: 192756 - DNA, 5169 bp, synthetic construct
  misc_feature 1..5169: note = Description of Artificial Sequence: Synthetic coding sequence
  source 1..5169: mol_type = other DNA
atggccggcgcctggctgcggtggggcctgctgctgtgggccggccttcttgctagctcagcacacggcaggctccggcgcataacctacgttgtacatcccgggcccggactcgcagcgggcgctctgcccttgagcggtcctcctcgatcaagaacttttaatgtggccctcaacgccaggtactccagatccagtgccgccgcaggagcgcccagccgtgcctctcctggtgttccgagcgagagaacgcggagaacttctaagcccggtggagctgccctgcaggggctcagaccacctcctcccccaccacccgagccagctcggcccgcagtcccaggcggtcagttacatcccaatccgggtgggcatcctgcagccgcccctttcacaaagcagggccggcaggtggttaggagcaaggtccctcaggagacccagtcgggtggcgggtcacgcctgcaggtacaccagaaacagcaactgcagggtgtcaatgtctgtgggggcaggtgctgccatggctggtccaaggcccccggctcccagcggtgtacaaagcccagctgtgttcccccatgccagaacggaggcatgtgcctgcgcccacaactgtgcgtgtgtaaaccgggcacaaagggcaaggcgtgcgagactatcgctgctcaggatacctcctctcctgtattcggcggccagagccctggtgccgccagctcctggggcccccctgagcaggccgctaagcacaccagttctaagaaagccgacaccctgcctcgggtgtcccctgtcgcccagatgacacttacactgaaacccaagccttccgtgggactgccccaacaaattcacagccaggtcactccgctctcatcgcagagtgtggtcattcaccacggccagacacaggagtacgtgctcaagccaaagtactttccggcccaaaagggaatctccggtgaacaatccaccgaggggagtttcccactgcgctacgtgcaagaccaggtagctgcacctttccaactgagtaatcatactggacgaataaaggtggttttcacccccagtatttgtaaagtaacatgcacaaaaggctcatgccagaatagttgcgaaaagggcaatactaccaccctcatctccgaaaatggccacgcggcagacacattgaccgccactaatttccgggtcgtgatttgtcacctgccatgcatgaacggcggccagtgcagcagtcgcgataagtgccagtgcccgccaaacttcacaggaaaactgtgtcagataccagttcacggggcctcggtaccaaagctgtaccagcatagtcaacagcctgggaaggcgcttggaacccacgtgatccactctactcacacactaccacttaccgtgacgtctcaacagggagtgaaagtgaaatttccacctaatatcgttaatatccacgttaaacaccctcccgaggcctctgtgcaaattcatcaagtctcgcgcattgacggcccaaccggccagaaaaccaaagaggcacagcctggacagtctcaggtctcctatcagggcctccccgttcagaagacgcaaaccattcactcaacttactcccatcagcaggttataccacacgtgtaccctgtggcagctaaaactcagcttggcaggtgcttccaggaaactatcgggtcacagtgtgggaaggctctgccgggactgagcaaacaggaagattgctgcggaactgtggggacatcatggggattcaataaatgccagaaatgccccaaaaagccctcttatcatggttacaaccagatgatggaatgtctgcctggctacaaacgcgtgaacaatactttttgccaagatatcaacgagtgtcagctgcagggggtctgtcccaacggagaatgtttgaacacgatgggttcttaccgttgcacctgcaagatcggttttggccccgaccctactttttcctcttgtgtccccgatccccctgtgatttccgaagagaagggaccttgttatcgcttggtgtccagcggcaggcagtgcatgcacccccttagcgtgcatctgactaaacagctttgctgttgctctgttggtaaggcatggggccctcattgcgagaaatgccctctacctggaacagccgccttcaaggaaatttgtccaggtggtatgggttacacagtgtccggggtgcaccgacgcaggcctatccaccaccacgtgggcaagggccctgtcttcgtgaagcccaagaacactcagcccgtcgccaagtccacacaccctccacctctaccagccaaagaggagccagtggaagccctgacattctctagagagcatggcccaggtgtagccgaaccagaagtcgcaacagcccctccagaaaaggagatccccagcttagaccaagagaagacgaaactggagccagggcagccgcagctatccccaggcatttccaccatccacctgcatccccagtttcctggcattgtcatcgagaagacctcgccaccagttcccgtcgaagttgccccggaagcgagcacttcctctgcgagtcaggtaattgcacccacccaggttactgagattaacgagtgcactgtgaacccagatatctgtggcgccggccattgtatcaacctccccgttagatatacctgtatctgttacgaaggatatagattctcagagcaacagcggaagtgcgtagatatcgatgagtgtacgcaggtacaacacctttgctcacaggggcggtgtgagaacacagagggatcattcctgtgcatctgccccgcagggtttatggcatctgaagagggcaccaactgcatcgatgtcgatgaatgcctgcgaccagatgtgtgtggcgaggggcactgcgtaaacactgtgggggccttcagatgtgagtattgtgattcagggtaccggatgacacagcgcggcagatgtgaggatatcgatgagtgcttgaaccccagcacctgccctgacgaacagtgcgtgaactctccaggctcgtatcagtgtgtgccctgtaccgagggcttcagagggtggaacggtcagtgcttggacgtggacgagtgccttgaaccaaacgtttgcgccaacggggactgcagcaatctggagggatcttatatgtgtagctgccacaaggggtacaccagaacccctgatcacaagcactgtcgcgatatcgatgagtgccagcagggcaacctgtgtgtgaacggacagtgtaagaatacagaagggtcctttcggtgtacctgcggccaaggctaccagctcagcgctgcgaaagaccagtgtgaggatatagacgagtgtcagcatcgccacctctgcgctcacgggcaatgcagaaatacagaaggctccttccagtgtgtatgtgaccaggggtaccgagcctctggtctgggggaccattgtgaggacattaacgaatgtctcgaggacaagagcgtctgccagagaggcgattgcataaacacagcaggatcatacgactgtacatgcccggatggctttcaacttgacgacaataagacttgccaagacatcaatgaatgcgaacacccagggctttgcggtccccaaggcgagtgtcttaacactgaaggctcctttcattgcgtgtgtcagcagggtttcagcatttcggccgatgggagaacttgcgaagatatagacgaatgtgttaataacaccgtgtgtgatagccacggcttctgtgataatacagcaggctcatttcgctgcttatgttaccagggattccaggctccccaggacgggcaaggatgcgttgacgtcaatgagtgcgaactgctgagcggagtgtgcggggaggcattctgtgagaatgttgagggatcctttctgtgtgtgtgtgcggacgagaaccaggaatattcgccaatgactggtcaatgccggagccgcacctctacagatctggatgtcgacgtagaccaacccaaggaagagaaaaaggaatgctactataatctgaatgacgcctccctgtgcgacaacgtgctggcaccgaatgtcacaaaacaggagtgctgctgcacaagtggcgtcgggtggggggataattgcgaaatcttcccttgcccagtgcttggtactgccgagtttaccgagatgtgccctaagggaaagggcttcgtgcctgctggcgagtctagcagtgaagccgggggagaaaactacaaagatgctgacgagtgtctccttttcggtcaggaaatttgcaagaacggattctgtctcaatactcgccctggctacgagtgctactgcaagcaagggacctactatgatcccgttaagctgcagtgtttcgacatggatgagtgccaggatcccagtagttgcatcgacggacagtgtgtgaacaccgagggtagctacaattgtttctgcacgcatcctatggtcctggatgcatccgagaagaggtgcatccgccccgctgaatccaacgaacagatcgaggagaccgacgtttaccaggatctttgctgggagcacctgagcgatgaatacgtctgtagcaggccacttgtcggtaagcaaaccacctacactgagtgctgctgtttgtacggcgaggcttggggaatgcagtgtgcgctgtgtcctttaaaagactctgacgattacgcccagctgtgtaacattccagtgacgggtagacggcagccttatggccgcgacgctctcgttgacttttctgagcagtataccccggaagccgatccttattttattcaggataggtttttaaacagctttgaggagctgcaggctgaagaatgtggcattctcaacggctgcgaaaatggaaggtgcgttcgtgtgcaggagggttatacatgcgattgctttgatgggtatcacctcgacacagcgaagatgacatgcgttgatgtgaatgagtgcgatgaactcaataatcgcatgtctctgtgcaagaacgccaagtgcattaatacggatgggtcctataagtgcctatgcctgccaggatacgtgccctccgataagccgaattactgtacgcccctgaataccgctttaaatctagagaaagactctgatctggagtag

SEQ ID NO: 192757 - DNA, 4191 bp, synthetic construct
  misc_feature 1..4191: note = Description of Artificial Sequence: Synthetic coding sequence
  source 1..4191: mol_type = other DNA
atggacaccaagctgatgtgcctgctgttcttcttcagcctgcccccactgctggtgtcaaatcacaccggtagaattaaagtcgtattcacgccatcgatctgtaaagtcacttgtaccaagggttcctgccagaactcttgtgaaaagggcaatactacaaccctgatttccgaaaacggccacgctgctgacacattgacggcaacaaacttccgtgtggtaatttgccacctcccctgtatgaacggtgggcagtgcagttcacgcgataagtgtcaatgccctccgaatttcacgggaaagctctgccaaatacccgtgcacggggcaagtgtcccaaagctctatcaacatagtcaacagcccgggaaagccctcggcacgcatgtcatacacagtactcatacgctcccacttaccgtaacctctcaacagggagtcaaggtaaagtttcccccaaacatcgtaaatattcatgtgaagcatcccccagaagctagcgtccaaattcatcaagtgtcccgcatagatggccctaccggacagaaaaccaaagaagcgcagcccggacaaagtcaggtgagctaccagggcctgccagtgcagaaaactcaaactatccatagcacatatagtcaccagcaggttatccctcacgtgtatcccgtggccgcaaaaactcaacttggtcgatgcttccaggaaacaattggttcgcagtgcgggaaagcactccctggcttgagtaagcaagaggattgctgtggcacggtgggcacatcatgggggttcaacaagtgccagaaatgcccaaaaaaaccctcctatcacggatacaaccaaatgatggaatgtctaccgggctataaaagggtgaacaacacattctgccaggacattaacgagtgtcagctgcagggtgtgtgtcccaacggtgagtgcctaaacaccatgggctcctaccgctgtacttgtaaaattggcttcggacccgatccaactttttcaagctgtgtccccgatccccctgtgatctccgaagagaagggcccctgttaccgcctagtcagctcaggacggcaatgcatgcatccattaagtgtgcacttaacgaaacagctgtgttgttgtagcgttggaaaggcctggggaccacactgtgagaaatgtcccctgccgggtaccgctgccttcaaggaaatttgccctggagggatgggctatactgtcagtggcgttcaccggcggaggccaattcaccatcatgtgggaaagggaccagttttcgtcaaaccgaagaatacacagcccgtggccaagtccactcacccgcctcctctaccagcgaaggaagaacccgtggaagctctaacttttagtcgggagcatggcccgggcgtcgctgaaccagaggtagccactgctcctccggagaaggagattccctccctcgaccaagaaaagacgaaactcgagccaggacagccacagctgagccctggtatcagtacaattcacctgcaccctcaatttccggggattgtaattgaaaaaacaagtcctccggtaccggtagaggttgcccctgaagcatctacaagctccgctagccaggtgatcgccccgacccaggttacagaaattaacgagtgtactgtcaatcccgacatttgcggcgcaggacactgtatcaacctcccggtacggtacacctgcatttgctacgaaggctataggttctctgaacagcagaggaagtgcgtggatattgacgagtgcacacaggtgcagcacctgtgcagccagggccgatgtgagaatacagaagggtcttttctctgcatctgccctgccggctttatggcctcagaggagggcacaaattgcattgatgtagatgagtgtctgcggccggatgtttgtggagaaggtcactgcgtgaatactgtaggggccttcaggtgtgagtattgtgactcaggctatagaatgacacaacgcggcaggtgcgaagacattgatgaatgtctaaatccctccacttgccccgacgagcagtgcgtcaattctcccgggtcctaccagtgcgtcccatgtacagaggggttcagaggttggaacggtcagtgcctggatgtggatgaatgcctggaacccaatgtgtgcgccaacggcgactgctcaaacctggagggaagttacatgtgtagctgccacaagggttataccagaaccccagatcataaacactgtagagatattgacgagtgccagcagggaaatctttgcgtgaatgggcaatgtaaaaacacagagggttctttccgttgtacttgcggccagggttaccagctgtcagcagctaaggaccagtgcgaagatattgacgaatgtcaacatagacacctgtgcgcacacggccagtgtcgtaataccgaaggctcattccagtgcgtgtgtgaccagggctatagagcctcaggccttggcgaccactgtgaagatattaacgagtgcctggaggacaagtcagtctgccagcggggtgactgcattaataccgcagggtcgtatgattgcacttgtccagacggatttcagttagacgataacaaaacctgccaggacataaacgagtgtgaacacccagggctctgcggccctcagggcgagtgcctcaacactgagggctcgttccattgtgtttgtcaacaggggtttagcatctcggctgatggccggacctgtgaagatatcgatgagtgtgtaaacaacacggtgtgcgacagccatggcttttgtgataatacggcaggcagttttaggtgcctgtgctatcaaggttttcaggccccccaggatggccaaggctgcgtggacgtaaatgaatgcgaactcctgtccggcgtgtgcggggaagcgttctgcgagaacgtcgagggcagtttcctgtgtgtgtgcgctgacgaaaaccaagaatactctccaatgaccggacaatgcaggagcaggacatccaccgacctcgatgtggacgtggaccaacctaaggaagagaagaaggaatgctactacaacctcaacgatgcatctctgtgtgataacgtgttggctccaaacgtgacaaagcaagaatgctgttgcacgtccggcgtgggatggggagacaattgtgagatattcccatgtccggtactgggcacagccgagttcacggagatgtgccccaaaggtaaaggcttcgtgccagcaggagaatcttcatcagaagccgggggtgaaaactacaaggatgcggacgagtgtctgcttttcggacaggagatttgtaaaaacggcttttgcctgaatacaaggcctggttacgaatgttattgtaagcagggcacatattatgaccctgtgaagttgcaatgttttgatatggatgaatgtcaggatccttccagctgtattgacggtcagtgtgtgaacactgagggatcctacaactgcttctgtactcacccaatggtgcttgatgcatcagagaagcggtgtattcgccccgcagaatctaacgagcagatcgaggagactgacgtataccaagatctgtgctgggaacatctgagtgatgagtatgtctgttctcggcctctggtggggaaacagacgacatatactgaatgctgttgcctctacggcgaggcttggggtatgcaatgcgcgctatgtccacttaaggacagcgacgactacgcacagctttgcaacatacccgtgacaggtcgcaggcagccttacggtcgtgacgccctggtggatttctccgaacagtacacgcctgaggcagatccatatttcattcaggatcggttcctgaactccttcgaggagcttcaggccgaggagtgcggaatcctgaatggatgtgagaacgggcggtgcgttagggtacaggaagggtatacctgtgactgtttcgatggttaccacttggatacagctaagatgacttgcgttgacgtgaatgaatgtgacgagttgaataacagaatgtctctctgtaaaaatgccaagtgcattaatactgatggctcctacaaatgcctctgtctgccaggctatgtcccatccgataaacctaactactgtacccctctgaataccgctctgaacctagagaaagacagtgatctggaatag

SEQ ID NO: 192758 - DNA, 5166 bp, synthetic construct
  misc_feature 1..5166: note = Description of Artificial Sequence: Synthetic coding sequence
  source 1..5166: mol_type = other DNA
atggccggcgcctggctgcggtggggcctgctgctgtgggccggccttttagctagtagcgcacacggaagactacggcggatcacctacgtggtgcaccccgggcctggcctggcagccggagctcttccactgtccggtcctccccgcagccgcacatttaatgtggcactcaacgccagatattccaggtcgagtgcagcggcgggtgcccccagccgggcatcgcctggggtgccgtcggagcggacgaggagaaccagcaagccgggcggcgctgctctgcagggcctgagacccccacctccccctcctcctgagccggcccggccagcagtcccaggcggccaacttcaccccaaccccggagggcatccagccgctgccccttttaccaaacagggaaggcaagtggtgcgctctaaagtcccacaagaaacccagagtggcggcggatcgagactccaggtacatcaaaaacaacagctgcagggtgtgaacgtttgcggcggacgctgttgccatggttggtcaaaagcaccgggtagccagaggtgtacaaagccttcatgtgtgcccccctgccagaatgggggtatgtgcctccggcctcagttgtgtgtttgcaagcccggaaccaaaggaaaggcttgtgagaccatcgcagcccaggacacatccagccccgtgttcggtgggcagagtcctggcgcagcgtcctcctggggtcctccagagcaggccgccaagcatacaagcagcaaaaaagccgacaccctccctagagtgtctcctgtcgcccagatgacactcacgttaaaacctaagccaagcgttggcctgcctcaacagatccactcacaagtgacccccctatcttctcagagcgtagtgatacatcacggccagacacaggaatacgtgctgaaacctaagtacttcccggcccagaaggggatctctggagaacaatctaccgaaggtagtttccctctgcggtacgtacaggatcaagttgcagcgccctttcagctcagcaatcacaccggaagaatcaaagtcgtattcaccccctccatatgtaaagtgacctgcaccaagggctcgtgccaaaatagctgtgagaaaggtaatacaactacattgatctcagagaacgggcatgctgccgatacactaactgccaccaatttccgtgttgtcatatgccacctgccctgtatgaatggagggcaatgctctagcagagataaatgccagtgcccccctaactttactgggaagctgtgccagattcctgtgcacggagcgtctgtgccaaagctgtatcaacattcacaacagcccggaaaagcacttggtacccatgtgattcacagcacccatacgctgcccctaacggttacgtcacagcaaggcgtgaaagtaaaattcccaccaaatatcgttaacatacatgtgaaacatcctccagaggcctcagtacagatccaccaggtgtccagaattgatggtcccacaggacagaaaacaaaggaagcacagccaggacaaagtcaagtgtcgtatcagggtctacctgtgcaaaagacgcagacaatccacagtacgtacagccatcagcaggtcattccacacgtttatcctgtggcagcaaaaactcagctggggcggtgctttcaagagactatcggttcacagtgcggcaaggccctgcctggactgtccaaacaggaggactgttgcggcacggtggggaccagctggggttttaacaagtgtcagaagtgccccaagaaacccagctatcacggatataaccaaatgatggaatgcctgcctggctacaaacgagtgaacaacacgttctgtcaggacattaatgagtgccagcttcagggggtgtgtccaaacggggagtgcctaaataccatggggtcttaccgctgcacctgtaagatcgggtttggcccagacccgactttctcctcctgcgtgccagatccaccagtcatttcagaagagaaaggtccttgttatcggcttgtgtcctcaggccggcagtgtatgcatcccctttccgtgcacctgacgaaacaactatgctgctgttcagtagggaaagcatggggccctcattgcgagaagtgccccctgcccggaaccgctgcattcaaggaaatctgtcctggtggcatgggctataccgtgtccggagtacaccgtagacgccccattcatcatcacgtcggcaagggacccgtcttcgtcaagccaaagaacactcagcccgtcgctaagtcaacgcaccctcctccccttcccgcgaaggaggaacccgttgaggcgctgaccttttccagggaacacgggccaggggtggccgaacccgaggttgccaccgcgccacccgaaaaggaaatcccatccctggaccaggagaagaccaagctggagcccgggcagccgcaactcagtccaggcatcagcacaatccatctgcacccacagtttcctgtggtgatcgagaaaacctcacctcccgttcccgtcgaggtggcgcccgaagcatccacctccagtgcaagtcaagtaattgccccaacccaggtcacagaaatcaatgagtgtacggtaaatcctgatatttgtggcgccggtcactgtattaatttgcccgtgcgctacacctgcatttgctatgaggggtacagattttccgaacaacagcgcaaatgcgtggatatcgacgagtgtacacaggttcagcacctctgttcccaggggaggtgcgaaaacactgaggggagttttctttgcatctgcccagctgggttcatggcatccgaggagggcactaattgtatcgatgtggatgagtgtctgcggcctgatgtgtgtggcgagggacactgtgtgaacacagtcggcgctttccgatgcgagtattgcgacagcggctataggatgactcaaagaggacgctgcgaagacatagatgagtgcctgaatccctctacatgccccgacgaacagtgtgtgaacagtccagggtcatatcagtgcgttccttgtaccgaaggtttcagaggttggaacggtcagtgcctcgacgtagacgaatgtctcgaacccaatgtgtgcgcgaacggtgattgttccaatcttgagggctcatacatgtgtagctgtcataaaggatacacacggacacctgatcataagcactgtcgagatatcgatgagtgtcagcaaggcaatttgtgtgttaacggccagtgcaagaacaccgagggctcctttagatgcacctgtgggcaggggtaccaactgtccgcagctaaagatcaatgtgaggacatcgacgagtgtcaacacaggcatctgtgtgcgcatgggcagtgccggaacacagagggttcattccagtgcgtgtgcgaccagggctatcgtgcaagcggactcggggaccactgcgaagacataaacgaatgcttagaagacaaatctgtctgtcaaagaggcgactgcatcaacacagcgggatcatatgactgcacttgtccagacggtttccagttggatgataacaagacatgtcaggatattaacgaatgcgaacaccccggtttatgtggaccacaaggcgagtgcctgaacactgaaggtagcttccactgtgtatgccagcaggggttttctatctccgctgatggtaggacatgtgaggacatcgacgaatgcgtcaacaatacagtttgcgacagccacggtttttgcgacaacacagctggaagctttaggtgtctctgttatcagggcttccaggcaccacaggacggacagggatgtgtcgacgtaaatgagtgtgaacttctcagtggagtttgcggggaagccttctgcgagaatgtcgaggggtcattcttatgcgtgtgcgccgatgagaatcaggagtatagccctatgacaggccagtgtcgcagtcgtaccagtacagacttagatgttgacgtggaccagcccaaagaggagaagaaagaatgttattataacttgaatgatgcatccctttgtgacaatgtactggccccgaacgtaacgaagcaggaatgttgctgtacatccggggtgggctggggcgacaattgtgagattttcccgtgtcccgtgctcggcacagccgaattcaccgagatgtgcccaaagggcaaagggttcgtccccgctggagaatcttcctccgaggccggcggagagaactacaaggacgctgatgagtgtctgctcttcggacaagaaatctgcaagaacggattctgtttgaacacccgtcccggttacgagtgctactgtaagcagggcacttactatgacccagtaaaactgcagtgcttcgacatggacgaatgccaggatccttccagctgtatagatggtcagtgcgtaaatacggaaggaagctataactgcttctgtactcaccctatggttttggatgcaagcgaaaaacggtgtatccggcccgcagaaagcaacgaacagatcgaggaaactgatgtgtatcaggacttgtgctgggagcacctttctgacgagtatgtgtgttctaggccactggtcggcaagcagacaacctacaccgagtgctgttgtctgtatggagaggcatgggggatgcagtgcgcgctgtgccctcttaaagactcggatgactatgcccagctgtgtaatattcccgtgaccgggcggcgccagccatatggccgcgatgcgctggtcgatttttctgagcagtatacgccagaggcggacccatactttatccaggacagattcctcaacagcttcgaggagctgcaagcagaggaatgcggaatcttgaacggctgcgaaaacggccgctgcgtgcgagtacaggaaggctatacatgcgattgtttcgacggttatcaccttgatacggcgaagatgacctgtgtggatgtgaatgagtgcgatgagctcaataacaggatgtcgctatgcaagaacgcaaaatgcatcaatactgacgggagctacaagtgcctctgcctgcctggatatgttccttctgacaagcctaattactgtacccctctcaataccgcactcaatctggagaaagactccgacttggaatag

SEQ ID NO: 192759 - DNA, 4188 bp, synthetic construct
  misc_feature 1..4188: note = Description of Artificial Sequence: Synthetic coding sequence
  source 1..4188: mol_type = other DNA
atggacaccaagctgatgtgcctgctgttcttcttcagcctgcccccactgctagtgagcaaccacactggccggataaaagtagtatttaccccctctatctgcaaggtgacctgcaccaaaggaagttgtcagaactcctgcgagaaaggcaatacaactacactcatcagcgagaacggacatgctgccgacacattaacagccaccaattttcgggtggtgatttgccacctgccttgtatgaacggtggacagtgttccagcagggataagtgtcagtgcccccctaatttcactggcaaactgtgtcagatccccgtccacggtgcgagcgtcccaaaactgtaccaacacagccaacagccaggaaaagcgcttgggactcatgtcatccattccacccacacactgcccctgactgtcaccagtcagcaaggagtaaaggtgaaatttccccccaacatcgtgaatatccacgtgaaacaccctcccgaggcttccgttcagattcatcaagtttcacgcatcgatggaccaaccgggcagaaaaccaaagaggcgcagcccggacagtcacaagtgtcctaccaaggactgcctgttcagaagacacagactatacattcaacatacagtcaccagcaggtgatccctcacgtgtaccccgtggccgccaaaacacagctgggacgttgcttccaggaaactataggctcacagtgtggaaaagctctgcctggcctgagtaaacaggaagattgttgcgggaccgttgggacctcctggggcttcaataagtgtcagaagtgtcccaagaagccaagctaccacggctataaccaaatgatggagtgtctgccaggctacaaacgggtcaacaacacattctgccaggatattaatgagtgccagctgcagggagtgtgtcccaacggcgagtgcctgaataccatgggttcttatcggtgcacgtgtaaaattggcttcgggccggacccaactttcagctcttgtgtgccggacccccctgtcatctctgaagagaaaggaccctgttaccgtcttgttagcagcggccgccaatgtatgcatccgctgtccgtccacttaactaagcagctgtgttgctgttcggtggggaaagcctggggacctcattgcgagaaatgtcctctgccaggtactgccgcatttaaagaaatctgtcctggcgggatgggctacacagtcagcggtgtccatagaagacgtcctatccaccatcacgttggaaaaggaccagtgttcgtgaaacctaaaaacacccagcctgtggctaaatcaacccaccccccacccctgccagctaaggaggagcccgtggaagctcttacattttccagggagcacggacccggtgtggctgagccagaagtggcaactgcaccgccagagaaggaaatcccctccttagaccaggaaaagaccaagctggaaccaggacaacctcaacttagccccggaatttctaccatccatctccatccccagtttcctgtcgtcatcgagaaaacatctcctcccgtaccagtggaagtggcccccgaagcctcgacgtctagcgcaagccaggtcattgccccgacacaagtgactgagatcaacgagtgtaccgtgaatcccgacatatgcggggccgggcattgcatcaatttacccgttcggtatacctgcatttgctatgagggataccgtttctccgaacagcagcggaagtgcgtggacattgacgagtgtactcaggtgcagcatctttgcagccaaggacggtgtgaaaacaccgagggttcatttctgtgcatctgtccagctggttttatggcttccgaggaaggcaccaattgcattgatgtggatgaatgcctcagaccagacgtatgtggggaaggtcattgcgtgaatacagtgggcgctttccgctgtgagtactgcgactcagggtaccgaatgacccagcgcgggcgatgcgaagacattgatgaatgcctaaaccccagcacctgtcctgacgaacagtgtgtcaacagcccaggatcctaccaatgtgttccttgcaccgaagggttccgcggatggaacggacagtgcctggacgtcgacgagtgtctagaaccaaatgtctgtgccaacggcgactgctccaacctggagggcagttatatgtgttcctgtcacaaaggatatacacggacccctgaccacaaacactgccgtgatattgatgagtgtcaacagggaaacctgtgcgttaacggtcagtgtaaaaacactgagggaagctttaggtgcacgtgtgggcagggctaccagttaagcgcagctaaagatcagtgtgaggatatcgacgagtgtcaacacagacatctgtgtgcccacggacagtgccgcaacacagaagggagtttccagtgtgtttgcgaccagggttacagggcatctggactcggtgatcactgcgaagacatcaacgagtgtttagaggataagtccgtgtgccagcggggcgactgtattaacacggctggatcttatgattgtacctgccccgatggcttccaactggacgataataaaacgtgtcaggatatcaacgaatgtgagcatccaggactgtgtggtccacagggggaatgtcttaatacggagggctccttccattgcgtgtgtcagcagggcttctcgatctcggccgatggacggacctgcgaggacatcgacgaatgtgttaacaacacagtatgcgattctcacggcttctgcgacaacacagccgggagttttaggtgtctttgctaccaagggttccaggctcctcaggatggccaagggtgcgtggatgttaacgagtgcgaactgctatcaggcgtttgcggcgaggccttttgcgaaaatgtggaagggtccttcctttgcgtctgtgcagatgagaatcaagagtatagcccgatgactgggcagtgccggtctcgtacttctactgaccttgatgttgacgtagatcagccgaaggaagagaaaaaagaatgctactataatttaaatgacgcatctctgtgcgacaacgtgttggcaccaaacgtaaccaagcaggaatgttgttgcacatctggggtgggatggggtgacaattgcgaaatttttccctgccccgtgctgggcacagccgagttcacagagatgtgtcccaaggggaaaggctttgttcctgcgggtgagtcctcaagcgaggccggcggagagaattataaggacgccgacgagtgcttgctcttcgggcaggagatttgtaagaacggcttctgcctgaataccagaccaggatatgagtgctactgcaaacagggcacttactatgaccctgttaagctccagtgcttcgacatggatgagtgtcaagaccctagcagttgtattgatggccaatgtgtaaacactgaaggatcgtacaattgtttctgcacacaccccatggttctcgacgcctcggaaaagcgatgtattcggcctgctgagtctaacgagcaaatagaagaaacggatgtgtaccaggatctgtgttgggagcacttaagtgatgaatatgtgtgttcaaggcccctagtgggcaagcaaacaacgtatacagagtgctgttgtttgtatggggaggcctggggtatgcagtgtgctctatgccccctgaaagattcagatgattacgctcaactgtgcaatatccctgtaacaggccgacggcagccctatggtcgagatgcgctggtcgacttctcagagcagtatacgcctgaggccgatccttatttcatccaagatcgctttctgaactcattcgaggagcttcaggctgaggagtgcggcatcctgaacggctgcgagaatggtaggtgcgttcgcgtgcaggagggctacacttgcgactgtttcgacggttaccatctggataccgccaagatgacatgcgtggacgtcaacgagtgtgatgagctgaacaatagaatgtccctctgtaagaatgccaagtgcatcaataccgacggttcctacaagtgcctgtgcctaccaggctatgtccccagtgacaagccaaattattgtaccccactaaatacggctctaaacctggagaaagattcggatctggagtag

SEQ ID NO: 192760 - DNA, 4062 bp, synthetic construct
  misc_feature 1..4062: note = Description of Artificial Sequence: Synthetic coding sequence
  source 1..4062: mol_type = other DNA
atggacaccaagctgatgtgcctgctgttcttcttcagcctgccccctctactagtaagcaaccatacagggcgaattaaagtggtattcaccccgtccatctgcaaagtcacctgtaccaagggctcttgtcagaattcatgtgagaaggggaacactaccacgctgatatccgaaaatgggcacgctgcagatactctgacggcgaccaatttccgagtggtcatctgccacctcccctgcatgaatggcggccaatgttctagcagagataaatgccaatgccctcctaacttcactggcaagctctgccagatcccagttcacggtgcttcggtccccaagctgtatcagcactcacagcaacccggaaaggctctaggtactcacgttatccacagcacccacaccttgccattgacggttacctctcaacagggtgtgaaagtgaaattccctccaaacatagtcaatatacacgtcaagcacccccctgaggcctcggtgcaaattcatcaggtctcccgtattgatggccctaccgggcaaaagactaaggaggcgcagccaggacagagtcaggtcagctaccagggactgcctgtccaaaaaacccagacaatccatagcacgtattctcaccagcaggtcatcccacatgtatatcctgtagcagcaaaaacccagctgggcagatgctttcaggagaccattggatcacagtgcggtaaggctcttccggggctgtcaaagcaagaagattgttgcggcacagtagggacgtcgtggggtttcaataagtgccagaagtgccccaaaaaaccgtcctatcatggttacaatcaaatgatggagtgcctgcccggctacaaacgggtgaacaacacgttctgccaggatatcaatgaatgtcagctccagggcgtgtgtcctaatggagaatgtctcaacacaatgggatcttaccgctgtacctgcaagatcggcttcgggcctgacccaacattcagcagttgtgttcccgatccacccgtcatctccgaggagaagggtccatgctacaggctggtttcttcgggacgccagtgtatgcatccattgagcgttcacctgacaaagcagttatgctgctgcagcgtcggtaaagcctggggcccacattgtgagaaatgtcctttacccggtaccgctgcattcaaagagatttgtcccggcgggatgggatacactgtgtccggcgtgcaccgtagaaggccgatccaccaccatgtcggcaagggcccagtgttcgtgaagcctaaaaatactcaacccgtagccaaatccactcaccctcctccgctccccgcaaaggaggagcctgtcgaggcccttacattctcgagagaacacggacctggggtagccgaacctgaagtggccactgcaccccccgagaaagagatccctagcttggaccaggagaagacaaagttagagccgggacaaccgcagctgtcccctggcattagtactatacatcttcacccacagttccctgttgttatcgagaagacctcaccacccgtcccggtggaggtggctccagaagcctccactagcagtgcctctcaggtgattgcccccacccaggtgactgagataaacgaatgcacagtgaaccctgacatatgcggggccggccattgcattaacctgccagtccgctacacatgcatctgctatgagggctatcgcttttccgagcagcagcggaagtgcgttgatatcgacgagtgcactcaagtgcagcatctttgtagccaaggacgctgcgaaaacactgaaggatcttttctgtgcatctgccccgccggcttcatggcatcggaggaaggcactaattgtatcgacgttgacgaatgcttgaggccagatgtgtgtggagagggccactgcgttaataccgttggtgcttttcgctgtgagtattgtgactcggggtaccgcatgactcagcgcggccgctgtgaggacattgacgagtgcctcaatccaagtacctgccccgatgagcagtgcgttaactcgcctgggagctatcagtgcgttccttgtactgaaggatttcggggctggaatggccagtgtctcgatgtggacgagtgcctggaaccaaacgtttgtgcaaacggagattgctccaacctggaaggttcctacatgtgtagctgccacaaaggctacacccggacacctgatcacaaacactgccgcgatatcgacgagtgtcagcagggaaacttgtgcgtcaatgggcaatgcaagaacacagaaggcagctttcgttgcacatgcggccagggatatcaactgtccgccgccaaagaccagtgcgaagacatcgacgagtgtcagcacaggcacctgtgcgctcacggccaatgtcgtaacactgaagggtcctttcagtgtgtttgtgaccaagggtatagagcgagtggcttgggggatcattgtgaagatatcaatgaatgcctggaggataagtctgtatgccagaggggcgattgcatcaatacagcgggaagttacgattgtacttgtcccgacggattccagctagacgacaacaagacgtgtcaggatatcaatgagtgcgaacaccccggactgtgtggcccacagggagagtgtcttaacactgaggggtcattccattgcgtgtgccagcaggggttctctatctccgccgacggacggacgtgcgaggatgtgaacgagtgcgagctgctgtccggagtatgtggggaagctttttgcgaaaatgtggagggaagtttcctgtgtgtttgcgccgacgaaaaccaagaatatagtccaatgacagggcagtgcaggtcgcgaacatccacggaccttgatgtagacgttgatcaacccaaggaggagaagaaggaatgttattataacctgaatgacgcctcgctatgcgacaacgttctcgcacctaatgtaaccaagcaggaatgctgttgcacctcaggcgtgggctggggcgataactgtgagatcttcccttgcccagtgctgggcactgccgagtttacagaaatgtgcccaaagggcaagggatttgtgcctgcgggagaatctagctccgaggcaggcggcgagaattacaaagacgcagatgaatgcttgttgtttggccaggagatctgtaaaaacggattttgtctcaacactaggcctgggtacgagtgctactgcaagcaggggacctactatgacccggttaaactgcaatgcttcgacatggacgaatgccaagatcctagcagttgcatcgacggtcagtgcgtaaatacagaagggagctataactgtttttgtacacacccaatggtgctggatgccagtgaaaagcgctgcatccggccagcggaatcgaatgagcagatagaggagacggatgtgtatcaagatctatgttgggagcacctctccgacgaatatgtatgcagtaggcctttggtcggaaaacagaccacttataccgagtgttgttgtttgtacggcgaagcctgggggatgcaatgcgcgctctgtcccctgaaggactcagacgattatgctcagctctgcaatatccctgttactggtcgcagacagccttacggtagggacgcactggtcgacttttccgagcaatacacccccgaggccgacccatactttattcaagaccgcttcctgaatagtttcgaggaactacaggctgaggagtgcgggatcttgaacgggtgcgaaaatgggagatgtgtcagggtgcaggagggatatacctgcgactgctttgatggatatcacctagatacagcaaagatgacctgtgtggacgtgaacgagtgcgatgaactgaataaccgcatgtcgctctgtaaaaatgcaaaatgtattaacactgacggaagttacaagtgcttgtgtctccccggttatgtcccatctgacaagccgaattactgcactcccctgaacaccgcgctgaacctggaaaaagactcggatctcgagtag

SEQ ID NO: 192761 - DNA, 4029 bp, synthetic construct
  misc_feature 1..4029: note = Description of Artificial Sequence: Synthetic coding sequence
  source 1..4029: mol_type = other DNA
atggacaccaagctgatgtgcctgctgttcttcttcagcctgcccccgctactcgtgtccaatcataccgggcggatcaaggtggtgttcaccccctcaatctgcaaggtcacctgcaccaagggaagctgtcagaattcgtgcgagaaaggcaacactacaactctgatatccgaaaatgggcacgctgccgacacactgacggctactaatttccgagtggtgatatgccacttaccctgcatgaacggggggcagtgcagcagccgagacaaatgtcaatgccccccaaacttcaccggtaagttatgccagataccagtgcatggcgcttcggtcccaaaactctaccagcactctcagcagccggggaaggcactaggtactcacgttattcattcaacccataccctacccctgacagtaacgagccagcaaggggtgaaggtcaagttcccccccaatattgtaaatattcacgtgaaacatccccccgaggcctcagtgcagatccaccaggtctcccggatcgacggtccaactgggcagaagaccaaggaggcgcagcccggacagtcgcaggtttcttaccagggtctccccgtccaaaagacgcagacgatacattcaacttactcgcaccaacaggtcattccgcatgtttaccctgttgcagctaagactcagctggggaggtgtttccaggagacaatcggctcccaatgcggaaaagccctacccgggttaagtaaacaagaggattgttgtgggaccgttgggactagctggggatttaacaagtgccaaaagtgtcctaagaagccgagctatcacggctataaccagatgatggagtgcctaccggggtacaaaagagtgaataacactttctgtcaggacatcaatgaatgtcagctgcaaggcgtttgtccaaacggggagtgcctgaatacaatgggaagctacaggtgcacgtgcaagattggattcggacccgaccctactttttcttcctgcgtgccagacccaccagtgattagtgaggaaaagggcccgtgttatcgtctggtgtcctccggtaggcagtgtatgcaccccttaagtgttcatttgactaaacaactgtgctgttgctccgtaggcaaggcctggggacctcattgtgaaaagtgccccctgcccggaacagccaaggaggaacccgttgaggccctgacttttagcagggagcacggtccgggcgtagctgaacctgaggtggccaccgcaccaccagagaaggaaatcccaagtctagatcaggagaaaacgaaactggagccgggacagccgcagcttagcccagggatatccaccatccacttacacccacagtttcctgttgtgattgaaaagactagcccacccgtgccagttgaagtcgcgcctgaagccagcaccagtagtgcctcacaggttatcgctcccacacaggtcactgaaatcaacgagtgtacagtgaaccctgacatttgtggagctggccattgcatcaatctcccagtgcggtacacttgtatttgttatgaaggctacaggttcagcgagcagcagcgcaagtgcgtcgatatagacgaatgtacgcaggtccagcacttgtgctctcagggccgctgtgagaacactgaaggctcctttctgtgtatttgtcccgcaggatttatggcatctgaggagggtaccaattgtattgatgtagatgaatgcctacgcccagatgtttgtggcgagggccactgtgtcaacactgtgggagctttcaggtgtgaatattgcgactctggctacaggatgacacagcgcgggagatgtgaagacatagatgaatgccttaatccatcgacatgcccggatgagcagtgcgtcaatagtccgggatcttatcagtgcgtgccctgtactgagggctttaggggatggaacggacagtgtctggacgtagatgagtgcctggagcccaatgtatgtgcaaatggagactgttccaacctcgaaggttcctacatgtgttcatgccacaaagggtataccagaacaccggaccataagcattgtcgcgacatcgacgagtgtcagcaaggcaacttgtgcgttaatggacagtgcaagaacacagaagggagcttccgctgcacctgcggccagggataccagttgagcgccgccaaagatcaatgcgaggacattgatgaatgtcagcatcgccatctttgtgcccatggtcagtgccggaatactgaaggtagctttcaatgcgtgtgcgaccagggctaccgtgcttcagggctcggcgatcactgcgaagacattaatgaatgtcttgaggataaaagcgtatgccagagaggtgactgcataaataccgccggctcttacgactgcacctgccctgacgggtttcagctggacgacaacaaaacatgtcaggatataaatgagtgcgagcatcctggtctgtgtggccctcaaggtgagtgcctcaacacagagggctcctttcactgcgtgtgtcagcagggcttcagtataagtgccgatggtagaacatgtgaggatatagatgagtgtgtgaacaacacagtttgcgactctcatggcttctgcgataacacagccggatccttccgctgcttatgttaccagggctttcaagcccctcaggatggtcaggggtgcgtggatgtgaacgaatgcgagttacttagtggagtgtgtggtgaggcgttctgcgagaacgttgaaggctctttcctgtgcgtgtgtgctgatgagaaccaggaatatagtccgatgaccggccagtgcaggtcccgaaccagtacggacctagacgtcgatgtggatcaacctaaggaggagaagaaagagtgttactataacctcaacgatgcatccctgtgcgacaatgtcctggcaccaaatgttaccaagcaggaatgctgttgtacgagcggagtggggtggggagataattgcgagatcttcccatgtccagtattaggcacggctgagttcactgaaatgtgccccaaaggcaagggatttgttcccgccggcgagtcgtcatcagaggccggcggagaaaactacaaggacgctgacgagtgtcttctttttgggcaagaaatctgtaaaaatggcttctgtctcaacacccgacccggatatgagtgctactgcaagcaaggaacgtattacgaccctgtgaagctccaatgtttcgacatggacgagtgccaggatccctcctcatgtatcgatgggcagtgcgtcaataccgaagggagttacaattgcttttgtactcaccccatggttcttgatgcgtctgagaagcgatgtatcaggcccgccgagtcaaatgagcagatcgaagagactgatgtttatcaggatctgtgttgggagcacctgtccgacgagtacgtgtgcagccgcccgctggttgggaagcagactacctacaccgaatgttgttgcctctatggcgaagcctgggggatgcagtgcgctctgtgccctctcaaggattctgatgactacgctcagctctgcaacataccagtcactgggcgcagacaaccatacggaagagatgctctggttgactttagtgagcagtatactccagaggcagacccatactttattcaggacagattcctgaacagcttcgaagaactccaggctgaagaatgtggaatccttaacggttgcgagaatggcagatgcgtgcgtgtccaggaagggtatacatgtgactgtttcgacggttaccatctggacacagccaaaatgacgtgcgttgatgtaaatgaatgcgacgaactcaataaccgcatgagtctctgcaagaatgccaaatgcattaacaccgacggatcttataagtgtctgtgtctgcctggatacgtaccctccgataaacctaattattgcacacctctcaatacagcactgaacttggaaaaggacagcgacctggaatag

SEQ ID NO: 192762 - DNA, 5466 bp, synthetic construct
  misc_feature 1..5466: note = Description of Artificial Sequence: Synthetic coding sequence
  source 1..5466: mol_type = other DNA
atgcggccccggaccaaggcccggagccccggccgggccctgcggaatccttggcgcggcttcttgcctctcacgcttgcgctcttcgtgggtgccggtcatgctcagcgcgatcccgtcggccgctacgaacctgccggtggggatgcaaatcggctgagaagacctgggggatcctatcccgcagccgctgccgccaaggtgtactccctgttcagggagcaagatgcccccgttgccggtttgcagcccgtggagcgggcccagccaggttggggatctcctcggaggcctaccgaggccgaggctaggagaccttcgagggcacaacaatcaagacgcgtgcagccacctgctcagaccaggagatctacacccttaggccaacagcagccagccccaagaacacgggctgcaccagccctccccagactcggcactccacaaaggtcgggcgccgcccccccaactccgccccggggtcggctaaccggaagaaatgtctgtggggggcagtgctgccccgggtggactactgccaatagcaccaaccattgtataaaacctgtttgcgagccgccgtgccagaaccgtggctcttgttcccgcccgcaactctgcgtatgccgatccggcttccgcggggcgcgatgtgaagaggtgattcccgacgaggagtttgacccgcagaactctcgcctggccccccggaggtgggcagaacggagcccgaatctgaggcgctcctctgcagccggggaagggacccttgccagggcccagccacccgcgccccagtcacctcccgctcctcagtctccacccgctggcacgctgtccggactgtcacagactcatcctagtcagcagcatgtgggtctgagtcgaacggtcagattgcatcccaccgcaaccgcgagcagccaactttcttcaaacgctctcccacccggccccggtctggagcagagagacggcactcaacaggctgttcccctagagcacccctcgtcaccatggggcctgaacctgacagagaagattaagaagattaaaatcgtattcacaccgaccatatgcaagcagacatgtgcacggggtcattgcgcaaactcctgtgaaaggggcgatacaacgaccctctactcccagggaggccacggtcacgaccccaagtccggtttccgtatctacttttgtcaaatcccttgtctgaacggggggcgttgcattggtagggacgaatgctggtgccccgcgaactcaaccggcaagttttgccacctacctatcccccaaccagacagggagccgcccggacgcggaagcagaccacgcgcactgctcgaagccccgctgaagcagtctaccttcactctcccactcagcaatcagctggcgtccgtaaatcccagtctcgtcaaggtgcatatccaccaccctccggaggccagtgtgcaaatacaccaggtggcacaggtgagagggggggtcgaggaagccctggtagaaaactcagtcgagacccggcctccaccatggctccccgcgtcacccgggcactctctatgggactcgaacaatattccggctaggtccggagaaccaccacgccccctccccccagctgcgccaagaccgcgcggcctgctcgggcgatgttatttaaacacggtcaacggtcaatgcgccaatcctctgcttgagctgacaactcaagaagactgttgcggctcggtgggggccttttggggggtcaccttgtgcgcgccctgtcctcccaggcccgcaagcccagttatcgaaaatgggcagctcgaatgcccccaggggtacaagcggctgaatctaacacattgtcaggatatcaacgagtgccttacactcgggttgtgtaaggacgcagagtgcgtcaatacaagaggatcttatttgtgcacctgtcgccccggcctgatgctggatcccagtaggtctagatgcgtctccgacaaagctatctcaatgctgcaagggctatgttatcggtccttggggcctggaacctgcactctgccgctcgcgcagagaattacaaaacagatatgttgctgctctcgagtgggcaaagcgtggggctctgaatgtgagaagtgccccttacccggaacagaagccttcagagagatttgcccagcaggacatggctatacgtacgcctcaagtgacattcggctcagcatgcggaaagctgaggaggaggaactggcccgcccacctagggagcagggtcagagatcgagcggagccttaccaggccccgctgaacggcaaccactgagggtggttacggatacctggcttgaggccggcactattccagataaaggagattcacaggctgggcaggttaccacaagcgtgactcacgcacccgcctgggtgactggcaacgccactactccgcccatgcctgaacagggcattgccgagatccaggaagagcaggttacaccatccactgatgtgcttgtcacactgagcacacccggtatcgacagatgcgctgcaggggccaccaatgtctgcggtcccggaacatgtgtcaacttaccggatggatacagatgcgtctgctcgccaggctatcagctgcatccgagtcaggcttattgcacagacgacaatgaatgcctgagagatccctgtaaaggcaagggcaggtgtattaaccgggtgggatcatattcatgcttctgctatcccggttacacactggctaccagtggagcaacacaagaatgtcaggacattaatgaatgcgagcaacctggcgtgtgtagtggcggtcagtgcaccaacaccgaaggaagttatcactgtgagtgtgatcaaggttacattatggtgaggaagggacattgccaggacatcaacgaatgccgtcaccctgggacctgtccagatggacgctgcgtgaactctcccggctcgtacacttgtttggcgtgcgaagagggttatcgcgggcagagcgggagctgtgtggacgtgaatgagtgcctgacgcctggcgtgtgcgcccatggtaaatgcactaaccttgagggatctttcagatgctcctgcgagcagggctacgaagtcacaagtgatgaaaaaggctgccaggatgtggacgagtgtgcctcccgggcctcctgcccaacaggtttatgtttaaacactgagggctcattcgcttgcagtgcttgcgagaacggctattgggttaatgaggacgggaccgcgtgtgaggacttagacgagtgtgctttccccggagtgtgtccaagtggggtgtgtaccaacaccgccggatctttttcatgtaaagactgtgacggcggttatcgcccatcccctcttggtgactcttgtgaggatgtggatgaatgtgaggatccacagagtagttgcctaggcggcgagtgcaagaacacagttggaagttatcagtgcctgtgcccacagggctttcaacttgccaatggtactgtctgtgaggacgttaacgagtgcatgggggaggaacactgtgctcctcacggggagtgcctgaatagtcacggaagctttttctgcctgtgcgcgccaggattcgtgtccgcggagggaggaactagctgccaggacgtggatgaatgcgccactaccgacccttgtgtgggagggcactgtgtaaacacagagggctccttcaactgcttgtgcgaaactgggtttcagccctcacctgagtccggcgaatgtgttgatatcgatgaatgcgaagattacggagatcctgtgtgtgggacctggaaatgtgaaaattctccaggctcctataggtgtgtcctgggctgccaacccggcttccacatggctcccaatggggactgtatagacattgatgagtgcgccaacgacaccatgtgtggatcccacggcttctgcgacaacactgatggctcatttcgctgtttgtgtgaccagggatttgagatctcaccttctgggtgggattgtgtcgatgtcaacgaatgtgaattgatgctagcagtgtgcggcgcagccctgtgtgaaaacgttgaggggtctttcctgtgcctctgcgcatctgatttggaggagtacgacgctcaggaaggtcactgtcgtccgcggggcgctggcggacagagcatgtcagaggctccaacaggggaccacgctccagcacctaccaggatggattgctactccgggcagaaggggcacgctccttgcagcagcgtgctcggacgtaacacaactcaggcagagtgctgttgtacccagggtgcgagctggggggacgcatgtgacttatgccctagcgaggattccgcggagtttagcgaaatctgcccttccgggaagggctatatacccgtcgaaggtgcctggacctttggccaaaccatgtatactgacgcggacgagtgcgtcattttcggcccaggcctgtgtcccaacgggcgctgcttgaatactgtacccggctatgtatgtttgtgtaaccctggattccattacgacgccagtcacaaaaaatgtgaagaccacgacgaatgtcaagatttggcctgcgagaatggggaatgcgttaatactgagggctctttccattgtttctgtagcccgcctctgaccctagacctttcacaacagcggtgcatgaactccaccagttccactgaggacctccccgaccatgacatacacatggacatatgctggaagaaggttaccaatgatgtgtgttcagagcccctgcgtgggcatagaacaacatacaccgagtgctgctgtcaggacggggaagcgtggtcacagcagtgcgcactctgcccacccagatctagcgaggtctacgctcagctctgcaacgtagccagaatcgaagcagaacgagaggcaggggtacattttagacctggctatgaatacggccccggccccgatgatctgcattactctatttatggacctgacggggcgcctttttacaactatctggggccagaggatacagtgcctgaacccgccttcccgaacactgcgggccattccgcagaccgaactcctatacttgagtccccactacagccctccgagttacagccacactacgtagcaagccaccccgagcccccggccggcttcgaaggcctccaggctgaggagtgtgggatattaaatggctgtgagaatggaagatgcgttcgagtgcgggagggctatacatgcgattgctttgaagggttccagctcgatgccgcccacatggcttgcgtggacgtgaacgaatgcgacgatcttaatggtcctgcagtgttgtgcgtccacggatactgcgaaaatacagaggggtcttataggtgccactgttcccctggctatgtggccgaagctgggccacctcactgcacagctaaggaatag

SEQ ID NO: 192763 - DNA, 3912 bp, synthetic construct
  misc_feature 1..3912: note = Description of Artificial Sequence: Synthetic coding sequence
  source 1..3912: mol_type = other DNA
atgcccggcccccggggcgccgccggcggcctggcccccgagatgagaggagccggggcggctggactactcgccctcttgctcttgttgctccttctcctgttaggcctcggtggccgggtcgagggtgggccagcgggtgagcggggagcagggggcggaggagcactggctagagaaaggttcaaagtcgttttcgcccccgtcatttgcaagagaacttgcttaaaggggcagtgtcgagactcctgtcagcaagggtctaacatgacgcttatcggggagaacggccattccaccgataccctgacaggtagtggattcagggttgtggtttgtccactgccttgtatgaacggcggacaatgtagttcacggaatcagtgcctgtgtcctcccgatttcacaggtagattttgccaagtgcccgccggaggagcaggaggagggacgggaggcagcggccccggcctgagtcggactggagctttgtccactggagccctcccacccctggcgcctgagggtgactccgtggccagcaagcacgccatttacgctgtgcaggtgatcgctgaccctccaggtcctggagaaggccctccagctcagcatgctgctttcctagtaccgctgggaccgggtcagataagcgcagaggtgcaggctccccctcctgtcgttaacgtgcgcgtgcatcacccacccgaggcttccgtccaggtgcacaggatcgagagcagcaacgccgaaagtgccgctccaagtcaacatctcctgccacatccgaagccatcccaccctcggcctccaacccaaaaacccctcgggcggtgtttccaggatacactacccaagcagccttgcgggtcaaacccactccctggcctcaccaaacaggaggattgttgtggatccatcgggactgcgtggggccagagcaaatgccacaaatgtccccagctacagtacaccggggttcaaaagcccggaccagtgagaggcgaagttggcgctgactgtccgcagggctacaaacgcctgaactccacccattgccaggatattaacgaatgcgctatgccaggcgtttgcagacatggcgactgcctaaacaatcctggctcatacaggtgtgtgtgtccccctggacactccctgggccccagcaggacgcagtgtatcgccgataaaccagaagagaagagtctgtgcttccgattggttagtcctgaacaccaatgccagcatccactcacaaccaggcttacaagacaactgtgctgttgttccgtgggcaaagcttggggcgccagatgtcagcggtgcccgaccgatggcacagcagctttcaaagaaatctgtccggccggcaaagggtatcacatccttacctcgcaccaaacccttacgattcaaggagagagcgattttagcctatttctgcatcctgacggaccgcccaaaccacagcaactgccagaatccccctcgcaggctccaccacctgaggacacagaggaggagcgcggggtgactacagactctccagtttccgaggagcggagcgtgcaacaatctcatcctactgccaccacaacacccgctagaccataccctgaacttatctcccgaccatcaccacctacgatgcgctggtttctcccagacctaccaccatcccgctccgctgtcgaaatcgctcccactcaggtcaccgaaacggatgaatgtagattaaatcaaaacatttgcgggcatggggaatgtgtgccaggcccaccggattactcatgtcactgtaatccaggataccgaagtcacccacagcataggtactgtgttgacgttaacgaatgcgaggccgaaccttgtggtccgggcagagggatctgtatgaacactggagggtcttacaattgtcattgcaacagagggtatcgcctgcatgtaggagcgggtgggagatcttgcgtcgacctgaatgaatgcgcaaagccccacctgtgtggtgacggtggcttttgcattaacttccccggacattacaagtgtaactgttatcccggataccgacttaaggccagccggccaccagtgtgcgaggatattgatgaatgccgcgacccttcttcctgccctgacggcaagtgcgagaataagcccggcagttttaagtgcatcgcttgccagccaggctatcgctctcaaggaggtggtgcttgcagggatgtgaatgagtgcgccgagggtagcccctgttctccagggtggtgcgagaatctgcccgggtcttttaggtgcacatgcgcccaagggtacgcccctgcccccgacggtcgcagctgcctcgatgtggatgagtgcgaggctggggacgtgtgcgacaacgggatctgttcgaacactccaggatcgtttcagtgtcagtgtcttagtgggtatcatctctcacgggaccgcagccattgtgaggatatcgacgagtgcgacttccccgcggcctgcattggcggcgactgcattaacacgaatgggtcttacaggtgcctttgtccgcaaggccaccggctggttggcggaaggaagtgtcaagatatcgacgagtgtagccaggatcccagcctatgccttccccatggcgcctgtaaaaacctgcagggctcctacgtttgtgtatgtgacgagggttttacccctactcaggaccaacacggttgcgaggaggttgagcagccccaccataagaaggaatgttatctgaacttcgacgatacggtgttctgcgactcagtgctcgccaccaacgtgacgcagcaagaatgctgctgttccctcggtgcagggtggggagatcactgcgagatctacccctgccccgtttatagtagtgccgagttccattccttgtgcccagatggcaaagggtatactcaggacaataacattgtgaactacgggattcctgcccaccgggacatcgacgagtgtatgctctttggttctgaaatctgtaaagagggcaagtgcgtcaacacacagccaggttatgagtgctactgcaaacagggcttctactatgacgggaacttactggagtgcgttgatgtggacgaatgccttgacgaaagcaactgtcggaacggggtgtgtgagaatacacgcggaggttaccggtgtgcctgtaccccccccgccgagtattcaccagcccaaaggcaatgtctctctccagaagaaatggacgtcgatgagtgccaggatcccgcagcttgccgcccaggcaggtgtgtgaatctaccgggttcataccgatgcgagtgtagacctccgtgggtgccaggtccttccggacgggactgccagctgccagaatccccggccgagagggcaccagaacgccgagatgtttgttggtctcagcggggcgaggatggcatgtgcgcaggtcctctagccggtcccgctctaacttttgatgattgttgttgtaggcagggtaggggttggggggctcagtgcagaccgtgccctccacgcggagccggcagccactgtcccactagccaatcagagagcaattccttctgggacacttcgcctctgctattagggaaacccccaagggatgaggactcttcagaggaggattctgatgagtgtcggtgtgtttctggaagatgcgtccccaggccaggcggcgccgtgtgtgaatgtcccggcggttttcaattggacgcctcaagagctcgctgtgtcgacatcgacgagtgtagggaattaaaccagcggggcctgctgtgtaagtcggagcgttgcgtcaatacatctggatcatttcgatgcgtttgcaaagccggatttgcaagatcccgcccccacggagcgtgtgtccctcagaggaggcggtag

SEQ ID NO: 192764 - DNA, 792 bp, synthetic construct
  misc_feature 1..792: note = Description of Artificial Sequence: Synthetic coding sequence
  source 1..792: mol_type = other DNA
atgctgttcggcagcgagatctgcaaggagggcaagtgcgtgaacactcagccagggtatgaatgttactgtaaacagggcttctactacgacggaaatctgctggagtgtgtcgacgtcgacgagtgtctcgatgagtctaactgtaggaacggtgtctgcgagaacactcgcgggggttataggtgcgcatgtactccaccagctgagtattcaccagcccagcggcagtgtctctccccagaggaaatggacgtagacgaatgccaagatcctgccgcttgcaggcctgggcgctgcgtgaaccttccggggagctatcggtgcgagtgccggcctccctgggtacctggcccttccggtcgggattgccagcttcctgagtcccccgcagagagagcccccgaaaggcgcgacgtctgctggtctcaacgcggcgaagatggtatgtgcgcaggccctctggcaggtcctgctcttactttcgacgactgttgttgtcgccaggggcggggctggggagctcaatgtaggccttgtcctccaagaggcgccggctcacactgtccaacatctcaaagcgagtccaactcattttgggacacctccccactgctcctgggcaagccccctcgcgacgaagactcatccgaagaggatagcgacgagtgccgctgcgtttctgctgcagcctgtagagggagggctgcaccctgcgcctcagtcccagccgcctccagctctacaccacctgcaccagcagcctggatctccacatcagcagagtcttag

SEQ ID NO: 192765 - DNA, 3771 bp, synthetic construct
  misc_feature 1..3771: note = Description of Artificial Sequence: Synthetic coding sequence
  source 1..3771: mol_type = other DNA
atgcccggcccccggggcgccgccggcggcctggcccccgagatgaggggtgcaggcgccgccggtctcctggctttgttattactgctgctcctgctgctacttggattagggggaagggttgagggcggaccggccggcgagcgtggcgcaggcggggggggcgccctggcaagggaacgctttaaagtggtattcgctcctgtaatctgtaagcgcacttgcctaaaggggcaatgccgcgactcgtgtcagcagggctccaacatgacattaatcggagaaaatggtcacagcacagatacactgacaggttcagggtttcgcgtggtggtgtgccccctgccgtgcatgaatggtggccagtgttcttctaggaaccaatgtctctgcccacccgatttcaccggccggttctgccaggtccctgctggaggagccggtggcggcacgggcgggtcagggcccgggttgtccaggacaggtgctctctctacgggcgctctaccgcccttagcccccgagggtgattcggtggcgtcaaagcacgccatctatgctgtgcaggttatcgccgaccctccgggtcccggagagggacccccagcccaacacgccgcctttctggtgccactgggtcctggacagatttccgctgaagtgcaagcaccaccgccagtggttaatgtgagagttcatcaccccccggaggcctctgtgcaagtgcatcgtatcgagtcctccaatgcagagtcggctgcaccaagccagcacctcctaccccacccgaaaccttcccatccacggcctcctacccagaagcccttagggcgctgcttccaagacaccctgcccaagcagccctgcggaagtaatccactgccaggactgaccaagcaggaggattgctgcggcagcattgggacagcttgggggcagtcaaagtgccataagtgcccacaactccagtatacaggcgtgcagaaacccggacccgtacgaggcgaagtcggtgcggattgtccacaaggctacaagcgcctgaatagcacacactgtcaggatattaacgaatgtgcaatgcccggtgtgtgccgccatggagactgccttaataatccaggaagttatcggtgtgtgtgtccgcccggacacagtttgggaccgtctcggacccagtgtatcgcggataaacctgaagaaaaaagcctctgctttagactggtgtcccctgagcatcagtgccagcacccattgaccacacgacttacccgacagctatgttgctgtagtgttggcaaagcatggggagccagatgtcagagatgcccaacagacggcacggccgcattcaaagagatttgtcctgccggtaagggctatcacattcttactagccaccagactttaaccatacagggcgagagcgacttcagtctgttcctgcacccagatggtcctcctaaaccccaacagttgcctgaaagcccctcgcaggcgccccctcctgaggacaccgaggaggagcgtggcgtgacgaccgactcaccggtgagcgaagagaggagcgtccagcagtcacaccccaccgccaccaccacaccagcccgaccctacccagagctaatctctcggccttccccgccaactatgcgctggttcttgccagacctgcctccaagccggagcgccgtggaaattgcccccacacaagtcacagaaacggacgagtgccgattgaatcagaatatctgcggccatggagaatgtgtacctgggcctccagattacagctgtcactgtaaccctggctataggagtcatccgcagcaccggtattgcgtggatgtgaatgagtgtgaagccgagccatgcggccctggcagggggatctgtatgaacaccggcggcagctacaactgccactgtaaccgcggatataggctgcacgtgggcgctggcggcagaagctgtgtggatctcaacgagtgcgccaaaccccacctctgtggagacggtggcttctgcatcaacttcccaggtcactacaagtgcaattgctatccaggttatcgcctaaaggcaagcaggccacctgtgtgtgaggatatagacgaatgccgagatccttccagctgcccagatggaaagtgcgaaaacaaaccaggcagtttcaagtgcatcgcttgtcagccagggtatcgttctcagggcgggggagcctgtcgagacgtgaacgagtgcgcagagggttctccatgcagccccgggtggtgtgagaatctgcccggcagttttcgctgcacctgcgcccagggatacgcgccggcccccgacggtaggtcgtgcctcgatgtggacgaatgtgaggccggcgatgtttgcgacaacggtatttgctctaatacccctggctcattccagtgccagtgcctctccggttaccacttgagcagggatcgatcccactgcgaagacatcgacgaatgtgacttcccagcagcctgtatcgggggagactgcattaacaccaatggctcatatcgatgtctttgcccacagggccacaggctggttgggggaaggaagtgtcaggatattgacgagtgcagtcaggacccatcactctgcttaccgcacggagcttgtaagaacctgcagggctcttacgtctgcgtgtgcgacgaaggattcaccccaacacaggaccagcatggttgcgaggaagtggagcagcctcaccataagaaagaatgttatctgaacttcgatgacaccgtattctgcgactctgtgcttgctaccaacgtgactcagcaggaatgttgctgcagtttgggagccggatggggcgaccattgcgaaatatacccttgcccagtttactccagtgccgaatttcattctctgtgtccagacggaaagggatacacacaggataataatatagtgaattacggcatacctgctcaccgggacattgacgagtgtatgctgtttggcagtgagatctgcaaggaggggaagtgcgtgaacacgcagcctggctatgagtgttactgcaagcaaggcttctactacgacggcaatctgctggagtgcgtggacgtcgatgagtgccttgacgagagcaattgtaggaacggagtctgcgaaaatactagaggaggatatcggtgtgcctgcactcctcctgccgagtactcacccgcgcagaggcagtgtctctctccagaagagatggagcgggcccctgagcgccgggatgtttgctggagccagcgcggggaggatggtatgtgtgccggccccctcgcaggacccgcgctgacctttgatgactgctgctgcaggcagggaagagggtggggtgcccaatgcagaccttgtccacctcgcggggcaggatcccactgtcctacatcgcagagtgagagcaatagtttctgggacacttcacccctcttactgggcaagccgcctcgggatgaggactctagcgaggaagactcagacgagtgccggtgtgtaagcggtagatgcgttcctaggccaggcggcgctgtgtgcgagtgtcccgggggtttccagttggacgcttcccgcgcacggtgcgtggatatcgacgagtgtagggaactgaatcaacggggcctgctgtgcaagtcagaaaggtgtgtcaacacgagcgggtccttccgttgtgtctgtaaggcagggtttgcccgttcgagaccccacggcgcttgcgtcccccagagaagacgttag

SEQ ID NO: 192766 - DNA, 921 bp, synthetic construct
  misc_feature 1..921: note = Description of Artificial Sequence: Synthetic coding sequence
  source 1..921: mol_type = other DNA
atgctgttcggcagcgagatctgcaaggagggcaagtgcgtgaacacccagcccggctatgagtgctactgcaaacaggggttctattacgatgggaatttgttggagtgtgttgacgtcgacgaatgcctggatgaatctaattgccggaacggagtctgtgaaaatacccggggcgggtacaggtgcgcatgcacccctccagcagagtattccccagcgcagaggcagtgcctatccccggaggagatggacgtcgatgagtgtcaggaccccgccgcttgcaggccaggacgatgtgtgaacttgcccggcagttatcgatgtgagtgtaggcccccttgggtacccgggccaagtgggagggattgtcagctgccagagtcacccgctgaacgcgccccggagcgacgggatgtgtgttggagccagagaggagaagatgggatgtgtgctgggccactcgcgggtcccgcactgactttcgatgactgctgctgtcgtcagggaagggggtggggagcccagtgcagaccctgtccacccaggggggccggctcacattgtcccacctcgcagtccgagtcgaatagcttctgggatacctcccctctgttgctaggcaaaccccccagggatgaggacagttcagaagaggattccgacgaatgcaggtgcgtgagcggccggtgcgtgcctagaccgggtggggctgtgtgcgagtgtccgggaggcttccagctggacgctagtcgtgcacgatgcgtggacatcgacgaatgcagagagctgaatcaaaggggcttgctttgcaagtcagagagatgtgtcaacactagtggatcctttaggtgcgtctgtaaggccgggtttgctcggagtaggcctcatggggcctgcgtccctcaaaggagaaggtag

SEQ ID NO: 192767 - DNA, 3414 bp, synthetic construct
  misc_feature 1..3414: note = Description of Artificial Sequence: Synthetic coding sequence
  source 1..3414: mol_type = other DNA
atgaccctgatcggcgagaacggccacagcaccgacaccctgaccggcagtggcttccgcgtggtggtgtgcccacttccgtgcatgaatggcggccagtgttccagtcgtaaccaatgtttatgtccaccggatttcacgggcaggttctgtcaggtccctgccgggggagcaggggggggtactggaggaagcgggcctggactgtcccgcacaggtgccctctcaacaggtgccctcccacctctggcccctgaaggagatagtgtcgcttctaagcacgctatatatgcggtgcaagtcattgcggaccccccaggccccggggaaggcccccccgcgcagcacgctgcatttctcgttccccttggccccggccagattagcgcagaggtgcaggcacctccccctgttgtgaacgtcagagtgcaccatcctcccgaggcttccgtgcaagtgcaccggatcgagtcctctaatgccgaaagtgccgctccctcacaacacctcctccctcatcctaagccctctcacccgaggcccccgacccagaagccactggggcggtgtttccaagataccctgccaaaacaaccgtgtggtagtaatccgttgcccggtctgacgaaacaagaagattgttgcggctctatcgggaccgcgtggggccaaagtaaatgtcataagtgcccgcagctgcagtacactggtgtacaaaaaccaggccctgttagaggagaggttggcgctgattgtccccagggctataaaagactcaactctacacactgccaggacatcaatgagtgtgctatgcctggggtgtgcaggcatggggactgtctgaataaccccggttcatacaggtgcgtgtgccccccaggccacagtctcggcccaagtaggacccaatgtatagccgataagccagaagagaagtccctgtgcttccgactggtgtcgccagagcaccagtgccagcatccgttgaccacgcggttaacccgccagctttgctgctgcagtgtggggaaggcctggggagccagatgccaaaggtgtccaacagacgggaccgctgcgtttaaagagatttgcccggccggcaaggggtaccacatcctgacgagccaccagaccttgacgatccagggagaaagcgacttctccttgttccttcatcccgacgggccgccaaagcctcaacagcttccggaaagccctagccaagcaccgccccctgaagatacagaggaagaaagaggagtcacgaccgattcccctgtgtctgaggaacggagtgttcagcagtcacacccaactgccacaaccactcctgctagaccataccctgagctgatcagccggccatctcctcccaccatgcggtggttcctccccgacctaccgccctctaggagtgctgtggagatcgcccctacacaggtcactgagacagacgagtgtcggctgaaccagaacatttgcggacatggcgagtgcgttccaggcccgccagactactcctgtcactgtaatccaggctataggtcacatccccagcatcgctactgcgtggacgtgaacgaatgtgaggccgaaccatgcgggcccggaagaggaatctgcatgaatacaggtggttcttacaattgtcattgtaacagaggatataggcttcatgtgggcgctggaggaaggtcctgtgtggatttaaacgagtgcgccaagccccacctgtgcggcgacggtggcttttgcatcaattttccggggcattacaaatgtaattgctacccagggtatcgtctgaaagccagtcgtccacctgtgtgcgaggatatcgatgagtgcagagaccccagttcatgcccagacggcaagtgcgagaacaagcctgggtcttttaagtgtatagcctgccagcccggctaccgtagccaaggcggaggggcgtgtagagatgttaatgaatgtgccgagggcagcccctgctcccctggatggtgcgagaatctgcccggctcattccgctgcacatgcgctcagggctacgcccctgcacccgacggacggagctgcctcgatgtggacgagtgcgaagccggcgacgtgtgcgataacggaatttgcagcaatacaccaggatcttttcagtgccagtgcttgtctggctatcacttaagtagagacagatcccattgtgaggatattgacgagtgcgactttcccgctgcatgcattggcggagattgcatcaacacaaacggttcttaccgatgtctctgtcctcaaggccaccgtcttgtcggaggtcgcaaatgccaagatatcgacgagtgcagccaggatcccagcctctgcttaccacatggcgcatgtaaaaatttgcagggtagctacgtgtgcgtctgcgacgagggattcacccccacgcaggatcaacacgggtgcgaggaagtggagcagcctcaccataagaaagagtgctatctcaattttgacgacacggtcttttgcgattccgtgttggctaccaacgtgacacagcaagagtgttgctgttctcttggggcaggatggggagatcactgtgaaatctacccatgccctgtatatagctccgccgagttccactcactgtgtcccgatggcaagggctatacccaggacaacaatatcgtgaattacggaatccctgcccatagggatatcgacgagtgcatgttgtttggttctgaaatctgtaaggagggcaaatgcgtaaacacccaaccaggatatgaatgctactgcaagcagggattctattacgatggcaatcttctggaatgtgttgatgtggacgaatgcttagacgagtccaactgccgcaacggggtttgtgagaacacaagaggtgggtatcgttgcgcttgcaccccacctgctgagtattcaccagctcaaagacagtgtctatcgccagaggaaatggacgtcgacgaatgtcaagatccagccgcttgcagacccggaagatgcgtgaacctgcctggttcatatcgatgtgagtgccgccctccctgggtgccagggccttctggtagagactgccaactgccagagagcccagcagagcgggccccagagcgtagagatgtctgctggagccagagaggcgaggatggaatgtgcgcaggccctctggccgggccagcccttacattcgatgattgttgctgcaggcaggggagagggtggggagcacagtgtcgaccctgccctcctcgcggcgcgggttctcactgccctacttcccagtccgaatcaaattccttctgggataccagcccgctgctgctggggaagcctcctcgcgacgaagattccagcgaggaagatagcgacgaatgccggtgcgtgtcaggatag

SEQ ID NO: 192768 - DNA, 2202 bp, synthetic construct
  misc_feature 1..2202: note = Description of Artificial Sequence: Synthetic coding sequence
  source 1..2202: mol_type = other DNA
atgcccgccgagaccgacgagtgccggctgaaccagaacatctgcggacacggggaatgtgtcccaggcccccctgattactcttgtcactgcaacccgggctacagatcccacccacagcacagatactgtgtcgacgtgaacgagtgtgaagccgagccttgcgggcccggcagaggcatctgtatgaatacgggtggtagctataactgccattgcaacagaggctataggttacatgtgggtgccggcggccgttcttgcgtcgacctgaacgagtgtgcaaaacctcacctgtgcggggacggtggtttttgcataaatttccccggacactataaatgtaactgctatccgggctaccgactaaaagcttcgagaccccctgtgtgcgaagatattgacgagtgccgtgatccttcctcgtgccctgatggtaagtgcgagaacaaacctggatctttcaaatgcatcgcttgtcagccaggctaccggtctcaagggggcggtgcgtgccgagatgttaacgaatgcgccgaaggttcgccatgctcccctggctggtgcgaaaatctgccaggcagctttcgctgcacctgcgcacagggctatgcacctgcccctgacgggcggtcttgtctggacgtcgatgaatgcgaagcaggcgatgtgtgtgacaacggcatttgttcgaacaccccggggagttttcagtgccagtgcctgtctggataccacctgtcacgagatcggtcgcattgtgaagacattgacgaatgtgatttcccagctgcctgcatcggcggcgactgtattaacactaatgggtcctacaggtgcctttgcccccagggccatcgcttagtaggaggacggaagtgccaagacatagatgaatgtagtcaagatccgtccttgtgcttgcctcacggtgcctgtaaaaacctgcaaggaagctatgtctgcgtttgtgacgaggggtttacacctacacaggatcagcacggatgcgaggaggtggagcagcctcaccacaaaaaagagtgctaccttaatttcgacgatacagtcttctgcgacagcgtgcttgcgacaaatgtcacgcagcaagaatgctgctgttctttgggcgccggctggggggatcactgcgagatctacccctgccctgtgtacagctccgcggaattccactccctgtgtccagacggtaagggctatacccaggacaacaacatcgtcaactatggtatcccagcccacagagacatcgacgaatgcatgctgttcggaagtgagatctgcaaagaggggaaatgtgtaaatacccaaccaggttacgagtgctattgcaaacagggtttttattacgacggtaatcttcttgagtgtgtggacgtggatgaatgcctggacgagagcaattgccgaaacggggtgtgtgagaatacccgcggcggatacaggtgtgcttgtaccccacctgcagagtatagccctgcccagcggcagtgtcttagtcctgaagaaatggacgttgacgagtgccaggacccagctgcttgtcgcccaggcaggtgtgtcaatctgcccgggtcttatcgatgtgagtgcaggcccccctgggttcccggtccttctggcagggactgccagctcccggaatcacccgctgagcgggccccggagcgacgggatgtttgttggtcacagcggggagaagacggtatgtgcgcaggcccactggccggcccggcgctcacctttgacgactgctgctgcaggcagggccgcggctggggagcacagtgccggccatgtccaccaaggggtgctggaagccactgcccgacgtctcagtctgaatcaaactcattctgggatacctccccccttttactgggaaagccacctagagatgaggactctagcgaggaggattctgacgaatgccggtgtgtgagtggtaggtgtgtcccaaggccaggcggcgccgtgtgcgagtgccctggcggcttccaactcgacgcgtccagagcacgctgcgttgacattgatgagtgtcgtgaacttaaccagcgggggctgctgtgtaaatctgaacggtgcgtaaataccagcggaagcttccgctgtgtgtgcaaagcaggatttgcccgcagtcgcccacatggtgcttgtgtgccacagagaagacgatag

SEQ ID NO: 192769 - DNA, 2649 bp, synthetic construct
  misc_feature 1..2649: note = Description of Artificial Sequence: Synthetic coding sequence
  source 1..2649: mol_type = other DNA
atgaccctgatcggcgagaacggccacagcaccgacaccctgaccgggagcggcttccgggtggctgataagccagaagagaagagtctgtgtttccgactcgtgtcccccgagcatcagtgccagcaccctcttactacgcgacttacgcgccagctgtgttgctgcagcgttggtaaagcctggggtgccagatgccaaagatgtcctactgatgggacagctgcctttaaggaaatctgtcccgccggtaaaggctatcacatcctcacaagccaccagacattgactattcagggggagtcagatttctcattatttttgcaccctgatggacctcccaagccccagcagttgcccgagagcccctctcaggctccacctcccgaggacacagaagaggagagaggcgtgacaacagattctccagttagtgaagagcggagtgttcagcagagccatccgacagcgactacaaccccagctagaccttatcctgagctgatctcgagaccaagtccccccactatgcgatggttcctccctgatctgccccccagcagatcagcggtcgagatcgcaccaacccaggtcactgagactgacgaatgccgtctgaaccagaacatatgcggacacggggagtgcgttcccggtccccccgattactcttgccattgcaaccccgggtaccgctcccacccacaacatcgttattgcgtagacgtcaacgagtgtgaggctgaaccctgcggccctggtcgtgggatctgcatgaataccggcgggtcatacaattgccactgcaaccggggctacagactgcatgttggtgccggaggccgttcctgtgttgacctgaatgagtgtgccaagccccatctgtgcggagatggcgggttttgtattaatttccctggccactacaagtgtaactgttaccctgggtataggctaaaggcttcaaggcccccagtgtgtgaagacattgatgaatgtcgcgacccttcctcctgtcctgatggaaagtgtgagaacaagcctggtagcttcaaatgcattgcctgccagccgggctaccgcagccagggcggtggtgcatgtagagacgtaaacgagtgtgcagagggcagcccatgcagccccggatggtgcgagaatctccctggttccttcagatgtacatgtgcacaaggatacgctcccgccccagatgggaggtcatgtctggacgtggatgagtgtgaggccggagacgtgtgcgacaacggaatttgctccaacacacctggctcattccaatgccagtgtctatcaggctatcacctatcacgggacaggtcccattgcgaagatattgacgagtgtgatttcccagccgcttgcatcggcggggactgcataaacactaatggctcatatcgttgcctgtgtccccaagggcatcgactcgtgggtggcaggaaatgtcaagacatcgacgagtgttctcaggatccctccctgtgtctaccacatggtgcctgtaagaaccttcagggctcatacgtgtgcgtgtgcgacgaagggttcactcctacacaggatcagcacggctgcgaggaggtagagcagccccatcataaaaaggagtgttacctcaacttcgatgataccgtgttttgcgacagtgtgttggctaccaacgtcacgcaacaggagtgctgttgttctctgggagcgggttggggagaccactgcgaaatctacccttgtcccgtctattcttccgcagagtttcactctttgtgtccagacggcaaaggctacacccaagataacaacatcgtcaattacgggatccctgcacaccgtgatatcgacgaatgtatgctctttgggtccgagatctgtaaagagggcaagtgcgttaatacacaacccgggtacgaatgttactgtaagcagggcttctattacgatggaaatctgctagagtgcgtggatgtggacgaatgcttagatgagagtaactgtaggaatggcgtttgcgagaatacacggggaggctaccgctgtgcctgtactccacccgccgagtattccccagcacagaggcagtgtctctcacctgaggaaatggagcgagctcctgaacggagagacgtgtgttggagccagaggggggaagacggcatgtgtgcaggacctctcgctggcccagccctcacctttgacgactgctgttgcaggcagggacgcggttggggagctcaatgtcggccgtgtccccctcgtggcgccggctcccactgtcctacttcacagtccgaatcaaactctttttgggacacctctccactgctgcttggaaaacccccccgggacgaggactcttctgaagaagactcagatgaatgccgatgtgtgagtggaaggtgtgtgccgaggccaggtggagccgtgtgtgagtgtccaggggggtttcagctcgacgcctcgagagcccgctgtgtggacatagatgaatgccgcgagctcaaccagcgcggcttgttgtgtaaatccgagaggtgtgttaataccagtggttcctttcggtgcgtgtgcaaagctgggttcgccagatcccgcccccacggggcctgtgtgccacagcgacgccgctag

SEQ ID NO: 192770 - DNA, 4761 bp, synthetic construct
  misc_feature 1..4761: note = Description of Artificial Sequence: Synthetic coding sequence
  source 1..4761: mol_type = other DNA
atgggcgacgtgaaggccctgctgttcgtggccgccgcccgggccaggagactgggcggagctgctgcctctgagagcctggcagtgagcgaggctttctgcagagtgagatcctgccagcccaagaagtgcgctgggccacagaggtgtcttaatcccgttccagctgtcccaagcccaagtccgagtgtgcggaaacggcaggtgagtctcaactggcagcccttgacactgcaggaggcacgcgccctcctcaagagaagaagacccagaggacccggaggaaggggcctgctgagacgtcggccaccccagagagcaccggcagggaaggctcccgtgctgtgcccactcatctgtcataatggtggggtgtgtgttaaacctgaccgttgtctctgtccgccggatttcgcaggtaagttctgtcagttgcatagctccggggcccgcccacccgccccggccgttccaggcttgacccggtcagtgtacactatgccgctggcaaaccaccgagacgacgagcacggggtagccagtatggtctctgttcacgtggaacatccccaggaagctagcgtggttgtacaccaagtcgagcgcgtgtctggaccttgggaagaagccgacgctgaggcggtggctcgagccgaagctgccgcccgggccgaggcagccgcgccttacacagtcctggcgcagtcagctccacgtgaagacgggtattccgatgccagtggtttcgggtactgcttccgcgaattgcgcgggggagagtgcgcatcccccctaccaggtctgagaacccaagaagtatgctgcaggggggccggcctcgcttggggagttcacgactgtcagctctgttcagagcgcctgggaaattccgagagagtttctgcccccgacggtccctgccccaccggattcgagcgcgtgaatggaagttgtgaagacgttgacgaatgcgcgacgggcggacgttgtcagcatggggaatgcgcgaatactagaggaggctacacgtgcgtgtgtcctgacgggttcctgctggatagctctcgttcctcatgcatttctcagcacgtgatatctgaggccaaagggccctgctttagagtgctgagggatggcggatgctctttgcctatcctgagaaacatcacaaagcagatctgctgctgtagtagagtcggaaaggcatggggcagggggtgtcaactctgtcccccgtttgggtcagaaggcttccgagagatttgtcctgcagggccaggataccactattccgccagcgaccttcgatacaatacaaggcccttgggtcaggagcctccacgtgttagtttgagccagcctaggacgttgcctgccacttcaagaccaagcgcaggattccttcccacccaccgcttggaacctcgcccagagccaaggccggacccaagaccaggtcccgagctgccgctgcctagtatccctgcatggacaggcccagagatccctgagtcaggcccctcttccggcatgtgccaaaggaatccccaggtgtgcggcccggggagatgtatctcgcgtcctagcgggtacacctgcgcttgtgacagcggtttcaggctgtccccacaaggaactaggtgcatagatgttgacgaatgccgaagagtgcctcccccctgcgcacccggacgctgtgaaaattctcccggatcctttagatgtgtgtgcgggcccggcttcagggcagggccacgggctgccgaatgcttggacgtcgacgaatgccacagagtgccaccaccctgtgatctcggccgctgcgagaacacgcccggctctttcctgtgcgtgtgtccagctggataccaagctgccccccacggagccagctgccaagacgtcgatgaatgcactcagagcccaggcctttgtggaagaggagcctgcaagaatttaccagggtccttcagatgtgtctgccctgccggcttcaggggttccgcttgcgaagaagatgtagatgaatgcgctcaggagcctcctccatgtggacccgggcgctgtgacaacacagccggttcttttcattgtgcctgccccgcaggattccgaagtcgagggcctggcgccccatgtcaagatgtggacgagtgcgctcgctcccctccaccatgcacgtacggtagatgcgaaaataccgaagggagctttcagtgtgtgtgccccatgggattccaaccaaacaccgctgggagtgagtgcgaagacgtggatgagtgtgagaaccaccttgcctgtcctgggcaggagtgcgtgaactcccccggatcttttcagtgccgcacgtgcccctccgggcaccacctccacaggggcaggtgcaccgacgtggacgagtgctcatcaggcgcacccccgtgtggcccccatgggcattgcaccaacacagagggatccttcaggtgttcctgtgcccctgggtacagggcgccctccggacgccctgggccatgtgccgatgtgaacgaatgtctggaaggggacttttgttttccacatggggagtgtctgaacaccgatgggtccttcgcatgtacatgcgctcctggataccggccgggtcctcggggtgcttcatgtttggacgtcgatgagtgcagcgaggaggatctctgtcaatcaggcatctgtacgaatactgacggaagtttcgagtgcatttgccccccaggccatcgcgctggccctgacctcgcatcttgtctggacgtcgacgaatgcagagaacgaggacctgcgctctgtggatcccaaagatgtgagaactcacccggatcgtaccgatgtgtgcgagattgtgacccaggctaccacgccggtccagaaggtacttgcgacgatgtcgacgagtgccaggagtacggccctgagatatgcggtgctcagcgttgcgagaatacaccgggttcttatcgctgtaccccagcatgcgaccccggataccagccgacacctggcgggggatgccaggacgtcgacgaatgccgcaataggagtttttgcggcgctcatgcagtctgccagaacctccctggttcgttccagtgcttgtgtgaccagtatgaaggggcgcgagacggccgacattgtgtggacgtgaatgaatgtgagactttacaaggcgtttgtggggcggcactgtgcgagaacgttgaagggagttttctgtgcgtgtgtccgaatagcccggaagaattcgaccccatgaccggcaggtgcgtacccccccgaacatccgccggaacattccctggctcccaaccccaagccccagcgtcaccagtcctgccagctcggccccccccaccccccctgccgcggagaccctctaccccccggcaaggaccggtgggctctggcaggcgggagtgttactttgacaccgccgcccccgatgcctgcgataacattttagctcgaaacgtgacttggcaggaatgttgctgcaccgtcggagaaggttggggatcagggtgtaggatccagcagtgtcctggcacagaaactgctgagtatcaaagcctctgccctcatggacggggctatctagcaccgagcggcgacctgagcctgaggcgggacgtggacgagtgtcaactctttcgtgatcaggtatgcaaatcgggcgtgtgcgtaaacacagcaccaggatacagctgctactgctcgaacgggtattattatcatacgcaacgactagaatgcatagataacgacgaatgcgccgacgaggaaccagcctgtgaaggggggaggtgtgtgaacacggtgggatcctaccattgcacatgtgaacccccactggtcctcgacgggagtcagagacgttgtgttagtaacgagagtcagtctcttgatgataaccttggcgtgtgctggcaggaggtgggggcagatctggtttgttcccatccgcgcctcgatcgtcaagccacatatacggagtgctgttgtctatacggcgaggcctggggaatggattgcgccctgtgcccagctcaggattctgatgatttcgaggcactttgcaacgttctgcgaccccccgcctactcaccacctaggcctggcggctttggcctgccctacgaatacggaccggaccttggtcccccatatcaaggactcccctatggcccagaactttacccgcctcccgctctgccttatgacccgtatcctcctccacctgggccctttgcacgcagggaggctccatatggggccccccgctttgatatgcctgattttgaggatgacggaggaccatatggggagtctgaggcccccgcaccccctggccccgggaccaggtggccatatagaagccgggacaccagaagatctttccctgagccagaagagcccccagaaggtggttcttatgcaggctctttagcagaaccttatgaggaactggaggcagaggagtgcggcattttggacggctgcaccaatgggagatgcgttagggtgcctgaaggctttacgtgccgttgtttcgatggctacaggttagatatgacaaggatggcctgcgtagacatcaacgaatgcgacgaggccgaagccgccagcccgctgtgcgtgaacgctcgctgtcttaacacggatgggagcttccggtgcatctgccgcccagggttcgcccccacacatcagccccaccactgtgctccagcccgaccacgcgcttag

SEQ ID NO: 192771 - DNA, 561 bp, synthetic construct
  misc_feature 1..561: note = Description of Artificial Sequence: Synthetic coding sequence
  source 1..561: mol_type = other DNA
atgctgggcggcgccggcggcggccccggcctgcggaccccctgccccgccgatgttgacgaatgtagcgaagaagatctgtgccaatcagggatctgtactaacacagacggaagcttcgaatgtatctgtcccccaggacaccgggccggacctgacctagcttcttgcctcgacgttgatgaatgccgggaacggggacctgccttgtgcggctcacagagatgcgaaaacagtcccgggtcttatagatgcgttcgggactgtgacccagggtaccatgccgggccggaaggcacatgtgatgatgttgacgagtgtaggaataggagcttctgcggcgcacacgctgtgtgccagaatcttcccgggagcttccagtgtctgtgcgaccagtacgaaggggcacgggatgggcgtcactgtgttgatgtgaatgagtgtgagacactgcagggtgtgtgtggagcagccctttgtgaaaacgtcgagggcagcttcctgtgtgtctgtcctaacagtcccgaggagtttgacccgatgaccggccggtgcgtttag

SEQ ID NO: 192772 - DNA, 4872 bp, synthetic construct
  misc_feature 1..4872: note = Description of Artificial Sequence: Synthetic coding sequence
  source 1..4872: mol_type = other DNA
atgccccggcccggcaccagcggccggcggcccctgctgctggtgctcctcctgccccttttcgcggctgctacatcagcagcttccccaagccctagccccagtcaggtggtggaggtacctggcgtgccttcccggcccgcaagcgtcgccgtttgccggtgctgtcctggtcagacctcccgtaggagccgatgcataagggcattctgccgagtcagatcgtgccaacccaaaaagtgcgcgggcccacagcgatgtctgaatcccgtaccagccgtcccatcccccagcccatcggtgaggaaaaggcaggtttccttaaactggcagccactgaccctgcaggaagccagggccctcctaaagcgcagacgtccccggggacctggagggcggggcctgttaagacgaaggcccccgcaacgagcccctgcaggcaaagcccctgttttatgccctttaatttgccacaatggaggcgtttgcgtgaaaccagatcgttgtctctgccccccagattttgcagggaagttctgccagttgcacagtagtggcgcgcgcccgcctgcaccagcagtccccggccttactaggagcgtctacactatgcccctcgccaatcatcgcgatgatgaacacggcgtcgcatcaatggtgagcgtccacgtggagcacccccaagaggccagcgtcgtggtgcatcaggttgagcgggtctcaggaccttgggaagaggcggatgctgaggctgtggctcgcgccgaggctgctgcacgggccgaggcagcggctccttacactgtgctggcccagtcagcacctcgggaggatggctactcagacgcaagtggatttgggtattgctttcgagagctacggggcggcgagtgcgcttctcctctccctgggctgcgaacccaagaggtttgttgtcggggcgccggactggcctggggcgtccacgattgccaactgtgctccgagcgtctgggtaactctgaaagggttagtgctccagacggaccttgccccacagggtttgagcgagtgaatggatcctgtgaagacgtcgacgagtgcgcgacgggggggagatgtcagcacggagagtgtgcaaatactaggggcggctacacatgcgtctgcccggacggcttcctgctcgattcatcccggtctagctgtatctcccaacacgtcatctccgaggccaagggcccttgctttcgcgtcctaagagacggagggtgttcgctccctattctgcgtaatattaccaagcaaatttgttgctgctccagggtcggaaaggcttgggggcgaggttgccagttgtgccccccgtttggcagcgagggcttccgagagatctgccccgcggggccagggtaccattacagcgcttccgacctgaggtacaacactcggccactcgggcaagagcctcctcgagtatctctaagccagccccgcacactgcccgcaacttcaaggccctctgccggctttttacccactcatcggctggaaccacgaccagaaccccgcccagacccacggcccggcccagagctgccattgccttctattcctgcttggacaggtccagagatccccgaaagtggcccgtcatcgggaatgtgtcagcgtaatccccaggtgtgcggacccggcaggtgcattagtcggcctagtgggtacacatgcgcctgtgacagcggctttaggctcagcccccagggaacaaggtgtatcgatgtggatgagtgccgtcgagtgcccccgccttgcgcccccggtaggtgtgagaattctccgggctcctttcgatgtgtgtgcggccccgggtttcgcgcgggccctcgcgccgccgagtgtctcgatgtcgacgaatgtcatcgcgttcctccaccgtgtgatcttggccggtgtgaaaacacccctgggtcctttctgtgcgtctgccctgcaggataccaggccgccccacatggggccagctgccaggacgtggacgagtgcacccagagcccaggcctatgcggcagaggcgcatgcaagaacctgcctggctcgtttcgatgcgtctgtccagcaggatttagaggatccgcatgcgaggaggatgtggatgaatgcgctcaagagcctccaccttgcggccctggtagatgtgacaacactgctgggtcatttcattgtgcatgtcctgcaggattcagaagcaggggacctggggctccctgccaggacgtcgacgaatgcgcccgctctccccccccttgcacgtatggacgatgcgagaataccgaaggcagcttccagtgtgtatgtcccatgggttttcagcctaatacagctggttccgaatgcgaggacgtggatgagtgcgaaaatcacctggcctgtccaggccaggagtgcgtcaactccccaggcagcttccagtgcaggacatgccccagcggacaccatctgcataggggccggtgcaccgatgtggatgagtgtagttcaggcgcccccccatgcggccctcacggacattgtaccaacacagaaggctctttccggtgcagctgcgctccgggttatagagctccctctgggagacctggtccctgcgctgatgtgaatgagtgcctcgagggtgatttctgcttcccccacggcgagtgtcttaacacagacggcagttttgcctgcacgtgcgcccctggctacaggcccggccctcgcggggcctcctgtctcgatgtcgacgaatgctctgaagaggatctgtgccagtctggaatctgcaccaataccgacggcagcttcgaatgtatctgtcctcctggtcaccgagctggcccagatctggccagttgtctggacgtcgacgagtgccgagagcgaggccccgccctttgcggatcacagcggtgtgagaactcgcctggttcatatcggtgcgtccgagattgcgatcccggctaccatgcagggcctgaaggaacctgtgatgacgtggacgagtgccaagagtacggaccagagatttgtggagcgcaaagatgcgaaaacaccccaggaagctaccgctgtaccccggcctgcgatccaggctatcagccgactccgggggggggctgccaggatgtggatgaatgcaggaataggtccttttgcggggcccatgcagtatgccagaatctcccaggatccttccaatgcttgtgcgatcaatatgaaggagcaagggacggacggcactgcgtggacgtgaatgagtgcgagacactccagggggtttgcggcgctgctttgtgtgaaaacgttgagggttcttttttgtgcgtttgtcctaactctccggaggaattcgacccgatgaccggtcgttgcgtacctccacgcacttccgctggcactttcccaggctcccagcctcaggctcccgccagtcctgtacttcctgctaggccccctccacctccactgcccagacgaccttctactcctaggcagggcccagttggatcaggccggagggaatgttatttcgacacagctgcaccagacgcgtgcgacaatatcctggctagaaacgtgacatggcaggagtgctgctgtaccgtgggggaagggtggggtagcggctgcaggattcagcagtgccccgggaccgagaccgccgagtaccagtccctgtgtccacatggacgaggttacctggctccaagcggagatctgtccttgcggagagatgttgatgaatgccaacttttccgcgaccaggtgtgcaagagtggcgtatgtgtgaataccgcccccgggtactcctgctactgctccaatggctactactaccatacccaaagacttgagtgtatagataatgacgagtgcgccgatgaagagcccgcatgcgaggggggccgctgtgtgaacacagtgggctcctaccactgcacatgtgagccccctctggttcttgatggctcccagcggcgatgcgtgtctaatgaatctcagtcacttgatgataacttgggggtctgttggcaagaagtcggtgccgaccttgtttgctcccaccctcggttagaccgccaagctacctacacggaatgctgttgtctatatggcgaggcatggggcatggattgcgccctgtgtcccgcccaggattctgacgatttcgaagccctctgtaacgttctgcggcccccagcgtattcgcctcctcgccccggcggttttggcctgccctacgaatatggccccgacctgggaccaccctatcagggcctgccttacggtcctgagctgtatcctccacccgcactgccatacgacccctacccaccacccccaggtcctttcgcccggagggaagccccctatggagctcccagattcgacatgcctgattttgaggacgacggcggaccctacggtgagtccgaggctcctgctcccccgggcccaggaacacggtggccctaccgctcgagagacacccgtaggagtttcccagagcctgaagagcctccagagggcggctcctacgcgggatcactggcagaaccctatgaggagctagaagctgaagaatgcgggatccttgatggatgcaccaacggccgctgcgtgagggtgccagagggatttacgtgccggtgtttcgatggctacaggttagatatgaccaggatggcttgtgtggacattaacgaatgtgatgaggcggaagctgccagccccctgtgcgtcaatgcccggtgtctgaacacagacggaagcttcagatgtatttgcagacctggtttcgctcctactcatcagccccaccattgcgcaccggctcgaccaagagcctag

SEQ ID NO: 192773 - DNA, 1155 bp, synthetic construct
  misc_feature 1..1155: note = Description of Artificial Sequence: Synthetic coding sequence
  source 1..1155: mol_type = other DNA
atgaccggccggtgcgtgcccccccggaccagcgccgacgtggacgagtgccagcttttccgcgaccaggtgtgtaagagtggtgtgtgtgtgaatacggctcccggatatagctgctactgtagcaatggctattactatcacactcaacgcttggaatgcatcgataacgacgagtgcgccgatgaggaacctgcctgtgaaggcggacgttgcgtgaacactgttggctcgtaccattgtacttgtgagcctccattggtcctagacggcagccagaggaggtgcgtgagcaatgaaagccagtcactcgacgataatctcggcgtgtgctggcaggaggtcggcgcggatctcgtatgctcccatccccggctcgataggcaggccacttataccgagtgttgttgtctgtacggggaggcctgggggatggattgtgcactctgccccgcccaggactcggatgactttgaagctctgtgcaacgtgcttcggccccccgcttattcccctccacgccccggcggcttcggcctgccttacgaatacggcccggatctgggtcctccctaccagggcctcccttacggccccgagctgtatccccctcccgccctgccttacgacccctatcctccccctcccggtccgtttgccaggagggaggcgccttacggagccccaaggttcgatatgcccgatttcgaagacgatggaggaccttacggtgagtctgaggcgccagccccacccggacccggaacaagatggccttatagatcccgggacacccgcaggtcttttccggaacccgaagagccaccagaaggagggagctatgccggttccctcgctgaaccctacgaggaactcgaagctgaggagtgcggcatcctggatggttgcaccaacggtcggtgtgtgcgcgtgccagagggattcacctgtcgttgtttcgacggttaccgcctggatatgactaggatggcttgtgtggatatcaacgaatgtgacgaggccgaagctgctagccctctctgcgttaacgctcgatgcctcaacacggatggcagtttcaggtgcatttgtcgaccaggctttgctccaactcatcagccccatcattgcgcccctgccagaccgcgcgcctag

SEQ ID NO: 192774 - DNA, 4671 bp, synthetic construct
  misc_feature 1..4671: note = Description of Artificial Sequence: Synthetic coding sequence
  source 1..4671: mol_type = other DNA
atggccggcggcgtgcggctgctgtgggtgagcctgctggtgctgctcgcgcaactcggacctcagcccggccttggccggttaggcgagagacttagagttagattcactcctgtagtctgcggcttgcggtgcgttcacggaccgaccggctctcggtgcacaccgacgtgcgcaccccggaatgcgacctctgtggacagtggggcccccggtggtgcggccccaggcggtcccggatttcgtgctttcctatgccccctcatctgtcataacggtggcgtgtgtgtcaagcccgatcgctgcctttgtcctccggattttgccggaaagttctgccagctgcactcctccggtgctcgaccgcccgccccggctgttccgggacttactcgctctgtttatactatgcccttagccaaccacagagacgatgaacacggggtggctagcatggtgagtgtgcacgtggaacatccacaggaagccagcgttgtcgtgcaccaggttgagagagtgtcgggaccctgggaggaggccgacgctgaagccgttgccagagccgaggcggcggcaagggctgaggctgccgccccctataccgtgctggcacaatcagcccctagagaggacggttattctgatgcaagtggatttgggtattgtttccgcgagctgcgggggggtgaatgcgccagtccactgccaggcctccggacgcaggaagtctgttgtcgcggggctggcctggcttggggggtgcacgactgtcagttatgctcagagaggttgggcaacagcgagcgtgtgagtgccccggatgggccttgcccaactggctttgaaagggtcaacgggagctgcgaggacgtggatgagtgtgctactggcggccgctgccagcacggcgaatgtgccaacacaagaggaggatacacttgcgtttgcccggacggctttcttctggatagctctagatcatcttgtatctcgcagcacgtgatatccgaagctaagggaccatgctttcgagttctgcgcgacggcggttgcagcctacctattcttagaaatatcactaaacagatatgttgttgctcgagggttggcaaggcgtgggggcgtgggtgtcaactatgccccccttttggaagtgaagggtttagagaaatttgtcctgctggacccggctaccactattccgcttctgacctacggtacaacacgcggccgttaggacaggagcctcctcgtgttagccttagccagccacgcactctgcccgccacgagccggcccagtgcaggatttcttccgacacacaggttggagcctaggcctgagccccggcccgatccaaggcctgggcccgagctgcctctgcctagtattcctgcctggaccggcccagaaattcctgaaagcgggccttccagtggtatgtgtcagcgaaaccctcaggtgtgtggtcctggccgctgtatatcacggccctctggatacacatgcgcttgtgatagtggctttcgtctgagcccccaggggactcggtgcattgacgtggacgagtgtcgccgggtccctcccccatgtgcccccggtaggtgcgaaaactctccaggcagctttcgctgcgtgtgtggtccaggctttcgcgcaggacctcgggcagctgagtgcctggatgtagacgaatgtcacagggtgcctcccccctgcgacctggggagatgtgagaacactcccggttcattcttgtgcgtctgcccagccggttaccaggccgccccccacggagctagctgccaggatgttgacgagtgtacacagagcccaggtctctgtggaagaggtgcctgtaagaacctcccagggtcattccgctgcgtctgccccgcaggttttcgcggctccgcctgtgaggaagacgtcgatgagtgtgcacaggaaccacctccctgtggacccgggcgatgcgataacaccgctggttcgtttcattgcgcgtgccctgctgggtttcggagccggggtccaggagccccttgtcaggacgtcgacgaatgcgccaggtctcccccgccgtgcacatacgggcgctgcgagaacaccgagggttcctttcagtgtgtctgtcccatgggattccaacctaacactgctggatccgaatgcgaggacgtggatgagtgcgagaaccacctggcttgtcctggccaggagtgtgtcaatagtcctggtagctttcagtgtagaacctgtccttccggacatcatttgcatcggggccgttgcacagatgtggatgagtgttcctcaggagcccccccatgtgggccccatgggcattgtactaacaccgagggctccttccgttgctcatgtgctcccgggtaccgggccccttccggcaggccagggccttgtgccgacgtgaatgagtgtcttgagggtgatttctgctttcctcatggggagtgtctgaatacggacggcagttttgcctgtacctgcgcccctggctatagaccaggccctaggggcgcatcatgcttggacgttgacgaatgcagtgaggaggacctgtgtcaatctgggatttgtaccaatactgacggctctttcgagtgtatatgcccgcccggacaccgggcagggccagatctcgctagttgtctggatgtcgacgagtgcagagaacgcggcccagccctgtgcggtagccagaggtgtgagaatagtcccggctcttatcggtgtgttagggactgtgatccagggtatcacgccggccccgagggaacatgcgatgacgtggacgagtgccaggaatacggacctgagatctgtggcgcccaaagatgcgaaaatacaccaggtagctatcgctgtacccccgcctgcgaccctggttaccagcccactcctgggggcggttgtcaggacgtggacgagtgtcggaatagaagcttttgtggagcgcatgctgtctgccaaaacctgccaggtagctttcaatgtctctgtgaccaatatgaaggtgctagggacggccgtcattgtgtggacgttaacgagtgcgagactctgcagggcgtttgcggagcggcactgtgcgaaaatgtagaaggatcttttctctgcgtctgccccaactcccccgaagaattcgatcctatgaccggaaggtgtgtaccgcctcgcacttctgcagggactttccctgggagtcagccacaagcacctgcatcacccgtgctgccagcacggcctcccccaccacccctgccacgaagaccctccactccgcggcaagggcctgtaggttcagggcgtcgcgagtgttactttgacaccgccgcccctgatgcctgtgataacatccttgctagaaatgtcacttggcaggaatgctgctgcaccgtcggcgagggatggggaagtgggtgtagaatccaacagtgtccgggcacagaaactgccgaatatcaatcactgtgccctcacgggagaggatatttggccccttcgggggacttgtcattaaggagggatgtggatgagtgtcagcttttccgggaccaagtatgtaaatctggagtttgtgtcaacacagctcctgggtactcttgttattgttcgaacggctattactatcacacccagcgcctagagtgcatcgataacgatgagtgtgcagatgaggagcctgcgtgcgaaggcggtcgttgtgtgaataccgtggggtcctatcattgcacctgcgagcccccactggtgttagatggcagtcagaggaggtgcgtctcaaatgagagccagagtctggacgataacctcggagtgtgttggcaggaagtcggggccgacctggtctgtagtcacccacgcctggataggcaggccacttatacagagtgttgctgtctctacggcgaggcctggggaatggattgcgccttgtgtccggcccaggactcggacgacttcgaggccctgtgtaacgtgctgcgaccgcctgcctactctcccccgaggccaggaggatttgggctgccttacgaatatggcccggacttgggaccaccatatcaaggcctcccttacggacccgagctgtatccaccgccagccttaccatacgacccctaccccccgccaccgggcccctttgcaaggagagaggccccatacggcgcaccacgctttgatatgcccgattttgaggacgatggggggccttacggcgagtcagaggcccctgctccccctgggccaggaaccaggtggccctatcgcagcagagataccagacggagtttcccagagcccgaggaacctcccgagggagggtcctacgccggatctctcgctgagccctatgaagagttggaggctgaagagtgcgggatcctggatggatgtactaatggtaggtgtgtgcgcgtacctgagggcttcacatgccgatgcttcgatggttaccggctcgacatgacgcgaatggcctgcgtagacattaatgagtgtgacgaggccgaggcagctagtcccctttgcgtgaatgccagatgtctgaacacagatggtagctttcgttgcatctgccggccagggtttgctcccacccaccaaccacatcattgtgcaccagcccgtccaagagcatag

SEQ ID NO: 192775 - DNA, 2700 bp, synthetic construct
  misc_feature 1..2700: note = Description of Artificial Sequence: Synthetic coding sequence
  source 1..2700: mol_type = other DNA
atgtgccagcggaacccccaggtgtgcggccccggccggtgcatctcacggccttccggctacacttgcgcttgtgattcagggttccgtctgagtcctcagggcacccggtgtattgatgtagatgagtgtcgtcgggtgccccccccatgtgcacccggccggtgtgagaactcaccaggctcttttaggtgcgtgtgcggcccagggttccgtgctgggccccgggccgccgagtgcctggatgttgatgaatgccaccgagtgccacccccttgcgaccttggacggtgtgaaaacactcctgggagcttcctctgcgtttgtcctgctggctatcaagcagccccgcacggggctagttgccaggacgtggacgaatgcacccagagtccaggcctctgcggtaggggagcctgcaaaaacctgcctggatcttttagatgtgtgtgccctgcaggtttcagaggatcagcttgcgaggaagatgtggatgaatgtgcgcaagagccaccaccctgtggaccaggccgttgtgacaacactgcaggaagctttcactgtgcctgtccagctggttttcggagtagggggcccggtgccccctgccaggatgtagatgaatgcgctcgctcccctcctccatgcacttatggccgctgcgaaaataccgagggctctttccaatgcgtgtgccccatggggtttcagcctaatactgctgggagcgaatgtgaagacgtagatgagtgcgaaaatcatttagcctgccccgggcaggagtgcgtcaactcacccggatcatttcaatgccgaacttgcccatctgggcaccacctgcacaggggcaggtgcactgacgtggatgagtgttcatcaggcgctcccccctgtggccctcacggtcactgtaccaataccgaaggatcttttaggtgttcatgtgcacctggctatcgggctccaagtggtaggcctgggccttgtgcagatgtgaacgagtgcctggagggggacttctgcttcccacatggggaatgcctcaatacggacggcagttttgcatgcacatgcgcaccagggtaccggcctggtcctagaggtgcttcatgtctggacgttgatgaatgtagcgaggaggacctatgtcaatccggcatatgcacaaacaccgacgggtcctttgagtgtatatgcccaccaggtcaccgtgctggccccgatctcgctagttgtctcgatgtggatgaatgcagggagcgcggccccgcgttgtgtggatcccagcgctgcgagaattctccaggctcctaccgttgtgtgagagactgtgatcctgggtatcatgccgggcccgaaggcacatgcgatgacgtgaacgagtgcgaaacgctgcaaggggtttgcggagccgccctgtgcgaaaacgtggagggctcttttctgtgtgtctgccctaacagccccgaggagttcgaccccatgactgggaggtgcgtaccgccgcggacctccgctggaacatttccaggcagccaaccccaagcaccagcatccccagtgctgcccgcaaggccaccaccaccgccactgccaagaagaccatctacccctcggcaaggccctgtgggctctggacggcgtgagtgctattttgacaccgctgctcccgatgcctgcgacaatatccttgcccggaatgttacttggcaggagtgctgctgtaccgttggtgagggctgggggtccggctgcaggatacagcagtgtcctggtaccgaaaccgcggagtaccagtccctgtgcccccacggccgcggttacctcgctccctccggggacctaagcctgagacgggatgtggatgagtgccagctgttccgcgaccaagtgtgcaagagtggcgtgtgtgtcaataccgcacctggctactcatgctattgctctaatggttactactatcatacccagagacttgaatgcattgacaatgatgagtgcgcagatgaggagcctgcttgtgaaggtggtcggtgcgtaaataccgtaggctcatatcactgtacttgcgaacccccgctcgttctcgacggctcccaacgcagatgtgtcagcaacgaatctcagtctctggacgataaccttggcgtgtgctggcaggaggtgggcgccgatctcgtctgcagtcaccctcggctggacaggcaagcaacgtacactgaatgctgctgcctgtacggcgaggcttggggtatggactgcgcactttgtccggcccaagacagtgacgacttcgaagcgctgtgcaacgtccttcggccccccgcctatagtccgccacgccccggcggctttggcctaccctatgagtatgggcctgatttgggccccccataccagggattgccctacggccctgaactgtacccacctcctgcactgccttatgacccttaccctccccctccaggcccattcgccaggagggaggccccatacggtgcgccccggttcgatatgccagactttgaggacgacggcggaccttacggtgagtccgaagcccccgctcctcctgggcccggcaccagatggccatatcggtcacgggacacacgtaggagcttccccgagccagaggaaccgccagaggggggctcttacgccgggtccttagccgagccatatgaagaattgtag

SEQ ID NO: 192776 - DNA, 639 bp, synthetic construct
  misc_feature 1..639: note = Description of Artificial Sequence: Synthetic coding sequence
  source 1..639: mol_type = other DNA
atgtggaccagcgccaccgcctgccggcggcgggtgaccagcggcgcagcccgaacaaggcaagcggcctcttgtgcttgcgcccccccaggcaccagactccatagaaccgagcctgctgcacgaatgtggatgtccgtgcctgaggcgccccatcccgccccgaccgccggagtgagaacacagaaagctgctagttccgtctctgctccgtgggccagtaatccgaccctgcttgctccaaacgttgacgagtgcgagaatcaccttgcatgtcctggtcaggagtgtgtcaactcccccgggtctttccagtgtagaacatgtcccagcggtcatcacctgcatcgaggccggtgtacggacgtagatgagtgctcttccggcgctcctccttgcggtccccatggtcactgcactaacacagaaggttcctttcgctgtagttgcgctccgggatatcgcgctccgtccggaagacctggcccttgtgcggatgtgaatgagtgtttggaaggcgacttctgcttcccgcatggcgaatgcctgaacacagatggcagcttcgcatgcacctgcgcccctggctataggcctggtccaagaggagccagctgcctgggaagttacccaggttag

SEQ ID NO: 192777 - DNA, 669 bp, synthetic construct
  misc_feature 1..669: note = Description of Artificial Sequence: Synthetic coding sequence
  source 1..669: mol_type = other DNA
atggagatcccccccaccaactaccccgccagccgggccgccctggtagcacagaactacattaattatcagcaaggtacaccccatcgggtgttcgaggttcagaaagtaaaacaagcttcaatggaagatatacccggacgcgggcataagtatcatctgaagtttgctgttgaggagataattcagaaacaggtgaaggtcaattgcacggctgaagttctttatccgtctacaggtcaagaaacggcaccggaagtgaactttacttttgagggggagacaggcaaaaaccctgatgaggaggacaatacattttaccagcgtctgaaatcaatgaaggagcctctcgaggcccagaacatcccagataattttggcaacgtgtcaccagagatgactctggtcttgcatcttgcgtgggtggcgtgtggttacataatctggcagaattccacggaggatacctggtacaagatggtgaagatccagaccgtgaaacaggtgcaaagaaatgacgactttatcgagctcgattataccatcctgctgcacaacatagcctcacaggaaattatcccatggcagatgcaggtgctctggcaccctcaatacggtaccaaagtgaagcataattctagacttccaaaggaagtgcaactggaatag

SEQ ID NO: 192778 - DNA, 888 bp, synthetic construct
  misc_feature 1..888: note = Description of Artificial Sequence: Synthetic coding sequence
  source 1..888: mol_type = other DNA
atgggcctgcccgtgagctgggccccccccgccctgtgggtgctgggttgttgtgccttacttctgtcactgtgggcattgtgcacagcctgtcgccggcccgaggacgccgtcgcgccgaggaagcgtgccagacgccaaagggccagattacagggatctgccaccgctgcggaggcttccctcctcaggagaactcacctatgcagtctgagtaaatctgatacaaggttacacgaactgcatcggggaccccgctcctctcgcgctctgcggcccgcctcaatggatcttctgcgcccccactggcttgaggtcagccgcgatatcaccggcccacaggctgctccaagcgcttttccccaccaggagctccccagagcactaccagctgctgctgctactgccggctgcgccgggctagaagctacatactcaaacgtgggtctcgccgctctccctggtgtgagcttggcggctagcccagtagtggccgaatacgcccgcgtgcagaagcgcaaggggacccataggagtccgcaggaaccacagcaaggaaagactgaggttacccctgccgctcaagtggatgtcctttacagccgcgtatgcaagcctaagagaagagaccctggacccaccaccgatcccttggaccctaagggacagggcgccatcctggctctcgccggagacctggcttaccagacattaccactgcgggccctggatgtagattcggggccactcgagaatgtatacgagtctattcgggagctgggcgaccccgcagggagatcctccacttgcggggcaggcaccccgccagccagttcctgcccctctctgggaaggggctggaggcctctccctgcatcgcttccttag

SEQ ID NO: 192779 - DNA, 324 bp, synthetic construct
  misc_feature 1..324: note = Description of Artificial Sequence: Synthetic coding sequence
  source 1..324: mol_type = other DNA
atgggcctgcccgtgagctgggccccccccgccctgtgggtgctgggctgctgtgcccttctgctgagtttgtgggcactgtgtactgcttgtaggaggccggaggacgccgttgcaccccgcaagagagcccggaggcagagagcacggttacagggttcggccactgcggcagaggccagtctacttcgcagaacccatctgtgttccctctctaagtccgacacccggctccacgagctgcacagggggcctaggtcttctcgagccctaagacctgccagcatggacctgttgcgacctcactggttagaggtaagttag

SEQ ID NO: 192780 - DNA, 2094 bp, synthetic construct
  misc_feature 1..2094: note = Description of Artificial Sequence: Synthetic coding sequence
  source 1..2094: mol_type = other DNA
atgggcgagcgggccggcagccccggcaccgaccaggagcggaaggccggtaagcatcattattcgtacctgtccgacttcgagacgcctcagtcgtctggacggagtagcctggtgtctagctccccagccagcgtgaggagaaagaaccctaaaaggcagacctcggatgggcaggtgcaccaccaggctcccaggaagccttctccaaaggggctgccaaaccgtaagggagttcgcgtgggcttccgtagtcagtccctgaatcgggagcctctcagaaaggacacggacctggtcactaaaaggatcctcagcgcaagactgctcaaaataaatgagctgcagaatgaggtgagtgagttgcaggtcaaattggcagagctcttaaaagaaaacaagtctctcaagcgattgcaatatcggcaagagaaagcattaaacaagtttgaagacgcagaaaatgaaatctcgcagctcatctttaggcacaacaacgaaatcaccgccctcaaggagcgactccgcaagtctcaggaaaaggagagagctaccgaaaagcgagttaaggatactgaatctgagcttttcaggaccaagttctcattgcaaaaactgaaggaaattagtgaggcgaggcacctgccagagagggacgatctagccaaaaaactggtaagcgcagagctgaaactggatgacaccgagaggagaatcaaggagcttagcaagaatttagaactgagcacgaattctttccagcgacagctgctggccgaacggaagcgggcctacgaggcccacgatgaaaacaaagttctccagaaagaggtccagagactctaccataaactcaaggaaaaggaacgagaacttgacattaaaaatatttatagtaatagacttcctaaatcctcccccaataaggagaaagagcttgctttaaggaaaaatgcggcatgccagagcgacttcgctgacctatgcaccaagggcgtgcagacaatggaagattttaagccagaggagtacccactcaccccagagacaattatgtgctatgaaaacaaatgggaagagccgggccatctgaccctggatctgcagtcccaaaagcaggaccgtcacggcgaggctggcatcttgaatcccatcatggagcgcgaagaaaaattcgtgactgacgaagagctgcacgtcgtgaagcaggaggtggagaagcttgaagacgagtgggagcgtgaggagctagataaaaaacagaaagaaaaggcctcgctcctggagagggaagagaagccagagtgggaaacaggaaggtatcagcttggcatgtatcctatacagaacatggacaagctgcagggtgaggaagaagagcggttgaagagagagatgctgttagctaaacttaacgagatcgatagagagcttcaagattcaagaaatcttaagtaccccgtgctgcccttactcccagattttgagagtaaactccactcgcctgagcggtcacccaagacatatagattctcggaatctagcgagaggctgttcaacggtcatcacctgcaagacatatctttctccacacccaagggcgaggggcagaactctggaaatgtccgtagccctgcgagccctaacgagttcgccttcgggtcatacgtcccctctttcgccaagacctccgagagatctaaccccttctctcagaaaagttcgtttttagattttcagcggaattctatggagaaactgagcaaagatggggtcgacttgattaccaggaaggaaaagaaggcgaatttaatggagcagctgttcggcgccagcggaagcagcacaatttcatctaaatcgtctgatccaaactctgttgcctcgtcaaagggcgatatcgatcccctgaattttctccctggcaacaaagggagccgtgatcaggaacacgatgaggacgaggggtttttcctgtcagaggggcggtctttcaatccgaaccgacaccgactcaaacatgccgatgataaacccgctgtgaaggctgcagatagcgtggaggacgagatcgaggaagtggcgttgcggtag

SEQ ID NO: 192781 - DNA, 2094 bp, synthetic construct
  misc_feature 1..2094: note = Description of Artificial Sequence: Synthetic coding sequence
  source 1..2094: mol_type = other DNA
atgggcgagcgggccggcagccccggcaccgaccaggagcggaaggccggcaaacaccattacagttatctctcagatttcgagacccctcagagctccggccggtccagcctagtcagctcctctcctgccagcgttcggaggaagaaccccaagcgtcagacctcagacggacaggtccaccaccaggccccgcggaagccttctcctaaaggcctccccaatcggaaaggcgttagggtggggttccgaagtcaaagcttaaacagagagccactgcgcaaggacacagacctggtgacaaagagaattctgagcgcccggctgcttaagattaacgaacttcaaaatgaggtcagtgaactgcaggtcaagctcgcagaacttctgaaagagaacaagagccttaaaaggctgcagtacagacaggagaaagccctgaataagtttgaggacgcggagaacgaaattagccagctcatcttcagacacaacaatgagatcaccgccctgaaggagcggttgcgcaagtcacaggagaaggagcgcgcgaccgagaaacgcgtgaaagataccgagagtgagctgttccggaccaagttctccctccagaagctgaaggagataagcgaggccaggcatttgcctgagagagacgatctggcaaagaagttggtatctgctgagctgaaacttgatgacaccgaaaggaggatcaaggagctgtccaagaatctcgagctttcgactaactctttccagagacagctactcgctgagcggaaacgggcttatgaagcacatgatgagaacaaagttcttcaaaaggaggtccagcgcctttatcacaagctcaaggagaaggagagagagctggacattaagaacatttattcaaatcgtctgcccaaatcaagcccaaacaaggaaaaggagttagcactccggaagaacgcagcctgtcagagtgactttgccgatctttgcaccaaaggcgttcagaccatggaggacttcaaaccagaggaataccccctcacaccagaaacaattatgtgttatgagaacaagtgggaagagccaggacacctgacgttagatcttcagtctcaaaagcaggaccgacatggagaggccggtatcctgaatccgattatggagcgagaagagaagtttgttactgacgaagagttgcacgtcgtcaagcaagaagtagagaagctggaagatgagtgggagcgggaagagcttgacaaaaaacaaaaggaaaaagcttccttactcgaacgtgaggagaaacccgagtgggagacaggcagatatcagctgggaatgtaccccatccagaacatggataaacttcagggcgaggaggaggagcgtctgaagagggaaatgctcctagccaaacttaatgagatcgaccgcgagttgcaggactctcgcaaccttaaatatcccgtgctccctctgctcccagactttgagtctaagctccatagcccagagcggagcccaaaaacctataggttttctgaatccagcgaacgactttttaacgggcaccatctgcaggacatatcattcagtacgccgaagggggagggacagaacagcgggaacgtgcgctctcctgcatcacccaacgagtttgccttcggatcttacgtgccttccttcgccaaaacatcagagcgatccaaccccttcagccagaagtcttcatttctggacttccagcgaaatagtatggaaaaactaagtaaggatggggtggatttgataacgagaaaggaaaaaaaggctaatttgatggaacaactgtttggagcttccgggtcgtctacaatctcctccaaaagctccgacccaaattccgtagcctctagcaaaggggatattgatcccttaaactttttgcctggcaataaggggtccagggaccaggaacacgatgaggacgaaggcttcttcctgagtgaagggcgaagcttcaaccctaatagacacagactgaaacacgctgacgacaagcccgctgtaaaggcggccgacagtgtggaagacgagatagaggaagtggcccttcgctag

SEQ ID NO: 192782 - DNA, 693 bp, synthetic construct
  misc_feature 1..693: note = Description of Artificial Sequence: Synthetic coding sequence
  source 1..693: mol_type = other DNA
atgaagaaccccatgctggaggtggtgagcctgctgctggagaagctgcttctgatctccaacttcaccctgttctcaagcggggctgccggagaagacaaggggcggaattccttctacgagacgagctcattccatagaggagacgtgctggaggtcccaagaactcatctgacccactacgggatctaccttggagacaacagagtcgcccatatgatgccagatattttgctggctctgaccgatgatatgggtaggactcaaaaggtggtctcaaacaagcggctgattctgggtgtaattgtgaaggtcgccagtatccgggtcgacactgtggaagatttcgcatatggggccaatatcctggttaaccatctagatgagtcactgcagaagaaggcattactgaacgaggaagtagcccgccgtgctgaaaaactgctgggttttacaccatacagtttattatggaacaattgtgaacatttcgttacctattgccgatacggcacccccatttccccccaatctgataagttctgcgagactgtgaaaataatcattcgagaccagaggtctgtgctggcatcggctgtgctcgggctggcctcaatcgtgtgcacagggctcgtgtcctataccaccctacctgctatctttatccccttctttctctggatggccggctag

SEQ ID NO: 192783 - DNA, 210 bp, synthetic construct
  misc_feature 1..210: note = Description of Artificial Sequence: Synthetic coding sequence
  source 1..210: mol_type = other DNA
atgaagaaccccatgctggaggtggtgagcctgctgctggagaagctccttttgatctccaattttacgctgttctcttctggtgcggcgggcgaggataaaggccggaattccttctacgaaactagttctttccacagaggcgacgtgctcgaggtaccccggacgcatttaacccattacggaatttacctgggagacaaccgctag

SEQ ID NO: 192784 - DNA, 693 bp, synthetic construct
  misc_feature 1..693: note = Description of Artificial Sequence: Synthetic coding sequence
  source 1..693: mol_type = other DNA
atgaagaaccccatgctggaggtggtgagcctgctgctggagaagctcctgctgatctctaacttcacactattttcttcaggcgcagccggtgaggacaaggggcgtaattcattctacgagaccagttccttccacagaggggacgtcttggaggtccctcgtactcacctaacccactatggcatctacttgggcgacaatagagtggcacacatgatgccagatatcctgctcgcactgacggacgacatgggccgaactcagaaggtggtctccaacaaacggttaatactgggcgtcatagtcaaagttgcaagcatccgcgtggacacagtggaggacttcgcatatggagccaacatattggtgaaccatctggacgaatccttgcaaaaaaaggcgctgctcaacgaggaagtggcacgacgcgcggagaagctcctggggtttacaccttattctcttctgtggaacaactgtgaacactttgtcacgtactgtcggtatgggacccccatcagtcctcagagcgacaagttttgcgaaacagtcaaaattatcatcagggaccagcgctcagtgctcgcctccgctgtgctcggcctcgccagcatcgtgtgtaccggcctcgtttcctacaccacgttgcctgccatctttatccctttctttctgtggatggccgggtag

SEQ ID NO: 192785 - DNA, 1110 bp, synthetic construct
  misc_feature 1..1110: note = Description of Artificial Sequence: Synthetic coding sequence
  source 1..1110: mol_type = other DNA
atggtgtgggcccccctgggccccccccggaccgactgcctgaccttgctccatacaccctctaaagactctcccaagatgagcttagagtggttggtggcctggtcctggagcctcgacggtttacgggactgcattgccaccggtatccagtcagtgagagattgtgacaccaccgccgtgatcacagttgcctgtttactcgtgctgtttgtgtggtattgctatcatgtgggcagggaacagccacggccttatgtcagcgttaactctttaatgcaagccgcagacgccaatggcctgcagaacgggtatgtctattgtcaaagtcctgaatgcgttcggtgtacccataatgagggactgaatcagaagttataccataatctgcaggagtatgcgaaacggtatagctggtctggcatggggcgaatccacaaaggaatccgagaacagggccggtatctaaacagcagaccctcaatacaaaagccggaggtatttttcctgcctgatctcccaacaaccccttatttctctcgggatgcccagaaacatgacgtagaggtgctggagcggaactttcagacaatcctgtgcgagtttgagactctttataaggcattctccaactgctcactgcctcaggggtggaaaatgaacagcacccctagcggagagtggttcaccttctaccttgtgaaccagggcgtttgcgtgcctcgaaattgtagaaaatgccctaggacgtataggctcctcggttcactgagaacctgcatcggaaacaacgtgttcggaaacgcctgtatcagtgtcctgtcaccagggacagttattactgagcactacggaccgacaaatattcggatacggtgtcacctgggcctgaagacacccaacggctgtgagctcgtcgtgggcggggaaccccaatgctgggccgaaggacggtgtttgttatttgacgattcattccttcatgccgccttccacgaagggagtgccgaagacggccctagagtcgtcttcatggtggacttgtggcatcccaatgtggcagcagctgagcggcaggccctggacttcattttcgcccctggcagatag

SEQ ID NO: 192786 - DNA, 984 bp, synthetic construct
  misc_feature 1..984: note = Description of Artificial Sequence: Synthetic coding sequence
  source 1..984: mol_type = other DNA
atgagccagcccagcggcggccgggcccccggcacccggatctactcgtggtcttgccctacggtgatgagccccggggagaaactggaccccattccggattcctttatcctccaaccccccgtgttccacccagtggttccctacgtgactaccatctttggtggcctccatgccggaaaaatggttatgctgcagggggtggtcccactcgacgcccatagattccaggtggatttccagtgtggatgttcactgtgccctagacccgatatagcctttcattttaacccaaggtttcataccaccaagcctcacgtgatctgtaatacattgcatggcgggcggtggcagcgcgaagctcgctggccccatctggccttgcggagaggaagttccttcttgattctctttcttttcggaaatgaagaggtgaaagtgtctgttaacgggcagcattttctccatttcagatacaggcttccactgtcacatgtagatactcttggaatcttcggcgatattctcgtcgaggctgtggggttcttgaatatcaacccgtttgtagaggggtcccgcgaataccctgctggccacgaggtgccgtgttctcatgcattgccccagggactgagcccaggtcaggtaatcatcgtcagaggcctggtgctgcaagaacctaagcactttaccgttagcctgcgcgatcaggctgcacacgctcctgtgactctgcgggcaagctttgcagataggaccttggcctggatctcccggtggggccagaagaaactgataagcgccccattcctcttttatcctcagcggttcttcgaggttctccttttgtttcaggagggcggattgaagcttgcacttaacggtcaggggctgggagctacatcaatgaaccagcaagctctcgaacagttaagagaattgcgaataagcggctccgtacaactgtactgcgtgcactcatag

SEQ ID NO: 192787 - DNA, 1014 bp, synthetic construct
  misc_feature 1..1014: note = Description of Artificial Sequence: Synthetic coding sequence
  source 1..1014: mol_type = other DNA
atgagccagcccagcggcggccgggcccccggcacccggatctacagctggtcatgcccgacagtgatgtctcccggggagaaactggatcctatccctgatagcttcattctccagccccccgtctttcaccccgttgtgccctacgttaccaccatcttcggcggcctgcacgccggcaaaatggtgatgctccagggcgtagttcctctagatgctcattcacggttccaggtagacttccagtgtgggtgttctctgtgtccccgaccagatatcgccttccactttaatcccaggtttcatacaacaaaaccacacgttatttgcaatactcttcacggtgggcggtggcagagagaggcccgctggccccatctcgcactccgtagaggctctagttttctcatcctcttcttgtttggcaacgaggaggtaaaggtgtcagtcaacggacagcacttcttgcacttccggtaccgcctgccactctctcacgtcgacaccctgggaattttcggagacatcctcgttgaggccgtaggattcctcaacattaacccttttgtggagggcagccgcgaatatcctgccggacatccatttctgcttatgagtcctagactggaggtgccttgtagccatgccttaccgcaaggattgtctcccgggcaagttataatcgtccggggcttagtgctgcaggagcctaaacacttcaccgtttcacttcgtgaccaggccgctcacgctcccgtgactctcagggcctccttcgccgaccggactcttgcctggatctctcggtgggggcagaagaagttgataagcgcccctttcttgttttatccgcagcgcttttttgaggtgctcttgttattccaggaagggggtctgaagcttgccctaaatggccagggactgggggctacgtcaatgaaccagcaggcacttgagcaattaagagaactccggataagtggtagcgtgcaactgtactgcgtccacagctag

SEQ ID NO: 192788 - DNA, 1011 bp, synthetic construct
  misc_feature 1..1011: note = Description of Artificial Sequence: Synthetic coding sequence
  source 1..1011: mol_type = other DNA
atgagccagcccagcggcggccgggcccccggcacccggatctacagctggtcctgtcctactgtgatgtcccctggtgagaagctggacccaattcctgattcatttatcctccagcctcccgtattccatcccgtagtcccgtatgtgactacgatttttggagggctacatgccggcaagatggtgatgctgcaaggcgtcgtgccactggacgctcacagatttcaagtggatttccaatgtggctgcagtctgtgtcctcggccagatatcgcattccacttcaatcctcgttttcacactactaaaccacacgtcatttgtaacacacttcatggtgggcgctggcagcgggaagcaaggtggccgcatctggcattgcggcgtggatcgtctttcctgatcctgtttcttttcgggaatgaagaagtgaaagtgtctgtgaacgggcagcatttcctgcatttccggtatagactgcccctcagccatgttgacactctaggcatttttggagatattctggtggaagccgtgggatttcttaatatcaatccatttgtggaaggatcaagagagtatccagctgggcacccctttctgctaatgtccccacggcttgaggttccatgttcacatgcactgccacaaggactgagtccagggcaggtaattatcgtgcgtggccttgtactgcaggagccaaaacactttaccgtcagcttgcgagaccaggccgctcatgcccccgtgactctgcgcgcatcttttgccgatagaacactggcttggataagccgctggggtcaaaagaaactcatctcagccccatttctcttctacccccaaagattctttgaggtgttacttctctttcaggagggcggccttaaattggcactcaacggtcagggccttggtgcgactagtatgaaccaacaggccctcgagcaactgagggagttgcgaatttcaggctccgttcaactttactgcgtacatagctag

SEQ ID NO: 192789 - DNA, 828 bp, synthetic construct
  misc_feature 1..828: note = Description of Artificial Sequence: Synthetic coding sequence
  source 1..828: mol_type = other DNA
atggtgatgctgcagggcgtggtgcccctggacgcccaccggttccaggtcgacttccagtgtggttgcagcctgtgccccagaccagacatagcgttccactttaacccacgctttcatacaacaaagccacacgtgatttgcaacaccctacatggcggccggtggcaacgggaagcccgatggcctcatctggccctcaggcgaggcagcagctttctcatcctgttcctgtttggcaatgaggaggtgaaagtgtcggtgaacggacaacacttcctacatttcagataccgcctccctctcagccacgtagatacacttggcattttcggcgatattttagttgaggctgtgggtttcctgaatataaatccctttgttgaaggctctagagagtaccctgccggtcacccattcttgctgatgtcgccgcgactcgaagttccttgttcacacgctctaccacagggactgtcaccgggccaagtgatcatcgtgagagggctggtgctgcaggagcccaagcattttaccgtgagtctcagggatcaggccgcacatgctcccgtgaccctgagggcttcattcgccgatagaactctcgcttggatatctagatggggacagaaaaagcttatttccgctcccttcctgttttatcctcagagattttttgaagttttgctactatttcaggagggaggcctgaagctggcactgaatgggcaaggcctgggggcaacctcaatgaatcaacaggcacttgagcagctgcgcgagctgcgcatctcaggatctgtgcagttatattgtgtgcattcgtag

SEQ ID NO: 192790 - DNA, 801 bp, synthetic construct
  misc_feature 1..801: note = Description of Artificial Sequence: Synthetic coding sequence
  source 1..801: mol_type = other DNA
atggtgatgctgcagggcgtggtgcccctggacgcccaccggttccaggttgatttccagtgcggatgctcgctatgtcctagaccagacatcgcctttcatttcaatccgcgtttccacaccacaaagccacatgtgatatgcaatacactgcacggagggcgttggcagagagaggcgcgatggccccatctcgccctacgacgggggtcaagctttctgattttgttcttatttggaaacgaggaggtaaaggtgagtgtgaacggacagcacttcttacattttaggtaccgcctacccctttcgcacgttgacactcttgggatctttggcgatatcttagtagaggcagtggggttccttaatattaatccattcgtggagggtagcagagagtaccctgccggccatgaggtaccgtgttctcatgctctgccacaaggcctcagtcctggtcaagttataatagtccgcggattggtgctgcaggagcccaagcacttcacagtaagtctccgtgatcaggcagcacatgctccagtcactctccgcgctagctttgccgatcgcacacttgcctggatttcccggtggggtcaaaagaaactgattagcgcaccctttctgttctatccacagcgtttctttgaggttttgcttctcttccaggagggcggactgaagctagccctaaacggtcagggactgggagccacaagcatgaatcaacaagccctggagcagctgcgtgagctgcgtattagcggttctgtgcagctgtactgcgtccacagttag

SEQ ID NO: 192791 - DNA, 378 bp, synthetic construct
  misc_feature 1..378: note = Description of Artificial Sequence: Synthetic coding sequence
  source 1..378: mol_type = other DNA
atggccgacgaggagctggaggccctgcggcggcagcggctggccgagctgcaagctaaacacggagaccctggcgatgctgctcagcaggaggcaaagcatagagaagcggaaatgcgaaatagtatcctcgctcaagtgctcgaccagtccgctcgggcccgcctgtcaaatctcgcgctcgtgaaacctgagaaaacaaaggccgtggagaactatctgatacagatggcgcgttacggacagctgagcgaaaaagtgagcgagcagggtctgatcgagatccttaagaaggtgtctcagcagactgagaagactactactgttaaattcaacaggaggaaagtgatggattccgacgaggacgatgactattag

SEQ ID NO: 192792 - DNA, 1530 bp, synthetic construct
  misc_feature 1..1530: note = Description of Artificial Sequence: Synthetic coding sequence
  source 1..1530: mol_type = other DNA
atgggcgtgcaggccggcctgttcggcatgctgggcttcctgggcgttgctctcggcgggtcgcctgccctcagatggtatcgcactagctgccacctgaccaaagccgtgcccggaaatcccctaggttatctgtctttcctagcaaaggacgcacagggactggccctcattcatgcccggtgggatgcgcacagaaggctgcagagctgtagctgggaggacgaaccggaactgactgccgcctacggcgccctatgcgcccacgagacagcctggggctcttttatacacacccccggcccagagcttcaacgtgccctagccactcttcaaagccagtgggaggcttgtcgcgccctcgaggagtctccagctggcgcgagaaagaagcgagccgccggacagagcggcgtgcccggcggcggtcatcaacgggagaaacgaggatggactatgccaggcactctgtggtgcggagttggcgatagcgcaggtaattctagtgagctgggtgtcttccagggccccgatttatgttgtagggaacacgacagatgtccacagaatatttcccccttgcagtataattatggaattcggaattaccgtttccacactatatcacattgcgattgcgacacaagattccagcagtgccttcaaaatcagcatgatagtatctctgacatagtgggtgtggcatttttcaacgtactggaaattccctgctttgtgctggaagaacaggaagcctgtgtcgcgtggtactggtggggcggttgccgtatgtatgggacagtgcccctcgcccgactgcagcctcgcactttctataacgcaagctggagttctagggcaaccagccccaccccttcctcaaggtctcccgcccccccaaaacctcggcagaagcagcaccttagaaaaggaccaccgcatcagaagggatcaaaacggccttcgaaggccaatacgacagccctgcaggacccaatggttagcccaaggctggacgtcgcccctaccgggctccagggccctcaggggggtctgaagcctcagggagctaggtgggtctgtaggagtttcaggaggcatcttgaccagtgtgaacaccagatagggcccagggagattgagtttcagttactgaacagcgctcaagagcctctttttcattgtaattgcaccaggcggctggcacggtttttgcgtctccacagccctcctgaggtaacgaacatgctgtgggagctgttgggtaccacatgcttcaaactggctcctccactcgattgcgtcgaaggtaaaaactgctcaagagaccccagagccatacgagtgagcgccaggcacctgcggcgactgcaacagcgccggcatcaactacaggacaagggaaccgacgagaggcaaccatggccctctgaaccgctccgagggcccatgtcgttttataaccagtgcctccagcttactcaagcagctaggagacctgacaggcagcagaagagctggtcacagtag

SEQ ID NO: 192793 - DNA, 93 bp, synthetic construct
  misc_feature 1..93: note = Description of Artificial Sequence: Synthetic coding sequence
  source 1..93: mol_type = other DNA
atgaccggcgagctggaggtgaagaacatggacatgaagcccggctccactttgaaaattactggttcaatcgctgacggcacggatggttag

SEQ ID NO: 192794 - DNA, 1758 bp, synthetic construct
  misc_feature 1..1758: note = Description of Artificial Sequence: Synthetic coding sequence
  source 1..1758: mol_type = other DNA
atgacccccccccggctgttctgggtgtggctgctggtggccggcacacagggagtgaatgatggggacatgcggctggccgacggaggcgccaccaaccagggccgtgtggagatattctatcgaggccagtggggtacggtgtgcgataacttgtgggatctgactgacgctagtgtcgtgtgcagagccctcggttttgagaatgccacccaggctctgggtcgcgccgcattcgggcaaggcagtggccccatcatgcttgatgaggtgcaatgcacggggacagaggcttccctggccgattgtaagagcctgggctggctgaagtcaaactgtcgccatgaaagagatgcaggggtcgtgtgcacaaacgaaactcgcagcacccacacactggatctctcacgggagctatctgaagcactaggccaaatcttcgactcccagcgagggtgtgatctcagcatatccgtaaacgtgcaaggggaggacgcgttagggttctgcggtcacacagtaatcttaacagctaacctggaagcccaagctctatggaaggaaccaggctcgaatgtcaccatgtctgttgacgccgagtgcgtcccaatggtgcgcgacttgctgcgatatttttatagtcgccgaattgatattaccctctcctcagtcaagtgcttccacaagctggcatctgcatatggtgctagacagttgcagggttattgtgcatccttgtttgctatcctgctgccccaggaccctagtttccagatgcctttggatctctatgcttatgccgtggcgacaggtgacgccctgctcgaaaagctctgtctgcagttcctggcatggaattttgaggccttaactcaggctgaggcttggccctctgtccccactgatctgctgcagcttctgctgcccagatcagacctcgctgtgccctccgagctcgcattgctgaaggcagtggacacctggagctggggagagagggctagtcatgaagaagttgagggtctcgtcgaaaagatcaggttcccaatgatgctccctgaagaactgttcgaactgcaatttaatcttagcctgtattggagtcatgaagctttatttcagaagaagacactgcaggcacttgagtttcatactgtgcctttccagcttcttgctaggtacaaaggccttaacttaacagaggatacatataagccacggatatacacatctccaacttggtctgcctttgtcaccgatagttcttggagcgcacggaaatctcaactcgtgtaccagtcaagacgaggccccctcgtcaagtacagctccgactactttcaggcaccaagcgactacagatattacccctatcagtcatttcagacgccccagcacccgtccttcctgtttcaggacaagagggtctcctggtcactggtttacctacccaccattcagtcctgctggaactacggcttctcctgttcttcggatgaactgcccgtcttgggactgaccaaaagtgggggttccgatcggaccatcgcctacgaaaacaaagcattaatgctctgcgaagggctttttgtggctgatgtgaccgatttcgaaggatggaaagccgccataccaagcgctctcgacacaaacagctctaagagtacctcctcatttccctgccctgctggccatttcaatggctttcgtacggtaattaggcccttctatctaactaattcatccggcgttgactag

SEQ ID NO: 192795 - DNA, 1722 bp, synthetic construct
  misc_feature 1..1722: note = Description of Artificial Sequence: Synthetic coding sequence
  source 1..1722: mol_type = other DNA
atgacccccccccggctgttctgggtgtggctgctggtggccggcactcagggcgtgaacgacggagatatgaggcttgcagacggcggagccacgaatcaaggacgcgtagagatcttttaccgcggccaatggggcacagtctgcgataatctctgggatctgaccgacgcaagtgtggtatgtagagccctcggatttgagaacgccacccaggctctgggacgggccgccttcggacagggatcagggcccatcatgttagctgattgcaaatctttgggatggctcaagtcaaattgccgccacgagcgggatgcgggtgtggtgtgtacaaatgagactcgctctactcataccctcgacctgtcccgagaactatcagaggccctgggccagatcttcgatagccagcgcggttgcgacctgagcatctctgtgaacgtgcagggtgaggacgctctagggttctgtggacacactgtcatactgactgcaaacctggaagctcaggccctgtggaaagagcctggttccaatgttactatgtcagtcgatgcagaatgcgtgccgatggtccgcgatctgctgaggtacttctactcgcggcgcattgatatcaccctctcctccgtcaaatgttttcataagttggccagcgcctatggtgcacggcaactccagggatattgcgcatcactcttcgccatccttttaccccaggaccccagctttcagatgcctctggacctttacgcatatgccgtggccactggggatgcactactggaaaagttgtgcctgcagttcctagcctggaattttgaagccctgacacaggccgaggcatggccatcagtgcctaccgatctgctccagctgctcctgccacgcagtgacctcgccgtgccctcagaactggccttgctcaaagcagtcgatacctggtcatggggtgagcgggcgtcccacgaggaagttgagggccttgtggagaagatcagatttccaatgatgctccccgaagaacttttcgaactgcagttcaatttgtcactgtattggtcccacgaagctcttttccagaaaaaaacgcttcaagcactcgaatttcatacagtgcctttccagctcctggcaaggtataaggggctcaacctcacagaagacacctataagccccgcatctataccagccccacctggtccgctttcgtcacagactccagctggagcgcgcggaagtctcaattagtttaccagtcacggcgcggtccgctggttaaatattcatctgattattttcaggccccaagcgactacagatattatccctatcaatcatttcagacccctcagcacccatcttttttgttccaagacaagagggtgtcgtggtctctcgtttatctgccaacaatccagagctgctggaattacggctttagttgtagttctgacgagttaccggtgctgggtttaaccaagagtggaggcagtgacaggaccatagcctatgagaacaaggcacttatgttatgtgaggggctcttcgtggccgacgtcactgacttcgagggttggaaagccgctatacctagcgcgcttgacaccaatagctccaagagcaccagtagttttccctgtccggcaggacacttcaacggcttccggacagtgatccggccattctatctgaccaacagctccggggtcgactag

SEQ ID NO: 192796 - DNA, 411 bp, synthetic construct
  misc_feature 1..411: note = Description of Artificial Sequence: Synthetic coding sequence
  source 1..411: mol_type = other DNA
atgagcaacgtgccccacaagagcagcctgcccgagggcatccggcccggtaccgtcctgcgaatacgcggactggtgcctcccaatgcaagccggttccacgtgaacctgctgtgtggcgaggagcaagggtcggacgctgccctccactttaatccccgcctggacacaagcgaggtcgtgtttaactccaaagagcagggatcctgggggcgagaggaacgtggtccgggtgtcccattccagcgcggccagccttttgaagtgctcatcatcgcaagcgacgatggcttcaaggctgtggtaggggatgcacagtatcatcattttcgccacaggctgcctctcgcgcgcgtccgcctcgtggaggtcgggggggacgtccagttggactccgtacggatattttag

SEQ ID NO: 192797 - DNA, 954 bp, synthetic construct
  misc_feature 1..954: note = Description of Artificial Sequence: Synthetic coding sequence
  source 1..954: mol_type = other DNA
atgatgctgagcctgaacaacctgcagaacatcatctacaaccccgtcataccattcgttggcaccattcctgatcaactggatcctggcactctgatcgtaattagaggacacgtgccgtccgacgcagatcgattccaggttgatttacagaatgggagcagtatgaagccccgtgcggacgtggcatttcattttaaccctcggtttaagcgcgcaggatgtattgtgtgcaataccttgatcaacgagaagtggggaagagaggagattacatacgacacgccttttaaacgtgaaaaatccttcgagatcgtaatcatggtgctcaaagacaagtttcaagtggccgtgaacgggaagcatacccttctgtacggacatcggatcgggcctgaaaagattgataccctaggtatttacggaaaggtgaatatacactctattggattctccttcagttcggatctacagtctacccaggcctcttccctggaactgaccgagatatctagggagaacgttccaaagagtgggacccctcagctacggctccccttcgcggctcgtctgaacacccctatgggccctggcagaacggtggtagttaagggggaggtgaatgccaatgctaaaagctttaatgtggatctgttagctggtaagtcaaaagatatcgctcttcaccttaatcctaggttgaatataaaggccttcgtgagaaacagttttctccaggagtcttggggggaggaggagcggaatatcacaagcttcccctttagccctggtatgtattttgagatgattatatactgcgacgtgcgtgagtttaaagttgccgtgaatggtgttcatagtctggaatataaacatagattcaaggagttgtccagcatcgatacattagaaattaacggtgatatccacttgctggaggtgaggagctggtag

SEQ ID NO: 192798 - DNA, 1080 bp, synthetic construct
  misc_feature 1..1080: note = Description of Artificial Sequence: Synthetic coding sequence
  source 1..1080: mol_type = other DNA
atgatgctgagcctgaacaacctgcagaacatcatctacaaccccgtgatccccttcgttggcactataccagatcagctggatcccggaaccttaatcgtgattcgcgggcacgtgccttccgatgcagatcggtttcaggtcgatctccaaaatggctctagcatgaagccccgcgctgacgtcgcatttcactttaatccaagattcaagcgagcaggctgtattgtatgcaacactctcattaacgagaagtggggacgggaggagatcacttacgacactccctttaagcgggaaaaatcatttgaaattgttatcatggtgcttaaggataaatttcaggtggcggtcaacgggaaacatacccttctgtatggtcaccgcatagggccagaaaaaattgacacactgggcatttacggaaaggtgaatattcattccatcggattctccttctcatcagatctgcagtccacccaggctagctctcttgagcttaccgaaattagccgcgagaatgtccccaagtctggtactcctcaacttccttccaaccggggaggcgacatctccaagatagcacctcgtactgtctatacgaaatcaaaggattccacggtcaatcacacacttacttgcaccaaaattccccccatgaactatgtctcgaaacggctacctttcgctgctagactcaatacgcccatgggcccgggacgcaccgtggtggtcaaaggagaggtgaacgccaacgcaaagagcttcaatgttgacctgttagcagggaagtcgaaggatatagcactccacctgaaccctcgtctaaatattaaagcctttgtgcggaacagcttcctccaggagtcatggggggaagaggagaggaatatcacatcattcccattttcccccggtatgtactttgaaatgatcatctactgcgatgttagggagtttaaagtcgctgttaatggtgtgcacagcctggagtacaagcaccgctttaaggaactgagctcaatagataccctcgagatcaatggagatattcacctgctggaggtaaggagctggtag

SEQ ID NO: 192799 - DNA, 1077 bp, synthetic construct
  misc_feature 1..1077: note = Description of Artificial Sequence: Synthetic coding sequence
  source 1..1077: mol_type = other DNA
atgatgctgagcctgaacaacctgcagaacatcatctacaaccccgtgattcctttcgtgggcaccatcccagaccaattggaccccggaactttgattgtgatccgtggacatgtgccttctgatgctgatagatttcaagtggacctccaaaacgggtcttccatgaaacctcgagccgacgttgcgtttcatttcaatccaagattcaagcgcgcgggctgtatcgtgtgcaacacactgattaacgagaagtgggggcgggaagagattacctatgatacaccattcaaaagagagaaatccttcgaaattgtgattatggtcctgaaggataagtttcaggtcgcagtgaatggcaagcacactttgctctatggtcacaggattggccctgagaagatcgacactttggggatctacgggaaagtaaacattcatagtattggcttcagtttttcaagtgacttacagtcgacacaggccagcagcctcgagttgacggagatcagccgcgagaacgtgccaaaatcgggcacacctcagcttagacttagtttgccttcttgggatctgcaaggccatggatcggaaaccttccgttctgtattatggacgcgcgtgttcgagattgccttctgtcggcccctgggaacagtggcaagcttccagaggttgccatttgctgccaggttaaacacccccatgggcccgggccggaccgtggtggtgaaaggcgaggtgaacgctaatgcaaagagttttaacgtcgacctgctcgcaggcaagagtaaggacatcgctctccatctcaaccctcgtctaaacatcaaagccttcgtccgaaacagtttcctgcaggaatcttggggcgaagaggagcgaaatataaccagtttcccattttcgcctggcatgtacttcgagatgattatttattgtgatgtcagagagtttaaggttgccgtcaacggggtccactctctcgagtacaagcaccgcttcaaggaattgtcttccatcgatacacttgagattaatggcgatatacacctcctggaggtccgtagctggtag

SEQ ID NO: 192800 - DNA, 954 bp, synthetic construct
  misc_feature 1..954: note = Description of Artificial Sequence: Synthetic coding sequence
  source 1..954: mol_type = other DNA
atgatgctgagcctgaacaacctgcagaacatcatctacaaccccgtaatccccttcgtggggacaatccccgatcaactggacccaggcaccctgatcgtaatcaggggccacgtcccatcagacgctgatcgctttcaggttgacctgcagaatggatctagcatgaagccgagagcagatgttgcattccacttcaatccccggttcaagagggctggatgtattgtgtgtaacactctcattaacgagaagtggggccgcgaggaaatcacctacgacacgcctttcaaacgagaaaagtcattcgagatagtgataatggtgctcaaggataaattccaggtggccgtaaatgggaaacacacactgctgtacgggcaccggatagggccagaaaagatcgatactctgggaatctacgggaaagtcaatattcactcaattggttttagcttttcatcagacctgcagagtacacaggcatcttcacttgaactgacagagatcagcagagagaatgtgccgaagtcgggcacaccacagctcagattgccattcgcggctcggcttaacacgcccatggggcctggtagaaccgtggtggtgaagggggaggtgaacgccaacgccaaatccttcaacgtggatctgctggccgggaagagcaaggacattgctttgcatctcaaccccaggttgaacattaaggcatttgtgcgcaatagcttcctgcaggaaagctggggcgaagaggaaaggaatatcaccagtttcccattctcccctggtatgtattttgagatgatcatctattgtgacgtgagagagttcaaagtggcggttaacggtgtgcattccctcgaatataagcaccggttcaaggagctgtcttctattgacacactggaaatcaacggcgacatccatctcctggaagtcaggtcctggtag

SEQ ID NO: 192801 - DNA, 627 bp, synthetic construct
  misc_feature 1..627: note = Description of Artificial Sequence: Synthetic coding sequence
  source 1..627: mol_type = other DNA
atgatgctgagcctgaacaacctgcagaacatcatctacaaccccgtgattccattcgtcggcactatacctgatcagctcgaccctgggacgctgattgtgataagagggcatgtgccgagcgatgccgacagatttcaagtggacctccagaacggttcttcaatgaagccccgagcagatgtggccttccactttaatccacgctttaaacgggccggatgcatagtctgtaacacactcatcaatgagaaatggggcagggaggagattacatatgacacacccttcaagagggaaaagagcttcgagatcgtcattatggtactcaaggataaatttcaggttgccgtcaatgggaaacataccctgttgtatggccacagaatcggtcctgagaaaattgataccctgggcatttacgggaaggtgaatatccacagtatcggttttagttttagctctgacttgcagtcgacccaggcctcttccctcgagctgacagagatctctcgggagaacgtgcccaaatctggtaccccacagcttccctccaacaggggcggcgacatcagcaaaattgctccccggactgtatacacaaaatctaaagacagtaccgtatag

SEQ ID NO: 192802 - DNA, 903 bp, synthetic construct
  misc_feature 1..903: note = Description of Artificial Sequence: Synthetic coding sequence
  source 1..903: mol_type = other DNA
atgatgctgagcctgaacaacctgcagaacatcatctacaaccccgtgattcctttcgtggggactattcccgaccaactggatcccgggaccctaattgtgattaggggacacgtgccctctgacgcagataggttccaggttgatctccagaacgggagcagcatgaaacctagagccgacgtcgcctttcacttcaacccaagattcaagcgagccgggtgtatcgtctgtaatacgctgatcaacgagaaatggggtagggaggagataacatatgacacgccctttaaacgggaaaagagttttgagattgtgatcatggtgctgaaggacaaattccaggtccctaagtccgggacaccccagcttccctccaaccggggcggcgatatctctaagatcgctccaagaaccgtctatactaaaagcaaagattccactgtcaatcacacattaacctgtactaagataccacctatgaactacgtttccaagcgcctcccttttgctgcccgattgaatacgccaatgggacccggaagaactgtggtagtcaagggggaggttaatgccaatgccaagtccttcaatgtagaccttctggcgggaaaaagtaaagacattgcacttcatctcaacccaaggctgaatattaaggccttcgtccggaacagttttctccaggaaagctggggagaggaggagaggaatattacatcatttccattttcacccgggatgtacttcgaaatgataatctattgcgatgtgagggaatttaaggttgccgtgaacggtgtacactccttagaatacaagcatagattcaaggaattgtcctccattgacaccctggagattaatggggatatccacctgctggaggtgcgctcctggtag

SEQ ID NO: 192803 - DNA, 1080 bp, synthetic construct
  misc_feature 1..1080: note = Description of Artificial Sequence: Synthetic coding sequence
  source 1..1080: mol_type = other DNA
atgatgctgagcctgaacaacctgcagaacatcatctacaaccccgtcattccttttgtgggcaccattcccgatcagttggatcctgggacactaatcgtcatccgtggtcatgtacctagcgatgccgatcgtttccaggtggatttgcagaatggctcatctatgaagccacgcgcggatgtggctttccatttcaacccacgctttaaacgtgccggatgcatcgtatgtaacacccttatcaacgaaaaatggggacgagaagagatcacctacgatacgccatttaaacgtgagaagagcttcgagatagtcatcatggtactgaaagacaagtttcaggtagccgtcaacggtaagcatacgcttttatatggccatcgaatcggacccgagaagatcgacactctgggaatttatggaaaagtcaacatacacagtattggttttagcttcagcagcgatctacagtccactcaggcctcatccctagagctcactgagatcagcagggaaaatgtgcccaagtccgggaccccacagctaccttcaaacagaggtggcgacatcagtaaaatagccccccgaacagtgtatacaaaatccaaagactcaacagtaaaccacacattgacatgtactaagatcccacccatgaactacgtctctaagagactgccattcgccgcccggctgaatactcccatgggcccaggccgcactgtggtggttaagggcgaggtgaacgcaaatgccaagtcatttaacgttgacctcctggcaggcaagtctaaggacatcgccctccacctcaatccaaggctcaatatcaaggcttttgtgagaaattcttttctgcaggagtcctggggcgaggaagagcgaaacattacttcttttccattctcccctggtatgtactttgaaatgattatatattgcgacgtgagagaattcaaagtagctgtgaacggggttcacagcttggagtataaacaccgattcaaggagttgtcctcgattgacaccctggagatcaatggggacatacatctactggaggtgcgaagttggtag

SEQ ID NO: 192804 - DNA, 507 bp, synthetic construct
  misc_feature 1..507: note = Description of Artificial Sequence: Synthetic coding sequence
  source 1..507: mol_type = other DNA
atgatgctgagcctgaacaacctgcagaacatcatctacaaccccgtgataccatttgtgggaacaatccccgatcagctggatcccggaactctgattgtgatccgtggacatgtgcccagcgatgcggaccgctttcaggttgatctccagaatggctcgagtatgaagccccgggcagacgtggctttccacttcaacccgcgctttaagcgggccgggtgcattgtctgcaatactctaataaacgagaaatgggggagggaggagatcacctacgacacaccttttaagagagagaaatccttcgaaatcgtgataatggttctgaaggacaagttccaagtcgccgtaaatggcaagcacacactgctgtacggacaccggataggccccgagaagattgacacactcggtatctatggaaaagtgaatatacactcaataggcttcagcttctcctccgacttgcagtcaacccaagcttcctcactggagttgacatag

SEQ ID NO: 192805 - DNA, 321 bp, synthetic construct
  misc_feature 1..321: note = Description of Artificial Sequence: Synthetic coding sequence
  source 1..321: mol_type = other DNA
atgatgctgagcctgaacaacctgcagaacatcatctacaaccccgttatcccgttcgtggggaccattccagatcaactggaccctggtaccctcatcgtgattaggggccacgtgccttccgacgccgatcggtttcaagttgatttgcaaaacgggtccagcatgaaaccaagggccgatgtagcttttcatttcaaccctaggtttaaaagagcgggatgtatagtgtgcaacacactcattaatgagaagtggggaagagaggaaatcacgtatgacaccccatttaagcgcgagaagtcattcgagatcgtgtag

SEQ ID NO: 192806 - DNA, 1080 bp, synthetic construct
  misc_feature 1..1080: note = Description of Artificial Sequence: Synthetic coding sequence
  source 1..1080: mol_type = other DNA
atgatgctgagcctgaacaacctgcagaacatcatctacaaccccgtgatcccttttgttggcaccattcctgatcagttggacccaggtactctgatcgtgatcaggggccacgtaccttccgatgcagaccgcttccaggtagatttgcaaaatggcagcagcatgaaaccacgggctgacgtggcatttcacttcaaccctagattcaagcgcgctggttgcattgtttgcaacactcttattaatgagaagtgggggcgcgaggaaattacctatgatacaccattcaaacgagagaaaagtttcgagattgttattatggttttgaaagataaatttcaagtggccgtgaacggaaaacatacacttctgtatgggcaccgcatcggtccagagaagatagacacattagggatttacgggaaagtcaatatccattccattggattttcttttagcagtgacctccagagtacacaagcctctagtcttgagctgaccgagatctccagagagaatgtccccaaatccggcaccccccaactgccttctaaccgaggaggtgatatttccaagattgctcccaggacagtctataccaagagcaaagactctacggtgaatcacacactgacctgcactaagatccctcctatgaactatgtatcaaagcgcctaccattcgcggctaggctgaatacacccatgggacctggccggactgtggttgtgaaaggagaagttaatgccaacgctaagtctttcaacgtggatctgctggccggaaaaagcaaagatatagcccttcatctgaaccctagacttaacattaaggccttcgtgcgaaactcttttttacaagagtcatggggggaagaggaacgtaatatcacctccttccctttttctcctggaatgtactttgagatgataatttattgtgatgttagagaatttaaagtcgccgtgaatggtgtgcatagtctcgagtacaaacacagattcaaggaactttctagtattgatactctggagataaacggagacatccacctattagaggtgaggtcttggtag

SEQ ID NO: 192807 - DNA, 954 bp, synthetic construct
  misc_feature 1..954: note = Description of Artificial Sequence: Synthetic coding sequence
  source 1..954: mol_type = other DNA
atgatgctgagcctgaacaacctgcagaacatcatctacaaccccgtgattccgtttgttggaaccattcccgaccaactggatcctgggacactgatcgtgattcgaggacacgtcccttccgatgccgaccgttttcaggtggatttgcagaacggatcgtccatgaagcctcgtgccgacgtggcattccacttcaacccgcggttcaagcgtgctggctgtattgtgtgcaatactctgatcaatgaaaagtggggtcgggaggagattacatacgatacacccttcaaacgcgaaaagtcctttgagatagtgatcatggtgcttaaagacaaattccaggtggccgtgaacggaaaacacactctgctgtatggtcatagaattggacctgaaaaaatagacaccctcggaatctacggaaaggtaaacatccattcaattggtttctccttttccagcgacctgcagtccacccaggccagctccctggagctcaccgaaataagcagagagaatgtgccaaaatcaggcacaccccagctgcgactgccctttgcggcccggctgaatactccaatgggtccaggtagaaccgtggtagtgaaaggagaggtgaacgccaacgccaagtcatttaacgttgaccttctggcgggcaaatcaaaggacatcgctctccatttaaacccgcgcctcaatatcaaggctttcgtgcgaaattcctttctccaggaaagctggggggaggaagaacgcaatataacgagcttccccttctcccccggcatgtacttcgagatgattatctactgtgatgttagagagtttaaggttgctgttaatggggtccactcccttgagtataagcataggttcaaggaactctcatccatcgataccctggaaattaatggagatattcacctcttagaagttcgcagttggtag

SEQ ID NO: 192808 - DNA, 1080 bp, synthetic construct
  misc_feature 1..1080: note = Description of Artificial Sequence: Synthetic coding sequence
  source 1..1080: mol_type = other DNA
atgatgctgagcctgaacaacctgcagaacatcatctacaaccccgtgatcccatttgtcgggacaataccagaccagcttgacccaggcaccctcatcgtgatcagagggcacgttccatccgatgcagaccggttccaggtagaccttcagaatgggtcttccatgaagcctcgggccgacgttgctttccacttcaatcctagattcaagcgggccggctgcatcgtatgtaatactctgatcaacgaaaagtggggccgtgaagagattacctacgacacaccttttaaacgcgaaaagtctttcgagatagttattatggttttaaaggataaatttcaggtggccgttaatgggaaacacactctgctttatggccaccgcattggacctgaaaagatcgacactctcggaatttacgggaaggtaaacattcattcgatcggattctcctttagctccgatttgcagagtacccaagccagcagcctcgaactgacagaaatttcaagggaaaacgtgccaaaaagtggcacaccacaactgccttccaatagaggtggggacatctcaaagattgcgccccggacagtgtacaccaaaagcaaggattctaccgtgaaccataccctcacctgcactaagatcccccccatgaactacgtgtccaaacgactgcccttcgccgcgcggctgaacactcctatgggcccaggccgcactgttgtagtgaagggggaagtcaacgctaacgctaagagttttaacgtggacctgctcgccggtaaatctaaagacattgctctacacctcaaccccaggctcaacatcaaggcgttcgttagaaactcattcttgcaggaaagttggggtgaagaggagcgcaacatcacgtcatttccattctcgcccggaatgtattttgagatgatcatctattgcgacgtgcgcgagtttaaggtggctgtgaatggggtccactcactggaatataagcatcgcttcaaagaactgtcctctatagacactctggagataaatggggacattcatctgctcgaggtacgctcttggtag

SEQ ID NO: 192809 - DNA, 132 bp, synthetic construct
  misc_feature 1..132: note = Description of Artificial Sequence: Synthetic coding sequence
  source 1..132: mol_type = other DNA
atgatgctgagcctgaacaacctgcagaacatcatctacaaccccgtaattccttttgttggaaccatccccgatcaactggaccccggtacactcatagttattcgtggccacgtgccaagcgacgcatag

SEQ ID NO: 192810 - DNA, 972 bp, synthetic construct
  misc_feature 1..972: note = Description of Artificial Sequence: Synthetic coding sequence
  source 1..972: mol_type = other DNA
atggccttcagcggcagccaggccccctacctgagccccgccgtgccattttcaggtacaatccagggaggtctccaggacggtctccaaattaccgtaaacggaacagtgctgtcatctagcggcaccaggttcgccgtgaactttcagactggtttttcaggcaatgatatagccttccatttcaatcctcggttcgaagacggaggctacgtggtctgtaacactcgccagaacggaagctggggacccgaagaacgcaaaacacacatgcctttccagaaggggatgccattcgacctttgttttctcgtccagagcagcgatttcaaagtgatggtgaacgggatcctgttcgtgcagtactttcacagggtgccgtttcatagagttgacacaatatctgtgaatgggtcggtgcagctgtcctatatcagctttcagcccccaggagtgtggcccgccaatccagctcctattacacagacagtgattcacaccgtccagagcgctcccggccagatgtttagcacgccggccataccaccaatgatgtaccctcatcctgcctaccctatgccatttatcacaaccattttggggggactatacccatcaaagagtattttattgtccggaaccgtgctcccgtcagcacaaagattccacataaatctttgcagtggtaaccatatcgcgttccatttgaacccaagatttgacgagaacgccgtggtccgtaacacccaaattgacaactcctggggtagcgaagagcgctcactgccgcgtaaaatgccttttgtcaggggccagtcattttccgtgtggattctatgcgaggcccactgtctgaaagtggccgtcgacggtcagcacctgttcgagtactaccaccgcttacggaatcttccaaccatcaatcgtttggaggttggtggggacattcagttaacacacgtccagacatag

SEQ ID NO: 192811 - DNA, 936 bp, synthetic construct
  misc_feature 1..936: note = Description of Artificial Sequence: Synthetic coding sequence
  source 1..936: mol_type = other DNA
atggccttcagcggcagccaggccccctacctgagccccgccgtgcctttctccggaaccatccagggtgggctgcaggatgggcttcagatcacagtgaacggcaccgttttgtctagttctggaaccagattcgcagttaatttccagacgggttttagtgggaatgatatagccttccactttaaccctcggttcgaggatggcggctacgtggtctgtaacacccggcagaatggatcctggggccctgaagaacgtaaaacccatatgccctttcagaagggcatgccctttgacctctgtttcctcgtgcagtcttcagacttcaaagtaatggtgaatggcatcttgttcgtgcagtactttcatagggtgcccttccaccgcgtggatactattagtgttaacggaagcgtgcagctgagctatatctcattccaaacccaaacggtaatccataccgtgcaaagcgcgcccggacagatgtttagcacacccgcgatcccgcctatgatgtacccacacccagcttaccctatgccctttattactaccattttaggtggattgtaccccagtaaatcgatcctgctgtcaggcacagtcctccctagtgcacagaggttccacatcaacctatgttcaggtaatcacatcgcattccacctgaaccctcgctttgacgagaatgctgtggtcagaaatactcagatcgataatagctggggaagcgaggagcgcagcttgccacggaaaatgcccttcgtgcgaggccagagcttctccgtatggatcctgtgtgaggcccactgtctcaaggtagcagtggatggacaacacctctttgagtactatcatcgtctgcgaaatctgcctactataaacaggttagaagtgggaggcgacatccaattaacacatgtccaaacatag

SEQ ID NO: 192812 - DNA, 741 bp, synthetic construct
  misc_feature 1..741: note = Description of Artificial Sequence: Synthetic coding sequence
  source 1..741: mol_type = other DNA
atggccttcagcggcagccaggccccctacctgagccccgccgtgccattctctggcaccatccagggaggtttgcaggacggccttcagattactgttaacggaactgtgttatccagctctggcacaaggtttgccgtaaacttccagactggctttagtgggaatgacatcgcattccattttaatcctcgctttgaggacgggggctatgtggtatgcaacactcggcagaacggatcttggggtcccgaggaaagaaaaactcatatgccgttccagaaaggcatgccctttgacctttgttttttggttcagagctcagattttaaagtcatggtcaacgggattctatttgtgcaatacttccacagagtgcccttccacagggtcgatacaatctcagtgaatgggagcgttcaactctcttacatctcttttcagcctcccggggtgtggccagccaatcctgcccccatcactcagacggtcatccacacggtacagagcgcgcctgggcagatgtttagcacccctgctattccaccaatgatgtatccacaccctgcctatcccatgcccttcattacaacaattttgggtggcctttacccctcaaaaagtattctcctcagcggcacggtgctgcccagtgcacagaggtgtggaagctgcgtcaagctgactgcctcgcgttggccttggatggtctccacatgtctgaatactacaatcgcctag

SEQ ID NO: 192813 - DNA, 1068 bp, synthetic construct
  misc_feature 1..1068: note = Description of Artificial Sequence: Synthetic coding sequence
  source 1..1068: mol_type = other DNA
atggccttcagcggcagccaggccccctacctgagccccgccgtgccgtttagcggaacaatccagggaggcctgcaggatggactgcagatcacagtcaatggtaccgtcttatcctcttcaggaacacggttcgctgtgaactttcaaactgggttctccggaaacgacattgccttccactttaatccaagatttgaggatggtgggtatgtggtgtgcaatacgcgccagaacggtagctgggggcctgaagagagaaagactcatatgcccttccagaagggaatgccctttgacctctgcttcctggtgcagtctagcgacttcaaggtgatggttaatggcatcctgtttgtgcagtacttccatcgggtgccatttcatcgagtggacaccatctctgtgaacgggtccgttcagctcagttacatttctttccagaacccacgcacggtgcccgtgcagcccgctttttctactgtgccctttagccagccagtctgttttcctcctcggcccagagggagaaggcagaagccacccggggtttggcccgcaaatcccgccccgatcacacagactgtaatacacacagttcagtccgccccaggtcagatgtttagcacgccggcgatcccacccatgatgtacccccaccccgcctaccccatgcccttcattaccacaattctaggcggcttataccctagtaagtctatcctgttaagcggtactgtgttaccgtctgcgcagcggtttcatattaacctctgctctggtaaccacatcgcctttcacctgaatcctcgctttgatgaaaacgccgtggtccgaaacacccagatcgataactcttggggatcagaggagagatcacttccaagaaagatgccctttgtgcggggtcagagcttcagcgtctggattctatgcgaggcccattgtctcaaggtagccgtggatggtcagcacctgttcgagtattaccaccgactgaggaacctgcctaccatcaatagactcgaggttggcggggatatccagcttacccacgtgcagacgtag

SEQ ID NO: 192814 - DNA, 666 bp, synthetic construct
  misc_feature 1..666: note = Description of Artificial Sequence: Synthetic coding sequence
  source 1..666: mol_type = other DNA
atgggccccttcagcgcccccgtggagcccgacggcggctacgtggtgtgtaatacaagacagaacggctcttggggccctgaagagcgcaagacacacatgccgttccagaaaggtatgcctttcgatctctgttttcttgtccaatccagtgacttcaaagtgatggtgaatggcatcctgttcgttcagtatttccatagggttccttttcacagagtggataccataagtgtaaatggttctgtacagctaagttacattagcttccagaaccctaggactgtgcccgtgcagcctgccttctccacagtccctttttcccaacctgtttgtttcccgccaaggcctagaggccgccgccagaagccacctggcgtgtggccggcaaaccctgcgcctattactcagaccgtgatccacaccgtccaatccgctcctggccagatgttttctactcccgccatcccccctatgatgtatcctcatccggcatatcctatgcccttcattacaacaattctaggtgggctttacccttctaagagcatcctgctctccggcacagttcttccaagcgcacagcgttgcgggtcctgcgtcaaacttaccgcatctaggtggccctggatggtgtcgacatgcttaaatacgaccatagcatag

SEQ ID NO: 192815 - DNA, 360 bp, synthetic construct
  misc_feature 1..360: note = Description of Artificial Sequence: Synthetic coding sequence
  source 1..360: mol_type = other DNA
atggccttcagcggcagccaggccccctacctgagccccgccgtgcctttctcggggactatacagggcgggttgcaggatggactgcagattaccgtcaatgggaccgtactgagctcgtctggtaccaggttcgccgtgaacttccagactgggttcagcgggaatgacatcgcatttcactttaacccacggttcgaggatggaggctacgtagtctgtaatacccgacagaatggatcctgggggccagaggaaagaaaaacccatatgccttttcagaagggaatgccatttgatctgtgtttcctggtgcagtcctccgacttcaaggtgcaccttcttctgctgttgctgtag

SEQ ID NO: 192816 - DNA, 1533 bp, synthetic construct
  misc_feature 1..1533: note = Description of Artificial Sequence: Synthetic coding sequence
  source 1..1533: mol_type = other DNA
atggccggcagccggcagcggggcctgcgggcccgggtgcggcccctattttgcgctctactgctgagcttgggaagattcgtcagaggcgacggagtcggaggggaccccgctgtagccctcccacacaggcggtttgaatacaagtactccttcaagggcccccacttagttcagagtgacggaactgttccgttctgggcgcatgcaggaaatgcaatcccaagcagcgatcagattcgggtggcaccctccctcaagtcacaacgtggcagcgtctggacgaagactaaggcagctttcgaaaattgggaagtggaggtgacctttagggtaactggacgtggcaggattggggctgatgggctggccatctggtatgccgagaatcaaggcctggaggggccggtattcggatctgcagacctgtggaatggcgtaggtatcttttttgactcttttgacaatgacggcaagaaaaataatccagccattgtgattataggcaataatgggcagattcactacgatcatcaaaacgacggggcctctcaggcactggctagttgtcaaagggatttccgtaacaagccgtaccctgtgagagcaaagattacgtattaccagaatacactgaccgtcatgattaataacggatttacacctgacaaaaatgactatgagttctgcgccaaagttgaaaatatgatcattcccgcccaaggacattttggcatcagtgctgccactgggggtctcgccgacgatcacgacgtgcttagcttcctgaccttccagttgacggagccggggaaggaaccccctacccctgataaagaaatcagtgagaaggaaaaggagaagtatcaggaagaatttgagcatttccaacaggagctggacaaaaaaaaggaagagttccagaagggccatcccgacttacagggccagcccgccgaggagatattcgagtcagttggcgatcgggaattacgccaggtatttgaggggcagaatcgtatccatcttgaaattaaacaactcaaccgtcagttagatatgattctggacgagcaaaggagatacgtatccagtctgaccgaagagatcagcaaacgcggtgcgggtatgccggggcagcatggccagatcacacagcaggagctggacaccgttgtgaaaacccaacacgagattctgcgccaggtcaacgaaatgaaaaatagcatgtctgaaactgtccggctggtgagcggtatgcaacacccaggatctgccggaggtgtgtatgaaaccactcaacattttatcgatatcaaagagcatttacacatagttaaacgggacattgataacctcgtccagaggaatatgccatcaaatgagaagcccaaatgtccagagctcccaccattcccctcttgcctcagtacggtgcactttataatctttgttgttgttcaaaccgtgctatttattggttacataatgtacaggtcccagcaggaagcggccgccaaaaaatttttttag

SEQ ID NO: 192817 - DNA, 1101 bp, synthetic construct
  misc_feature 1..1101: note = Description of Artificial Sequence: Synthetic coding sequence
  source 1..1101: mol_type = other DNA
atgcagcccctgtggctgtgctgggccctgtgggtgctgcccctggcctctccgggggcagcgttgaccggagagcagcttctaggctccctgttgagacagctccaactgaaagaagtacctacgctggatcgggccgacatggaagaacttgtcattccgacacatgttcgggctcagtatgtggcccttttacaaagaagtcatggcgaccggagtcgcggtaagcgcttcagccagtcctttcgcgaagttgcgggtaggtttctcgcgctggaagcctcaacccacttgcttgtcttcggaatggagcaaaggcttccccccaatagcgaactagtgcaggcagtgctgaggttatttcaggagcccgtacctaaagctgctctccatcggcatggccggctttctccacgatccgcgagggcgagggtcaccgtggagtggctacgtgtccgcgatgatggtagcaaccgtactagcctcattgactcccggcttgtgtccgtgcatgagtcaggctggaaggcatttgatgtgaccgaggcagtgaatttttggcaacagttgtcccggcctcggcagcccctgttactgcaagtgtccgtgcagcgcgagcaccttgggccactcgcctccggcgcacataagctggtgagatttgcatctcagggagcaccagctgggctcggcgagccccaattagagctgcatacacttgatcttggcgactacggggcccaaggcgactgcgacccagaggctcctatgaccgaaggcacacggtgttgccgccaagaaatgtacattgacctccagggaatgaagtgggccgagaactgggtgcttgagccacctggcttcctggcgtacgagtgtgtgggcacatgtcgacagccccccgaggccctcgcatttaagtggcccttcctgggccctcgccaatgtattgccagtgaaaccgacagtctccctatgattgtgagcattaaggagggagggcgtactcggccccaggtcgtgagcctccctaacatgcgggtgcagaagtgcagttgtgcgtcggatggcgctctggtcccacgcaggcttcagccttag

SEQ ID NO: 192818 - DNA, 1101 bp, synthetic construct
  misc_feature 1..1101: note = Description of Artificial Sequence: Synthetic coding sequence
  source 1..1101: mol_type = other DNA
atgtggcccctgtggctgtgctgggccctgtgggtgctgcccctggccggccctggcgccgctctcactgaggaacagctcctggggtctttgctgcggcagctccagctgtccgaagtccccgtgctggacagggctgacatggagaaactagttattccagcccatgtccgcgcgcagtacgttgtcttgttgaggagaagccacggggatcgctcaaggggaaagagatttagccagagcttccgtgaagtcgccgggcgatttctcgcatccgaagcttctactcatttgttggttttcggcatggaacagagactgcccccaaattccgaacttgtgcaggctgtcttaagattgttccaggagcccgtccccaaagctgccctacaccgtcacggtagactcagcccccggtctgcccaagcaagggtgacagtcgagtggctcagagtgcgggatgacgggtccaatagaacatcactcatcgactcccgcttggtctctgtgcatgagtcaggctggaaggcttttgacgtaacagaggctgtgaatttctggcaacagctctcccgcccgcgccagcccctgctgctacaggtcagtgtgcagagggaacacttaggtccactcgcctctggggcccacaagctagtgaggttcgcaagtcagggagccccagccggcctcggagaaccccagctcgagctacataccctggatctcagggactatggggctcagggtgactgtgacccggaggcccccatgaccgagggcactcgatgctgcaggcaagagatgtacattgatctgcagggtatgaagtgggcaaaaaattgggtgcttgaaccacctggcttcctcgcatacgaatgtgtaggcacctgccagcagccccctgaagccctggcctttaattggcccttcctgggccccagacagtgtatagcgtctgagaccgctagcttgcctatgattgtgtctatcaaggagggcggccgcaccaggccgcaggtggtaagcctgccaaatatgcgggtgcagaaatgctcctgcgctagtgacggcgcactcgttccgagacgtcttcagccctag

SEQ ID NO: 192819 - DNA, 999 bp, synthetic construct
  misc_feature 1..999: note = Description of Artificial Sequence: Synthetic coding sequence
  source 1..999: mol_type = other DNA
atgtggcccctgtggctgtgctgggccctgtgggtgctgcccctggcaggcccaggtgccgcactcacggaagagcagctgttgggtagccttctgcgtcagctgcagttatcagaagtacccgtgctcgatcgtgccgatatggaaaaactggtgatccctgcccacgtgagagcccaatacgtcgtactgctgcgcagatctcatggggaccgcagccgtggcaaacggttttcccagagtttcagagaggtcgcgggacgttttctggcctctgaagcagcactgcacagacatggcaggttgtcacctcgctccgcacaggctcgcgtaactgttgagtggctgagagtgcgtgacgacggctccaaccgcacaagcctgatcgactcacgtctggtttccgtacacgaatcagggtggaaggccttcgatgtgaccgaggctgtgaatttttggcagcaactgtcccgccctagacagccgctgctgctccaggtgtctgtgcagcgtgagcaccttggccccctagcatctggggcccacaagttagtccgattcgcaagccagggggccccagcaggcctcggagagccccagctcgaactccatacactagatttaagagactatggcgcccaaggtgattgcgacccagaggctccaatgacagagggcaccagatgttgtagacaagaaatgtatatcgacctgcagggcatgaaatgggccaagaactgggtcctcgaaccccccggtttcctcgcctacgaatgcgtcggtacttgtcagcagccacctgaagccttagccttcaactggccattcctaggccccagacaatgcatcgcatccgagactgcctctctccctatgatcgtttctatcaaagagggaggcagaacccgcccacaggtcgtgtcgcttcccaatatgcgcgtacaaaaatgctcgtgcgctagtgatggggcattagtgcctcgacgcctccaaccttag

SEQ ID NO: 192820 - DNA, 1131 bp, synthetic construct
  misc_feature 1..1131: note = Description of Artificial Sequence: Synthetic coding sequence
  source 1..1131: mol_type = other DNA
atggtgtggaaggtggccgtgttcctgagcgtggccctgggcatcggcgctgtacccattgatgatcccgaggacgggggaaaacattgggtggtcatcgttgcaggtagcaatggatggtataactacaggcaccaggctgacgcatgtcatgcttaccagatcatccacaggaatggaattcccgacgagcagattgtagtgatgatgtatgacgatattgcttactctgaagataaccccactcctggaatcgtcatcaatcggcctaacggcaccgatgtatatcagggagttcctaaagactataccggcgaagatgtgacaccccagaattttctggcggtcctgcgaggcgatgcagaagctgttaaggggattggaagtggaaaagtcctgaaatcggggccgcaggaccacgtgtttatttacttcaccgaccacggctccaccgggattttagtgttccccaacgaggacctgcatgtcaaggatcttaatgaaacaattcactacatgtataagcataaaatgtatagaaagatggtattctacattgaagcgtgcgaatcagggtccatgatgaatcatctccctgacaacattaatgtttacgctaccacagccgctaatccaagggaatcctcctacgcttgttactacgacgaaaagcggtctacctacctgggagattggtacagcgtgaactggatggaagacagcgatgtcgaggatttgaccaaagagactctgcacaagcaatatcacttagtcaaaagccataccaacacaagccacgtgatgcagtatggcaataaaactattagtaccatgaaagtgatgcagttccaaggcatgaagaggaaagccagctctccagttccgctcccaccagtcacacatttagacctgacccctagcccagacgttcccctgaccattatgaagaggaaattaatgaacaccaacgatctggaggagtcaaggcagctgacagaggaaatacagaggcaccttgactatgagtatgctttgcgccacctctacgttctggtcaatctctgcgagaagccttaccctctgcaccgcatcaagctgagtatggaccatgtctgtctcggccactactag

SEQ ID NO: 192821 - DNA, 1119 bp, synthetic construct
  misc_feature 1..1119: note = Description of Artificial Sequence: Synthetic coding sequence
  source 1..1119: mol_type = other DNA
atggtgtggaaggtggccgtgttcctgagcgtggccctgggcatcggagctgtgcctattgatgaccctgaggatggcggcaagcactgggtggtgatcgttgctggcagcaatggctggtacaactaccgacaccaggctgacgcctgccatgcttaccagataatccatcgcaatggaatcccggacgagcagattgtggtaatgatgtatgacgatattgcatacagtgaagacaatccaacgccaggaattgtgattaacagacccaacggaaccgatgtctaccagggtgtgcctaaagactacaccggagaggacgtgaccccgcagaactttttggccgtcctccggggcgacgcagaggccgttaaaggaatcggcagtggaaaggtgctgaagtccggaccacaggaccacgtgttcatatatttcactgatcatgggtccactggcatcttagtgtttccaaacgaagacttgcacgtgaaagacttgaacgagactatacattacatgtacaaacataagatgtaccgcaaaatggtgttctacatcgaagcttgtgaaagtggctcaatgatgaaccatcttccagacaacatcaacgtgtatgcgactactgctgctaaccctcgcgagagcagttacgcatgttattacgacgaaaaacgaagtacgtacctgggagactggtattccgttaattggatggaagacagcgatgtagaggatctcacaaaagagacactccacaagcagtatcacctagtgaagtcccatactaacaccagtcacgtaatgcagtacggcaacaagactatttctacaatgaaggtgatgcagttccaggggatgaagcggaaagcctcctcacctgtgcccctgcctccagtgacccatctggatcttacaccgagcccagatgtgccactgacaataatgaagcgtaaactgatgaataccaacgatttggaggagtcccggcagctcacagaggaaatccagaggcacctggatgacaaaatcgtgcatggcccaagggtaccttggtccctgctgaagagctgcctgctcgaagcattcccctctgtttccgctccacccactgtatgttag

SEQ ID NO: 192822 - DNA, 1302 bp, synthetic construct
  misc_feature 1..1302: note = Description of Artificial Sequence: Synthetic coding sequence
  source 1..1302: mol_type = other DNA
atggtgtggaaggtggccgtgttcctgagcgtggccctgggcatcggggctgtaccaatcgatgaccctgaggacgggggtaagcactgggtggtgatcgtcgcgggcagcaatggatggtacaattatcgccaccaggcggatgcatgccatgcctaccagatcatacacagaaacggcatccctgacgaacagattgtggtcatgatgtacgatgacattgcatattcggaggataacccgacccctggcatagttataaaccgaccaaacggtacggacgtttatcagggggtacctaaggactacactggggaggatgttactcctcagaactttctggctgtgctcaggggggacgcagaggccgtcaagggtattggttccggaaaggtgctgaagtcaggcccacaggatcatgtatttatttactttaccgaccatggctctaccgggatcctcgtctttcccaatgaagacctgcatgtgaaggacctgaatgagacaatacactatatgtacaagcataaaatgtataggaagatggttttctacatcgaggcctgtgagagtgggtctatgatgaaccacttacccgataatatcaatgtttacgcaaccaccgcagccaaccctcgagaatcaagttacgcctgctattatgacgagaagcgttctacatacctgggggattggtattctgtgaactggatggaagactccgatgtagaggacctaaccaaggagactctgcacaaacagtaccacctggttaagtcgcacaccaacacatcccatgtgatgcagtacggcaacaaaacaataagcaccatgaaggtcatgcagttccagggaatgaaacgcaaggcttcctctccagtgcccctacctcctgtcacacacctggacctgacaccttcacctgatgttcccttaaccattatgaaaagaaaactgatgaacactaacgatctcgaggaatccaggcagctgacagaggagatacagcgccatctcgacgccaggcacctgattgagaagtcagtccggaagattgtgagccttttggctgcgtcggaggccgaggtggagcagttgctgagcgaacgcgctcccctcaccggccactcctgttaccctgaggcactgttacattttagaacacactgctttaactggcatagtcccacctatgagtacgccttgcgtcacctttatgttcttgtgaacttatgtgagaagccctacccgttacatcgcattaagctttctatggatcatgtgtgtctaggtcattattag

SEQ ID NO: 192823 - DNA, 1302 bp, synthetic construct
  misc_feature 1..1302: note = Description of Artificial Sequence: Synthetic coding sequence
  source 1..1302: mol_type = other DNA
atggtgtggaaggtggccgtgttcctgagcgtggccctgggcatcggggctgttcccatcgatgatcctgaggacggtggaaagcactgggtcgtcattgttgccggctccaacggctggtacaactacagacatcaggctgacgcctgccatgcctaccagattatccaccggaacgggattccagacgaacagattgttgtgatgatgtacgacgacattgcatactcggaagacaatcctacccccggtattgtgatcaatcgacctaatggtactgatgtttatcagggcgtccccaaggattataccggagaagacgtgacgccacagaacttcttggctgtgctgcgtggagatgctgaagctgtcaaaggcataggttccggcaaggtgctgaaatctggaccacaagatcatgtctttatttacttcactgatcacggatctaccggaattctggtgttcccaaacgaagacctgcatgttaaggatctgaatgaaactatccactacatgtacaagcacaaaatgtatcgaaagatggtgttttacatcgaggcttgtgaatctgggagcatgatgaaccacctgccggacaatataaacgtttatgccactactgccgcaaaccctagggagtctagttatgcctgctattatgatgagaagaggtccacctatttgggagactggtactctgtgaactggatggaagattctgacgtagaggacttaacgaaggaaacactgcacaagcaataccacttagtaaaatctcataccaacacatcccacgtcatgcagtatggtaacaaaaccatcagtactatgaaggtgatgcagttccagggaatgaaacgcaaagcctcatctcccgtacctcttccccctgtgactcacctggaccttacgcctagtccagatgtgcccctgacaatcatgaaaagaaaactgatgaatacaaacgatcttgaggagagccgccagctgaccgaggagatccaacgtcacttggatgcgaggcacctgatagagaagtccgtccgcaaaatcgtctcactgctcgcagcaagtgaagccgaggtggaacagctcttatcagagagggcccctttgacaggtcattcatgttacccagaggctctgttgcacttcaggacacactgcttcaattggcactcacctacatatgaatatgccctcagacatctgtatgtgcttgtgaatttgtgtgagaagccataccctctgcaccgcataaagctctctatggatcatgtctgcctgggccactattag

SEQ ID NO: 192824 - DNA, 1197 bp, synthetic construct
  misc_feature 1..1197: note = Description of Artificial Sequence: Synthetic coding sequence
  source 1..1197: mol_type = other DNA
atggtgtggaaggtggccgtgttcctgagcgtggccctgggcatcggcgcagtccccatcgacgacccggaagacgggggcaagcactgggtggtaatcgtggctgggtctaatggttggtacaactacaggcaccaggcggacgcttgtcacgcgtatcagataattcaccgaaatgggatcccagatgagcaaatcgtcgtcatgatgtatgacgttacgcctcagaatttcctcgcagtcctgcgaggtgatgccgaggcggtgaaagggattgggtcaggcaaagtgctgaagagtggtccacaggaccatgtctttatttactttacagatcacgggagcaccggcatcctcgtgttccccaatgaggacctacacgtcaaggatttaaacgagaccatccactatatgtataaacacaaaatgtatcgcaaaatggtgttttacatagaagcgtgcgagtccggctcgatgatgaatcacctgccagacaacatcaacgtgtacgctacaacagctgcgaatccccgggaaagttcgtatgcctgctactatgacgaaaagagatcaacctacctcggcgattggtatagcgttaactggatggaagattcagatgtggaggacctgacaaaagaaaccctgcataaacaataccatctcgtgaagagccacactaacacaagccacgtcatgcagtacggcaacaaaactatctcgacaatgaaggtaatgcagttccagggcatgaagcgcaaagcctcatcaccagtgcccctgcccccagtgacccatctggacctcacaccttctcccgacgtgccgcttacaattatgaagcggaaacttatgaatactaatgatctcgaagagtcgaggcagttgaccgaggagatccagaggcacctcgacgctcggcatttaatagaaaaaagtgtaagaaaaatcgtttcccttctcgccgcatcggaggccgaggtggaacagctgttgtccgaaagggcccctttaactgggcatagttgctacccagaggctctgctgcactttcggacccactgcttcaattggcactcccccacctacgaatacgccctaagacatttgtacgtgctggtcaacttgtgcgaaaagccctacccactgcaccggatcaaactctcgatggaccacgtgtgcttgggccattactag

SEQ ID NO: 192825 - DNA, 1233 bp, synthetic construct
  misc_feature 1..1233: note = Description of Artificial Sequence: Synthetic coding sequence
  source 1..1233: mol_type = other DNA
atggtgtggaaggtggccgtgttcctgagcgtggccggcagcaacggctggtataattatagacatcaggctgacgcctgtcacgcatatcagatcattcatcgaaacggtattcccgatgaacaaatagtcgtgatgatgtacgatgatatcgcatactccgaagacaatcccacaccgggcattgtcatcaataggccaaatgggactgacgtatatcagggagtgcccaaggactatacaggcgaggatgtcacaccacagaatttcctggccgtactgaggggcgacgctgaggccgtcaagggaataggatctgggaaggtgttgaaatcaggccctcaggaccacgtttttatttatttcacggaccatggatctaccgggattctggtgtttccaaatgaagacctccacgtgaaagacctgaatgagacaatacactacatgtacaaacataaaatgtatcgaaagatggttttctacattgaggcatgtgagagcgggtccatgatgaatcacttaccggataacatcaatgtttacgccaccaccgcggccaacccgcgcgaatcctcgtacgcctgttattacgatgagaagagaagcacctacttgggagattggtattctgtgaactggatggaggattctgatgtcgaggatctcaccaaagagacactgcacaaacagtaccaccttgtgaaatcccacactaacacctcacacgtgatgcaatacgggaacaaaacaatcagtactatgaaggtcatgcagttccaaggcatgaagagaaaggccagctcacccgtgcccctgccccccgtaacgcacctggatctgacccccagtccggatgtaccactgactatcatgaagcgcaagctgatgaacacaaatgatttggaggaaagcagacagctgacggaagagatccagcgccacctcgatgctcgtcatttgattgagaaatctgtgcggaagattgtgagcttactggcggcatcagaagcagaggttgaacagcttctgtccgagcgcgcacccctgacaggccattcctgctaccctgaagccttactgcattttcgcactcattgcttcaactggcacagccctacctacgagtacgctctccgccacctttacgtgttggtgaatttatgcgagaagccctatcctctgcaccgcatcaagttgtccatggaccacgtgtgtctggggcattattag

SEQ ID NO: 192826 - DNA, 174 bp, synthetic construct
  misc_feature 1..174: note = Description of Artificial Sequence: Synthetic coding sequence
  source 1..174: mol_type = other DNA
atggtgtggaaggtggccgtgttcctgagcgtggccctgggcatcggcgccgtccccatagatgaccccgaagacggcggaaagcactgggtggtcatcgtggccgggtcgaacgggtggtacaattaccgtcaccaggccgatgcttgccacgcctatcaaatcatccactag

SEQ ID NO: 192827 - DNA, 60 bp, synthetic construct
  misc_feature 1..60: note = Description of Artificial Sequence: Synthetic coding sequence
  source 1..60: mol_type = other DNA
atggtgtggaaggtggccgtgttcctgagcgtggccctgggcatcggggctgttccctag

SEQ ID NO: 192828 - DNA, 177 bp, synthetic construct
  misc_feature 1..177: note = Description of Artificial Sequence: Synthetic coding sequence
  source 1..177: mol_type = other DNA
atggtgtggaaggtggccgtgttcctgagcgtggccctgggcatcggggctgtgcccatcgacgatcctgaagacggcggtaagcactgggtggtgatagtcgcaggatccaatggatggtacaattaccggcaccaggcggacgcatgtcacgcctatcagatcatccaccgctag

SEQ ID NO: 192829 - DNA, 237 bp, synthetic construct
  misc_feature 1..237: note = Description of Artificial Sequence: Synthetic coding sequence
  source 1..237: mol_type = other DNA
atggtgtggaaggtggccgtgttcctgagcgtggccctgggcatcggtgccgttcccatagacgacccagaggacggcggtaaacactgggtcgtgatcgtggccggatcaaatgggtggtacaactataggcaccaggctgatgcttgtcatgcgtatcagattattcatagaaatggaatcccggacgaacagattgtcgtgatgatgtacgatgatattgcgtactctgaatag

SEQ ID NO: 192830 - DNA, 237 bp, synthetic construct
  misc_feature 1..237: note = Description of Artificial Sequence: Synthetic coding sequence
  source 1..237: mol_type = other DNA
atggtgtggaaggtggccgtgttcctgagcgtggccctgggcatcggcgccgttccgatagatgatcctgaagacggagggaaacactgggtcgtgattgtggctggctccaatggatggtacaactataggcaccaagccgacgcctgccacgcctatcagattattcatcgcaacggcatcccagacgaacagatagtagtcatgatgtacgatgatatcgcttatagtgagtag

SEQ ID NO: 192831 - DNA, 2736 bp, synthetic construct
  misc_feature 1..2736: note = Description of Artificial Sequence: Synthetic coding sequence
  source 1..2736: mol_type = other DNA
atggccgccgccgccgccagcgccccccagcagctgagcgacgaggagcttttttctcagctgcggcgatacggcttgtcccctggaccagtgactgagtctacacgaccagtgtatctgaaaaaactgaaaaagttgcgtgaggaagaacagcagcagcacagaagcggaggcaggggcaacaagactcgcaattctaacaataacaataccgctgccgccaccgtcgctgccgccggcccagcggccgctgccgcagctggaatgggtgtgcggccggtgtctggggatctgtcttacttgcgaactccaggtggactgtgtcgcataagtgcctccggccccgaatccttgcttggggggcctggaggcgccagtgcggcgcccgccgccggcagtaaggtactactaggattcagtagcgacgaaagcgatgtggaggctagccccagggaccaggcgggcggaggcggtcgaaaggaccgcgccagcctacagtatagaggtctcaaagcaccacctgctcccctggccgcatcagaagtaaccaactccaattctgcagagcgcaggaaaccccattcatggtggggggccagacggccagccggccctgagctccaaactccacccggtaaggatggtgccgtagaagatgaggaaggcgagggtgaggacggcgaggagagagatccggagacggaggagcctttgtgggcgtctaggaccgtaaacggcagcagattggtgccgtacagttgtcgagaaaactacagtgactctgaggaagaggacgatgatgacgttgccagcagccgccaggtcctgaaagatgacagtctttctaggcatagaccccgtcgaactcactcaaaacctctgccccccttaactgctaaatctgccggaggccggctagaaacaagcgtgcagggagggggcgggctggctatgaacgaccgcgccgcagcggcggggagtctcgatcgcagtcggaatctcgaggaggctgctgcagctgagcagggtggcggatgcgatcaggtcgattctagtcccgtgccaaggtaccgggtgaacgccaagaagctgacccctttgctgccaccacccctgaccgacatggactctacgctggactcatctacaggttccctgctgaaaaccaacaatcacatcggcggcggagcattttccgtggactcccccaggatttactccaactcccttccgccaagtgcagctgtggccgcttccagctctcttagaatcaaccacgctaaccataccggcagtaatcacacctacctcaagaatacctacaacaagccaaagctgagcgaacccgaagaggaactgcttcagcagttcaagcgggaggaggtgtctccaaccggcagctttagtgctcattacctctctatgtttctgttgacagccgcctgtttgttctttttgattctaggattgacctatttggggatgagaggaaccggcgtctccgaggacggcgaactctccattgagaacccgtttggtgagacgttcgggaaaatccaggaatctgagaagacactgatgatgaataccctatacaaactccatgacaggttggcccagctggccggcgaccacgagtgtggttcaagtagccagcgaacgctttctgtgcaggaagccgccgcctacttgaaggaccttggcccagaatatgaagggatcttcaataccagtttgcagtggattctggagaacgggaaggacgtgggcatacgatgcgttgggtttgggcccgaagaggaattgaccaatatcaccgatgtgcaatttctccagtcgaccaggcccttgatgagtttttggtgtcgctttaggcgtgcatttgtcacagttacgcacagacttctgctcttatgcctaggggtagtgatggtatgtgtggttctgcggtatatgaaatatagatggaccaaggaggaagaggaaacgcgccagatgtacgatatggttgtgaaaattatcgacgtcctccgctctcacaatgaggcttgccaagagaataaggatcttcagccatacatgcctattccccacgtaagggattcgctgatacagccgcatgacaggaaaaagatgaagaaggtctgggaccgggccgtggatttcttggctgctaacgagtcacgtgtgcgaacagaaacaagacgtattggaggtgcggattttcttgtctggagatggattcagccaagtgcctcttgcgacaagatcctcgtcatcccgtcaaaggtatggcaaggtcaggcctttcacctggacagaagaaatagtccaccaaactcgctgaccccatgcctcaaaatcaggaatatgttcgacccagttatggaaatcggtgatcaatggcatttggctattcaggaggctattctggagaaatgctcggacaatgacggaatcgtgcacatagcagtggacaaaaacagcagggaggggtgcgtgtacgtgaaatgcctgtctccagaatatgccgggaaggccttcaaggccttacacggaagctggttcgatggaaaacttgtgaccgtgaagtacttgaggttagaccgataccaccaccggttccctcaggcgctcacatctaatacccctctgaaaccttctaacaagcacatgaactctatgtcccatcttcgactgcgcacaggcctgactaactctcagggctcttcctag

SEQ ID NO: 192832 - DNA, 4512 bp, synthetic construct
  misc_feature 1..4512: note = Description of Artificial Sequence: Synthetic coding sequence
  source 1..4512: mol_type = other DNA
atgcccggcccccccgccctgcggcggcggctgctgctgctgctgctggttctcctcattgctggttccgcaggcgctgcgccactcccacagacgggcgccggggaggcccctcctgcggctgaggtcagtagctctttcgtaatcttatgcgtgtgctcccttattatattgatcgttttaatcgccaactgtgtctcttgttgcaaagatccagagatcgattttaaagagttcgaggataacttcgacgacgagatcgattttacaccaccagctgaggacacgccctccgttcaatctcccgccgaagtattcactctgagcgtgccgaacatcagtctgccggccccttctcagttccagccaagcgtggaggggcttaagtctcaggtggcacggcacagtcttaattatatccaagaaattggaaacggttggttcgggaaagtactgcttggtgaaatctacacggggacgtctgtggcacgggttattgtgaaagaattaaaggcgagcgcaaaccctaaagaacaggacacatttctgaagaacggtgagccatactacatccttcagcatcctaatattcttcagtgcgtgggccagtgcgtggaggcaataccctatctcctggtgttcgagttctgcgatctgggcgatctgaaagcttaccttaggtcagaacaggaacatatgcggggggactcccagaccatgctattgcaaagaatggcttgtgaggtagctgcaggactggctgccatgcataaactgcactttctccatagcgatctggccctaagaaattgctttctgactagcgatcttaacgtgaaagtgggagactacggcattggcttttcccggtataaggaggattatatcgagaccgacgacaagaaggtgtttcccctgcggtggacggcaccagagctagtgacctcatttcaagatcgcctgcttaccgctgatcagaccaaatatagtaacatctggtctttgggcgtaacgttgtgggaactgttcgataacgccgcccagccctacagtaatctcagcaatcttgacgtgctcaaccaggttattagagagcgcgacacgaaactgcccaagccccaactagaacagccctacagtgataggtggtacgaggtactccaattttgttggcttagtcccgagaagcggccagcagccgaggatgtccacagactgctgacttatctgagactgcaatcacagcgagattcagaggttgactttgagcagcaatggaatgccctcaaacccaacacaaactcaagagatagctccaataatgcggcctttcctatcctcgatcattttgcacgtgaccgcctgggccgcgaaatggaggaggtgcttaccgtcacagagacttcccaggggctaagttttgagtatgtgtgggaggcggccaaacatgatcacttcgacgagcggagtagaggccacctcgacgaagggctgtcatacaccagtatcttttatcccgtggaggtgttcgaatctagtctttcagacccgggccctgggaagcaggacgatagtggccaggatgtgcccctcagagtacccggggtcgtccccgtatttgacgcccataatttgagcgtgggatctgattattatattcagctcgaagagaagtcagggtctaatctggagctggattacccgcctgcactgcttaccactgatatggacaatcctgaaaggactggccccgagctgtcgcagcttacagcgctgcgaagcgtggaattagaggagtcatcaacggacgaggatttctttcaaagctctactgatcccaaagatagcagtctccctggagacttgcatgtaacgtccggacccgagtctccttttaataatatcttcaatgacgtggacaagtccgaggacctgccaagtcatcagaagattttcgatctaatggagttgaacggggtccaggccgacttcaaaccggccacacttagttcctctctggacaacccaaaagagagcgttataacgggacacttcgagaaggaaaaaccgcgcaaaatctttgattctgagccgctctgcctatctgacaacttaatgcaccaggacaatttcgatcctctgaacgttcaagagctatcagagaatttcttattcctgcaagaaaagaaccttttaaagggatccctcagctcaaaggagcacatcaacgatctgcagacagagctgaaaaatgctggctttaccgaagccatgctggaaaccagctgcagaaattcattggatacggagctccaattcgctgaaaacaagcctggactgtccctgttgcaagagaacgtctctactaagggggacgataccgatgttatgctgacaggggatactctgtctacttctttgcagagttcaccagaggtgcaagttccaccaactagttttgaaacagaagagaccccacgcagagtgcctcctgacagcctgccgacccagggtgagacccaacctacgtgtctggacgtgattgtgcccgaggactgtctacaccaagatatctcccccgatgccgtgacagtgcctgttgaaattctttcaaccgacgccaggacccattcactcgacaatcggagccaagacagccctggcgaatccgaggagacgttaagattgacagaatccgatagcgtccttgctgacgacatccttgcatctcgagtctccgtagggagcagcctgcccgagctgggccaggagctgcataataaacccttcagtgaggaccatcattctcaccggaggctggagaaaaatctggaagccgtcgagacactgaaccagctgaattctaaggacgcagcaaaggaagcaggactcgtgtcagctctgtcctctgattctacatcacaggattccttactggaggattccttatccgctcctttccccgctagcgagcctagcctggagacccctgactcgctagagtctgttgacgtgcacgaggcccttctggactcactgggatcccatacaccacagaaactcgtgccacctgataagcccgctgattcaggatacgagactgagaacttggagtcgccagagtggacactccaccccgctcctgagggcactgccgatagcgagcccgctaccactggggatgggggccactcaggccttccaccaaatccagtcatagttatctccgatgccggcgatggtcaccgtggcaccgaggttactcctgagacattcaccgcaggctcccagggaagttatcgggattcagcctatttttcagataacgattcagaacccgagaagcgatcggaagaggtccccggcaccagccccagcgctttggttctcgtccaagagcagcccctgcctgaacctgtgctcccagaacagagccccgcagcccaggattcgtgcctggaggccaggaagtctcagcccgatgagtcttgtctgtctgcactgcataattcatctgacctcgaattgcgcgccaccccggagcccgcccagaccggcgtgcctcaacaggtgcatcctactgaagatgaggcttcatcaccatggtccgttcttaacgccgagctctccagcggtgacgacttcgaaacgcaggatgacagaccatgtacccttgcttctacgggaacaaataccaatgagctgctggcttacacgaatagtgccctggacaagtctcttagttcccattccgagggcccgaagctgaaggaacctgatattgaaggcaaataccttggcaaactcggagtgagtggcatgctggatctgtccgaagacgggatggacgcagatgaggaagatgagaattccgacgacagcgatgaagatctacgtgcattcaacctgcactctttatcgtctgaaagcgaagacgaaaccgaacaccccgtgccaatcatcctgagtaacgaggacgggcggcatctgaggtccctgctgaagccaactgcagccaacgcacccgacccgcttcccgaggattggaaaaaagaaaagaaggccgttacattcttcgacgacgtgaccgtctatttgttcgatcaggaaacaccaactaaggagctcggcccctgtggaggagaagcatgcggacccgacttgtcagggccggctccggcctccgggagtccctaccttagtcgctgcataaattcggaaagtagcacggacgaagaagggggcggcttcgagtgggatgacgacttttccccggatccttttatgagcaaaactacctccaatctgctcagtagcaagcctagtttgcaaacgtctaagtactttagccccccaccgcccgcaagaagtactgaacagtcttggccccattcagctccttacagcagattttctatttcccctgcaaatatcgcttcattctcattgacacatttgaccgactccgatattgaacagggggggagctcggaagacggggagaaggactag

SEQ ID NO: 192833 - DNA, 186 bp, synthetic construct
  misc_feature 1..186: note = Description of Artificial Sequence: Synthetic coding sequence
  source 1..186: mol_type = other DNA
atgcagccccggacccagcccctggcccagaccctgcccttcttcctgggcggggccccaagagacaccggattaagggtacccgtcattaagatgggtactggctgggaagggtttcagcgcaccttgaaggaagtggcttacatccttttgtgttgctggtgtataaaagagctgctggactag

SEQ ID NO: 192834 - DNA, 186 bp, synthetic construct
  misc_feature 1..186: note = Description of Artificial Sequence: Synthetic coding sequence
  source 1..186: mol_type = other DNA
atgcagccccggacccagcccctggcccagaccctgcccttcttcctgggtggcgcccccagagacaccgggctgcgcgttcctgtgatcaagatgggtacagggtgggaaggcttccagcgaactcttaaagaggtggcctatatcttgctgtgttgctggtgtatcaaagagctgttggactag

SEQ ID NO: 192835 - DNA, 522 bp, synthetic construct
  misc_feature 1..522: note = Description of Artificial Sequence: Synthetic coding sequence
  source 1..522: mol_type = other DNA
atgtacagcttcatgggcggcggcctgttctgcgcctgggtgggcaccatcctgctcgtggtcgctatggctacagatcattggatgcagtacagactctctggatccttcgctcatcagggcttatggcgttattgcttgggcaataaatgttatctccagacggattctatcgcctattggaacgcaacaagagccttcatgatcctgagcgccctctgcgccatttcgggaattataatggggatcatggcctttgcacaccagcccaccttttcacgcatcagcagaccattcagtgcaggaattatgtttttctcttcaacgttgtttgtggtccttgcactagcaatttacaccggagtaactgtctccttcctgggaagacgtttcggggactggcgattcagttggtcatatatcttggggtgggtcgcggttctgatgaccttttttgccggtattttttacatgtgtgcctatagggtgcacgagtgtcggcgtcttagcaccccacgctag

SEQ ID NO: 192836 - DNA, 681 bp, synthetic construct
  misc_feature 1..681: note = Description of Artificial Sequence: Synthetic coding sequence
  source 1..681: mol_type = other DNA
atgcccggcggccccggcgtgctgcaggccctgcccgccaccatcttcctcctcttcctcctgagtgctgtctacctcgggccagggtgccaggccctttggatgcacaaggtacccgcttccttaatggtcagcttgggggaggatgctcattttcagtgtccgcacaacagcagcaacaatgccaatgtgacctggtggagagttttgcacgggaactacacctggcctccggagtttctcggaccgggcgaggacccaaatggaaccctcattatacaaaacgtaaataaaagccatggaggcatttatgtgtgccgcgtccaggaaggtaacgaatcctaccagcagtcctgcggcacctatctgagagtccgtcagcctcctcctcggccatttctcgacatgggagaaggcaccaaaaatcggattattacagccgaggggatcattctgttgttttgcgccgtggtccccggaacactactgttgtttaggaagcgatggcagaatgagaaactaggactcgacgcgggcgatgaatatgaagacgagaatttgtatgaggggctcaacctggacgattgcagtatgtacgaggatatctctcgtggcctccagggtacatatcaagatgtagggagtctcaatattggagatgtgcagttggaaaagccttag

SEQ ID NO: 192837 - DNA, 2001 bp, synthetic construct
  misc_feature 1..2001: note = Description of Artificial Sequence: Synthetic coding sequence
  source 1..2001: mol_type = other DNA
atggccgacatggaggacctgttcggcagcgacgccgacagcgaggctgaaagaaaggacagcgattcaggatcagactctgactccgatcaggaaaatgccgcctctggctccaatgcgtccggttccgagtcggatcaggacgaacggggggactcaggtcagcctagtaacaaggaactattcggggacgacagcgaagacgagggcgctagccatcatagtggttcggataaccacagtgagcgatcagacaatcggtcggaggcttccgagcgatcggaccatgaagacaacgatcctagtgatgtcgatcaacacagcggtagtgaggctccgaatgacgatgaggatgaagggcatcggtccgacggtggctctcaccattccgaggccgaaggctccgaaaaagcccacagtgacgatgaaaagtggggcagggaagacaaaagtgaccagtcggacgacgagaaaattcagaattcagacgacgaagagcgcgctcaaggctcggacgaggacaagctgcagaactctgacgatgatgaaaaaatgcagaatacagacgatgaggagcggcctcaactctccgacgacgagcgtcagcagttgagcgaggaagagaaggcgaatagcgatgacgaacgccccgtggcatcagataacgacgacgagaaacaaaactcagatgacgaagaacagccccagctcagcgacgaggagaagatgcaaaactcggatgacgagcggccccaggcatccgacgaggagcaccgccactccgacgacgaggaagagcaggatcataagagcgagagtgcccgcggaagcgactctgaagacgaagttctgagaatgaagcgcaaaaatgctattgcctcggattctgaggccgacagtgataccgaagtgcctaaggacaattccggcacaatggatttgttcggcggagctgacgacatcagcagcggcagcgatggggaggataaaccccccacccctggtcagcccgttgacgaaaatggccttccccaggatcaacaggaggaggagcctattccggaaactcgcatcgaggttgagatcccaaaggtgaacaccgacttgggaaacgatctctatttcgtcaaactgcccaactttctgtctgtcgaaccacgaccctttgaccctcaatactatgaggacgagtttgaggacgaggaaatgcttgatgaggagggccgcacccgattgaagctgaaggtcgagaatactatccgttggagaataaggcgagacgaagaagggaatgaaattaaagaaagtaatgcgcgcattgttaaatggagcgacggaagcatgagtctccatctgggcaatgaggtgtttgatgtctataaagctccactgcagggtgaccataatcatctctttataagacagggcaccgggctgcagggtcaggcggtgttcaagaccaaattgacattcagacctcactcaaccgacagtgctacacatagaaagatgaccctgtcattggcggaccgttgctcaaaaacacagaagatccggattttgcccatggcgggaagggatccggaatgccagcgaactgaaatgataaagaaggaagaagaacgcctgcgcgcgtccatccgccgggagtcacagcagaggcggatgagagagaaacagcatcagaggggcctatccgcaagttacctcgagcctgatcgctatgacgaggaggaggaaggagaggaatccatctcactagcagccatcaagaaccgatataaaggcggcatccgagaggagcgcgcccgtatctacagctctgatagcgatgaaggatccgaagaagacaaggctcagcggctgctaaaagcaaagaaactcacctccgacgaggagggcgagccgagcggcaagcgtaaggctgaagatgacgacaaggctaacaagaaacacaagaaatacgtaatttctgacgaagaggaagaagacgacgactag

SEQ ID NO: 192838 - DNA, 1821 bp, synthetic construct
  misc_feature 1..1821: note = Description of Artificial Sequence: Synthetic coding sequence
  source 1..1821: mol_type = other DNA
atggccgacatggaggacctgttcggcagcgacgccgacagcgaggcagagaggaaggacagcgactcaggtagcgactcggattcagatcaagagaatgcagcctccggttccaacgcatcaggtagtgagtcagatcaggacgagaggggagacagtgggcaaccatcaaataaggagctgtttggcgacgactcggaggatgagggcgcttctcaccactcaggcagcgacaatcactccgaaaggtctgacaaccggagcgaggcctctgagcgaagcgatcatgaagacaacgacccaagtgacgtagatcagcactccgggagtgaggcacctaacgacgacgaagacgaaggccatcgctctgatggtggctcacaccactctgaggcagaaggtagtgagaaggcacattctgacgacgagaagtggggacgcgaggataagtccgatcagtcagatgatgaaaagatccagaattctgacgatgaagagagagcccagggcagtgacgaggacaagctacagaactccgatgacgatgaaaagatgcagaatacagatgatgaagagcggccgcagctttctgatgatgaacgtcagcaactgtcagaagaggagaaggcgaatagcgatgatgaacgaccagtggcctccgacaacgacgacgagaagcagaattcggatgacgaggagcagccccaactttcggatgaagagaagatgcagaatagtgacgacgaacggccccaggctagcgatgaggagcaccggcattcagatgacgaagaggaacaggaccacaaatccgagagcgccagaggatcagattccgaggacgaggttttacgcatgaagcgcaaaaatgccatcgcctctgattcggaggctgactctgacacagaggttccgaaggacaacagtggaaccatggacctctttggcggcgccgatgatatctcctctggcagcgatggtgaagataagcccccaacccctgggcagcccgtggatgaaaatgggctccctcaggaccagcaggaagaagagcctatacctgaaacccgcatcgaagtcgaaatccctaaggtgaataccgatctgggcaacgacctgtatttcgtcaagttacccaacttcttgtcagtggaacctagtatgagcctgcatctcggcaatgaggtgtttgacgtgtataaagcacctctgcaaggtgatcacaaccacctatttattcgacaagggaccggacttcagggacaggcggtgttcaaaaccaagctgaccttccgcccccacagtaccgatagtgctacccaccgcaagatgactctctctctggcggatcgctgtagtaagacccagaagattcggattctccccatggcaggcagagatccagaatgtcaacggactgagatgatcaagaaagaggaggagcggctgagagcctcgatccgtagagaatcacagcagcggaggatgagagaaaagcagcaccagagaggtttgtccgcatcctatctggagcctgacagatacgatgaggaagaagaaggggaagagtctattagtttagctgcgattaagaatcgctacaaaggcggcattagggaggaaagggcaagaatctattcatcagattctgatgagggatctgaggaagacaaggcgcagcgccttttgaaagcaaagaaattgacctccgatgaggaaggggagccaagtggcaagcgtaaggccgaagacgatgataaggctaataaaaagcataagaagtatgtgatcagcgatgaggaggaggaggacgacgactag

SEQ ID NO: 192839 - DNA, 1935 bp, synthetic construct
  misc_feature 1..1935: note = Description of Artificial Sequence: Synthetic coding sequence
  source 1..1935: mol_type = other DNA
atggccgacatggaggacctgttcggcagcgacgccgacagcgaggcggagaggaaggattcagattcgggaagcgacagcgattccgatcaggagaatgccgcttccggaagcaatgcttccgggagcgaatcggatcaagacgaacggggcgactctggacaaccatctaacaaggaattgtttggcgacgacagtgaggacgaaggggctagccatcatagtgggtcagacaaccattccgagagatctgacaacagatcggaagcgtccgagcggtccgatcacgaagataacgaccctagtgacgtagatcagcacagcgggagtgaggcaccgaatgatgatgaggacgaaggacaccggtctgatgggggctcacatcacagcgaagcagagggatcagagaaggcacactccgatgatgaaaagtgggggagggaggataagtcagatcaatctgacgatgagaaaattcaaaactctgacgacgaagaacgcgcgcagggatccgatgaagataaattacagaattcagatgatgatgaaaagatgcagaatactgatgatgaagaacgtcctcagctctctgatgacgaacggcagcagttaagcgaagaggagaaagctaatagcgatgatgagaggccggttgctagtgataacgacgacgatgatgagaggcctcaggcttcggacgaagaacataggcattcagatgacgaggaggaacaagaccataaatcagagtcagctagagggagcgatagcgaagacgaagtgctgagaatgaagagaaagaatgctatagctagcgattctgaggctgactccgataccgaggttcccaaggataacagtggtactatggatttgtttggaggagccgacgacatcagcagtggcagcgacggcgaagataagcccccgaccccaggccagcccgttgacgaaaacggcctgccccaggaccaacaggaggaagaaccaatcccagaaaccaggatcgaagttgagatccctaaggtcaataccgatttaggcaatgacttatattttgttaagttgcccaatttcctttcagttgaacctcggccctttgacccacagtattatgaggacgaattcgaagatgaagagatgctggatgaagaaggtcgaactcggctgaaattaaaggtggagaacacgattcgctggcggatcaggcgcgatgaggaagggaatgagatcaaagagtcaaacgcaagaatcgtgaagtggagcgacggctccatgagccttcacctgggaaacgaagtgttcgacgtatacaaagccccgctacagggggaccacaaccacctgttcattcgtcagggaacagggcttcagggacaagccgtgttcaagaccaagctgactttccgacctcattctactgacagcgcgacccatcggaagatgaccttatcgttggccgatcggtgctctaaaacccagaagatccggatactacccatggcaggacgggatcccgaatgccagagaaccgaaatgatcaaaaaagaagaggaacgtctgagagcttctattcggagagaatctcagcagcgtaggatgcgggagaagcagcatcagcgtgggctcagtgcatcatacttggagcctgatcggtatgatgaggaggaggaaggggaagaatcgatcagcctagcagctatcaagaatcgctataagggaggaattcgcgaggaacgagcccgcatttatagttcagactccgacgaaggctcagaagaagacaaagctcagcgactgcttaaggcaaaaaagctgacaagtgatgaagagggggaaccaagcgggaagagaaaagcagaggatgatgataaagcaaataagaaacacaaaaagtatgtaattagtgatgaagaggaggaagatgacgactag

SEQ ID NO: 192840 - DNA, 2127 bp, synthetic construct
  misc_feature 1..2127: note = Description of Artificial Sequence: Synthetic coding sequence
  source 1..2127: mol_type = other DNA
atgcgggagcggatctgggccccccccctgctgctgctgctgcccctcctgctcccccctcccctgtggggcggccctcccgattctcctagacgggagctggaactggaaccaggaccgctgcaacctttcgacttgttatacgctagcggcgctgccgcttattattctggggactatgagcgggccgtccgggacctcgaagccgcgctgagatcccacagacgtctgcgggagatccgaacccggtgtgctcggcactgcgccgcacgccaccctttgccacctcccccacccggcgaaggaccaggagccgaactaccacttttcagatcactgttaggtcgcgcaaggtgttatcggagttgcgagactcagcggctgggaggtcccgcaagccggcaccgggtgtctgaagatgtgcgatcagactttcagcggagagtgccgtataattacctccagagagcttacattaaacttaatcagctcgaaaaagcagtcgaggccgcacatacgttttttgtggcaaatcccgagcatatggaaatgcagcaaaatatcgagaactatagagccacagcgggcgttgaagcgttacagttggttgacagagaagctaagccacatatggaatcctataacgcaggtgtcaagcattacgaggcagatgatttcgagatggccatccgccacttcgagcaggctctcagggagtactttgtagaggacacagagtgtcgcacattgtgtgagggtccccagcgattcgaggagtatgaatatttaggttacaaggcgggcctgtacgaggccatcgctgatcactatatgcaggtgttagtttgccagcatgaatgcgtcagagagttggccacacgaccggggagattatctccgatcgagaatttcctacctctgcactacgactatctccagtttgcctactatagggtgggtgagtatgtgaaggcactcgaatgtgcaaaagcttacctgctgtgccacccagacgatgaagacgtgctcgataatgttgattattacgagagcttgcttgatgactccatagaccctgcttcaatcgaggctagagaagatctgacaatgttcgtgaagagacacaagttagagagtgaactgatcaagagtgccgccgaagggctcggcttctcttacacggagcctaattattggattcgctacggtgggcggcaggatgaaaatcgtgtgccatcaggtgtgaatgtggaaggggccgaggtccatggctttagtatgggaaagaagttgagccccaagattgatcgagacttgcgcgaaggaggcccactgctttacgaaaatattaccttcgtttacaacagtgaacagctgaatggaactcagcgagtgctgctggacaatgttctcagtgaggagcagtgtagggagctgcatagcgtggcctcgggcataatgttggtgggagacggctatcggggaaagacttcccctcataccccaaatgagaaattcgagggagcaacagtgctcaaggctcttaagtccggctatgagggccgggtgccgctgaaaagtgccagactcttctacgacatctccgaaaaggctcggcgcatagttgaatcttacttcatgttaaattccaccttgtacttctcctacacgcatatggtgtgccgcaccgccttgagcggccagcaggacagaaggaacgatctttctcaccctattcacgctgataattgcctcttggaccccgaagccaacgagtgctggaaggagccacctgcctatacattccgggactattcagccctgctgtacatgaatgacgactttgagggcggagagtttattttcacggaaatggatgcgaaaaccgtcacggccagtatcaagccaaaatgtggccggatgatatccttctcttccggaggggagaatccgcacggagtgaaggcagtcacaaagggcaagaggtgtgcagtggcattatggtttacccttgacccactctatagagagctagaaaggatacaggctgacgaggtcatcgccattctggatcaggagcagcaggggaagcatgagctgaatattaaccccaaggacgaactctag

SEQ ID NO: 192841 - DNA, 1584 bp, synthetic construct
  misc_feature 1..1584: note = Description of Artificial Sequence: Synthetic coding sequence
  source 1..1584: mol_type = other DNA
atggagatgcagcagaacatcgagaactaccgggccaccgccggcgtggaagcactgcaactagtagaccgggaagctaaaccacatatggaaagttacaatgctggcgtgaagcactacgaagcagacgacttcgaaatggccatcagacatttcgagcaggccctccgagagtacttcgtggaggatacagaatgccgcactctctgtgaaggccctcagcgatttgaagagtacgaatatcttggctacaaggcgggtctctacgaggccatcgctgatcactatatgcaggtgctggtatgccaacacgagtgtgtccgggagcttgctacaagacctggcagattgtcccccattgagaatttcctccctctgcactacgattatctccagtttgcctactatagagttggggagtatgtgaaagccctggagtgtgctaaagcatacctactgtgtcatcccgacgacgaagatgtgctggacaatgtggactattatgaaagtctgctggatgatagcatagatcccgctagtattgaggcccgagaggacctaacaatgtttgtcaagagacacaagctggagtccgaattgatcaaatccgccgcggaaggcctcgggttcagctacaccgagccaaattattggataaggtatggcggaagacaagatgagaatagagtgccttcaggagttaacgttgagggggccgaggtgcacgggttttctatggggaagaagctgtccccgaaaatcgatcgggacctacgggaaggaggccctctgctgtatgaaaatataactttcgtctacaactctgaacagttaaatggaacgcagcgggttcttcttgacaatgtcctgtcagaagagcaatgcagagagctgcatagtgtggccagcgggatcatgctggtgggggacgggtaccgggggaagacatctcctcacacaccgaacgaaaaattcgagggcgcgacagtgcttaaggcgctgaagtcaggatacgaaggtcgggtccccctcaagtcagcgcggcttttctacgacattagcgagaaggctaggaggatcgttgagagctactttatgcttaacagtacactatacttcagctatactcacatggtctgtcgcaccgcgttatccggccagcaggatcggcggaatgacctcagtcatccgatccatgctgataattgcttactcgaccccgaggcaaatgaatgttggaaggaaccccctgcgtacacctttcgcgattatagcgccctcctttatatgaatgatgatttcgagggaggagaatttatcttcaccgagatggatgcaaagactgtcacagcctcaattaaacccaagtgcgggaggatgatatccttctcttcggggggcgaaaatccacacggcgtcaaggccgtgacgaaaggcaagagatgcgctgtggcactgtggttcacacttgatcctctctatcgagaattggagaggatccaagccgacgaggtgatcgccattttggaccaggagcaacaagggaaacatgagctgaacataaatcctaaagacgagctgtag

SEQ ID NO: 192842 - DNA, 2721 bp, synthetic construct
  misc_feature 1..2721: note = Description of Artificial Sequence: Synthetic coding sequence
  source 1..2721: mol_type = other DNA
atgatctgccagaagttctgcgtggtgctgctgcactgggagttcatttacgtgattacagctttcaacttgagttacccaatcacaccttggcgctttaaattatcctgcatgccgcctaattctacatacgattactttctcctgccggctggattgtccaaaaatacaagcaactctaacggacattatgagactgctgtggaacctaagttcaactcaagcggcacacatttttcaaacctgtcgaagactacattccactgctgcttccgatccgaacaggaccggaattgcagcctgtgcgccgacaacattgaaggtaaaacctttgtctccacagtgaatagcctggtgttccagcagatcgacgccaattggaatattcagtgttggcttaagggcgacctcaagcttttcatttgctacgtagagagcctcttcaagaatctgtttaggaattacaactacaaagtgcacctgttgtatgttcttccggaagtcctggaagacagccctcttgtgccccagaaaggtagcttccagatggtgcactgcaactgctctgtgcacgagtgttgtgagtgcctggtacctgtccctaccgctaagctgaatgatacgttgctcatgtgtttgaaaattacatctggtggcgttatatttcaaagcccgttgatgagtgtccagcccataaacatggttaagcccgaccccccccttggcctgcatatggagattacagacgacggtaaccttaaaatctcatggtcgtctcctccgttggttccctttccactgcagtatcaggttaaatactcagagaatagcacaaccgtcatcagggaagcggataaaatagtctctgcaacctctctgctcgttgacagcattttgccaggcagctcttacgaggttcaggtccgcggaaagcgcctggacggaccagggatctggtccgactggtcgaccccccgcgtttttaccacgcaggacgtaatttacttccctcccaaaatactgacctctgttggcagcaatgtaagctttcactgtatttataaaaaggagaacaaaatagtgccgtccaaggaaattgtctggtggatgaacctggcggagaagattcctcagtctcagtatgacgtggtttccgatcatgtgagtaaagttacattctttaatctaaacgagaccaagccccgcggtaaattcacatacgatgctgtctattgctgtaacgagcatgaatgtcaccacagatacgctgaactgtacgtcatcgacgtgaatattaatatctcatgcgagacagatgggtacctcaccaagatgacttgtcggtggagcacctccactatccagtccctggccgaatccacgcttcagctgcgctaccaccgatcttccttatactgttctgatatcccctccatacatcctatctccgagccgaaggactgctacctccagtctgacggtttctatgaatgcatctttcagcctatctttctcctttcggggtacactatgtggatcagaattaatcactctttgggttccctcgatagccctcccacttgcgttctgcccgacagcgtcgtgaaacctctgcccccttcatctgtcaaagctgaaataacaatcaacataggacttctgaagatctcctgggagaaacccgtgtttccggagaacaaccttcagtttcagattcgttacggtttgagcgggaaagaggtgcaatggaaaatgtatgaggtatatgatgccaaaagtaagagcgtcagcttaccggtgcccgacttgtgtgcagtgtacgcggtgcaggtgaggtgtaaaagactggacggcttgggatactggagcaactggagtaatcctgcttataccgtcgtgatggacataaaagtgcctatgagagggcccgagttctggagaattattaatggagacaccatgaagaaggagaagaacgtgactctgttatggaaacctttgatgaaaaatgattcactctgttctgttcagagatatgtcattaaccatcatacctcctgtaacgggacatggtctgaggacgttggtaaccacactaagttcaccttcctttggactgaacaagcccatacggtgacagtgctggcgattaactctattggcgcctccgtcgctaacttcaacttgactttcagctggcctatgtctaaagtcaatatcgtacagtctctaagtgcctatccattaaactcttcatgtgtgattgtttcatggatcctttcgcctagcgactataagctgatgtactttattattgaatggaagaatcttaacgaagatggtgagatcaaatggttgcgaatttccagtagtgtgaaaaagtactacatccacgaccacttcatcccaatagaaaaataccaattttccctgtacccaatattcatggaaggtgtggggaagccaaaaatcatcaacagtttcacacaggatgacatcgagaagcatcagtcggacgcaggcctatatgtaattgtgcccgttatcatcagctcaagcatactattactgggaactctcctcatctcccaccaacgcatgaagaagttgttctgggaggacgtgcccaatcccaagaactgttcatgggctcagggactgaacttccagaaaaagatgccagggactaaggagctgctgggaggtggctggctgacctag

SEQ ID NO: 192843 - DNA, 3498 bp, synthetic construct
  misc_feature 1..3498: note = Description of Artificial Sequence: Synthetic coding sequence
  source 1..3498: mol_type = other DNA
atgatctgccagaagttctgcgtggtgctgctgcactgggagttcatatacgtcatcaccgccttcaacttatcttatcctatcactccttggcgtttcaagcttagttgtatgccccccaactctacttatgattacttccttctccctgcggggctgtcaaagaatacatccaattcaaacgggcattatgagactgccgttgaacctaagtttaactcatctggaactcacttcagcaacttatcaaagacgactttccactgctgctttagatctgagcaggaccggaactgcagtctgtgcgctgataatatcgaaggcaagacgttcgtttctacagtgaattccctagtttttcagcaaatcgacgccaattggaatattcaatgctggttgaagggagacctcaagctgttcatctgttatgtggaatcgttgttcaagaatctgtttagaaattataattataaggtgcatttgttatacgttctgccggaagtgttggaggacagccccttagtaccccagaagggcagctttcagatggtccactgcaattgcagtgttcacgagtgctgcgagtgtctcgtcccagtgcctactgccaagctaaacgatacactcctcatgtgcttaaagataacctctggcggcgtgatttttcagtcaccactcatgtcagtgcagcctatcaacatggtgaagcctgatccaccactgggactgcacatggaaatcactgatgatggaaatctgaaaatctcatggagttctccacctctcgtgccttttcccctgcagtaccaggtgaaatactcagagaacagtacaaccgtaatacgggaagcagacaaaatcgtatcagcaaccagcctcctggtagattcaatcttgccggggtcttcctatgaggtgcaggtgcgaggcaagcggctggatggcccagggatatggtctgactggtcaaccccccgcgtgttcacgacacaagatgtgatttacttcccccccaaaatcctcactagtgtggggagtaacgtgagctttcactgcatctataaaaaggagaacaaaatcgtacctagtaaggaaatagtctggtggatgaatctggccgagaaaataccacagagccagtatgacgtggtttctgaccatgtcagcaaggtcactttttttaaccttaatgagactaagcccagaggtaagttcacctatgatgccgtgtattgttgtaacgaacacgaatgtcaccatcgctacgctgaactctacgtgattgacgtaaacatcaacatatcctgtgaaaccgatggctatctcacaaaaatgacctgtaggtggtcaacatcaacaattcaaagtctggctgagtccactttacagctgaggtaccaccggagcagcctctactgtagcgatatcccttccatacacccgatcagtgagcccaaggattgctacctgcagagcgatgggttctacgagtgtatattccagcctatttttctgctctccggctacacaatgtggatcaggattaatcattctctcgggagcctagatagtcctcctacttgcgtgttgccggattccgttgtgaagcccctgccccccagctctgtgaaagccgagataacgattaacattggtcttcttaagatctcttgggagaaacccgtcttcccagagaacaacttacaatttcagattaggtacggtctgtccggcaaagaggttcagtggaagatgtacgaagtgtacgacgccaagagcaagtcagtgagcctaccagtgccggatctttgtgctgtttatgccgttcaagtgagatgcaagcgcctcgacgggctgggctactggtcgaactggagtaaccccgcctatacagtcgtgatggatatcaaggtgcccatgagaggtccggagttctggaggattataaacggcgacactatgaagaaagagaagaatgtgaccctgctgtggaaacctcttatgaaaaacgatagcctctgttccgtgcagcggtatgttataaaccaccacacttcctgcaatggaacttggagcgaggatgtggggaatcacacgaagtttacatttctgtggacggagcaggcacacacggtgactgtgctggccatcaattccatcggtgctagcgtagctaacttcaacttgacatttagttggcctatgagtaaagtcaatatagtgcaatctctctctgcctaccccctgaattctagctgcgtcatcgttagttggatcctgtctccctcagactacaagctgatgtatttcataatagagtggaaaaatcttaacgaagacggcgagatcaaatggctcaggatatcctctagcgtcaaaaaatactacattcacgaccacttcattccaattgaaaagtaccagttctcactttaccctatatttatggagggtgtcggaaagcctaagattatcaattcttttacgcaggacgacatagagaagcatcagtcggatgccggactgtacgtcatagtgcctgtgataatttctagctctattcttctgttgggcaccctcctgatctctcatcagcggatgaaaaaattgttctgggaggacgtgccaaacccaaagaattgcagctgggcacaaggactcaactttcagaaacctgaaaccttcgagcatcttttcattaaacacaccgcctcagtcacctgcggtccactactcctggaacccgagactatctccgaggatatttcagtggatacttcttggaagaataaggacgaaatgatgcccacaacagtcgtatcccttctctcgactactgacttggagaagggctcagtatgtatctctgatcagttcaacagcgtgaatttttccgaagctgagggaaccgaggtgacctacgaagacgagagccagcgacagccgttcgttaagtacgctactcttatttcaaactcaaagcccagcgagacgggggaggaacagggtctcattaactctagcgttacaaaatgtttttctagcaagaacagccctttgaaagattcattctcaaatagctcctgggaaatcgaagctcaggcgtttttcatcctgtccgaccagcaccccaacatcattagcccccatttaacgtttagtgagggcctcgatgaactcctaaaacttgaggggaacttccccgaagaaaataacgacaaaaagtccatctactatttgggcgtgacctccatcaagaagcgagaaagcggcgtgctgttgactgacaagagccgggtctcttgccctttcccagcgccgtgcctgttcaccgacatccgtgtacttcaggacagctgtagtcactttgtggagaacaatattaacctgggcacttcttctaaaaagactttcgcaagctacatgccacagttccagacctgcagcacgcagactcacaaaattatggagaacaaaatgtgtgacctcacagtgtag

SEQ ID NO: 192844 - DNA, 2721 bp, synthetic construct
  misc_feature 1..2721: note = Description of Artificial Sequence: Synthetic coding sequence
  source 1..2721: mol_type = other DNA
atgatctgccagaagttctgcgtggtgctgctgcactgggagttcatatatgttattacagcgttcaacctcagttatcctattaccccttggcggttcaagctcagttgcatgccaccaaactctacatatgattactttctgttaccagccgggcttagtaagaacacctctaattccaatggccattacgaaaccgctgttgaacctaagtttaacagctcagggacgcacttctctaatctcagtaaaacgacttttcactgttgcttccggtccgaacaggatcggaattgcagtctgtgtgcagacaacatcgaaggcaaaacttttgtatctacagtaaactctctcgtctttcaacagatcgatgcaaactggaacatccagtgctggttgaaaggggatctgaagcttttcatctgttatgtcgagtcattattcaaaaatctgtttcgcaactacaattacaaagtgcacctgctctatgtcctaccagaagttcttgaggacagtccacttgtgccccagaagggatcctttcagatggtgcactgtaattgtagcgtccatgaatgctgtgaatgcctggttcccgtcccgactgcaaagctgaacgacactctgctcatgtgcctgaaaattacctccgggggcgttatctttcaaagtcctctcatgtctgtccaacccatcaacatggttaagccagatccaccactcggtcttcatatggagatcaccgacgacggcaacctgaagatcagttggtcttcccctcctttagtccccttcccattgcagtatcaggtgaagtatagcgaaaattccaccaccgtgatccgcgaggccgacaaaatcgtgagcgccacttcgctcctggttgatagtatcctgcctggatcgtcctatgaagtccaggtgcgcggtaagcgcctcgacggacctggaatctggtccgactggtcgactccccgggtgttcacaacgcaggatgtaatttatttccccccaaaaatcctgacctccgtcggaagcaacgtctcttttcactgtatttacaaaaaggagaacaaaatcgtgccgagtaaagaaattgtgtggtggatgaacctcgcagaaaaaattcctcaatcccagtacgacgtggtgagcgatcacgtcagtaaggttacattttttaatttgaatgagacaaaacctaggggaaagttcacctacgacgctgtgtactgttgtaatgagcacgagtgccatcatcgctacgccgaactatatgtgatcgatgtcaatatcaatatttcatgtgagaccgacgggtatcttacaaaaatgacctgcaggtggagtactagtacgatacagagcctggccgaatccaccctccaattacggtaccacaggtcttcactctattgttccgacataccatcaatacaccctatctctgagccgaaggactgctacctgcaatccgatggattctacgagtgcattttccagcctatctttctgctaagcggatacactatgtggataagaattaatcattcactgggtagtctggatagccctcccacctgtgtcctgcccgattctgtcgtaaaaccgctgcctcctagtagcgttaaggctgaaatcacaattaacatcgggctcctgaagatcagttgggaaaagcccgtgttccccgagaacaacttacagttccaaatcagatacgggttgtccggtaaggaagtgcaatggaagatgtacgaggtgtacgatgccaaaagcaaaagtgtgtctcttccagtgcccgacctctgcgctgtttatgctgttcaggttcgatgtaagagactggacggtctgggttactggtcaaattggagcaacccagcttatactgtagtcatggatatcaaggtccctatgagaggcccagagttttggcgtatcattaacggtgacacaatgaagaaagagaaaaatgtcaccctgctgtggaagcccttgatgaaaaatgatagcctgtgttctgtgcagcgatatgtaattaatcatcacacatcttgtaatggaacgtggtctgaagacgtagggaaccatacaaagttcacatttctgtggacagaacaggcccacacagtgacggttttggcaataaacagcatcggcgcatcagtagctaactttaatctgaccttttcttggccgatgtcaaaggtgaacatagtgcagtctctgtcggcctatcccctcaactccagctgtgtgatcgtctcctggatcttgagtcctagtgactataagctgatgtacttcatcatagaatggaagaatctcaatgaggacggcgagatcaaatggctccgcataagcagtagcgtgaagaagtattacatccatgaccactttatccctatcgagaaatatcagttttccctctaccccatctttatggagggggtgggaaagccaaagattataaacagtttcacgcaagacgatatcgagaaacaccagtcagatgctggtctgtatgtgatcgtccccgtcattatctcttcctcaattctgctactgggaaccctgttgatcagccaccagcgcatgaagaagctgttctgggaggatgtgccgaacccaaaaaactgctcatgggctcaggggctcaactttcagaagaaaatgccgggtacaaaggaacttctggggggcgggtggctgacctag

SEQ ID NO: 192845 - DNA, 2877 bp, synthetic construct
  misc_feature 1..2877: note = Description of Artificial Sequence: Synthetic coding sequence
  source 1..2877: mol_type = other DNA
atgatctgccagaagttctgcgtggtgctgctgcactgggagttcatttacgttatcactgctttcaatctttcctaccccatcacaccttggcggtttaagttatcctgcatgccacccaacagcacgtacgattatttcctcttgcctgctggtctcagcaagaacacatccaatagtaacggccattatgaaaccgccgttgagccaaaattcaacagcagcgggacccacttcagtaacttgtccaaaacaacatttcactgttgtttccggtctgagcaggacaggaattgctctctatgcgccgataatattgaagggaagaccttcgtctcaaccgtgaatagtttagtttttcaacagatcgatgcgaactggaatatccagtgttggctcaagggggatctgaaactgtttatctgctatgttgaatccctgttcaaaaatctgttcaggaattataactacaaggttcacctgctctatgtgttgcccgaagttctggaggattctcctctggtgcctcagaagggatcttttcagatggtgcactgtaactgtagcgttcacgaatgctgcgaatgtctcgtacccgtgcccacagccaagctgaacgacacccttttaatgtgtttaaagatcacctcaggtggcgtgatcttccagagccccttgatgtctgtccaacctattaacatggtcaaaccagaccctccactgggcttgcatatggagattacagatgatgggaacctgaaaattagctggtcatcgccaccccttgtacctttccctctccaatatcaagtcaagtactcggaaaacagcaccacggtcatcagggaggcggataagattgtgtctgctacaagccttttagtggattcaatcctgccagggtctagctacgaggttcaggtgagaggaaaacgactcgatggcccgggtatctggagtgattggagtactccacgtgtgtttaccacccaggatgtgatttatttccctcctaaaattctgacatctgtggggagtaatgtatctttccattgcatctacaagaaggaaaataagattgtaccaagtaaggagatcgtgtggtggatgaacctggccgaaaaaattccccagtcccagtacgacgtggtttcagatcacgtgtccaaagtgacctttttcaatctcaatgaaactaaaccgcgcggcaaattcacctacgatgccgtatactgctgtaatgagcatgaatgccaccatcggtacgcggagctatacgtgatcgacgtaaacatcaatatatcgtgcgagacagacggttacctcaccaagatgacatgccgatggagcacgtccactatccagagccttgccgaatcaacactacaactgcgttaccacaggtcatccctttattgctcagacattcctagtattcacccaatttccgagccgaaggattgctatttgcagagcgacggattttatgaatgtatctttcagcctatttttttgttgtctggctacacgatgtggatccgaatcaatcactctctgggatcactggatagcccaccgacctgcgtgctgcccgatagcgtggtgaagcccctccccccatcatcggtcaaggctgaaataactattaatatcggactgttgaaaatttcgtgggagaagcccgttttcccggaaaataacctgcagtttcagatcagatacggattaagtggcaaggaggttcagtggaagatgtacgaggtttatgacgctaagagcaaatcagtgtccctgcccgtgccagacctttgcgcggtgtatgctgtacaagtgaggtgcaagaggttggatggcttgggatactggagcaattggtccaaccccgcttacactgttgtcatggatattaaggttcctatgcgcggacccgaattttggaggattataaatggcgacactatgaagaaagaaaaaaatgttacactgctgtggaaaccgcttatgaaaaatgactctctctgcagcgtacagagatacgttatcaatcatcacacgtcatgcaatgggacatggagcgaagacgtcgggaaccacacaaaattcacctttctgtggactgagcaggcccacactgtgactgtgctggccattaattccatcggggcctccgtagcaaatttcaatctgacattcagctggcccatgtccaaagtgaatatcgtccaaagcttgtccgcctatccactgaattcctcctgcgttatcgtaagttggatcttgtccccatccgactacaagctcatgtactttattattgagtggaagaacctcaatgaggacggggaaatcaagtggctgcgcatcagttcctcagttaaaaaatattacatccatgatcacttcatccctattgagaagtaccagttctcactgtaccccatattcatggaaggcgtcggtaaaccaaaaattattaattccttcacccaggacgacattgaaaagcatcagtccgacgctgggttgtatgttattgtccctgtcatcatctccagtagtattttgctgctgggaaccctactgatctcccaccagaggatgaagaagctgttttgggaagacgtgcctaaccctaagaattgcagctgggcgcagggccttaatttccaaaaaatgcttgagggcagcatgttcgtaaagagtcatcaccattcgctcatcagtagcacgcaggggcacaagcactgcggccgaccccagggcccactgcaccgaaaaaccagagacctgtgttcattggtgtatctactgacgctcccccctttactttcttatgatcctgctaagtccccatccgtccggaacacgcaggagtag

SEQ ID NO: 192846 - DNA, 2691 bp, synthetic construct
  misc_feature 1..2691: note = Description of Artificial Sequence: Synthetic coding sequence
  source 1..2691: mol_type = other DNA
atgatctgccagaagttctgcgtggtgctgctgcactgggagttcatttacgtaataactgctttcaatttgtcctacccgatcacaccatggcgctttaaactgtcatgcatgccaccaaatagcacatatgactatttcctccttccggcaggactgagcaaaaacacgtctaattctaacggtcactacgagactgccgttgagccaaagtttaactcttccggcacccacttcagcaatttgagcaaaacaacattccactgctgttttcggtcggagcaggatagaaattgttccctttgtgctgataatatcgaggggaaaactttcgtgtcaactgtaaattcgttagtgtttcagcagatcgatgcaaattggaatattcagtgttggttgaagggagacctgaagctctttatatgctatgtagagtcgctctttaagaacctgtttcggaattacaattacaaggtgcacttactgtacgtgctgccggaggttctggaagattcgcccctcgtgcctcagaaaggttcattccagatggtgcactgcaactgctctgtgcatgagtgttgcgagtgcctagtccccgtgccaacggccaaactcaatgacaccctcctgatgtgcctgaagatcacgtccggaggcgtgatctttcagtcgccactgatgtccgtccagcctatcaacatggtcaagcccgacccgcctctcggtctccatatggaaatcaccgacgacggcaatcttaagatcagctggagttcgcccccactcgtgccattccctctgcagtatcaggtgaaatacagcgaaaatagcactactgtcatccgcgaggcagataagatcgtctcagctacctccctgctggtggatagcatcctgcctggatcaagctatgaggtacaagtgcgcggaaagagattagacggccctggcatctggagcgattggtcgacccctcgggttttcacaacacaggatgtcatctacttcccgccaaagatactcacctcggttggctccaacgttagcttccactgcatctataagaaggagaataagattgtaccaagtaaggaaatcgtgtggtggatgaatctcgccgaaaagatacctcagagccaatatgacgtggtctccgatcatgtgagtaaggtcacttttttcaatctgaatgagacaaagcccaggggaaagtttacctacgatgcagtctactgctgcaatgaacacgaatgccatcataggtacgccgagctgtatgtgattgatgtgaacatcaacataagctgcgagaccgatgggtatctgaccaaaatgacctgtcggtggagtacatctacaatccagagcctggcagagagcactcttcagttaagatatcaccgatcatccctctattgctccgacattccatcaatacaccccatttccgagccaaaagactgctacctccagtccgacggattttatgagtgtatctttcagcccatattcctactatctggatatactatgtggattcgcataaatcatagcctcggttcactagattctcccccaacctgcgtgctaccggattctgtagtcaagcctttaccccctagcagcgtgaaggccgagataacaattaatatcggactgctgaaaataagttgggagaagcccgttttcccagagaacaatttacaatttcagattcggtacgggttgagcggtaaagaggttcaatggaagatgtacgaggtttatgacgctaagagcaaatctgtgtccttgcctgtgcccgacctatgtgctgtctacgccgttcaggtccgctgtaaacgactggacggactgggctactggtccaattggtctaacccagcctacaccgtcgtgatggacatcaaggtgccaatgcgcgggccagagttctggaggattatcaacggtgacacaatgaagaaagagaaaaatgtcacattgttgtggaaacctctgatgaagaacgacagcttatgttcggtgcagagatacgttattaaccatcatacaagttgcaatgggacatggagcgaggacgtcgggaaccatacaaaatttacattcctttggacagagcaagctcacaccgttacagttttggccattaacagcatcggggcctcagtggccaacttcaacttgactttctcctggccaatgagcaaggtgaatatcgtgcagagcctctcagcttaccctctgaatagctcttgcgtaattgtgtcatggattctctccccctccgactataaattgatgtatttcatcattgaatggaaaaacttgaacgaagacggagagatcaagtggttacgcatcagctcctccgtcaaaaagtactacattcacgaccacttcatccccatagagaagtatcaattcagcctgtatcccatttttatggagggtgtcgggaaaccaaagatcattaacagctttacacaggatgatatcgagaagcatcagtcagatgctggcctgtatgtcattgtgccagtgatcataagttcaagtatccttttgctggggaccctcttaatttctcaccaaagaatgaaaaaattattctgggaggacgttcccaatcccaaaaactgctcttgggctcagggacttaacttccaaaagcggacagatatactttag

SEQ ID NO: 192847 - DNA, 699 bp, synthetic construct
  misc_feature 1..699: note = Description of Artificial Sequence: Synthetic coding sequence
  source 1..699: mol_type = other DNA
atgatgcccaccaccgtggtgagcctgctgagcaccaccgacctggagaaaggcagcgtttgtattagcgatcaatttaactccgtaaatttctctgaagctgagggcactgaggtaacatacgaagacgaatcccagcgccaaccgtttgtgaaatacgcaactctgattagtaactccaagccctctgaaaccggcgaggagcagggcctcatcaattccagcgtgactaaatgcttcagttctaagaattccccactgaaggactccttcagcaactctagttgggagattgaagcccaagccttcttcatcctttcagaccagcatcctaacatcataagcccgcatctgaccttcagtgaggggttggacgagcttctcaaactggaggggaactttccagaagagaataacgataaaaagtcaatatattatctgggagttacctcaatcaaaaaaagagaatctggggtcctcttgaccgacaaatcccgcgtgagttgtccattccctgccccttgtctgtttaccgacattcgcgtactgcaggactcctgttcgcactttgtggaaaacaatatcaatctgggcactagtagtaagaaaactttcgcttcatatatgccacagttccaaacttgttctacccagacacacaagatcatggagaacaaaatgtgtgaccttactgtttag

SEQ ID NO: 192848 - DNA, 396 bp, synthetic construct
  misc_feature 1..396: note = Description of Artificial Sequence: Synthetic coding sequence
  source 1..396: mol_type = other DNA
atggccggcgtgaaggccctggtggccctgagcttcagcggcgccatcggattgaccttcttgatgctgggttgcgccctggaggattacggtgtctattggcctctgttcgtactaatttttcatgccatttctcccatcccccacttcatcgctaaacgagtgacctatgatagcgatgccacaagctctgcgtgccgagaacttgcctatttttttacaacgggaatcgtagtgtctgccttcggcttccccgtgatcctggctagggttgctgtgattaagtggggtgcctgcggccttgtgctggctgggaacgccgtcatcttcctgactatccaagggtttttcctgatatttggcagaggtgatgatttctcctgggaacagtggtag

SEQ ID NO: 192849 - DNA, 396 bp, synthetic construct
  misc_feature 1..396: note = Description of Artificial Sequence: Synthetic coding sequence
  source 1..396: mol_type = other DNA
atggccggcatcaaggccctgatcagcctgagcttcggcggcgccattggtctgatgtttctgatgctagggtgcgctctgccaatatataacaaatactggcccctgttcgttctctttttctacattctgtcccccattccatactgcatcgcaagaaggctggtggacgataccgatgccatgagcaatgcctgtaaagaactagccatcttcctaaccaccggtatcgtcgtaagcgcattcggcctccccatcgtttttgcccgagcacatttgatagagtggggggcctgtgctttggttctgaccggcaataccgttatttttgccaccattctaggcttctttttggtgtttgggtctaatgacgactttagctggcaacaatggtag

SEQ ID NO: 192850 - DNA, 510 bp, synthetic construct
  misc_feature 1..510: note = Description of Artificial Sequence: Synthetic coding sequence
  source 1..510: mol_type = other DNA
atggccggcatcaaggccctgatcagcctgagcttcggcggcgccatcgggcttatgttcctgatgctggggtgtgcactgcccatttataacaagtactggcccctgttcgtgctgttcttctacattctttccccaattccatattgtattgctcggcgattggtggatgatacagacgccatgtccaatgcctgcaaggagctcgctatcttcctcacaactggtattgtggtgtctgccttcggcctgccgatcgtattcgcccgagctcatctgatgggccggctcccatttttcagtaagatgggaactgctgagtccgaaggcagggaaaccctaacacagcaactgcccttgccggccgcagccatgcgacgactgctgcctgctagccgcgtgagcactcaacccgtccttcggcttgctgattccgcagaatctctgcttgggcgccccgctctgtgggcactcgggtttctgctgtgcccaccaagtcaggcccagtag

SEQ ID NO: 192851 - DNA, 3195 bp, synthetic construct
  misc_feature 1..3195: note = Description of Artificial Sequence: Synthetic coding sequence
  source 1..3195: mol_type = other DNA
atgatgaagttccggttccggcggcagggcgccgacccccagcgggagaaattgaaacaggaacttttcgccttcaacaagactgtcgagcatggctttcctaaccagccttcagcccttgcttttgacccagaactgagaataatggctattggcaccagatctggcgctgtgaaaatctacggtgctccaggggtagagttcaccggcctccacagagacgccgctactgtgacacagatgcacttcctgaccggtcaaggtagactcctgtcgctgctggatgactcatctctgcacctatgggagatcgtccaccataatgggtgtgcgcaccttgaggaggccctcagcttccagctgccatctcgccccggcttcgatggtgcctctgcccccctgtcgctgacaagggtgaccgtcgtgctgctggtcgccgcgtctgatattgctgccctgggaaccgagggcagctctgtgttcttcctggacgtgaccacccttaccctacttgaaggccaaacgttggcccccggagaggtgctgaggtccgttcctgacgattacaggtgcggtaaggcgttggggccagttgagagtctgcagggtcatctccgggatccaacgaagatcctcatcggctacagtcgaggcctgctggtgatatggaaccaagcctcccaatgtgttgaccacatattcttaggaaaccagcagctcgagtctctgtgctggggacgcgactccagtactgtcgtttcttcacattcggatggtagctacgctgtgtggtcggtagatgccggttcatttccaacattacagcctaccgtggccacgacaccttatgggccgttcccatgcaaggccatcaacaagatcctatggcggaattgcgagagcgggggacacttcatcatcttctcaggaggcatgcctcgagccagttacggcgatcggcactgcgtctccgtgttacgcgccgaaactttggtgacactggacttcacatccaggattattgacttctttacagtgcattcaacaagacccgaagacgagtttgatgacccacaagcactcgccgttctgctcgaggaggagctcgtagtgttagacctccagacccccggctggcccgcagtgcccgcgccttacttggcgcccctgcattcatctgccatcacctgctcggcccacgtcgcatccgttccagctaaactatgggctaggatcgtgagcgccggggagcagcagtctccacagccagtgtcatcggccctcagctggccgattacgggcggaaggaacttggcacaggaaccgtcccagaggggcctgctgctcactggccacgaggatggtaccgttaggttctgggacgcatcgggtgtggctctccggcctctgtataagctgtcaacggccgggttgtttcagactgactgcgaacacgcagatagtttggctcaggcagctgaggatgattggcctccatttaggaaggtgggctgctttgatccttatagcgacgaccctcgcttaggggtgcagaaagtagcactctgcaagtatacggctcagatggtcgttgcaggtaccgctggccaggtactcgtactagagctgtcagacgtcccagtggagcaggctgtaagtgttgccatcatagatttgctgcaagatagggagggatttacctggaaggggcacgaacggctatctcctcgaaccggccccttaccttggcctgctggtttccagcctcgggtgttggtgcagtgtctgccccccgctgccgtcacagcggtgaccctgcacaccgaatggagcttagtcgctttcggcacgtctcacggttttgggttatttgactaccagagaaaatctccagtgctggcaaggtgcactcttcatcccaacgattccctggccatggaagggccactgtcccgagtgaagtccctgaagaaatccctgagacagagctttcgccggatcaggaaatcacgcgtgtctggtaagaaaagagctgctaacgcctccagcaagttgcaggaggcaaatgcccagttagccgaacaggcatgcccacacgatgtggagatgaccccagttcagcggaggatagaaccccggagcgccgacgacagtctgagcggggtggtcaggtgcctgtactttgctgataccttcctgagggatggtgcccaccacgggcccaccatgtgggccggtaccaattctgggtcggtctttgcatatgctttggaagtgcctgccgccgccgttggtggagaaaagcgacccgagcaagcagttgaggctgtcctgggtaaggaagtgcagttaatgcacagggctccagtggtcgccatagctgttctggacgggcgcgggcggcccctccctgagccctacgaggccagtagagaccttgcacaggctccagacatgcagggagggcacgccgtcctgattgcatcggaagagcagtttaaagtttttaccctgcctaaggtgtctgccaaaacaaaattcaaactgaccgcacacgaaggatgtcgcgtccggaaggtcgcccttgccacctttgcaagcgtcgcgtgcgaagactacgccgagacctgcctcgcctgcctgaccaaccttggggacgtgcatgtgttctcagtccccggactgcgcccgcaggtgcactactcttgcattcggaaggaagatatctctgggattgccagctgtgtctttacgcggcatggccagggcttttacctgatcagtccaagcgaattcgaaaggttctcactgtccgccaggaacataacagagccgctgtgtagtctcgatattaattggcctagagacgctactcaggcatcttatcggattcgtgaatcccccaaactctcgcaggctaatggcacacccagcattctgctggctcctcagtccctcgacgggtccccggatcccgcccattctatgggaccagacaccccagaaccccccgaggcagccctgagtcctatgtccattgattctgcgacttcggccgacactacattggatacaaccggggacgtgactgtagaggacgtgaaagattttctcggcagctctgaggagtccgaaaagaatctcagaaatcttgccgaggatgaagcccacgcctgcgcgattctcatcaagtag

SEQ ID NO: 192852 - DNA, 1056 bp, synthetic construct
  misc_feature 1..1056: note = Description of Artificial Sequence: Synthetic coding sequence
  source 1..1056: mol_type = other DNA
gagctgcccagcgccgcccccgacagcaccctgctgctgaccgcccagcactgggtggctaatctgtttatcctggccactctgattggatggaccgtgcggtccttcttcctgggaaggatggaaacttgttgctcacacctggggcttcgctccggaaggagattcgccgtctctatcggatactggcacgacccctacattcagcactttgtgcgcctgtcaaaggaaaggaaagccccggaaatcaatcgcggttactttgccagggtacatggcgtgtctcagctgataaaggccttcctacgtaaaacagaatgccactgtcagatcgtgaatctgggggcaggaatggatactacattctggcggctaaaggatgaggatctgcttccatccaagtacttcgaagtcgattttcctatgatcgtgactagaaagctgcattcgatcaaatgcaagccccctttgtccagcccaatcctcgaactccatagcgaagacacactgcaaatggacgggcacattctggactcaaagcggtatgctgtgatcggcgccgatctcagagatctgtcagagctggaggagaaacttaagaaatgcaatatgaatactcagctccctaccctgttgatagctgagtgtgtgcttgtttacatgacaccggaacagtcagctaacctactgaaatgggccgccaatagctttgaacgcgcgatgttcattaactacgaacaagttaacatgggcgataggtttggccagattatgatagagaaccttcggcggagacagtgtgatctagccggcgtcgaaacctgcaaaagcctggaaagccaaaaggaacggctgctaagcaacgggtgggagaccgcttccgcagtggacatgatggagctttataatcgcctacctcgagcagaggtgtcgcggattgaaagcctcgaatttctggatgagatggagctgctggaacaactcatgcggcactactgcctgtgctgggcgacaaagggcggaaatgaattaggcctgaaggagatcacttattag

SEQ ID NO: 192853 - DNA, 840 bp, synthetic construct
  misc_feature 1..840: note = Description of Artificial Sequence: Synthetic coding sequence
  source 1..840: mol_type = other DNA
atggccacccggcagcgggagagcagcatcaccagctgctgcagcacatcatcttgcgacgctgatgatgagggcgtccggggcacctgcgaagacgccagtctgtgcaagaggttcgccgtgtcaatcggttactggcacgacccctatattcagcactttgtaaggttatccaaggagcgcaaggcacctgagatcaacagaggctatttcgccagagtgcacggggtgtctcaactgatcaaagcctttttgcgtaagacagagtgtcattgtcagatcgtgaacttaggcgctggtatggacacaaccttttggcgcctgaaagacgaggatctgttgcccagtaaatacttcgaggtcgacttccctatgattgttaccagaaaattgcactccatcaagctgccaactctgcttatcgccgaatgtgtcctagtgtacatgactcctgaacagtccgcaaatctattaaaatgggccgcaaactcctttgagagggccatgtttattaactacgaacaagtcaacatgggtgaccggtttgggcagattatgatcgagaatttgagacgacgccagtgtgacctggcaggcgtagagacatgcaaatctctggagtcacagaaggaacggctcctgtcaaatggatgggagacggcttcagccgtggatatgatggaactttacaaccggcttcccagagctgaggtcagtcggattgagagtctggagtttctggacgagatggaactgctcgaacagctgatgcgtcactattgtctgtgctgggctacaaaggggggtaatgaactgggcctaaaggaaatcacatactag

SEQ ID NO: 192854 - DNA, 1005 bp, synthetic construct
  misc_feature 1..1005: note = Description of Artificial Sequence: Synthetic coding sequence
  source 1..1005: mol_type = other DNA
atggccacccggcagcgggagagcagcatcaccagctgctgcagcacgagcagttgcgatgctgatgacgagggtgttagagggacatgcgaggatgcgagcttatgcaagcgcttcgccgtttcaatcggatactggcacgatccctatatacagcattttgtccgcttatcgaaggagcgaaaagctcccgagattaatcgaggctacttcgccagagtgcatggggtttcacagctgattaaggcgtttctaaggaaaaccgagtgtcactgtcaaatcgtcaatctgggagccgggatggacacaactttctggagactaaaggatgaggacctcctgccatctaaatacttcgaagtagattttcctatgatcgtgactcggaagctgcatagtatcaagtgtaagccgccattgagcagccccatcctcgagctgcactctgaagacaccctgcagatggacggtcatatccttgactccaagcgatacgccgtgataggtgctgatctgagagacctgtcagagcttgaagaaaagctcaaaaagtgcaatatgaatacccagttgcctacactccttatcgccgaatgcgtgcttgtttatatgacacctgagcagtctgccaatctgctgaagtgggcggctaacagtttcgaacgagcaatgtttattaactatgaacaggtgaatatgggagacagatttggccagattatgatcgagaatctcaggcggcgacagtgtgatttggccggggtagaaacctgtaaatccctggagtctcagaaggaaaggctgctcagtaacggctgggagaccgcctcagccgtcgacatgatggaactttacaatcgactgcctagagccgaggtctcaaggatcgaatcccttgagtttcttgacgaaatggaactgctggagcagctgatgcgacactactgcctttgctgggccacaaaaggcggcaacgagctcggcttgaaggaaatcacatactag

SEQ ID NO: 192855 - DNA, 2415 bp, synthetic construct
  misc_feature 1..2415: note = Description of Artificial Sequence: Synthetic coding sequence
  source 1..2415: mol_type = other DNA
atggccgtgcgggccctgaagctgctgaccaccctgctggccgtggtggccgcagctagtcaggccgaggtagagtcagaggctggatggggaatggtcacgccagacctgctgttcgcggaggggacagctgcatatgctcgcggcgattggcctggggtggttctctctatggaaagggcgctcagaagcagggccgctctgcgggccctgcgtctgcgctgtagaactcaatgtgcagctgacttcccctgggagctggatcctgattggtccccatctcccgcgcaggcctctggagccgctgctctgcgggatctttcgttcttcggggggttgctccgcagagcagcgtgcctcaggagatgcctcggtcctcccgccgcacatagtctcagcgaggaaatggaacttgagttccgaaagcgcagcccgtacaattacctccaagttgcttatttcaaaatcaacaagcttgagaaggcggtcgcagccgcccatacgttctttgtcggcaaccccgaacacatggaaatgcagcagaaccttgactattaccagacaatgtcaggcgtgaaagaggcagatttcaaggatctggaaacacaaccccatatgcaggagtttcggcttggcgtgaggctatatagtgaggagcagcctcaggaagcagtgccccacttggaggcagccttacaggaatacttcgttgcttacgaagagtgccgcgcgctgtgcgagggcccatacgactatgacgggtataattatctggagtacaacgctgacctatttcaggctatcaccgaccattatattcaggtgcttaattgtaagcagaattgtgtgactgagctagccagccatccctcacgcgagaagccttttgaagacttcttgccttcccattataattatttgcagttcgcatattataacatcggtaactatacccaggccgtggaatgcgccaagacttatcttctcttttttcctaacgacgaggtcatgaaccaaaacctggcttattacgccgcgatgttgggtgaagaacacacccggtcgatcggcccaagggagtctgccaaggaatatcgacagcgttctctgcttgagaaggaattgctgtttttcgcgtatgacgtgtttggaatcccattcgtggaccccgatagctggacaccagaggaggtgattccaaagaggcttcaagagaaacagaagagtgaaagagaaaccgcggtacgcatctctcaagagattggaaacttgatgaaggaaatcgagaccctcgttgaggagaagacaaaggaaagcctcgacgttagtaggctgacgagggagggaggaccactgctgtacgagggaattagcctgacaatgaacagcaaactccttaatggatcccaaagggtcgtgatggatggtgtgattagcgatcatgagtgccaggaactccagcggctaaccaatgtcgctgctaccagcggcgacggatacagggggcaaacctcgccccacacgccaaacgagaaattctatggagtgaccgtgttcaaggcgttgaaactcggacaggaaggcaaggtcccattgcaaagtgcccacctgtattataatgtgacagagaaggttcggaggattatggagagttacttcagactggataccccattgtatttcagctattctcatctggtgtgtaggacggcaattgaggaggtacaggcagaacgcaaggacgactcacacccagtccatgtcgataactgtatactcaatgcagagactctggtttgcgtgaaggagccaccggcgtacaccttccgagactatagcgctatcctgtacctgaacggcgacttcgacggcgggaatttctatttcacagaactggacgcaaaaaccgttacagcggaagtgcagccacagtgcggtcgcgcggtcggctttagttctggaactgagaaccctcacggagtgaaagctgtgacccggggtcaaaggtgcgccattgccttgtggttcaccctggacccacggcatagtgagagggtccgggcggccagagcaggcgaatcctcttggtgctgcggggatccattccctgagcgtccatggtttgcattcctgttccccaaatctcattgtcagtggctgagacacgagaggtctacatgggacacgagcagcaacgcactgtccctgtggagtcattgtttggtgttgccgggtccggccgtgaatgggattcaggtcgggaaagaagtcaaaaccgggagtgatgcagaatttctcgttccttccctgggtccaacaagcgcagtgctcttccagcgtgtcggacccgcagggaaagagatgtctttgggcccactcagaaatctcccttgtcccctgggcagcagctcatag

SEQ ID NO: 192856 - DNA, 2211 bp, synthetic construct
  misc_feature 1..2211: note = Description of Artificial Sequence: Synthetic coding sequence
  source 1..2211: mol_type = other DNA
atggccgtgcgggccctgaagctgctgaccaccctgctggccgtggtcgccgctgcctctcaggcagaggtcgagtccgaagctggttggggcatggtcacgccagatctcctcttcgctgagggcacagctgcttacgcaaggggagactggccaggagtcgtgctttctatggagcgcgcactccggagccgagctgcactccgggcactccggctgcggtgcaggacgcagtgcgcggctgattttccttgggagctcgaccctgactggtcgccctcgcccgcgcaggccagtggagcagccgccctgagggacctgagtttctttggcggcctgctacggagggccgcttgcctcagaaggtgtctcggccctcctgctgcccactccctgagtgaggagatggagctggaattccggaaacggagtccgtacaattacctgcaggtagcttacttcaaaatcaacaagctcgaaaaagctgtggccgcagctcacacattcttcgtcggcaaccccgaacacatggaaatgcagcaaaaccttgactactaccagaccatgagtggagtgaaagaggcggacttcaaagaccttgagacccaacctcacatgcaagaatttcggctaggggtcaggctgtattctgaggagcagcctcaggaggcagtgcctcaccttgaagcagcgcttcaggagtatttcgtcgcatatgaagagtgccgcgctctgtgcgagggcccatatgactacgatggctacaattacctcgaatacaatgcagacctgttccaggcaattacggaccactatatccaagttctgaactgtaaacaaaattgtgtcacagaactggcatcacaccccagcagggagaaaccgttcgaggactttcttcccagccactacaattacctgcaattcgcctattataatatcggtaattacacccaagccgtggagtgcgccaagacatatctcttgttcttcccaaacgacgaagtgatgaaccagaatctggcttactacgctgctatgctgggggaggaacacacccgaagcatcggcccacgtgagtcggcgaaagagtacagacagcggtctcttctcgagaaagaactcctgttcttcgcgtatgatgttttcggaataccattcgtggatcccgattcttggactcctgaggaagtgattcccaagagactacaggagaagcaaaagagcgaaagggaaacggcagtgagaatttcacaggaaatcggcaacttgatgaaggagatcgaaacacttgtggaggagaagaccaaggaatcccttgacgtaagccggctcaccagggaggggggccccctgctgtacgaaggtatatcacttactatgaatagcaaacttctcaatgggtcccagcgagtggtgatggatggtgtgatttcagaccacgagtgtcaggagcttcagcgcttgaccaatgtcgccgccacatcaggtgatggctacagaggccaaacgtctccacacacacctaatgagaaattttacggggttaccgtgttcaaagccctgaaactcgggcaggagggaaaagtacctctgcagtcggcgcacctgtactacaatgtcactgagaaagtgaggcgtattatggagagttacttccggttggacaccccactgtacttttcctactcgcatctggtatgcagaacagccattgaggaagttcaagcagagcgcaaggacgactcacacccagtgcatgtggacaattgcattttgaatgccgaaacgttggtttgtgtcaaagaacctccagcctataccttccgtgattatagcgctatactgtacttaaatggcgattttgatgggggaaacttctatttcaccgagttggacgctaagacagtgaccgcagaagtgcagcctcagtgcgggagagctgtcggattctcctcaggaaccgagaatccacatggggtgaaagccgttactcggggtcagcgatgcgcaattgctctctggtttacattagacccacgtcactcagagcgagaccgggtgcaagctgatgatcttgtaaagatgctgttctcacctgaggaaatggatttgagtcaggagcaaccactggatgcacagcagggacctcctgaacccgcccaggaatccctcagtggatcagagtctaagcctaaggatgaactttag

SEQ ID NO: 192857 - DNA, 2094 bp, synthetic construct
  misc_feature 1..2094: note = Description of Artificial Sequence: Synthetic coding sequence
  source 1..2094: mol_type = other DNA
atggccgtgcgggccctgaagctgctgaccaccctgctggccgtggtggcggcagccagtcaggcagaggttgagagcgaggctggatgggggatggtcactccagatttgctgttcgctgagggtacggcagcctacgcaaggggagattggcctggagtggttctatccatggagagagccctgcgatctcgcgcagctttgagggcactgagactgcgctgtaggacccagtgtgcagccgatttcccttgggaactggaccccgactggtccccctcccccgcccaggcttccggcgccgctgccctgcgggacctcagctttttcggcggtctgttgcggcgcgccgcatgtttgcggagatgcttagggcctccagctgctcactctctcagtgaggaaatggagctggaatttagaaagcgttcaccctataactatttgcaggtagcatacttcaagattaacaagctggaaaaggccgtggccgctgcgcacacattctttgtcggtaatcctgagcatatggagatgcagcaaaacctggactattaccagacaatgtctggtgtgaaggaggcagactttaaggacctcgaaacacagcctcatatgcaggaatttagactgggggtgaggctctactctgaagaacagccacaggaagcagtcccccacctggaggctgcactgcaggagtactttgtggcttatgaggaatgcagggctctgtgtgaaggcccctacgactacgatggctacaattatttggaatacaacgcagacctttttcaggccatcacggaccactacattcaagtgctgaattgtaagcagaactgcgtaaccgaattggcgtcgcacccttcacgcgaaaaaccgttcgaggactttctacctagccattacaattatttacagttcgcctactataacatcggcaactatacacaggccgttgagtgtgccaaaacgtatttgcttttttttcctaatgacgaggtgatgaaccagaatctcgcatactacgctgccatgttgggagaagagcacactcgaagtatcggacctcgcgagagtgctaaggaatatagacagcggagtttgctagagaaagaactgctgtttttcgcttatgacgttttcggaatccctttcgtcgatcctgactcgtggacccctgaggaagtgattccgaaacgacttcaggaaaagcaaaaaagtgaacgcgagacggcggtaaggatctctcaggaaattggcaacttgatgaaggagatagaaacacttgtcgaagagaaaactaaagaaagcctggatgttagtcggctgactcgcgagggtggacccctgctttatgaagggatctcattgactatgaactccaaattgctgaacggctcccaacgggttgtgatggacggcgtgataagcgaccacgagtgccaggaactccagcgcttgacaaatgttgcggctactagtggcgacggatacagaggtcagacctccccccatacccctaatgagaagttttatggagtaacagtcttcaaagccctgaaactggggcaagaaggaaaggtacccctgcagtctgctcacttgtattacaatgtcacggaaaaagttagaagaatcatggaatcctactttagattggacacacctctgtacttttcttactcccacctggtatgtcgcacggcgattgaggaggtgcaagctgagagaaaagatgacagccaccctgtgcacgtggacaattgcattctgaatgcagagactcttgtatgcgtgaaggaaccacccgcctatacctttagagattactccgccatcttgtatctgaatggggattttgacggcgggaacttctactttaccgaattagacgccaagaccgtaaccgccgaggtgcagccacagtgcggacgggccgtgggcttctcaagtggaacggagaatcctcatggagtgaaggccgttacccgcggccagagatgtgctatcgcgctctggtttacactcgaccccaggcacagtgagcgtgtgagggccgctcgggccggtcagggagctggccgatag

SEQ ID NO: 192858 - DNA, 459 bp, synthetic construct
  misc_feature 1..459: note = Description of Artificial Sequence: Synthetic coding sequence
  source 1..459: mol_type = other DNA
tgagagcgggagaccgccgtgcggatcagccaggagatcggcaacctaatgaaggaaatagaaacactggtggaggagaagacgaaagagtctctggatgtcagtcgattgacacgcgaaggcgggccacttctatatgaaggaatctctctgacaatgaatagcaaactcttgaatggctcccagagggtcgtgatggacggggtgattagcgaccatgagtgccaggaactgcaaaggctcacaaatgtggccgcaacttctggcgacgggtaccggggccagacatcgccccacacaccaaatgaaaagttttacggggtgacagtgtttaaagcattaaaacgaggagtggtgctggtcagatttcataccgcggacaaagacgttcctgagaccggtcagttcacaaaggaacggggactccttggcctgaccgtcccgtgcgggtggggttag

SEQ ID NO: 192859 - DNA, 1806 bp, synthetic construct
  misc_feature 1..1806: note = Description of Artificial Sequence: Synthetic coding sequence
  source 1..1806: mol_type = other DNA
atggagctggagttccggaagcggagcccctacaactacctgcaggtggcttacttcaaaattaataaacttgagaaagccgtcgctgcagctcatacattctttgttggaaatccagagcacatggagatgcagcagaatttggattactatcaaactatgtctggcgtcaaggaggctgactttaaagatcttgaaacgcagccacatatgcaagagtttcgccttggtgtacggttgtactctgaggagcagccccaggaggcagttccccacttggaggctgctttacaggagtatttcgtggcctacgaggagtgccgggctttgtgcgaaggtccctacgactatgacggctacaactacctcgaatacaatgcggatctctttcaggccatcactgatcattacatccaggtgctcaactgcaaacagaattgtgttaccgaactggcatcgcacccctcccgcgagaaacctttcgaagatttcctgccatctcactacaattatttacaattcgcctactataacatcggtaactacacgcaggcagtcgagtgcgcaaaaacctacttgctgtttttccctaacgacgaagtgatgaatcagaatctcgcctactatgccgctatgctcggcgaagagcacacaaggtcaatcggcccaagagagtcagctaaggagtacagacagcgttcgctccttgaaaaagagctcctttttttcgcctatgacgtgtttgggattcctttcgtggatcctgacagctggacacctgaggaggtcatccctaaacgcttgcaagaaaagcagaaatcagaaagggagacagccgttcgaattagtcaggaaatcggaaacctcatgaaggaaattgaaacccttgtcgaggaaaagaccaaggagtcactggacgttagcaggctgactagagagggcggacctttgctctatgagggcatttcgctgaccatgaattcaaaactcctgaatggaagtcagagggtagtcatggatggggtgatcagcgaccacgaatgtcaagaactgcagaggcttacaaatgtggccgctacttcaggagatggctatagaggacagacgtcacctcatactccaaatgagaaattctatggagtgacagtgttcaaggccctgaagctcggccaggagggaaaagtacccttacagagcgctcacttgtattacaatgtgacagaaaaggtgcgcaggatcatggagagctattttagacttgacacccctctttatttctcatacagtcacctggtttgccggacagcaattgaggaagtccaggctgaacgcaaagacgatagccatccagtgcacgtggacaattgtatactgaacgccgagactctggtttgcgttaaagaaccgccggcctatacttttcgggactactcggcgattctgtacctgaatggcgatttcgatggcggaaacttctattttaccgagctggacgctaagactgtgaccgccgaagtgcagccacagtgtggccgtgccgtaggtttttctagtggcaccgagaacccacacggcgtcaaggccgtgaccagagggcagcgatgcgccatagcgttgtggtttacactggaccctcgccactctgaacgcgacagagtccaagcagacgatctggtgaagatgctgttttcccctgaagagatggatctttcccaagagcaacctctggacgcacagcaagggccaccagagcccgcacaggagagtctctcgggatctgagtcgaagcctaaggacgaattgtag

SEQ ID NO: 192860 - DNA, 2355 bp, synthetic construct
  misc_feature 1..2355: note = Description of Artificial Sequence: Synthetic coding sequence
  source 1..2355: mol_type = other DNA
atgaccagccccgccgccgcccagagccgggagatcgactgcctgtcccctgaggcgcagaagctcgcagaggcccggctggccgccaagcgggccgcacgcgcagaagctcgggaaatccggatgaaggaactggagaggcagcagaaggaggaggacagcgagcggtactcacggcgcagccggagaaacacttctgcttccgacgaggacgaaaggatgtctgtgggctcacggggctcgctccgcgtcgaggaaaggcctgagaaggattttacagaaaaaggatcccggaatatgcccggactgtctgccgccaccttggcgagcctcggcggaacctcaagccggcggggctcaggggacacttcaataagtattgataccgaagcctcaatacgagagatcaaggactctctggcagaggtggaggagaagtataagaaagccatggtatctaatgcgcaacttgataacgagaagactaactttatgtaccaggtcgacaccctcaaagatatgttgctggaactcgaggaacagttggcagagagccgccgccagtacgaggagaagaacaaggagtttgagagggaaaaacatgctcattcaattttacaatttcagtttgcagaggtgaaggaggccctgaagcaaagggaagaaatgctggaaaagcatgggatcatcttgaatagcgagatcgctacaaacggagagacgtccgacacactgaacaatgtaggatatcaagggccaacaaaaatgacgaaagaggagcttaatgctctcaaatcaacaggagatggaacactgggacgtgcctccgaggtggaggtgaaaaacgagatcgtggctaatgtaggaaaacgggagatcctgcataataccgagaaggagcagcacactgaagataccgtcaaggattgcgtggatattgaagtgtttcccgcgggagagaatacggaggaccagaagtcaagtgaggataccgcaccgttccttggcacacttgccggcgccacctatgaagagcaggttcagtcacagattctggagagcagttctctgccagagaacactgtgcaagtggagagcaacgaggtaatgggggctcccgacgatcgtacacggacaccactggaaccatctaactgctggtccgatttggatggagggaatcataccgagaatgtgggggaggcagcagtgacccaggtagaggagcaagctggaacagtcgcttcctgcccactgggacactcagacgataccgtttaccacgatgataaatgtatggttgaggtgccacaggagcttgaaacctccacaggacacagtctggagaaggagttcaccaatcaagaagcagcagagcccaaggaggtgccggcgcattctaccgaggtgggcagagaccataacgaggaggagggtgaggagaccgggctgcgcgatgagaaacccatcaaaactgaggttcccggctctccagcaggcacggagggtaattgtcaggaagctacagggcccagcacagttgacacccagaacgagccactagatatgaaggagcccgatgaggagaaatccgatcagcagggcgaggcactagacagcagccagaagaagaccaagaacaaaaagaaaaagaataagaagaaaaaatcacccgtgccagtggaaactttaaaggatgtaaagaaggagttaacttatcagaataccgatctttctgaaatcaaagaggaagaacaggtgaaaagtactgacagaaagtccgcggtggaggcccaaaatgaggtgacagagaacccaaaacagaaaatcgcagccgagtccagcgaaaacgtggactgccccgaaaatcccaaaataaagcttgatgggaaactcgaccaagaaggcgatgacgtgcagactgccgccgaagaagtgctggctgacggagacaccctggacttcgaggacgacacagttcagagcagcggcccaagagccggtggggaggagttagatgagggcgtggctaaagacaatgctaagatagatggagccacgcaaagcagccctgccgagcccaaatcagaagatgcggaccgctgcacccttcccgagcacgagtcacccagtcaggacatctctgacgcctgcgaagccgagtcaactgaaaggtgtgaaatgtccgagcacccttcccaaacagttcgaaaagcactggattccaactcactggaaaacgacgatttgagcgcacccggcagggagccggggcactttaatccagaatcgcgggaagacacacgtggaggcaacgaaaagggtaagtccaaagaagactgtactatgagctag

SEQ ID NO: 192861 - DNA, 2259 bp, synthetic construct
  misc_feature 1..2259: note = Description of Artificial Sequence: Synthetic coding sequence
  source 1..2259: mol_type = other DNA
atgaccagccccgccgccgcccagagccgggagatcgactgcctgtccccagaggcacagaaattggccgaggccagactcgcggccaagagagctgccagggccgaggctcgcgagatcagaatgaaagagctggagcgacagcagaaagaggtggaggaaagaccagaaaaggattttaccgaaaaagggtccagaaacatgccgggcctcagcgcagccacgttggctagcctgggcggaacctcttcccggaggggaagcggcgataccagtatcagcattgatactgaagcttcaattagagagatcaaagactctctggccgaggtggaagagaagtataagaaggccatggtgtccaacgcgcagctcgacaatgagaagacaaattttatgtaccaggtggacaccttgaaggacatgctgctggaacttgaagagcagctggccgagtcgcgcaggcagtacgaagaaaagaacaaagaattcgaacgcgagaaacatgcccattccattttacagttccagttcgccgaggtcaaggaggcccttaaacaacgagaggaaatgcttgaaaagcatggcattattctgaacagtgagatagccactaacggagaaacctctgacactctgaacaacgtgggctaccaagggccaaccaaaatgacaaaggaagagctgaacgccctgaagtcaacgggcgacgggaccctaggcagagccagtgaagtggaggttaagaatgaaattgtggcaaatgtcggaaaaagggagattctgcacaacaccgaaaaggagcagcataccgaggacactgtgaaggactgcgtcgacattgaggtgttccctgccggtgagaataccgaagatcagaaaagctccgaagatacggctccctttctgggtacgttggccggcgcaacctacgaggaacaggtccagtcccaaattctggaaagctccagtctgcctgagaacaccgttcaggttgagtcgaatgaagttatgggcgctccagatgataggaccaggaccccattagaaccatcaaactgttggagcgatctcgacggagggaatcacaccgaaaatgtgggtgaggcagcagtgactcaagtcgaggaacaggcaggtacagtggccagttgtcctctggggcactccgatgataccgtttaccatgacgataagtgtatggtggaggtgccgcaggagctggagacctcgacgggacactctctggagaaagaattcaccaaccaggaggccgccgaaccgaaggaggtccccgcgcactctactgaagtgggcagggatcacaatgaagaagaaggcgaagagaccggcctaagggacgagaagcctattaagactgaagtcccaggcagcccggcaggtactgaaggtaattgccaggaggccaccggcccgtctaccgttgatactcagaatgagcctctggacatgaaagagcctgatgaagaaaagtccgaccaacagggtgaggcactggatagttcgcagaagaaaacaaaaaacaagaaaaaaaagaataaaaaaaaaaagagccctgtgccggtggagacactaaaagatgtcaagaaagaattgacttatcagaatactgacctgtccgagatcaaggaggaagagcaggtgaagtctaccgatcgcaagtctgccgtggaggcccaaaatgaagtcacggagaatccaaaacagaagattgcagccgagtcctcagagaacgtcgactgtccagagaaccctaaaataaaactggatggtaaactggaccaagagggggatgacgtgcagacggccgccgaggaagtactggccgatggtgatactctcgatttcgaagatgatacagttcagagctccggccctcgtgctggcggagaagaactggatgagggggtggccaaggataacgccaaaattgacggcgcaacccaaagttccccggccgaacctaaatctgaggacgcggatagatgtaccctgccagaacacgaaagcccctcgcaggacatctccgatgcctgtgaagcagagagtacagagagatgcgagatgtccgaacatcccagccagactgtcaggaaggctcttgattctaattccctcgagaatgatgatctgagcgctcctggcagagagcctggccacttcaatcctgaaagtcgcgaggataccagaggcggaaatgagaagggtaagagtaaggaggactgcacaatgagctag

SEQ ID NO: 192862 - DNA, 1893 bp, synthetic construct
  misc_feature 1..1893: note = Description of Artificial Sequence: Synthetic coding sequence
  source 1..1893: mol_type = other DNA
atgaccagccccgccgccgcccagagccgggagatcgactgcctgtcacctgaagcccagaagctggcggaggctcggcttgcagcgaagcgcgccgcccgagcagaggctagggagatacgtatgaaggaacttgagcgacagcagaaggaggtcacctcagcccaagagaaatactatggattagatacaaagtggggagacatcgagcaatggatggaagattcagagcggtacagccgtaggtccaggcggaatacaagtgctagcgatgaggatgagagaatgagtgtaggttcacggggatccttgcgaagccaacccgatctagagtacggaggtccatatgcatggactaatggatatgacggagagttgtacggtagtcagagtcttaacagaaggagcggccgccctagttgtctctacagcgctgcaaggcccagcgggagttacagggctagtgtgctagacgaaggctctttcggcggtactaggcgggggtctacatcaggctcacgagccccatctgaatactcgggacacttgaacagtagcagcagggcctctagccgagcctcgagcgcacgggcctcccctgtcgtggaggagagacctgagaaagactttacagagaaggggtcaaggaatatgcctgggttgagtgcagcgacgctcgcctccttagggggaaccagcagtcgccgggggtctggtgacacttctatcagcatcgacaccgaggcttctatccgcgagatcaaggagctgaacgaattaaaggaccagattcaggacgtagaaggaaagtacatgcaggggctaaaggaaatgaaagacagtctcgcagaggtagaggagaagtataaaaaggcaatggtttctaacgcacaactcgataacgagaaaacaaacttcatgtaccaggtggatacactgaaagatatgctgctagagctagaagagcagctcgccgagagccgccgccaatacgaagagaagaataaagagttcgaacgtgagaagcatgcgcattctatcctccaatttcaatttgcagaagttaaagaggcccttaagcagcgcgaggagatgctcgaggagatcaggcagttacagcaaaagcaggcttcaagtattagagagataagcgatctccaggaaactattgagtggaaagataagaagatcggcgcccttgaacgccagaaggagtttttcgattctgtgcggagcgaacgcgatgatctgcgagaagaggttgtcatgctcaaagaagagttgaaaaaacacggtataattctgaatagcgagattgctacaaacggggaaacttctgatacccttaacaatgttggctatcagggccccacgaaaatgacaaaagaggagctgaatgcgctgaagagtactggcgacggcactctggacattagattaaagaagctggttgacgagcgcgagtgcctgctggagcaaatcaaaaaactcaaagggcagctggaagagcggcagaaaattggaaagctcgataacctcaggtccgaggacgatgtgctagagaacggaaccgatatgcacgtgatggatttacaacgggacgctaaccgccagatcagtgacctcaagttcaaactggctaagagtgaacaggagattaccgctttggaacagaacgttatcagactggagtcacaggtgtcccgctacaaatccgcagccgaaaacgccgagaagattgaagatgagctgaaggcagagaaaaggaagctccagcgtgagctccgttccgccttagacaaaacagaagaactggaagtctcaaacggacatctggtgaaacggctggaaaagatgaaggcaaataggtcggcgctgctatcccaacagtag

SEQ ID NO: 192863 - DNA, 2427 bp, synthetic construct
  misc_feature 1..2427: note = Description of Artificial Sequence: Synthetic coding sequence
  source 1..2427: mol_type = other DNA
atgaccagccccgccgccgcccagagccgggagatcgactgcctgtccccagaggcccagaagctcgccgaggcgcgtctcgctgcaaagagagccgcaagggcggaggcaagagaaataagaatgaaagagttggagcggcagcagaaagaggaggactccgaaagatattcacggcggtctcggagaaacacgtccgcatcagacgaagacgaacgcatgagtgtaggttcccgtggaagcttgcgcgtggaggagcgccccgagaaggacttcaccgagaagggcagcagaaacatgccagggcttagtgccgcgacactggcctcactgggaggcacatcatcccgccggggaagcggggacacctccattagcatcgatacagaagcttctatcagggagatcaaagagctaaacgagctcaaagaccagattcaagacgtcgagggtaagtatatgcagggtctaaaggaaatgaaagactcactggccgaggtggaggagaaatataagaaggccatggtaagcaacgcacagctcgacaacgagaaaaccaacttcatgtaccaggtggatacgctaaaggatatgctgctcgagctggaggaacagctcgccgaaagtcggagacagtacgaagagaagaataaagagttcgaacgcgagaagcatgcacattccatattacaattccagttcgccgaagtgaaggaagccctgaagcagagggaggagatgctggaaaagcatgggattattctgaattccgaaattgccaccaacggcgagaccagcgacacacttaacaacgtggggtatcaaggccctaccaagatgaccaaagaagagctgaacgctttgaagtcaacgggcgatgggaccttgggccgagccagcgaagttgaggttaagaatgaaatagtggccaatgtaggcaagcgagagatcctccacaataccgagaaggagcagcacacagaggacacagtcaaagactgtgtcgatattgaggtgttcccagcgggtgaaaacacagaggaccagaagtcttctgaggacactgctccattcctagggacactggccggcgccacatatgaagaacaagtgcagtcgcagatccttgagtcctccagtctcccagagaacactgttcaggttgaatcaaacgaggtaatgggagcacctgacgacagaactcgtacccctctagaacctagcaattgctggagcgatctcgatgggggcaaccacaccgaaaatgtcggagaggctgccgtaacccaggttgaggagcaagcaggaaccgtggcctcatgtccgctaggtcactccgatgatacagtttaccacgatgataagtgtatggtggaggtacctcaggaacttgagacttccaccggacatagtttggaaaaagaatttacaaaccaggaggcagcggagccaaaggaagtgcccgcccacagcactgaggtgggtcgagaccataacgaggaagaaggcgaagagactggacttagagacgagaagccaatcaagaccgaggtgcccggctctcccgcaggaaccgagggcaactgtcaggaagccactggcccctccaccgttgacacccaaaatgagcctctcgatatgaaggagcccgacgaagagaaaagtgatcagcagggggaagcactggacagctcacagaagaagacaaagaataagaagaagaagaataaaaagaagaagagcccagtccccgtagagacattaaaggacgtgaagaaggaactgacatatcagaatactgatttgtccgagatcaaggaggaagagcaggttaaatctaccgaccgcaaatctgcggtggaggcccagaatgaagttactgagaatcctaagcagaaaatcgctgccgaaagcagcgaaaatgtggactgtccagagaatccaaaaataaaactggatggaaagctggaccaggaaggagacgacgttcagacagccgcggaggaggtcctggccgacggcgatacattggatttcgaggatgacacagtgcagtcctctgggccgcgagctggtggtgaggagctcgacgagggggttgcaaaagataacgccaaaatcgatggcgccacacagtccagccccgctgagcctaagtcggaggacgccgatcgatgtaccctgcctgagcacgaatccccgtctcaggatatttcagatgcttgtgaagccgagtccacagaaagatgtgaaatgagtgaacacccttcacagactgtgcggaaggccctcgatagtaatagcttggagaatgacgacctgtccgcccccgggagagagcccggtcatttcaatcccgagagccgagaggacacacgtgggggcaatgaaaaaggcaagagcaaagaagattgcactatgtcctag

SEQ ID NO: 192864 - DNA, 1923 bp, synthetic construct
  misc_feature 1..1923: note = Description of Artificial Sequence: Synthetic coding sequence
  source 1..1923: mol_type = other DNA
atggacatgggcacccagggcagcggccggaagcggctgcccaacagggagcgcttaaccgcggaggacgacgcgctgaaccaaatcgcccgggaagccgaagctagactggccgctaaaagggccgcccgcgccgaagccagggaaataaggatgaaggagttggagcggcagcagaaggagatctatcaagtacagaagaagtactacgggctcgacacgaaatggggagacatcgaacagtggatggaggattctgagcggtattccagaaggtcccgccgaaacacaagcgcctccgacgaagacgaacggatgagcgtgggatcacgcggcagcttaaggtcccagccggacctggagtacggaggcccctacgcttggacaaacggatacgacggggagctgtatggatcacaaagtctcaaccggcgctccggtcggccgagttgtctttatagtgcagcccgtcctagtggctcctaccgtgctagcgtattggatgaggggtctttcgggggcactaggcgcggttccacctccggaagtcgcgctccttctgagtactcaggccatcttaatagctcatcaagggcttcctcaagggcaagctccgcccgcgcgagtccagtggtcgaggagagacctgagaaagatttcactgagaaggggtcgagaaacatgcccggtttgtctgccgcaacacttgcgtctctgggtggcacctcttcccgtcgcggaagcggggacacatctatatccattgacacggaggcctcgattcgcgagataaaggagctcaatgagcttaaagaccagatccaggatgttgaaggaaagtacatgcaggggttaaaggaaatgaaggactctctagcagaagtggaagaaaaatataagaaagctatggttagtaacgcacaactggacaatgagaagacaaactttatgtatcaggtggataccttaaaagacatgctactcgaactcgaggagcagctggccgagtccagacgacagtatgaagagaaaaacaaagaattcgagcgggaaaagcatgctcattccattctccagttccaattcgcggaggtcaaggaggctctcaagcagagggaggagatgctggaagagattcggcaactgcagcagaaacaagctagcagcattcgggagatctctgatttacaagagactatcgagtggaaagacaagaagatcggggctctcgagcgacaaaaagaattctttgatagcgtgcggtctgagcgggacgacctaagagaggaagtggttatgctgaaagaggagctcaagaagcacggtattatcttgaattctgagatcgccacaaacggagaaacgagtgataccctgaacaatgttgggtaccaggggcccactaagatgaccaaagaagaactcaatgccctgaaatctactggagatgggacactcgacatacgtcttaaaaagttggtcgacgaaagggagtgtctccttgaacagataaagaaacttaagggccagctggaagagcgacagaagatcgggaagctggataacttaagaagcgaggacgacgttctggagaatggaacagacatgcatgtcatggatttgcagcgcgatgcaaatcggcagatctccgatttaaaattcaaacttgccaagagcgagcaagagatcaccgcactggaacaaaacgtgatccgattagaatctcaagtgagtcggtataaatcagctgcagagaatgccgagaaaattgaagacgaattgaaagcggaaaagcgcaagctgcagcgcgaattacggagcgcgctcgataagacggaagagctggaagtgtctaacggccatttggtgaagcgtttggagaagatgaaagcaaaccgaagtgctctgttatctcaacagtag

SEQ ID NO: 192865 - DNA, 2166 bp, synthetic construct
  misc_feature 1..2166: note = Description of Artificial Sequence: Synthetic coding sequence
  source 1..2166: mol_type = other DNA
atgggcacccccgccagcggccggaagcggacccccgtgaaggaccgcttcagcgctgaggacgaggcgttgagtaatattgcccgggaggccgaagcaagactcgccgccaagagagctgcgcgcgccgaggcgcgcgacattcgaatgcgtgaactggaaaggcaacagaaggaatatagtctacattctttcgacagaaaatgggggcagatacagaagtggctcgaagattcggagcgtgccaggtatagtcacaggtctagtcaccatcgtccctacctgggtgtagaggatgcactgagtatcaggagcgtgggcagccataggtacgatatgtttaaggaccgctccagcagactaagttcactgaaccattcctacagccattcacatggtatgaagaagaggagctctgatagccataaagacctgctgagcggcctgtactttgatcagcggaactattcatccctccgtcattccaaacctactagtgcctactataccaggcagagctcctctctgtactcggatccactggcgacatataagtctgacagagcctctccaaccgccaattccgggctgcttagatcagcctcattggctagcctgtataacggtgggttatataacccctacggaccccgcactccctcagagtgctcttattacagcagccgaatctccagcgctagatcgtctccaggcttcaccaatgacgacaccgccagcatagtgagctctgaccgggcctcccgtggcagaagggagagcgtggtctccgctgccgattacttttctcggagcaatagacgggggtccgtcgtaagtgaagtcgacgacatctccatccccgacctcagctctctggacgagaaatcagataaacaatacgctgaaaactacacaaggccctccagtaggaactctgctagcgccaccacacccctatcaggaaactcctcccgcagagggagtggcgatacaagttccctgatcgaccccgatacttcactttcagaactccgggatatctacgacctcaaagatcaaatccaggacgttgagggcaggtacatgcagggcctgaaagagctgaaagaaagcctgtcagaagtggaagaaaagtacaagaaggccatggtgtcaaatgctcagttggataacgagaagaataatttaatttaccaagttgacaccttgaaggatgttatagaagagcaggaggagcaaatggcggagttttacagggagaacgaggaaaaatccaaagaattagaaagacaaaaacacatgtgctcagtgctacagcacaagatggaagagctgaaggaaggtctgcggcaaagagatgagttgatagaggaaaagcagaggatgcagcaaaaaattgacactatgaccaaggaggtgttcgatctgcaggaaacgctgctctggaaggacaaaaagataggtgccctggaaaagcagaaggagtacattgcatgcctgcgaaatgagagggatatgttgcgtgaggagctggcagacctgcaggagactgtgaaaacaggagagaagcatggcctggttattatccctgatggcacgcccaatggcgatgttagtcacgagcccgttgcaggcgccataacagtggttagccaagaggctgcccaggtgctcgagagcgccggcgagggaccactcgacgtgcgccttcggaaactggctggagagaaggaggaactgttatcccagatacgaaaacttaagctccagctggaggaagagaggcagaagtgtagtcgcaacgatggtacagtcggcgaccttgccggcttacagaatggctccgaccttcagttcatagagatgcaacgcgatgccaacaggcagatttccgaatacaagtttaaactgtctaaggcggaacaggatattacaactctggagcaatccatttcacgtctggagggacaggtcctcagatataaaaccgcagcggaaaacgccgagaaagttgaagatgaactcaaggcagagaaaaggaaattgcagagggagctcaggactgctctggataagatcgaagagatggagatgacgaatagtcacctcgccaagaggctggagaaaatgaaggcaaacaggactgccctgctcgctcagcaatag

SEQ ID NO: 192866 - DNA, 1203 bp, synthetic construct
  misc_feature 1..1203: note = Description of Artificial Sequence: Synthetic coding sequence
  source 1..1203: mol_type = other DNA
atgggcacccccgccagcggccggaagcggacccccgtgaaggacagattcagcgctgaagatgaggctctgtctaatatcgccagggaggccgaggcccggttagccgccaagcgggctgcacgagctgaagccagggatatcagaatgcgcgagctggagagacagcagaaagaactggatgagaagagcgacaaacaatatgccgagaactatacccgaccgtcctcacggaactctgcttccgctaccacccctctgtcaggcaacagttctagacgcggcagcggagacacctccagtctaattgatccggatacatccctgtctgagctgcgagaaagtttgagcgaggtcgaggaaaaatacaagaaagccatggtttccaatgctcagctggacaatgaaaaaaacaatctgatctaccaagttgatactctgaaggatgtcatcgaggagcaggaggagcaaatggccgagttttatcgggaaaatgaagaaaaatctaaggaactcgagcggcagaagcacatgtgctccgttctgcagcataaaatggaagagcttaaggagggtcttcggcaacgggatgagttgatagagaaacatggactcgtgattatcccggacggcaccccgaatggagacgtgagccatgaaccagtggcaggcgcaatcactgtagtgagtcaggaggcagcccaggttttagagtctgccggcgaaggaccacttgacgtgcgcttaaggaaactggccggagagaaagaggagttgctgagccagatccgcaaactgaagctgcagctggaagaggaacgccagaagtgtagccgcaacgatgggaccgtgggcgatctagcaggactccagaatggatccgacttgcaatttatcgaaatgcaacgggacgcaaaccggcaaatcagtgaatataaatttaagctgagcaaggccgagcaggacatcacgaccctggaacagagtatttctcggttagaaggacaggtgctgagatataaaacagccgcagagaacgccgagaaagtggaagacgaacttaaggccgaaaagaggaaactgcagagagaactgcgcacagcactcgacaaaatagaggaaatggagatgactaactcccacctggctaaacggctggagaagatgaaagcaaatcgaaccgcgctgctcgctcagcaatag

SEQ ID NO: 192867 - DNA, 2166 bp, synthetic construct
  misc_feature 1..2166: note = Description of Artificial Sequence: Synthetic coding sequence
  source 1..2166: mol_type = other DNA
atgggcacccccgccagcggccggaagcggacccccgtgaaggaccggtttagcgccgaagacgaagctctcagcaatattgcgcgggaggctgaagccagactggcagccaaaagagctgctcgggccgaggcgagggacatacgcatgagagagctcgagcgccaacagaaggaatactccctgcacagcttcgaccgtaagtggggccagatccagaagtggctggaggatagcgagcgcgcaaggtacagccaccggagctctcaccacagaccctacctgggggttgaagacgcgctgtctattcgttccgtgggatcacatcggtacgacatgttcaaagataggagttcaagactgtctagcctaaaccactcctactcacacagccacggcatgaaaaagagatcatccgacagccataaagatctactatctggactgtatttcgaccagaggaattattcgagcctgcgccacagcaagccaacctccgcatactacactcgccagtcctcctccctgtactcagacccactcgccacatacaaaagcgatagggcatccccgacagccaatagcggcctgttgcgcagcgcctcattagcgtcgctctataacggcggcctctataatccatacggtccgcggaccccctcggaatgcagctactattcatcccgaattagctcagcacgctcttctccagggttcacaaacgacgacaccgccagcattgtctcgtccgaccgagcaagtcggggacggagagaatcagtggttagcgcggccgattactttagtagatctaaccgtagaggtagcgtagtttctgaagtcgacgacatcagcattcccgacctcagtagtcttgatgaaaagtctgataagcagtatgcagaaaattacactcgtcccagcagccgcaactcagccagcgccaccaccccactatccggtaatagctctcgaaggggctcaggagacaccagcagcttaatcgatcctgacacgtccctgagcgaattgagagacatttacgacctgaaggatcaaattcaggacgtggaaggaagatatatgcaaggactgaaagagttaaaggagtcgctgtccgaggtggaggaaaaatacaagaaagccatggtgagcaacgcccagctggacaatgagaagaacaatctcatttatcaggttgacaccctgaaggacgtcattgaggagcaggaggagcagatggccgagttttaccgggagaacgaggaaaaatccaaagaactcgagcggcagaagcacatgtgtagcgttctgcagcacaaaatggaggagctgaaggaggggctcaggcagagagacgagttgatagaggagaagcagagaatgcagcagaaaattgacacaatgacaaaggaggtattcgatcttcaagaaacactgttgtggaaagataagaaaattggtgccctggaaaagcagaaagagtatatcgcatgcttgagaaacgagcgcgacatgttgcgcgaggagcttgccgacttgcaggaaacggtaaaaacaggagagaaacatggcttagtgataattcccgatggcacgcctaacggcgacgtgagccacgagccagtcgcgggcgctatcactgtggtgtctcaagaagcagcccaggtattggaaagtgcaggtgaagggccccttgatgttcggctccgaaaactggccggtgaaaaggaggagctgctgagccaaatccggaagctgaagctgcagttagaggaggaaaggcagaaatgttctcggaacgatgggactgtgggtgatcttgccggcctgcagaatggatcagacttgcagtttatcgaaatgcagcgtgacgccaacagacagatctcagagtataaattcaaactgagtaaagcagaacaggatatcaccacattggagcaatctatctccaggctggaagggcaagtcctaagatataaaacagccgccgagaacgccgagaaagtggaggacgagctgaaggccgagaaaagaaaattgcagcgcgagcttagaactgcactcgacaagattgaagagatggagatgactaattcacacctggctaagcggttggagaagatgaaggccaaccggactgccctgcttgctcagcagtag

SEQ ID NO: 192868 - DNA, 180 bp, synthetic construct
  misc_feature 1..180: note = Description of Artificial Sequence: Synthetic coding sequence
  source 1..180: mol_type = other DNA
atgggcacccccgccagcggccggaagcggacccccgtgaaggaccgcttctcagcagaggatgaagcactaagtaacatagctcgggaggccgaagctcggctggccgccaagcgagctgcacgagcagaggccagggatattcggatgcgggagttagagcgccagcagaaagaatag

SEQ ID NO: 192869 - DNA, 180 bp, synthetic construct
  misc_feature 1..180: note = Description of Artificial Sequence: Synthetic coding sequence
  source 1..180: mol_type = other DNA
atgggcacccccgccagcggccggaagcggacccccgtgaaggaccggttcagcgcggaggatgaggcactcagtaacattgcacgagaagccgaagcccgcctcgccgcaaagagggcagcacgcgcggaagcccgagatattagaatgcgtgagcttgagcgccagcagaaggaatag

SEQ ID NO: 192870 - DNA, 180 bp, synthetic construct
  misc_feature 1..180: note = Description of Artificial Sequence: Synthetic coding sequence
  source 1..180: mol_type = other DNA
atgggcacccccgccagcggccggaagcggacccccgtgaaggaccggttttcggccgaagacgaagctctgagtaatatcgcccgagaggccgaggcacggctagcggctaagcgggccgctcgggcagaagccagagacattcggatgagagagctcgaacggcaacagaaagagtag

SEQ ID NO: 192871 - DNA, 1275 bp, synthetic construct
  misc_feature 1..1275: note = Description of Artificial Sequence: Synthetic coding sequence
  source 1..1275: mol_type = other DNA
atgggcacccccgccagcggccggaagcggacccccgtgaaggaccgcttcagtgccgaggacgaagctctctctaatattgccagggaggccgaggcccgattagccgcgaagcgggctgcccgggccgaggcccgtgacattaggatgcgcgaactggagcgccaacaaaaggagctggatgaaaagagcgacaaacagtacgccgagaactacacccggccatcttcacggaatagcgcctccgcaaccacccctctatccggtaattcctccaggagaggttctggtgacacgtccagcttgatcgaccccgatacgagcttgtcagaactccgggacatatatgatctcaaggatcagattcaggacgtggaaggacgctatatgcagggtttgaaggaactcaaggagtctctctccgaagtggaagaaaaatacaaaaaagccatggtgagcaatgcccaactggacaacgagaagaataatctgatctaccaggtggacacactgaaggatgtcatcgaggagcaggaggaacagatggctgagttctaccgggaaaatgaggagaaatctaaggaattagagcgccagaaacatatgtgctcggtgcttcagcacaagatggaagagcttaaggaagggttgagacagcgcgatgagctaatagagaagcatggcctggtgatcatcccagacgggactccgaatggcgatgtaagccacgagcccgtagcaggagccatcacagttgtctcacaggaagctgcccaggtcctggaatcagctggcgaggggccactggatgtacgtttgagaaaactggcaggcgaaaaggaagaacttctgagtcagataagaaagctcaaactgcagctcgaagaggagcgacaaaaatgcagtcgaaacgatggaactgtaggagatcttgccggcttgcagaacgggtctgatcttcagttcatcgaaatgcagagggacgccaacaggcagatcagtgagtacaaatttaagttgtctaaagctgaacaggatatcactacgctcgagcagagcatctccagactggagggccaggtcctccgatataaaacggctgcagaaaatgcagaaaaggtggaagacgagctaaaagcggaaaaacggaagttgcagagagaactccgcactgcactggacaagatcgaggaaatggaaatgacaaactctcatctcgctaagagactcgagaagatgaaagccaaccgcactgctctcctggcacagcaatag

SEQ ID NO: 192872 - DNA, 2316 bp, synthetic construct
  misc_feature 1..2316: note = Description of Artificial Sequence: Synthetic coding sequence
  source 1..2316: mol_type = other DNA
atggcccccggccccttcagcagcgccctgctgagccccccccccgcagccctgcctttcctgctcttgctttgggccggtgcatcccgcggacagccatgccctggacggtgcatttgtcaaaacgtcgctccaacgttgacaatgttatgcgcaaagactggtctgctgtttgtgccccctgccattgatcggagggtggttgagctgaggcttacagacaatttcatcgctgcagtgcggaggcgcgatttcgctaacatgaccagtctcgttcatctcacactcagtaggaatacaattggccaggtggcagcaggggcgttcgctgacctgcgtgccttgcgagcattgcacctagacagcaacagactcgccgaggtgcggggtgaccagctgcgcgggctgggcaaccttcgtcacctgatcttaggcaataaccagattagacgcgttgaatccgcagcctttgacgccttcctgagtaccgtcgaggaccttgatctatcttataataacctggaggccttaccttgggaggcagtgggccagatggttaacttgaacacgctcactctcgatcacaaccttattgaccacatcgctgagggcacttttgtgcagctgcacaagctagttcggctggatatgacctcaaatcgtctgcataagcttccccccgatgggctctttctgcgatctcagggcactggcccgaagcctcccactcctctgacagtgagctttggcggaaatcccttgcactgcaactgcgagcttctgtggctcaggaggttgactcgcgaagacgacctcgagacgtgtgccacacccgaacacttgactgaccgctatttttggagcatccccgaggaagaatttctgtgcgagccacctctaatcacccggcaggccggaggccgcgctctggtggttgaaggccaggcagtgagcctacggtgcagggccgtcggcgaccccgaaccggtggtccattgggtagctccagacggaagactcttggggaatagttctcgcactagagtgcggggagatggaacccttgacgtaaccattaccaccctgagagactctggaacctttacctgtatcgcctcaaatgctgcgggcgaggctaccgccccagtggaggtgtgcgtggtgccactgccattgatggcgcccccccctgccgctcctcctcctctgaccgaacccgggtcctctgacatagctactccagggcgcccaggcgctaacgatagtgcagctgaaaggcgcctcgttgccgccgagctgacaagcaactccgtgctgatccggtggccagcacagagaccagtcccaggaatccgcatgtaccaagtgcagtacaattcttctgtcgatgatagcttggtctaccgcatgatcccttcgaccagccagacctttctggtaaatgatctggccgccgggcgcgcttacgatctttgcgtccttgctgtctacgacgatggtgcaactgctttgcctgcgacgcgggtggttggctgtgtccagtttactaccgctggcgatccagcaccatgccgacccctgcgcgctcattttctgggaggcacaatgatcattgccattggcggggtgattgtggcgtccgtgttagtgttcattgttctacttatgatccggtataaagtatacggagacggagactcccgaagggtcaagggcagccggagcctgccccgcgtttcccatgtgtgctcccaaacaaacggcgcgggcactggcgcggctcaggctcccgccctcccagcacaggatcactatgaggcgctgcgcgaggttgaatctcaggctgcccccgccgtcgctgtcgaagcaaaggcaatggaggccgaaaccgccagtgctgaaccggaggttgtcttaggacgctctctggggggaagtgcaactagcctctgtctgctcccttcagaagaaacaagcggtgaggaatcgagagccgcagttggccctagaagatctaggtccggggccctggagcctccgactagtgcaccacccaccttggcactcgtacctggtggggccgccgcccggccaaggccacaacagcggtacagtttcgacggagactacggagcgctattccaaagccactcttacccacgacgcgctcgtcgcactaagcggcacagatctaccccccacttggacggagcaggagggggagctgccggagaggacggcgacctgggcctgggatcagctcgagcctgtctagcattcactagcacagagtggatgctggaatccacagtttag

SEQ ID NO: 192873 - DNA, 2370 bp, synthetic construct
  misc_feature 1..2370: note = Description of Artificial Sequence: Synthetic coding sequence
  source 1..2370: mol_type = other DNA
atggagaccctgctgggcggcctgctggccttcggcatggccttcgccgtggtagacgcttgtccaaagtattgcgtgtgtcagaacttaagcgaaagcttggggaccctgtgtccctcaaaagggttgctgttcgtccctcctgacattgatcgcagaacagtggaactgaggctgggaggaaatttcattatccatattagtcgacaagactttgccaatatgactgggttagttgacctgactctaagcagaaacactatatctcatatccagcccttttctttcctggacttggagtccttgagatcactccacctggactctaaccgtttaccaagtctgggagaagataccctgcggggactggtgaacctgcagcatctcatcgttaataacaaccaattaggggggatagcagacgaagcatttgaggactttttacttaccctcgaagatctggatctcagttataataacctgcatggccttccgtgggattctgttagacgaatggttaacttacaccaattgtccctggaccacaatctactagatcacatcgccgagggcaccttcgcagacctgcagaagctcgccagactcgatctgacttcaaatcggctccagaagctgcctccagatcccatctttgccaggtcacaagcctctgctctcaccgcaaccccctttgctccacccctatcattttctttcggggggaatccattacactgtaattgcgaactgctgtggttgaggagactggaacgcgacgacgacctggagacttgtgggtccccagggggactaaaaggtcgttatttttggcatgtcagagaggaggagtttgtgtgcgaaccgccccttataactcagcacacccacaaactgctggtgctcgaaggtcaggctgccacactgaaatgtaaagccattggggacccatccccgctgatccactgggtagcgcctgacgataggctggtgggaaactctagcaggacagccgtctatgataacgggactctggatatctttattaccaccagccaggatagtggcgccttcacatgtatcgccgccaatgctgccggagaagcgacagctatggtcgaggtgagcattgtccagttgccacatcttagcaattccacaagtcggaccgcccctcccaaaagtcgcctcagtgacattactggatcctctaaaacctcccgcggaggagggggcagtggcggcggcgaaccacccaaatctccaccagaaagagcagtgctcgtgagtgaggtgacgaccacaagcgccctggttaaatggagtgtgtctaagagcgcgcctcgggtgaagatgtatcagcttcagtacaattgctcagatgacgaggtactgatctaccggatgattcccgcctccaacaaagcctttgttgtgaacaacttagtgagtggaaccggatatgatctgtgtgtgctcgccatgtgggatgatacagctaccactttaaccgccaccaatattgtagggtgcgctcagttcttcactaaagctgattaccctcaatgccagagcatgcattcccagatactaggaggcacaatgatactcgtgatcgggggaatcatagttgccacacttcttgtcttcatcgtgatactgatggtcaggtacaaggtgtgcaaccacgaggcacctagcaagatggcagcagctgtgtccaatgtgtactcacaaacgaacggtgctcagcccccacctccctcttccgcacctgcaggcgctccccctcagggaccccctaaggtggtggttcggaacgagctcctggacttcaccgctagtctggcgcgtgcaagcgattctagttccagctctagtctgggttctggggaggccgccggtctgggcagggcaccttggcgaatccccccctctgcgccaagacctaagccctctctggaccggctcatgggagcttttgcaagtctcgatctgaaatcccaaaggaaggaagaattattggacagcagaactccggctgggagaggggctggcacttcagctcgcggacaccacagtgaccgagaaccgctcctcggccccccagccgcacgcgcacgctctctccttccattgccgctggaaggaaaggccaagcgctctcatagctttgacatgggagatttcgcagccgccgccgccggaggagtggtacccggcgggtattccccaccccggaaggtgtccaatatctggactaaacggagtcttagcgtaaacggtatgctccttccctttgaggaatctgatttggtgggcgcacgtgggacctttgggagctcagaatgggtcatggagagtacagtatag

SEQ ID NO: 192874 - DNA, 1887 bp, synthetic construct
  misc_feature 1..1887: note = Description of Artificial Sequence: Synthetic coding sequence
  source 1..1887: mol_type = other DNA
atggccatcctgcccctgctgctgtgcctgctgcccctggcccccgcgagctctcctccccagtccgcaaccccctccccatgccctaggcgctgccggtgtcagacacagtctttaccattatcagtcctgtgccctggtgcaggccttctctttgtcccaccaagcctcgacaggagggccgctgagcttcgactcgcagataatttcatcgcaagcgtgagaagacgagacctggcaaacatgaccggcctgctccacctttctctgtccagaaatactattagacacgtggcagctggcgccttcgctgacctgagagctctacgggcgctgcatctggatgggaatagactcacaagcctgggtgagggccaattaaggggcctggtaaacttgaggcacctgatcctaagcaataatcagcttgcggcgttagcagctggagcacttgatgactgcgctgagacattggaggacctggacttgtcctacaacaaccttgagcagctcccttgggaggcccttggtagactgggtaacgtgaataccctggggctcgaccataatctcctggcctccgtaccggctggagccttcagccgacttcataagttagctcgtcttgacatgacaagcaatagactcacgacaatccctcccgacccactgtttagtcgcctgcccctcctagcccggcctcgaggcagccccgcaagcgccctcgttctggcttttgggggcaatcctcttcattgcaactgcgagcttgtctggttgagacggctcgcgcgggaagatgaccttgaggcttgtgccagcccccctgcgttggggggccggtatttctgggcagtcggcgaggaagaatttgtctgtgagcctcctgtagtgacccaccgcagcccacccctggccgtgccagcgggccggcccgcagccctccggtgtagggctgtaggagatcccgaaccgcgtgtgcggtgggtgtctccgcagggacgacttctcggaaattcctcaagagctagagcgtttccgaatggcactctggagctgctggtcacagaacctggcgacggaggaatttttacatgtattgccgccaatgccgcaggcgaagccacagctgccgttgagctgactgtgggacctcctccacctccacaactggccaatagcacaagttgtgatccacctcgcgatggcgaccccgatgcgttaacaccccctagcgccgcaagcgcctcagccaaagtggccgacactggacccccaaccgatagaggcgtgcaagtgactgaacatggggctactgctgcactcgtgcagtggccggatcagagaccaatccctggcatcagaatgtaccagattcagtacaactcaagcgctgacgatatacttgtgtaccgcatgatccccgctgaaagtcggagcttcctgctcacagacctggcatcaggtcgaacgtatgacctctgcgtcctcgccgtatatgaagactccgctacaggtttgacggccaccagaccagtgggttgcgccaggtttagtaccgaaccagctcttcgtccctgtggcgcccctcacgccccctttctgggaggcactatgatcattgcattgggaggagttattgtcgcatctgtcttggtgttcatcttcgtcctgctgatgcggtataaggtacatggcggacagccccccggtaaagccaaaattcccgctcccgttagctctgtctgcagccaaacaaacggcgccctgggcccgacccccacgccagcccccccagccccggagcccgctgctctgagggcccacactgtggtccagctcgattgcgaaccttggggaccgggacacgagcctgtgggcccatag

SEQ ID NO: 192875 - DNA, 1887 bp, synthetic construct
  misc_feature 1..1887: note = Description of Artificial Sequence: Synthetic coding sequence
  source 1..1887: mol_type = other DNA
atggccatcctgcccctgctgctgtgcctgctgcccctggcccccgccagttcgccaccacagtccgctaccccaagcccttgtccacgtcggtgccgatgccagacccaatccttgcccctcagcgtgctctgtcccggagcgggtttgctgtttgtgccaccatcactcgacaggagggccgccgagcttagactagcagataatttcattgcctctgtcaggagacgggacctggccaatatgacggggctcttgcatctctccctgtccagaaacaccatcaggcacgtggcggcaggagccttcgccgacctgagagccctgcgagctctccacctggacgggaatcggttgacaagccttggggagggtcagctgcgaggcctagtcaaccttaggcatttgattctatcaaacaatcagctggcggctctcgcggctggagcattggacgactgtgcagaaactctagaggatctggatctatcttacaataatctggagcagctgccttgggaggccttaggacggctggggaacgtgaatacattgggtctggatcacaacttactggccagcgtacccgctggcgcctttagcaggctgcataagctcgcccgtctcgatatgactagcaatcgccttacaacgattccacctgatccacttttttctcggctgcccctcctcgcacgaccaaggggaagtccagcctctgcgttggtccttgcctttggaggcaaccccctccattgcaattgcgagctcgtgtggcttcgacgtctggctagggaagacgacttggaggcctgtgcgtcccctccagcattgggtggccgctacttttgggcagtgggcgaggaagagtttgtctgtgagccacccgtggtgacccatcgtagcccccccctcgctgtgcctgcaggacgacccgcggctcttcggtgccgtgccgtcggcgatccagaacctagagtcagatgggtttcccctcagggccggctgttaggtaattctagccgagctcgggctttccccaacggaactctggagttgctggtaacggagcccggagacggaggaatctttacctgtatcgctgcaaatgccgccggtgaggctactgctgccgtcgagctcaccgtcggtcctcccccccctccccaactggccaatagtacaagctgtgacccaccgcgggacggagatccagacgcactaacccctccgtcagccgcctcggcctctgccaaggtggccgataccggccctccgactgaccggggcgttcaggtcactgaacatggtgccactgccgctctggtgcagtggcccgatcagcggcctatacccgggatcagaatgtaccagattcaatataactcatccgccgacgatattctggtttataggatgatcccggccgagtcccgctccttcctgctgacagacctggcgtctggccggacttatgacctttgcgtccttgcagtgtatgaagatagcgctacagggctcaccgcaacaaggccagtgggatgcgccagattttccactgagcctgctctgcgcccttgtggcgcaccacacgcccctttcctgggaggcacaatgatcattgctcttggaggtgtcatagttgcaagtgtgttagtatttatcttcgtgctcctgatgcggtataaagttcatggaggccagccccccggaaaagctaagataccagcacccgtctcatccgtgtgctctcagaccaacggagctctgggcccaactcctacccccgccccccccgcaccagagcccgctgcactaagagcacacacagtggtgcagcttgattgcgagccgtggggtccggggcacgaaccagtgggtccatag

SEQ ID NO: 192876 - DNA, 1908 bp, synthetic construct
  misc_feature 1..1908: note = Description of Artificial Sequence: Synthetic coding sequence
  source 1..1908: mol_type = other DNA
atggccccccccctgctgctgctgctgctggccagcggcgccgccgcatgtcctctcccctgcgtttgccagaatctttcagaatcgctgtctaccctgtgtgcccacaggggtctgctgttcgtcccacccaatgtggataggcggacagtggagctgaggctggctgataactttatccaggcactggggcccccggacttcaggaatatgacaggactggtggacttaaccctgtcccggaatgccatcacccgaattggcgcaagagcctttggagatttggaaagtctccgttccttgcatctggatggaaatagacttgttgagctgggtaccggatctctcagaggacctgttaatctgcaacatctgattctgtctgggaaccagctggggaggatagctccaggcgcatttgatgatttcttagaaagcctggaagacctcgacctgagttataacaacctcaggcaggtaccctgggcaggcattggagcaatgccagcccttcatacactcaatctggaccacaatctaatcgatgctctgcccccgggcgcattcgctcagctgggacagctatcacgactggatttaacatcgaaccgtctcgcgaccttggccccagatccattgttcagcagaggtcgcgatgctgaggccagccccgcccctcttgtgcttagctttagcggcaaccccctccactgtaactgcgaactgctgtggctgcgcaggctggcccgccctgacgacctagaaacttgtgcttccccgcccggattggcaggcagatatttctgggcggtgcccgagggcgaatttagttgcgaaccaccacttatcgcccgccatacacaacgcttgtgggtgctggaaggacagcgtgctacactaaggtgccgggcattgggcgaccccgcacccacaatgcactgggtagggccagacgacagactcgtgggcaacagctctagagcccgagcattcccaaatggcaccctcgaaatcggagttaccggcgctggagatgctgggggatatacgtgtattgctactaaccccgcaggcgaggccacagctagggtcgagctgcgggtactcgccctgccacacggaggaaatagttccgctgaggggggccggcccggcccaagtgatattgctgctagcgctagaaccgcggctgagggagagggcacgctggagagcgagcctgctgttcaggtgaccgaagtgaccgccacatctggcctcgtttcttggggacccggaagaccagcagatcctgtgtggatgttccagatccagtacaattcatccgaggacgaaactctgatctacagaatcgttcctgcgtcctcccatcatttcctactgaagcacctagtgcctggagctgactatgacctctgcctgctggcactgtcccctgccgccggcccttccgacctcaccgctactcgtttgctcgggtgtgcacacttctctacactgcccgcgtctccactgtgtcacgccctgcaggcacacgtgctcggaggcactctgacggtggcggtggggggtgtgctggtggcagctttactggtattcacggttgccctgcttgtgcggggacggggagcggggaatgggcgcctaccgttaaagctcagtcacgtgcagagtcagactaatggaggcccctcgccaactcccaaggctcatccaccaagaagcccacctcctcgcccacagcggtcatgctccctggacttgggcgacgccggatgttatggctatgcccgccgactgggcggagcatgggcgcggaggtcccattctgtacatggaggtttgcttggggccggttgcagaggagttgggggaagcgctgaaaggctcgaggagtctgtcgtgtag

SEQ ID NO: 192877 - DNA, 2160 bp, synthetic construct
  misc_feature 1..2160: note = Description of Artificial Sequence: Synthetic coding sequence
  source 1..2160: mol_type = other DNA
atggagaagatcctgttctacctgttcctgatcggcatcgccgtgaaggcgcaaatctgtcctaaaagatgtgtgtgccaaattcttagtcctaatttggccaccctctgtgcaaagaagggcttactctttgtccctccaaacatcgataggcgaactgtcgagctgaggctggccgacaactttgtgaccaatatcaaaaggaaagattttgccaatatgacatctctcgtggacttgactcttagcaggaacacaatctcctttatcacgccgcacgctttcgccgaccttaggaatttgagagccttgcatcttaatagcaaccgcctgacaaaaattactaatgatatgtttagtggtctcagcaacttgcatcacttaatcttgaataacaaccaacttaccctgatcagctccacagcatttgacgacgtgttcgcgcttgaggagcttgatttatcttacaataacctggaaaccattccgtgggatgccgtggaaaaaatggtgagcctccacactctcagcctggatcacaacatgatagacaatatcccgaaggggactttctcacacttgcataaaatgaccagactggatgtgacgagtaataagctgcaaaaactcccccccgacccactgttccaacgtgcgcaggtactcgcgaccagtgggatcatatccccctctaccttcgctctgtcttttggcgggaatccactgcactgtaattgtgaacttctgtggcttagacgactatctagggaggacgatctcgaaacttgcgcttcccctcccctacttacaggacgatatttttggtcaattcccgaggaggaatttctctgcgaacccccgctcatcacgaggcatacccatgaaatgagagtgctggagggccagagggcaacactccggtgcaaagcccgaggtgaccctgagcccgcaattcactggatcagccccgaaggtaagctgatctcaaacgccactaggtcattagtgtatgacaacggcaccttggacatcctgatcaccaccgtgaaagatacaggagctttcacatgcattgcatccaatccggccggggaagctactcaaatcgtggacttgcacattattaaactaccacatttgctgaactcaaccaatcatatccatgaacccgacccaggctcctctgatattagtaccagtacaaagagtggatccaacacatcgagcagtaacggagataccaagctttcccaggataagatcgtggttgcggaggctacatctagcacagcccttctgaaattcaattttcagaggaatataccaggaatccggatgtttcagatccagtataatggaacctatgatgacacattagtgtaccggatgatccctcccacttcaaaaactttcctggtaaataatctggctgccggaactatgtacgatctctgtgttctcgctatctatgatgacggtattacctctctcacagccactcgggtggtgggttgcatacaatttaccacggaacaggattatgtcagatgtcacttcatgcagtcccaatttctgggcggcaccatgattataataatagggggcatcatcgtggcctcagtgcttgtgtttatcatcatcctgatgattaggtacaaagtctgcaacaataatggccagcataaagttaccaaggtgtctaacgtttattcacagacaaacggcgcgcagattcaggggtgctctgtcacgttgccccagtcagtcagcaagcaagcagtgggacacgaagaaaatgcacagtgttgtaaggccacctctgataacgtgatccagagctctgagacctgcagttcacaagattctagtacgaccacatccgcactgccacccagttggacctccagtacctccgtatcccaaaagcagaagcggaaaaccgggaccaaacccagtaccgaaccacaaaatgaggccgtcactaatgtggaatctcagaataccaataggaacaactccacagcactgcagctcgcctccaggccaccagattcagtgaccgaaggcccaacttctaagagagcccacattaagccaaacgcactgctaacaaatgtggaccagatcgtccaggagacacaacggttagaactgatctag

SEQ ID NO: 192878 - DNA, 1863 bp, synthetic construct
  misc_feature 1..1863: note = Description of Artificial Sequence: Synthetic coding sequence
  source 1..1863: mol_type = other DNA
atgcaggtgagcaagcggatgctggccggcggcgtgcggagcatgccatcccctctgttggcttgctggcaacccattctgcttctggtcctggggtcggtactctcaggtagcgccacagggtgtcctcccaggtgcgaatgcagcgctcaggatagggccgtgttatgccatcgaaagagattcgttgccgtccctgagggaatccccacagagaccaggctcttggacctagggaagaatcggattaagaccctcaatcaggatgagttcgcttcttttccacacctggaagagctcgagctaaacgagaatattgtttcagctgtcgagcccggtgccttcaacaatttgttcaatcttcgaaccttaggcttaagaagcaaccggctgaagcttataccccttggtgtctttacaggattaagcaacctcaccaagttagatatctctgagaataagattgtgattctcttggattatatgttccaggacctgtataacttgaagagcctggaagtgggggataacgatctcgtttatatctcccatagagcattctcggggctgaacagtctagagcagctgactcttgagaaatgtaacctgacctctattccaaccgaagctctgtcacacctccatggcttgatcgtacttaggttacggcacctgaacatcaatgctatcagagattattcgtttaagcgcctgtaccgcctgaaagtcctggagatttctcactggccttatttagataccatgacgcctaattgcctatatggactgaaccttacgtccctgagtatcacacactgtaatttgactgcggtcccctacctagctgtccggcatctggtctacttacgctttttaaacctgagttataacccaattagtactatcgaggggtccatgctccacgaactgctgcgcctgcaagaaattcaacttgtgggcggccagctcgcggtggtggagccctatgccttcagaggactcaattacctgagagttctgaatgtgtctggaaatcagctcacaacactggaggaaagtgtcttccattcagtcggcaatttggaaactctgatactagactcaaatccactggcctgcgactgccgactgttgtgggtgtttagaagacggtggcggttaaacttcaacagacaacagcccacatgcgcaacccccgagtttgtgcagggcaaagaatttaaagacttcccagacgtcttgctgcctaattactttacgtgtcggagggcccgcatccgggataggaaggctcaacaggtgttcgttgacgaaggacatactgtgcagttcgtgtgcagggcagatggagatcccccccccgcaatcctttggctcagcccacgaaagcacctcgtgtctgccaagagcaacggcagacttacagtttttcctgacggaacactggaagtccggtacgctcaggtccaggataacggtacttacctctgcatagccgcgaatgcaggcggcaacgattccatgcccgctcacctgcacgtgagaagctacagtccagactggccacaccagcccaacaaaacatttgctttcatcagtaaccagccaggggaaggcgaagccaactccacccgcgcaacagtccctttccccttcgatataaaaactctaatcattgccacgacaatgggctttatctcatttcttggcgttgtgctcttctgtctggtgctgctgtttttatggtcccggggcaagggtaacacaaaacacaatatagaaattgaatatgtgccaagaaagagcgacgcaggaatctcttctgctgatgcacctaggaagtttaacatgaaaatgatttag

SEQ ID NO: 192879 - DNA, 168 bp, synthetic construct
  misc_feature 1..168: note = Description of Artificial Sequence: Synthetic coding sequence
  source 1..168: mol_type = other DNA
atgctggccggcggcgtgcggagcatgcccagccccctgctggcctgctggcaacccattttgttgctcgtgctcggttctgtcctgtccggtagtgccactgggtgtccccctcggtgcgagtgctctgcccaggatcgagctgtattatgtcaccgcaagagatag

SEQ ID NO: 192880 - DNA, 1845 bp, synthetic construct
  misc_feature 1..1845: note = Description of Artificial Sequence: Synthetic coding sequence
  source 1..1845: mol_type = other DNA
atgctggccggcggcgtgcggagcatgcccagccccctgctggcctgctggcagcctattctcctgctggtgctcgggtcggtcctgagtggctccgccacaggatgtccgcccaggtgtgagtgttccgcccaggacagagccgtgctgtgccatcgaaagagatttgttgccgtaccagagggtattcccaccgagacaaggctgctggatctcggtaagaaccgaattaaaacgcttaaccaggacgagttcgccagttttccccatttggaggagctcgagcttaacgaaaatatcgtctctgctgtggaacccggcgcctttaacaacctgtttaacttacggactctgggtctcagatccaatcgccttaagctcattcccctgggcgtgtttacgggactgtctaatctgacgaaactcgacattagtgagaacaaaatcgtgatactcctggactatatgttccaggacctctacaacctgaaatctctggaggtgggggataatgacttagtctacatatcccatcgtgcgtttagcggtctgaacagtctcgagcagttaactttggagaagtgtaatctcacatctattcctacagaagcactatctcatcttcatggtctgattgtacttcgactgagacatctgaatatcaatgccataagagattatagctttaaaaggctgtaccggctcaaagtcctcgagatctcccactggccttatctggatacaatgactcccaattgcctttatggcctgaatttgacctcattatccataactcattgtaatctgaccgcagtcccttacctcgccgttagacatctcgtgtacctacgctttctcaacctgagctacaaccccatcagcaccatcgagggttctatgcttcacgagcttctcaggcttcaggaaatccagttggtgggaggccagttggccgtcgtcgagccatacgcctttcgcgggctgaattaccttcgtgtgcttaacgtttcaggtaatcagctcaccaccctggaggagagcgtgttccactcggttgggaatctcgagacactcattcttgactccaacccactcgcctgtgactgtaggctgctgtgggtgtttcgccggagatggcgactcaattttaacagacaacagcctacttgtgccacacctgaattcgtgcaaggcaaagaattcaaagattttcctgatgtcctcttacctaactatttcacatgcaggcgtgccagaatccgcgaccggaaagctcagcaggtctttgtggacgagggccacacagtgcagtttgtttgcagagctgatggcgacccgccccccgccattctgtggctgtctcctcggaagcaccttgtgtccgccaagagcaatgggcgcctgaccgtgttcccagacggcacactggaagttagatacgcccaggttcaggacaatggcacctatctctgtatcgccgccaatgcaggtggaaacgacagcatgcccgcccacctccatgtcagatcctactctccggactggccccatcagcccaacaagaccttcgccttcatttctaatcagcccggtgagggcgaggcaaactcaacccgcgccactgttccattcccatttgatatcaagacacttataattgctactactatgggatttatttctttcctcggcgtggttctgttttgtttagtgctcctgttcctgtggagtcggggcaagggcaatactaagcacaacattgaaatcgaatacgttcccaggaagagcgatgctggcatctcaagcgccgatgcccctagaaaatttaacatgaagatgatttag

SEQ ID NO: 192881 - DNA, 1821 bp, synthetic construct
  misc_feature 1..1821: note = Description of Artificial Sequence: Synthetic coding sequence
  source 1..1821: mol_type = other DNA
atgctgcacaccgccatcagctgctggcagcccttcctgggcctggcagtggtgctgatttttatgggctcaaccatagggtgtccagcacgatgcgaatgcagcgcgcagaataagtccgttagttgccaccgccgaagactgattgccattcccgaagggatcccaatcgagactaagatcctcgacctgagcaaaaacagactcaagagcgtcaatcctgaggagtttatcagttaccctctgctggaagagatcgacttatctgacaatatcattgctaacgtggaaccaggagcctttaacaacctgtttaaccttcggagcctacgcttgaagggtaaccgtctgaaacttgttccgcttggcgtattcacgggactatctaatctgacgaagctggatattagcgagaacaagattgtaattctgctcgattacatgttccaggacctgcacaacctgaagtctcttgaagtcggcgacaatgacctggtatatattagccaccgcgcctttagcggcctgctttccctggaacaactgacactcgagaagtgcaacctcactgctgtaccaacagaggccctcagccacttacgctcacttatttctctgcatctcaagcacctgaatatcaacaacatgcctgtgtacgcctttaaaaggctgttccatcttaaacatcttgaaatagactactggcccttgcttgacatgatgcctgctaacagcttatatggtctcaacctcacctctctctctgtgaccaacacaaacttatctacagttccattcctggccttcaagcatctggtgtacctgacccatctcaatctgtcatataaccctatttccactattgaagccggaatgttctctgatcttatccggttgcaggaactacacattgtcggagcgcaactgcgcaccatagagccacattcatttcaagggctgcgctttttgcgcgtcctgaacgtgtctcagaatctccttgaaactctggaagaaaatgtgttctctagtcctagggcccttgaggtcttgagcatcaataacaaccctctggcttgtgactgtcgactgctttggatactacaaaggcagccaacactgcagtttgggggacagcagcctatgtgtgccggccccgatacaatccgtgaacggtccttcaaagatttccattccaccgcgctctctttctatttcacatgtaaaaaacctaagataagagaaaagaagctgcagcacctgctggtggacgaaggccaaacagtgcaactcgagtgcagcgcagacggggatccacagcctgtaataagttgggtgacgcctcggcggcggttcattaccaccaagtccaatggccgggcaaccgtgcttggcgatggcacattggaaattagattcgcccaggatcaggattcagggatgtatgtctgtattgcgtcaaacgcagcggggaatgacacattcacagcatccctcacagtaaagggcttcgcctctgatagatttctttacgccaacagaactccgatgtacatgacggactccaatgatacgatcagtaatgggactaatgccaacaccttcagcctggatttgaagacaattctggtgtcaacagcaatggggtgttttactttcctgggggtggtgcttttctgctttctgctcctgtttgtgtggagtagaggaaagggtaaacataaaaattccatcgacctcgagtacgtgcctaggaagaacaacggtgcggtcgtcgagggcgaggtagccggcccccgccggtttaatatgaaaatgatttag

SEQ ID NO: 192882 - DNA, 1821 bp, synthetic construct
  misc_feature 1..1821: note = Description of Artificial Sequence: Synthetic coding sequence
  source 1..1821: mol_type = other DNA
atgctgcacaccgccatcagctgctggcagcccttcctgggcctggccgtggtgttaatctttatgggcagcaccatcggatgtcctgccagatgcgaatgtagcgcgcagaataagtccgtgtcttgtcatcgccgtagactaatcgcaatcccggaagggattccaatagaaactaaaatactggacctgagtaagaatcggttaaaaagcgtcaacccggaagaattcatcagctaccccttgctggaagaaatcgatttaagcgacaacattatcgctaacgtggagccgggggcattcaacaacctctttaacttgaggtcccttaggttaaagggcaatcggctaaagctcgtccctttaggcgtgttcacagggctgtccaacctaaccaagcttgatatttctgagaacaaaatcgtgattctgctggactacatgttccaagacctccacaatctcaagtcccttgaggtcggggacaacgatctggtttacataagtcacagggctttctctggcctgctgtcccttgagcagctgacattagaaaagtgtaatcttacggccgtgcctactgaggccctaagccatttgcgttcactcataagccttcacttaaaacatctgaatatcaacaatatgcctgtctacgcctttaagcgcctgttccaccttaagcatctggagatcgactactggcctcttttagacatgatgccagcaaactctctgtacggattaaacctgacatcactgagtgtcaccaacaccaacctttcaacagtgccctttctcgcatttaagcacctggtatacctcacccaccttaacctctcctacaaccctatttcaactatcgaggccggcatgttttccgatcttattagactccaggagctacatatagtcggcgctcaattgaggactatcgaacctcattcttttcagggtctacggttcctgagggtgctgaacgtgtcacagaacctgcttgaaacgctggaggagaatgtgttttcaagcccgagagccttggaagttctgtctattaacaacaatcccctggcttgcgactgtcgcctcctttggatcctacagcgccagccaactttgcaatttggtgggcagcagccgatgtgtgccggccccgacacaattcgggaacgcagctttaaagatttccattccacggctctctctttttattttacctgtaaaaaaccaaagattcgagagaagaagttgcaacacttgctggtagacgagggccagactgtgcagctggagtgctctgcagatggtgacccacagcctgttatttcatgggtcacccctcggagacgtttcatcacaactaagtccaacggtcgcgctacagtcttgggggatggaactttggagattcgcttcgctcaggatcaggatagtggaatgtacgtgtgtattgcaagtaatgccgccgggaatgacacttttacagccagcctgacagtgaaggggttcgcctcggatcgctttttatacgccaaccgcaccccaatgtacatgaccgacagcaatgataccatctcaaatggtacgaatgccaacacatttagtctggacctgaagaccattctggtgtctacggccatgggctgctttacctttttaggcgtggttctgttctgctttctcctccttttcgtgtggtcacgcggtaaggggaaacataaaaactcaatcgacctggaatatgtacccaggaaaaacaatggagcagtcgtggaaggcgaagtggctgggccacgtcggttcaacatgaaaatgatctag

SEQ ID NO: 192883 - DNA, 1779 bp, synthetic construct
  misc_feature 1..1779: note = Description of Artificial Sequence: Synthetic coding sequence
  source 1..1779: mol_type = other DNA
atgacctgctggctgtgcgtgctgagcctgcccctgctgctgctgccagctgccccacctccagccggcggttgtccggcgcgttgtgagtgcacagtgcaaactcgggctgtcgcttgcacgaggcggaggcttactgcagtgcccgacggcattccggccgaaacccgcctcctggagttatctaggaatcgcatacgatgcctgaaccctggggacctcgccgcgcttccagccctcgaggagctcgacctctctgaaaacgcaatcgcccacgtggagcctggcgctttcgcaaacctgccacgcctgagggttttgcgcctgcgggggaaccagcttaaactaattcccccgggagtctttacaaggctcgataacctcactctgcttgacctctccgagaataagctcgtgatcttattagactacacatttcaggatcttcactctctgaggcgtctggaggtgggggacaacgatctggtctttgtgtctagaagggcctttgccgggctacttgcccttgaagagctgacactggagaggtgcaaccttacagcattgtcgggggagagcctcggacacctgaggagcttgggcgctctgcgtctccggcacctcgcgattgcttcacttgaggatcagaatttccggcgtcttccaggtttgctgcatctggagatcgataattggcctttactggaggaagttgccgctggcagtttgcgggggctcaacctgacatccttaagcgtaactcacaccaacattactgcggtccccgctgcagcccttcgacaccaagctcatcttacctgtttaaatctcagtcataacccaattagcactgtcccaaggggctctttccgagaccttgtgcggctcagagagcttcatctggccggagctctgctggccgtcgtagagccacaagcatttctgggactccggcagattagactgttgaatttgtctaacaatctgctgtctacacttgaagagagcacctttcatagcgtgaacaccctcgagacccttcgagtggatgggaatcctctggcttgtgattgcagattgctctggatcgtgcagcggaggaagactctgaattttgatggaagactaccggcttgcgcaacacctgccgaggtacggggcgacgctctgagaaacttgccagacagcgtgctgttcgagtatttcgtgtgtcgcaaacctaaaatacgagaacggagactgcagagggtaactgctaccgccggagaggacgtgaggttcttatgcagggccgaaggggagcccgctcccaccgtcgcatgggtaacaccacagcatcgccccgtcactgctacttcagcaggccgggcacgggttctccccggaggcactcttgagatccaggatgcaaggccccaagacagtggcacatacacctgcgtagccagtaacgctggaggcaacgacacctattttgccactctgacagtgcggccagagcctgctgcgaaccgcactcctggcgaggcacataatgaaacccttgccgctctgcgcgcccccctcgacttgaccaccattttagtgtcaacggcaatgggctgcatcacttttctcggggttgtgttgttctgctttgtgctcctgttcgtctggtctaggggcagaggacaacacaaaaacaacttctccgtcgagtactcatttcggaaggtggatggccctgcggcggctgcaggccagggcggagcacgcaagttcaacatgaagatgatctag

SEQ ID NO: 192884 - DNA, 2172 bp, synthetic construct
  misc_feature 1..2172: note = Description of Artificial Sequence: Synthetic coding sequence
  source 1..2172: mol_type = other DNA
atgcccctgttcttccggaagcggaagcccagcgaggaggcccggaaaagactggaataccaaatgtgccttgccaaagaggccggcgccgatgacatactcgatatctccaagtgcgagttgagcgaaattccgtttggtgccttcgccacctgcaaagtgcttcaaaaaaaggtgctgatcgtgcacacaaaccatttgactagtttgcttcccaagagctgcagtcttctttcattagcaactatcaaggttctggatttgcacgacaaccagctgaccgctcttcctgatgacctgggacagcttaccgctctgcaggtgttaaatgtcgaaaggaaccagcttatgcagctgccaagaagcatcggcaacctcacccagctgcagacactaaatgtgaaggataacaagttgaaggagctccctgacacagtcggcgagctgcgcagtttacggactcttaacattagcggaaacgagatccagagactgccccaaatgctagcccatgtgcgtacgctggaaatgttaagtctggatgcgtctgccatggtgtatcccccaagggaggtctgcggagccggtacagctgctatcctgcaattcctgtgcaaggagtccggtctggaatattatcccccctcccaatatctgcttcccatccttgaacaagacggtatcgagaactcccgggactcgcctgacgggcctactgaccgattcagcagagaggagctggagtggcagaatagattctccgactacgagaagagaaaggagcagaaaatgcttgaaaagctggagttcgaaagaaggctcgaactcggtcagcgagaacacacgcagctcctgcagcagtcaagctcgcagaaggatgagatcctgcaaactgttaaggaggagcaatctcgtttggagcagggcctaagcgagcatcagcgtcatctgaatgccgaaagacaacgcctgcaggagcagcttaaacagacggagcagaacatttcctcccggatccaaaagctgctccaggataatcaaagacagaaaaagtctagcgagatcctaaaaagcttggaaaacgaacgaattaggatggagcagctgatgagcattactcaagaagagaccgagtcgcttaggaggagggacgtggccagcgcaatgcagcagatgctgactgaatcctgcaaaaaccggctgatccagatggcatacgagagccaacgccagaacttggttcagcaggcttgtagtagtatggccgaaatggacgagagattccaacagatcctatcctggcaacagatggatcagaacaaggccattagccagatcctgcaggaatctgcaatgcagaaggccgctttcgaggcgctgcaggttaagaaggacctgatgcacaggcagattcggtctcagattaaactgatcgagacggaactgctccagcttacccagctggaactaaagaggaaaagcctcgacactgagtcactgcaagaaatgatctctgagcagcgatgggccctgtcatcacttctgcagcagctgttaaaggaaaagcagcagcgggaagaagagctccgagaaattctgactgaacttgaagcaaaaagcgagacgcgccaggagaattactggttgatccaatatcagcggctgttgaaccagaaacctcttagcctcaaattgcaggaagaaggaatggaacggcaactcgtcgcactcctggaagaattaagcgcagaacactatttaccaatattcgcccatcaccgactcagtctcgatttgctgagtcaaatgtctcccggcgatctggctaaagtcggagtaagtgaagccggcctgcagcacgagatcttgaggagggtgcaggaactgctggacgccgcaaggattcagcctgagctgaagcctcctatgggggaggtggttactccaaccgctccgcaggaacctcccgaaagtgtgcggccatccgccccacctgccgagctggaagtgcaggcctccgaatgtgtcgtgtgccttgaacgggaggctcaaatgatctttctgaactgtggccacgtatgctgctgtcaacagtgctgccagcccctccgaacttgccccctgtgccggcaggacatcgcccagaggctccgcatctaccattcatcttag

SEQ ID NO: 192885 - DNA, 2172 bp, synthetic construct
  misc_feature 1..2172: note = Description of Artificial Sequence: Synthetic coding sequence
  source 1..2172: mol_type = other DNA
atgcccctgttcttccggaagcggaagcccagcgaggaggcccggaagaggctcgaatatcagatgtgtctggcaaaagaggctggagctgatgacattctggacatctccaaatgtgagttgagcgagattccgtttggcgctttcgcaacgtgtaaggttcttcagaagaaggtcttgatcgtgcacaccaaccatctcactagcctcttgcctaaatcttgttccctgctgagtctggctaccatcaaggtgcttgatctgcacgacaatcagttaactgccttgcctgacgacctgggacagctgacggcgctccaggttcttaatgtagaacggaaccagctgatgcaacttcccaggtcaattgggaatctgacccagcttcagaccctgaacgtgaaggacaacaaactgaaggagctgcccgatactgtgggtgaactcagaagtctcaggaccttgaatatctctggaaacgaaattcagcggttgccgcagatgctggcccatgtcaggactctggagatgctatccctggatgcttccgctatggtctacccaccgcgcgaagtctgtggtgccggaactgcagcaatacttcaattcttgtgcaaagagagtggcctggagtattacccgccaagtcagtatctgctgcccatcctggaacaggacggaatcgaaaactcccgtgattctcctgacggccctacagacagattcagccgcgaagagctcgagtggcagaacagattttccgactatgagaagcgcaaagagcaaaaaatgctggaaaaacttgagttcgaacgcaggctcgagcttggccagcgcgaacacactcaactgctccagcaaagttcctcccaaaaagacgagattttgcagaccgtgaaagaggagcaaagtcgtctggaacaaggactatcagagcatcagcggcatcttaacgcggagaggcagagactccaagagcaattaaaacaaacagagcagaatatttcatctagaatccagaagctgctccaggataaccagagacagaaaaaaagttccgagatcttgaaaagcttagaaaatgaaagaatcagaatggaacagttgatgtcaatcacacaggaggagactgagagtctgcgcaggcgcgacgtggcatcagctatgcaacagatgctgaccgagtcgtgtaagaatcgactgattcagatggcttacgagagtcagcggcagaacctagtgcagcaagcatgcagctcaatggccgagatggatgaacgcttccaacagatcctcagctggcagcagatggatcagaataaagcaattagtcaaatcctgcaagagagtgctatgcaaaaggctgcattcgaagctctgcaggtgaagaaggatttgatgcaccgtcaaatacggtctcagatcaagctaattgagaccgaattgctgcagctcactcagttggaactgaagaggaagtcacttgataccgagtccctgcaagagatgattagcgagcaacggtgggcactgtcctcacttctccagcaactgcttaaagaaaagcagcagcgggaggaggagctccgagaaatacttacagaactggaagcgaagtctgaaacacgccaggagaactattggttgatccaataccagaggcttcttaaccagaagcctctgagcctgaagttgcaagaagagggcatggaaaggcagctggtggcacttttggaagagctcagcgcagaacactacctccccatcttcgctcaccaccgactctccttggacctgctttctcaaatgtcccccggcgatttggccaaagtcggagtgagcgaggccgggttacaacatgagatcttacggagggtgcaggaactgctggacgcagcaagaatacagccagaactgaaaccacctatgggcgaggtcgtgactccaacagcgccacaggagccgcctgagtctgtgagaccatccgcaccacctgccgagttggaggtgcaagcaagtgaatgcgtagtttgtctcgagagagaggcacagatgatctttctcaactgcggccacgtgtgctgctgtcagcagtgctgtcaaccactccgtacgtgccctctttgcaggcaagatatcgcccagagactccgaatttatcactccagttag

SEQ ID NO: 192886 - DNA, 2172 bp, synthetic construct
  misc_feature 1..2172: note = Description of Artificial Sequence: Synthetic coding sequence
  source 1..2172: mol_type = other DNA
atgcccctgttcttccggaagcggaagcccagcgaggaggcccggaaaagactagagtaccagatgtgtctggcaaaagaggctggcgcagacgacatattagacatttctaagtgtgagttgtctgaaatcccgttcggcgcgttcgctacctgcaaggttctccagaagaaggtgcttatcgttcatactaaccatctgacctccttgctcccaaaatcatgcagcctcttgtcactggcgaccatcaaggtcctggatctgcatgataaccagctgaccgcactcccagacgatctcgggcaactcactgccctccaggtgctgaatgttgagcgaaatcagcttatgcagcttccgaggagtatcggcaacctaacccagctccaaacactaaatgtcaaagacaacaagctcaaggaattacccgacaccgtcggcgagctcaggtctttgcgaaccctgaatatatctgggaacgaaatccaacggcttcctcagatgctggctcatgtgcgcaccctggagatgctgtcattagacgcctctgccatggtctacccacctcgcgaagtgtgtggcgccggaactgcggccatccttcagttcctttgcaaagaatcaggcctggagtattatcccccctcccagtacctcctaccgatcttagaacaagatggtatcgaaaactcgagggattctccagacgggcccacggacagatttagccgggaggagctggagtggcagaaccgctttagtgattacgaaaaaaggaaagagcagaagatgctcgaaaagctagaatttgagcgtcggcttgaactgggacagagggagcatacacagctcttacagcagagctcatctcagaaggatgagatcctgcaaacggtgaaggaggaacaatccaggctagaacagggcctgtccgagcaccagcgccatctcaatgccgagaggcagcggctgcaggaacagctgaagcagaccgagcagaacatcagttcaaggatccagaaattgttacaggataatcagcgtcaaaaaaagtcttccgaaattttgaaatccctcgagaacgaacggattagaatggagcagctcatgtctataacgcaggaggagacagagagcttgagacgtagagatgtggcaagcgccatgcagcagatgctgacagagtcctgcaagaataggctgatacaaatggcctacgaaagccagcgacaaaaccttgtccaacaggcatgcagctccatggctgaaatggacgagaggtttcagcagatcctctcatggcagcagatggaccagaacaaagccataagccagattctgcaagagtctgcaatgcagaaagctgcattcgaggcgttacaggtgaaaaaggacttgatgcacagacaaatccggtcccaaatcaaactcattgagactgaactattgcaactgacccaactggaactcaagcgcaagtcgctagataccgagtccctccaagaaatgatcagcgagcaaagatgggctctgagtagtctccttcagcaactcctgaaagagaagcagcaaagggaagaggaactgcgagagattttgaccgaactcgaggccaaaagcgagacgcgacaggagaattattggttaattcagtatcagcgcttactgaatcaaaaaccactgtccctgaagctgcaagaagagggcatggaacgacagctggtcgcattactggaagaactgagtgctgaacattatctgccgatttttgcgcaccatcggttaagtctggacttgttatctcaaatgtccccgggagacctggccaaagtgggcgtcagcgaggccggcctccagcacgaaatcctgcggcgggtgcaagaactgctcgacgccgccagaatacagccggaactgaagccacccatgggggaggtcgtgactcctaccgccccccaagagcctcctgaatccgtccgaccatctgcacctccagcagagctggaagtccaagcttctgagtgcgttgtgtgtctcgagcgcgaagctcaaatgatcttcctcaattgtgggcatgtgtgctgttgccagcaatgctgtcagccactcagaacctgccccctctgcaggcaggacatagcgcagaggctccggatataccacagcagctag

SEQ ID NO: 192887 - DNA, 2091 bp, synthetic construct
  misc_feature 1..2091: note = Description of Artificial Sequence: Synthetic coding sequence
  source 1..2091: mol_type = other DNA
atgcccctgttcttccggaagcggaagcccagcgaggaggcccggaaacgtctggagtaccagatgtgcctggctaaagaagctggtgctgatgatatcctcgatattagcaagtgcgaattgagtgagatcccctttggtgcctttgctacttgtaaagtgctccagaaaaaagtactcatcgtgcataccaatcatctgacctccctgctccccaaatcttgctctctgctctccctagcaactataaaggtgctggatcttcacgataaccaactcactgccctcccagacgacctggggcagctgacagctctgcaagtgcttaacgttgagcgcaatcaactcatgcagttgccacgatccattggcaatcttactcaactccagaccctgaatgtgaaagacaacaagctgaaggagttacctgacacagtaggtgaacttcgaagtcttagaacactgaatatttccggaaatgagatacagaggttaccacaaatgttggctcacgtgcggacactggaaatgctgagcctggatgcttccgccatggtgtatccgccccgggaagtatgtggcgccggcacggccgctattctccaatttctttgtaaggagtccggactggaatactatccaccttcccagtaccttctgcccattctggagcaggacgggatcgagaactccagagacagtcccgacgggcccaccgatcgcttcagccgggaggaattagagtggcagaataggttttctgattatgagaaacgaaaagagcagaagatgttggaaaagctcgaatttgagaggaggctggagctggggcagcgggaacacactcagctcctccaacagagttccagccagaaagatgagattctccagacagtgaaggaagagcagtctcggctggagcagggcttatcggaacaccaaagacaccttaacgcagaacgacaacgcttgcaggagcagctgaaacaaacagagcagaacatttcctcccgtatccaaaaactcctccaagacaatcaacgacagaaaaaatccagcgagatactgaagtcgctcgaaaatgagagaataaggatggagcagctcatgtcaataacccaagaagaaaccgaatccctgcgaagaagggacgtggcaagcgcaatgcagcagatgctgacggaatcttgtaagaaccggcttatccagatggcctacgagtcccagcgacagaacctggttcagcaggcgtgttcatctatggcagaaatggatgagcggtttcaacaaatcctgtcatggcagcagatggatcaaaataaggccatttctcagattctccaagagtcagccatgcagaaggcggctttcgaagctctccaggtgaagaaggatctcatgcatcgccagataagatcccaagagatgatctcagagcagcggtgggccctgtcatctctgctgcagcaattgctgaaggaaaaacagcagcgggaagaagagctgcgggagatccttaccgagctggaagctaagtccgaaacgcgtcaggagaattattggctaattcagtaccagcgattgctgaaccagaagcctctctcactgaagctgcaggaggagggcatggagcgccagcttgtggcgctgctggaggaattatcagctgagcattacttgcctatatttgcccaccatagactgagcctggatctgctttcccagatgagtcccggggacctggccaaagtgggcgtttctgaggcagggcttcagcatgaaatattgcgtagagtccaggagttgctcgatgccgcccgcatccaaccggaacttaaaccccccatgggagaggtggtgaccccgactgcccctcaggaaccccctgagagcgttcgcccttccgcacccccggctgaactggaagtgcaggcgagcgaatgcgtggtttgcctggagagagaggcccagatgatcttcctgaactgtggacacgtttgttgctgtcagcaatgttgccagcctttgagaacatgcccgttgtgtcgccaggatattgcccagagactgcggatctaccacagctcctag

SEQ ID NO: 192888 - DNA, 465 bp, synthetic construct
  misc_feature 1..465: note = Description of Artificial Sequence: Synthetic coding sequence
  source 1..465: mol_type = other DNA
atgttccactgcatccccctgtggcggtgcaaccggcacgtggagtcaattgacaaaagacactgcagcttagtctacgtgcctgaagagatatacaggtacgctcgctcgcttgaagaactcctcctggacgccaatcagctccgcgagctgcctgagcagttctttcagctggtgaaactcaggaagttagggttgtctgataatgagattcagagactgcccccagagatcgccaatttcatgcagctggtggaactcgacgtgtcacggaatgagataccggagatccccgagagcatctctttttgcaaagctttgcaggtcgcagatttcagcgggaatccgctgacccgtctgcctgaatccttccccgagctgcaaaatctaacctgtctcagcgtgaatgatatctccctccagtcactgcctgaaaacattggcaagcaaaagacaacttcatag

SEQ ID NO: 192889 - DNA, 1575 bp, synthetic construct
  misc_feature 1..1575: note = Description of Artificial Sequence: Synthetic coding sequence
  source 1..1575: mol_type = other DNA
atgttccactgcatccccctgtggcggtgcaaccggcacgtggagtccattgacaagcggcattgctccctggtgtatgtgccagaggagatttatcgctacgcccgaagcctcgaagagctcctgctcgatgccaaccagctgcgagaactgcccgagcagtttttccaactggtgaaactgcgcaagctcggattgagcgacaacgaaatccaacgcctgccgccggaaattgctaacttcatgcagctggtggagcttgatgtctcaaggaacgagatccctgagatccctgagtctatctcattctgtaaggcccttcaagtggcagatttctcgggtaatcccctaacccgtctgcccgagtccttccccgaactgcagaacctgacctgcttgagcgtgaacgatatatctctacagtcactgcccgagaacattgggaacctgtataacctcgccagcctggagctacgggaaaatctgttaacatatttgccagactccttgacacagttgcgacggttagaggagctggacctgggcaacaatgagatctacaacctaccggagagtatcggggctttgcttcacctaaaggatttgtggctagacggcaaccaactgtctgagcttccgcaggaaattgggaacctaaaaaatctattatgtctggatgtgtctgaaaatcgcctcgagcgattacctgaagaaatctccgggctgacatcccttaccgacctcgttatcagtcagaatttactggaaactattcctgatgggattggaaagctcaagaaactgagcatactaaaggttgatcagaacagactaacccaattacccgaagctgttggcgagtgtgagagcctgaccgaattagtgcttactgagaatcaactactaactttaccaaaatcgatcggaaagttaaagaagctgtcgaacttaaacgcggatcgaaacaaactggtctccctgccaaaggagattggcgggtgttgttcactgaccgttttctgtgtgagggacaatcgactgacgaggatccctgccgaggtgtcccaagctacagaacttcatgttctagacgttgccgggaataggttgcttcaccttcccctgtcattgactgcccttaagctgaaggccctatggctgtctgataatcaatcacagccactgctgacttttcagacagatactgattacaccaccggcgagaaaatcttaacgtgcgttctgctcccccaactcccctcggagcctacttgtcaggagaacctgccccggtgcggcgccctggaaaatctggtaaatgacgtgtctgacgaagcatggaatgaaagagccgtgaatcgcgtgtcagccattagatttgtggaggatgagaaggatgaggaagacaatgaaactcgcaccttactgcggcgcgccactccacacccaggagaactcaaacatatgaaaaaaacagtcgagaatctgagaaacgatatgaacgcggccaagggactcgatagcaacaagaatgaggttaatcatgccatcgaccgggtgacgacatccgtgtag

SEQ ID NO: 192890 - DNA, 834 bp, synthetic construct
  misc_feature 1..834: note = Description of Artificial Sequence: Synthetic coding sequence
  source 1..834: mol_type = other DNA
atgggcaacaccatccgggccctggtggccttcatccccgccgacagatgccaaaattacgtggtccgggacctgcgcgagatgccgttggataagatggttgacttgtcgggaagccagctgaggcgattcccgctgcacgtttgttccttccgcgaattagtaaaactgtacctgagtgataatcacctaaattccctgccccctgagttaggacagttacagaatctccagattttggcccttgactttaacaatttcaaagctttgcctcaggtggtgtgtacgctgaaacagctgtgcattctctatctcggtaacaacaaactctgcgacctgcctagcgagctttctctgctgcagaatctaagaaccctgtggattgaagctaattgtctgacacagttgcccgacgtggtttgtgagctgtcacttctgaaaacactgcacgctggctcgaacgctctgcgcctgctgcctgggcaactccgccgcttgcaggaactgagaaccatttggctaagcggcaaccggctgaccgatttcccaaccgtgttgctgcatatgcccttcctggaggtaattgacgttgactggaacagcatcaggtacttccctagtctggcacatttgtcatcacttaaactggtgatttatgaccataacccatgtaggaatgcccccaaagttgccaagggggtcagaagggtgggaagatgggctgaggagacacccgaacccgacccccgaaaagcccgcaggtatgccctggtccgggaggagtctcaggaattgcaggctccagtgcccctgctccccccaactaatagctag

SEQ ID NO: 192891 - DNA, 4116 bp, synthetic construct
  misc_feature 1..4116: note = Description of Artificial Sequence: Synthetic coding sequence
  source 1..4116: mol_type = other DNA
atgaccgaggagagcagcgacgtgccccgggagctgatcgagagcattaaagacgtcataggtaggaagattaaaatctcggttaagaagaaggtaaagctggaggtcaagggcgataaagttgagaacaaagttttagtgctgacctcctgtagggccttccttgtgaccgcgagaataccgactaagctcgagctgaccttttcatatcttgaaatccatggcgtggtgtgtagcaaaagcgcccagatgatcgtggagacggaaaaatgtagcatttcaatgaaaatggcgtctcccgaggacgtgtccgaagttctggcccatatcggcacatgtctcaggaagattttcccagggctgagccccgtccgtatcatgaaaaaggtatccatggagccatccgagcgcttggcttccttgcaggcattatgggattctcagactgtcgctgaacagggcccatgcggtggattcagtcaaatgtacgcctgcgtgtgcgactggctaggttttagctacagagaggaagttcagtgggatgtggataccatctatctaacacaagacacaagagagctcaaccttcaggacttctcccaccttgatcaccgcgacttgatcccaattatcgctgccctcgagtacaaccagtggttcactaaactctccagcaaagacctaaaattgtctactgatgtttgcgaacagatcctgcgggttgtcagccggagtaataggctggaggaactggtgctcgagaacgctggactgcgcacggacttcgcccagaaattggcttccgccctcgcacacaatcccaacagtggcctccacactataaacctggctggaaaccccttggaggatagaggagttagtagcctcagtatccaatttgcaaagctgcctaaagggttaaaacacttgaacttgagtaaaacctccctgagtcctaaaggcgttaattccttgagccagtccctgagcgccaaccctcttacagcttctaccctggtgcacttagacctgtcaggcaacgtgttacgcggggatgatttgagtcacatgtacaattttctcgcccagcccaacgctattgtgcacctggacctcagcaacaccgaatgtagcctcgatatggtgtgtggagctttgctgagaggctgccttcaatatttggcggtcttaaatctgtcgcgtaccgttttcagccacagaaaaggcaaggaagtcccaccgtctttcaaacagttcttctcctctagcctggcacttatgcacatcaacctgtcaggaacgaagctgagccccgagccgctgaaggccctgctgttgggcctggcttgtaatcacaacctcaagggggtgagcctggatttgtctaactgcgaattgcggtctggcggagcccaggtcctggagggttgcatcgccgagatacataacatcacaagcctggatattagcgacaacggactagaatcagacttgtcaacgctcattgtctggctgtccaagaatcggagcatacaacacttggccttgggcaagaactttaataatatgaaatctaaaaatctgacgcctgtgttggacaacttggtacagatgattcaggatgaggagtcccctctgcagagtctcagcctcgcagactccaagttgaagaccgaggtgactataattataaatgctctgggatccaacaccagcttaactaaggtggacatctcaggaaatgggatgggtgatatgggcgcaaagatgttggccaaagcgctgcagatcaatactaagctgcgcactgtgatttgggacaagaataatattaccgcacaagggttccaggacattgccgtggccatggaaaagaactatacgctgcgcttcatgcctatccccatgtatgacgcctcccaagcactaaaaactaatcctgaaaaaaccgaggacgccttacaaaaaattgaaaactatctattgcgcaaccacgaaacccggaagtacctgcaggagcaggcataccgtctgcaacaagggatcgtgacttccacgacacagcagatgattgacagaatctgcgtgaaggtccaggaccatctgaatagccttcgcaactgtggcggggatgcaatacaggaggacttgaaatctgcggaacgtctgatgagggacgctaaaaactccaagacactgcttcccaatttgtatcatgtcggcggcgcctcttgggcaggagcttctggtctgctgagctcacccattcaggagacactagagtcaatggcaggagaggtgactagagtggtcgacgaacagcttaaggctctcctggaatctatggttgatgctgcagagaacctgtgccccaacgtgatgaagaaagcacacattaggcaggatctgatccacgccagcacagagaaaatctctatccccaggactttcgtcaaaaacgtgcttttagaacagagcgggattgatatcctgaataaaatctcggaggtcaagctcaccgtcgcctccttcctgtcggaccgaattgttgatgaaatcctggacgccctaagtcattgtcatcacaagctggccgatcacttctcccggaggggcaagaccctccctcaacaggagtcactggaaatcgagctggctgaagaaaagcccgtgaaacgcagtatcatcacagtggaggagctcactgaaatcgagcgacttgaagacctcgacacatgcatgatgacaccaaagagcaaaagaaagagcatccacagccggatgctgcgccccgtgtcccgggccttcgaaatggagtttgacctagataaagcactcgaggaggtcccaattcacattgaagacccaccctttccctcactcagacaagaaaagcggagctccggttttatttctgagctgccgtctgaagagggaaaaaagttggaacactttacgaagctgagaccgaaaagaaataagaagcaacagcccacccaggctgcagtgtgtgccgccaacattgtctctcaggacggcgaacagaatgggcttatgggacgcgtggatgaaggtgtagacgagtttttcaccaaaaaggtaacaaaaatggattcaaaaaaatggtcaacacggggctcagagtcccacgagctcaacgaaggaggcgacgagaagaaaaaacgtgatagtcgcaaaagttctggatttttaaacctcatcaagagcaggtccaaatcagagcggccaccaactatactgatgacggaggaaccttcatcaccaaaaggtgcagttagaagcccgcctgtcgactgcccccgcaaagataccaaggctgcagagcacaatggcaacagcgaaaggatcgaggagatcaagactccagattccttcgaggagagtcaaggggaggagattggcaaggtcgagagatccgattccaaaagttccccccaggccggacggcggtatggcgtccaggtaatggggagcggcctgctggctgagatgaaggctaagcaggaaaagagagcggcctgcgctcagaaaaaactggggaacgacgctgttagccaggactctagttcccccgcccttagtggggtggaaagaagcgacggcggcggtgcagttcctaagctccatcccgggctccccgagaaccgcttcggactgggaacacccgaaaagaataccaaagcagaacccaaggcagaggccgggagccggagtagaagcagtagcagcacccccacatctccaaagcctcttctccaatctcccaaacccagcctcgccgcacgcccagtcattcctcaaaagcctagaactgcttcacggccagacgacattccagactcccctagctcccccaaagtcgcacttctcccgccggtgctgaagaaagtcccgtctgataaggagcgagacggccagtcctcccctcagcccagccctcgcactttctctcaggaggtttctcggcgtagctgggggcagcaggcccaggaatatcaggaacagaaacaaaggagtagttcaaaagacggccaccagggatcgaagagcaatgatagcggggaagaggcagagaaggagttcattttcgtgtag

SEQ ID NO: 192892 - DNA, 531 bp, synthetic construct
  misc_feature 1..531: note = Description of Artificial Sequence: Synthetic coding sequence
  source 1..531: mol_type = other DNA
atgtacgcctgcgtgtgcgactggctgggcttcagctaccgggaggaggtgcagtgggacgtcgataccatttatcttacacaggataccagggagctgaatctgcaggatttttcccacctcgaccatcgcgacctgattccaattatagctgcgcttgaatataatcagtggttcactaaactttcctctaaggacctaaagctgagtacagatgtttgcgaacagatcctacgcgtagtgtcccgctccaatagacttgaagaactcgtgctggagaacgccggtctacgcaccgacttcgcacaaaaacttgcgagtgctttggctcataatccaaactctggcctccatactatcaacctggcgggaaaccccctggaggacagggaaacaacaactaagatcaagcgccagaacgtgcctaccgttttgcaaacatatctagtcgtctgcccatcagattatcagccgtgtcccctgcccttgggaaaagacaattattacagtgacttctcccacgatggctag

SEQ ID NO: 192893 - DNA, 3981 bp, synthetic construct
  misc_feature 1..3981: note = Description of Artificial Sequence: Synthetic coding sequence
  source 1..3981: mol_type = other DNA
atgaccgaggagagcagcgacgtgccccgggagctgatcgagagcatcaaggacgtaatcggacggaaaatcaaaatctctgtaaaaaagaaggtgaagctagaggtgaagggggacaaagtcgaaaataaggtgctggtgttaacttcgtgtagagcatttctggtcactgcgaggattcccaccaagctggaacttacgttcagctacctggaaattcacggcgtggtttgttctaaatcggctcagatgattgttgaaaccgaaaaatgcagcatctccatgaagatggccagccctgaggacgtgtccgaagtcctggcgcatattggaacatgccttcgtaagatttttcccggcttatctcctgtacgtatcatgaaaaaggtttctatggagccctccgaaaggttggcttcactccaagctttatgggattcccagaccgtggcagagcagggcccctgtggtgggttctcacaaatgtatgcgtgcgtatgtgactggctcggtttctcctatcgcgaggaagtccagtgggacgtagacaccatctacttaacccaggacacacgggaacttaacctccaagatttttctcacctcgatcaccgggacttgattccgatcattgccgccctcgagtacaaccaatggttcacaaagctgtcaagcaaagacctgaagttatcaaccgacgtgtgtgagcagatcctgagagttgtgagccgttccaacaggctcgaagaacttgtgctcgaaaacgctgggctgagaacggattttgcgcagaagctggcaagcgctctggcgcacaaccccaattcgggcctgcataccatcaacctggctggcaacccccttgaagatagaggagtaagttctctatccatacagtttgcgaaactccccaagggactgaagcacctcaatctgagtaagacatctctgtcacccaagggagtcaatagcttaagtcaatcactgtctgcgaacccactaacagctagcacactggtgcatctggacctgtccggaaatgtgctgcgcggtgatgacctgtcacatatgtataacttcctggcccaacctaatgccattgtgcacctggacctgagcaataccgagtgcagccttgatatggtctgcggcgcccttttgcggggatgtctccaatacctcgctgtgctgaacttgtctcgaacagtgttcagccatcgaaagggcaaagaggtgcctccttctttcaagcaattctttagtagtagcctcgccctcatgcacatcaatctctctggcactaagctctcccccgagcctctgaaggccctgctgctgggcctggcgtgtaatcacaatctgaaaggcgtaagcctcgatctgtcaaactgcgagctgagatccggcggtgctcaggtgctggaggggtgtatcgccgagattcataatatcacttctctggatatcagcgataatgggctggagtccgatctgagtacattaatcgtgtggctgtccaaaaaccggtctatccagcacttagccttggggaaaaattttaacaatatgaaatccaaaaaccttaccccagttctggataacctcgttcagatgatacaagatgaggaaagccctctccagtccttaagcctagccgactcaaaacttaaaaccgaggtgaccattatcataaatgccctcggaagtaatacaagccttacaaaagtggacatcagtggcaacgggatgggggacatgggggccaaaatgctggccaaggctttgcagattaacactaaactaagaacagtgatttgggacaaaaacaacataacagcacagggtttccaggacatcgcggttgctatggaaaaaaactacacattgaggtttatgccaattcctatgtatgacgcaagtcaggccctgaaaacaaacccagaaaaaaccgaggatgcactccagaagatagaaaactaccttttgcgaaaccacgaaactcggaagtatctgcaagagcaggcctatcgccttcagcagggcatcgtgacttctacgacccagcagatgattgataggatatgcgtgaaggtccaagaccacctgaactccctccgcaattgcggcggggatgcaattcaggaagacctgaagagcgccgagaggttgatgcgcgatgcaaaaaattctaagacactgctgcccaatctgtaccacgtcggtggcgcaagttgggccggggcatctggcttactgagtagtcctattcaggaaaccctggagagtatggcgggagaggtgactcgcgtggtggatgaacagcttaaagccctgctagagagcatggtggatgctgcagagaacctctgtccaaacgtcatgaagaaggcccacatcaggcaggatcttattcatgcttcaaccgagaagatctctatccctagaacgttcgtgaagaacgtactgctagagcagtcaggcattgacattctgaacaagatcagcgaagtaaaacttaccgtggcttcctttctgtccgatcggatcgtcgacgagattctggatgccctcagtcactgccatcataagttagcagatcacttttcacgacgcggtaagactcttcctcagcaggagtctctggagattgaacttgctgaggaaaaacccgtaaaaagatcaatcattacggtcgaggagctgactgaaattgagagactggaagacctggacacatgtatgatgaccccaaaaagcaaacgcaaatccatccattctcggatgctgcggccagtgagtcgggcctttgagatggaattcgacctggataaggcactggaggaagtccccatacatatagaagaccccccctttccctcattacgccaggaaaagagatcatccggcttcatttctgagctgccaagtgaagaaggcaaaaagctggagcacttcaccaaactacggcccaagcgaaacaaaaaacagcaaccgactcaggctgcagtgtgcgcggcaaacattgtctctcaggatggagaacagaatggccttatgggccgagttgacgaaggggtggatgaattctttaccaagaaggttacgaagatggatagcaagaaatggtcaacacgcggctccgagtcccatgagcttaacgagggcggtgacgagaagaaaaagagagactcgcgaaaatcaagtggatttctcaaccttataaaatcccggagcaaaagtgagaggccacccactatcctgatgacagaggaaccgagcagtcctaagggtgcggtgaggtctccacctgtcgactgccctcggaaagataccaaggccgctgagcacaatggcaatagcgaacggatcgaagaaatcaagactccggactccttcgaagaaagccagggtgaagaaatcgggaaagtagagaggtctgatagcaagtcctcacctcaagccgggcgacgatatggggttcaggtcatgggctcaggattactagccgaaatgaaagcaaagcaggagaaccgttttggactggggacaccagagaagaatactaaggcagaacccaaggccgaggctggttctcgatcaagatcaagctcttcaaccccaacttctccaaaacccctactgcagtcccccaagccaagcctggcagctcgaccagtcatcccacagaagcccaggaccgcctcgcgtccagacgatatccccgattctccaagctctccaaaagttgcactattgccacccgttttgaagaaggtgccgagcgataaggagagagacggacagagttccccgcaaccaagcccaagaacgttctcccaggaggtgagtagacgctcctggggccagcaggcgcaggagtatcaggagcagaagcagcgaagcagcagtaaagatggccatcagggatcaaaatctaatgattctggggaagaagctgaaaaggagtttattttcgtgtag

SEQ ID NO: 192894 - DNA, 1116 bp, synthetic construct
  misc_feature 1..1116: note = Description of Artificial Sequence: Synthetic coding sequence
  source 1..1116: mol_type = other DNA
atgggccacaaggtggtggtgttcgacatcagcgtgatccgggccttgtgggaaactcgggtcaagaagcataaggcatggcagaagaaagaggtggagcgcctcgagaagagtgctttagagaagataaaagaggagtggaactttgtggcagaatgtagacgcaaggggattccccaggctgtgtattgcaaaaacggatttatagacacatcggttcggcttcttgataagatcgagcgaaataccttgacgcggcaatcttcgttgcccaaggaccggggcaagagaagtagtgcatttgtcttcgaattaagcggagaacactggaccgaactgccggattcactgaaagagcagacgcatctaagagaatggtacatctctaacacactgatccagataattcccacgtatattcagctttttcaggccatgaggatacttgatctacccaaaaaccagatttctcacctgccagctgagattggctgcctcaagaacctgaaagaactgaatgtgggcttcaattatcttaagtctattccccccgagctgggagactgcgagaatctggagagactggattgtagcggcaacctcgagctgatggagcttccgttcgagctgagtaacctgaagcaggtcacgttcgtcgacatctctgcgaataagttctcctcagtgcctatttgtgtcttgcgtatgtctaacctgcagtggctcgacatctcgagcaataacctgacggatttaccccaagatattgacaggctggaggagttgcagagttttctgctctacaaaaacaaacttacgtacctgccatatagcatgctgaatttgaagaaactcactctactcgttgtgtccggcgatcacctcgtcgaactgcccactgctttatgtgattcgagcaccccgttgaaattcgtgtctctaatggataaccccatcgataacgcgcagtgcgaagatgggaacgagattatggagtccgaacgggatcgacagcactttgacaaggaggtgatgaaagcctacattgaggatttaaaagagcgagagtctgtcccgtcctacactaccaaagtgtccttctcattacagctgtag

SEQ ID NO: 192895 - DNA, 1116 bp, synthetic construct
  misc_feature 1..1116: note = Description of Artificial Sequence: Synthetic coding sequence
  source 1..1116: mol_type = other DNA
atgggccacaaggtggtggtgttcgacatcagcgtgatccgggccctgtgggaaacccgcgtgaaaaaacataaggcctggcaaaagaaggaggtcgagcgactagagaaatctgcccttgagaagatcaaggaagagtggaacttcgtggcggaatgccgcagaaaaggtattccccaggccgtgtactgcaaaaacgggtttattgacactagtgtccggcttctggataagatcgagaggaacacactaacacggcagtcctccttgccgaaagacaggggcaagcgaagttccgcctttgtgttcgagctgtcaggagagcactggactgagctgcctgatagcctcaaggagcaaacccatctgagagaatggtatattagcaacaccttgattcagatcattccaacctacattcagcttttccaagcgatgcggattctcgatttacctaagaaccagattagccatctaccagctgaaatcggctgcctgaagaatctcaaggagctaaatgtaggtttcaattacctcaagagcatccccccggaacttggtgattgcgagaacctcgaacgcctggactgcagtggtaacctggaactgatggaattgcctttcgagctaagtaatctcaagcaggtgacattcgtggacatttccgcaaataagttcagctcagttcctatttgtgtcttacggatgagcaatctgcagtggctggatattagtagcaataatttgaccgatctaccccaagacatcgacagactcgaagagcttcaatcttttctcctgtacaagaacaaacttacatacctgccgtattctatgttgaatctgaagaagcttacccttctcgtcgtgagcggtgatcacttggtggagttaccaacagccttatgtgactcgagcacacctctgaaattcgtgtctctgatggacaaccccattgataacgcccagtgcgaagatggaaatgaaattatggagtctgagcgtgatcgccagcacttcgataaggaggtgatgaaggcctacatcgaagatctgaaggagcgcgagagcgtgccctcgtacacaacgaaagtcagcttttcccttcaactctag

SEQ ID NO: 192896 - DNA, 918 bp, synthetic construct
  misc_feature 1..918: note = Description of Artificial Sequence: Synthetic coding sequence
  source 1..918: mol_type = other DNA
atgggcggcaccctggcctggaccctgctgctgcccctgctgctgagggaatccgattccctggaaccctcctgcacagtgtcgtcggctgatgtggattggaacgccgagttttcagccacttgcctgaatttttctgggctctccctgagtctccctcataatcagtccctgagagcctcaaatgtgatcctgttggacctctcaggaaatggacttagagagctgcctgtgacattttttgctcacctacagaaactggaggtgctgaatgtcctcagaaacccactgtcgcgggtggatggcgccctcgcggcccggtgtgacctcgacctgcaggcagattgcaattgcgctctcgagtcttggcatgatattcgtcgcgacaactgctccggacaaaaaccactgctgtgctgggacaccactagctcacagcataatctgtccgcctttcttgaagtcagctgcgctcccgggctggcatcagccaccattggtgccgttgttgttagcggatgcttgttgttggggcttgcaatagccggtcctgtcttagcttggcgcctgtggcgatgcagggtggcgcgcagtagggagctgaataaaccatgggctgcccaagatgggccaaaacctggcctgggtctgcagccgaggtacggctcaaggtcggcgcctaagccccaggtggccgttccttcgtgcccctccactcccgactacgagaatatgttcgtaggacagcccgctgccgagcaccagtgggatgagcaaggcgcacaccccagtgaggacaatgatttttatatcaattataaagatatagatctggcctctcaacccgtatactgtaatctgcagagtttaggccaggctcctatggacgaagaggagtatgtgatacccgggcactag

SEQ ID NO: 192897 - DNA, 1005 bp, synthetic construct
  misc_feature 1..1005: note = Description of Artificial Sequence: Synthetic coding sequence
  source 1..1005: mol_type = other DNA
atgcggggccccagctggagccggccccggcccctgctgctgctgctcctcctcttatcaccctggcccgtttgggctcaggtaagtgctacagcctctcccagcggtagcctgggcgcccccgattgtcccgaggtttgcacatgtgtcccgggaggtctcgctagttgtagcgctctgtccctccctgccgtgccacccggactctcgctgagactgcgggcgcttctgcttgatcacaaccgggtacgcgctcttccgcctggcgcattcgccggagcgggtgcgttacaacggttagacctccgggagaacggcctccatagcgtccacgtccgagcgttttggggcctcggcgccctgcagttgcttgacctctctgctaaccagctcgaagctctcgcccctggaacttttgctccgcttagagcactgcggaacctgtccctggctggcaaccgccttgccaggctcgagccagcggctctcggcgcgctgcccctcttgcgttctttgtccctccaggataacgaacttgccgccctggctcctgggctgctgggcaggcttccagcactggatgcacttcacctgcgagggaacccttggggttgtggttgcgccctgcgccctctctgcgcatggctacggaggcaccctctccctgcgagcgaggccgagacagtgctttgcgtgtggcctggacggctcaccctatctcccctaaccgctttcagcgatgccgccttttcgcactgtgctcagccccttgcactgcgcgacttggctgtggtgtacaccctgggccctgccagctttctggtatccctagcctcatgtctggccctgggaagcggattgacggcttgtcgagcccggagacgaaggcttaggaccgccgcccttcggccaccccggccaccagaccctaacccggaccctgatcctcacgggtgtgcctctcctgccgatccgggttccccagctgctgcggcgcaggcctag

SEQ ID NO: 192898 - DNA, 1923 bp, synthetic construct
  misc_feature 1..1923: note = Description of Artificial Sequence: Synthetic coding sequence
  source 1..1923: mol_type = other DNA
atgctgaacaagatgaccctgcacccccagcagatcatgatcggccccagatttaatagagctctgttcgatcctttgctcgtggtgcttttagccctacagttgctggtggtggctgggttagtgagggctcaaacatgtccatctgtgtgttcgtgttcaaaccagtttagcaaggtcatttgcgtgaggaaaaaccttagggaggtgccagacggcatttcaactaatacgaggctcctgaatctacacgagaatcagatccagatcatcaaggttaattcctttaagcacctgaggcacctggaaatcttgcagctgtcgcggaaccacatcaggacaatcgagatcggtgcgttcaatggactggctaacctaaatacactagagctgttcgacaatcggcttactacgatacccaacggcgcatttgtatacctatcaaagctaaaggagttgtggttgcgcaacaatcctatagagtcgattccctcatacgcatttaacaggattccctccctcagaagactcgatctcggcgagctgaagcgcctaagttacatctccgagggcgcctttgaggggctaagcaatctgcgctatcttaacttagccatgtgtaacctgcgcgagatccccaacttgacaccactcattaagctggatgaactggatctttccggcaaccacctttctgctatccgacctgggagcttccagggcttgatgcacctccaaaagctttggatgattcagtcccaaatacaagtaatagagcggaacgcgtttgacaatctgcaaagtctggtggaaattaacctagcgcataataatttgacactactgccccatgacctctttacccctctgcaccacctcgagcgcattcatctccaccataatccttggaattgcaattgtgatattttatggttgtcgtggtggatcaaggacatggcacccagcaatactgcgtgttgtgctagatgtaacacccctccgaatctcaagggcaggtatattggggaactggaccagaattattttacttgttacgccccagtcattgtcgaaccacctgcagacctgaatgtgactgagggaatggcagccgagctcaagtgccgggcttctacaagcctgacctcagtgagctggatcactccaaatggcactgttatgacgcacggcgcctacaaggtcagaatcgctgtgctgagtgacggaacactgaatttcactaacgtcaccgtgcaggacactggaatgtacacctgtatggttagcaacagcgtggggaataccactgccagtgctacactcaacgttacagccgccactactacccccttttcttattttagtacggttacagtggagacaatggagcccagccaagacgaggcacgcacgaccgacaacaacgtgggaccaacacctgttgtcgactgggagacgactaatgtgacaacttccctgacgccacagtctacccggtccactgagaaaacttttaccatacccgtaacagacatcaactctgggatcccaggtatcgatgaggttatgaagaccacaaaaatcatcatcggctgcttcgttgctattacgttgatggccgccgttatgctagtcatcttctataagatgcgcaagcagcaccacagacagaatcaccacgctcccactcgtaccgtcgaaataatcaacgtggatgacgaaatcaccggagacaccccgatggagtcccatctacctatgccagctatagaacacgaacatctgaatcactataatagttacaaatctcccttcaatcatacaactaccgtgaacacgatcaacagcattcactcttcagtgcacgaaccactgctgataaggatgaatagtaaggacaacgttcaggagacacaaatatag

SEQ ID NO: 192899 - DNA, 1923 bp, synthetic construct
  misc_feature 1..1923: note = Description of Artificial Sequence: Synthetic coding sequence
  source 1..1923: mol_type = other DNA
atgctgaacaagatgaccctgcacccccagcagatcatgatcggccctcgctttaaccgggcccttttcgacccattgctcgtggtgcttctcgcgctgcagctccttgtggtggctggcctggtgcgcgctcaaacctgccctagtgtgtgttcctgttcgaaccagttctccaaagttatttgtgttcgcaagaatcttcgcgaggtacccgatggcatcagcactaacacacggttgcttaacttgcacgaaaatcagattcagatcatcaaggtcaactcattcaaacatctgagacatttggaaattcttcagttatcaagaaatcatattcgcaccattgaaatcggagcctttaacggtctcgccaatctaaacacccttgagctatttgataacaggctgactacaatccctaatggcgcattcgtgtacttgagtaaattaaaagagctgtggttgagaaacaatccaattgaatccataccatcttatgcatttaatagaatcccaagcctccgtcggctggacctcggtgagctcaaaagactgagttacatcagcgagggtgcattcgagggtctgagcaatttgagataccttaacttggccatgtgtaaccttcgtgaaatcccaaatctgacacccctcatcaaacttgacgagctggacttatctggcaaccatctatctgctattcgaccagggtcatttcagggccttatgcatttgcagaaactctggatgattcaaagccagattcaggtaattgaaagaaatgctttcgataaccttcagtcactagttgagattaacttagctcacaacaacttgactctcttgccgcacgatctgtttactcccctgcaccacctggaaagaatccacctgcaccataacccatggaactgcaattgtgacattctgtggctgagctggtggattaaagatatggcgcccagtaacaccgcctgttgcgcaagatgcaacacacctccaaatctgaaaggccgttatattggggagctggatcagaattatttcacttgctatgctcctgttatagttgagccgcccgcagatcttaacgtcactgaaggtatggctgccgaactgaagtgccgtgcctctacgtcactcacaagcgtctcatggatcacaccaaatggcacagttatgactcacggcgcatataaggtgagaatcgccgttctaagcgatggcacacttaattttactaacgtgacagtccaggacacaggcatgtatacttgcatggtgagcaacagtgtgggcaatacaacagcatcggcgacccttaatgttaccgccgccaccacaacaccattcagttacttctcaacagttacagtcgagacgatggagccaagtcaggatgaggccagaacaaccgataataatgtgggtcccacgccagtggtggattgggagaccactaacgtcactacaagcctcactccccagagcacccgatctactgagaagacttttaccattcccgtgaccgatattaactctgggatccccgggatagacgaggtaatgaagacaacaaagatcattattggctgttttgtggccattactctcatggcagctgtcatgctcgtcatcttttacaagatgcggaaacagcatcataggcagaaccaccatgctccaacgcgaacggtggagataatcaacgtagatgacgagatcaccggggacacccctatggaatctcacctccctatgccggcaatcgagcacgagcacctaaatcattacaacagctacaaaagcccattcaaccataccacgaccgttaacaccataaatagcatccattcctctgtgcacgaacctctgcttattaggatgaactctaaggataatgttcaagagacccaaatctag

SEQ ID NO: 192900 - DNA, 1923 bp, synthetic construct
  misc_feature 1..1923: note = Description of Artificial Sequence: Synthetic coding sequence
  source 1..1923: mol_type = other DNA
atgctgaacaagatgaccctgcacccccagcagatcatgatcggcccaaggtttaacagggctctctttgacccactgctggtggttctgctggccctgcagcttctcgtggtggctgggctggtaagagcacagacctgtccatccgtgtgcagttgcagtaaccaattttccaaggtaatctgcgtgcggaagaacctgagggaagtacctgacggaatatctactaacacgagactgttgaacctccacgaaaatcaaatccaaattattaaggtcaactcattcaaacatttgcggcatttagaaatactgcaactgagcagaaatcacatccgcactatcgaaataggtgctttcaacggacttgctaacctgaacacgttagagctttttgacaacagactgactactatcccaaacggcgccttcgtgtacctctcaaaactgaaagagttgtggttgaggaacaatcccatcgaatcaatcccttcctacgctttcaatcgcatcccttccttgagaaggttggacctcggagaactgaagcgattatcatatatctccgagggggcctttgagggcctgtctaacttgaggtatcttaacctggcaatgtgcaacctgcgtgaaatccccaacttgaccccactaatcaagttggacgagcttgaccttagtgggaatcacctgtccgcaatcaggcctggatcatttcagggcctgatgcatctgcagaagctatggatgatacagtcacagatccaggtgatagagcgcaacgcctttgacaatctccagtcattggtagagataaatctggctcacaataatctgacactgctgccccacgacctctttacaccgctccatcacctggaacgaattcacctgcaccacaacccgtggaattgcaactgcgatattctgtggctctcctggtggataaaagatatggctcctagtaataccgcttgttgcgccaggtgtaacaccccccccaatctgaagggccgctacatcggtgagctcgaccagaattacttcacctgctatgcccctgtgatagttgaaccaccggccgacttaaacgtgacagaaggcatggccgcagaactcaaatgccgagcctcaacatctctaacctccgtttcctggataacaccaaacggcaccgtaatgacacacggggcttataaggtcagaatagccgtgctgagcgacggaacactgaacttcactaatgttaccgtccaggataccggtatgtacacctgcatggtctcgaatagcgtgggaaataccactgcttccgccactcttaacgttacggccgccaccactacaccattttcctatttctcaacggtgacagtcgagaccatggaaccctcgcaggatgaggcaagaacaaccgataacaacgttgggccaacaccagtggtcgattgggagacgaccaacgtgaccacgtctcttacccctcagtctaccaggtccacagagaaaacctttacgatccctgttaccgacatcaatagcgggatccccgggattgatgaagtgatgaagactaccaagatcattatcgggtgcttcgtggcaatcacactgatggccgccgtgatgctggtgatcttctacaagatgcgcaaacaacaccatcgtcagaaccaccacgcgcctacaaggacagtggagatcatcaatgttgatgatgagattaccggtgacacgccaatggaatcacatctgcctatgccagcaatagagcatgagcacttaaatcactataactcctataagtcacctttcaaccacacaacaaccgtgaatacgattaatagtatccattccagcgtgcacgagccgctattgatcagaatgaactctaaggataacgtacaggaaacccagatctag

SEQ ID NO: 192901 - DNA, 1923 bp, synthetic construct
  misc_feature 1..1923: note = Description of Artificial Sequence: Synthetic coding sequence
  source 1..1923: mol_type = other DNA
atgctgaacaagatgaccctgcacccccagcagatcatgatcggcccaagattcaacagggcactgttcgaccccctgctagtggtgctgctggcactacagctgctcgtggtcgctggccttgtcagggctcagacgtgcccgagtgtatgttcctgctccaaccagttttccaaagtgatctgtgttcggaagaacctccgcgaagtacctgatggaatcagcaccaacacacggttgttgaacctgcacgaaaatcagattcaaattatcaaggtgaactcgtttaaacatttgaggcacctggaaattctccagctctccaggaatcacataagaacaatcgagattggagcatttaatggtctcgccaacttgaacaccctggaactgttcgataatcgtctgacgaccatcccaaatggcgcatttgtctatttgtcaaaattgaaagagctttggctgcgtaataatcctattgagtccatcccctcatacgctttcaacagaattccgagtctacgccggctcgatctgggcgagctcaaacggctgtcatacatttccgaaggggcgttcgaggggttgtctaatctgcgctatttaaacttagccatgtgtaatctgagagaaatcccaaacctgactcctctgataaagctggacgagctggatttgagtggaaatcatttgagcgcaattcggcccggaagttttcaggggcttatgcatctgcagaaattatggatgattcagagccaaatccaggttatcgagaggaatgcttttgataatctgcagtctctggttgagataaacctcgctcacaacaatctaacccttcttccgcacgacctgtttacccccctgcatcacctagagcgcattcatcttcatcataatccatggaactgcaattgcgacattctgtggttgagctggtggatcaaggacatggcaccttcaaatacagcatgctgcgcacgctgtaacactccacccaatctgaaaggcaggtacatcggggaattagaccaaaattatttcacgtgttacgcccccgtcattgtcgagccccccgctgacctaaacgtaaccgaggggatggcagcggagcttaagtgtagggcctcaacttccttgacgtccgtaagctggatcactcctaatggtactgtgatgacccacggggcctacaaggttaggatagctgtgttgagcgacggtactctgaactttacaaacgtgaccgtgcaggacactggaatgtatacctgcatggtgtctaactccgtcggtaataccaccgcgtccgccacactcaatgttaccgctgcaaccactacacctttctcctactttagtaccgttaccgttgaaacaatggaaccatctcaggacgaagcccgaacaacagataataatgtcgggccaactccagtggtcgactgggagacaactaatgtgaccacgtctctcactccgcaatccaccagatctactgagaagactttcaccatacctgtgacagatattaacagtgggattccagggattgatgaggtgatgaaaactaccaaaatcattattggatgcttcgttgctattacgttgatggcagcagtgatgttggttatcttctacaagatgagaaaacagcaccaccgccaaaaccatcatgctccaacaagaacagttgagattataaatgttgatgacgagatcaccggtgacacccccatggagagccacctgccaatgcctgcaattgaacacgagcaccttaaccattacaacagctacaagtccccgtttaaccacactacaactgtgaatacgattaatagcatccattctagtgtccacgagccactgctcattcgcatgaacagcaaggacaacgtgcaagaaacacagatatag

SEQ ID NO: 192902 - DNA, 126 bp, synthetic construct
  misc_feature 1..126: note = Description of Artificial Sequence: Synthetic coding sequence
  source 1..126: mol_type = other DNA
atgctgaacaagatgaccctgcacccccagcagatcatgatcggcccgaggttcaaccgcgctctgtttgaccctctgttggtagtgctgctggccctccagctgttagtcgtggccgggctatag

SEQ ID NO: 192903 - DNA, 4614 bp, synthetic construct
  misc_feature 1..4614: note = Description of Artificial Sequence: Synthetic coding sequence
  source 1..4614: mol_type = other DNA
atgaccaccaagcggaagatcatcggccggctggtgccctgccggtgttttagaggcgaagaggagataatcagcgtgctggactatagtcattgcagcttgcagcaggtgcctaaggaggtgtttaactttgagcgtaccctcgaagagctgtacctcgacgccaaccagatcgaagaattacccaaacagctatttaattgccaggcactgcggaaattgagtatccctgacaacgatctgagcaatctgcctaccacaatcgcctcactggtgaacttaaaagaactggatatctccaaaaacggagtgcaggaatttcctgagaacatcaaatgctgcaaatgtttgaccatcatcgaggcgtctgtgaaccctattagcaagctgcctgatggcttcacacagttactcaatctaacacagttgtatctgaacgacgcatttcttgagtttcttcctgcaaactttggtagactggtaaagttgaggatcctcgagctccgggagaatcacctgaagacgttaccaaagtcgatgcataagttagcccagctggagaggctcgaccttggaaataatgagttcggggagttgcctgaggtgctcgaccagatccagaatctccgagaactttggatggacaataatgccttacaggtgctgcccggttctatcggtaaacttaaaatgctcgtgtacctggacatgtcaaaaaacagaattgagacagtcgacatggatatctcaggctgtgaagccttagaagatctgttactgtccagtaacatgctgcagcagctgcccgatagtattggactactgaaaaagctcaccaccctgaaagtcgacgataatcagctgactatgctgcccaacactatcgggaacctgtccctgcttgaagagttcgactgcagctgcaatgaactcgaaagcttgccgtccacgatcggctatctccactcactgcgtactctggcagtcgacgagaacttcctgcctgagctcccccgcgagataggatcctgtaaaaatgttacagtaatgtctttaagatctaataagctggaattcttacccgaggaaattgggcagatgcagaagttgcgagtcctgaacctgagcgacaaccggttaaagaatcttccctttagcttcactaaactcaaagagttggccgcgctctggctgtctgacaaccagtctaaggcattaatcccacttcagactgaggcccaccctgaaactaagcaacgcgtgttaacaaactatatgttcccacagcaacctaggggcgatgaggactttcagagtgattctgactcctttaatcctacactttgggaagagcaaagacagcagcggatgaccgtggcctttgagtttgaagacaagaaggaagatgacgagaacgccggcaaggtgaaagatctcagctgccaggccccttgggagaggggccagaggggcattacattacagcctgcgagactcagcggggactgttgcaccccatgggccaggtgcgatcagcagattcaagatatgcctgtaccccagaatgatcctcagctcgcatggggatgcattagtggcctgcagcaggagcgctcaatgtgcacgccactgcccgtggcggctcaaagtacgacgttgccgtctttaagtggtcggcaggtagaaatcaacctgaagagatatcctactccctatcccgaggatctcaagaatatggtgaagtccgtgcagaatctcgtcgggaaaccgtcccacggggttcgggtggaaaattcaaatccaaccgcaaatacggagcagacggtcaaagaaaagtatgagcacaagtggccagttgctcctaaagagattacagtggaggacagctttgtgcaccctgccaatgaaatgcgcataggcgagctgcaccccagtctagcagagactccactttatcctcccaaactcgtgctcttgggcaaggacaagaaagaaagcaccgatgagtctgaagtggacaagactcattgtctaaacaactcagtgagctcaggcacctactcggattactctccgtctcaagccagctccgggtcctcaaatactagggtcaaggtaggatcccttcagaccacagctaaggatgcagtgcacaattcattatggggaaatagaatagcgcctagctttccccaacccctggactctaagcccctgttgagccaacgagaggctgttcccccagggaatattccccagcggcctgacagactcccaatgtccgacacatttacagacaattggacggacgggtcccattatgacaacacaggtttcgtggccgaggaaacaaccgcagaaaatgccaactctaacccactgctcagttccaaaagccgatctactagcagccacgggcgtcgccctctgatacggcaggaccgcattgttggggtcccattagaactggaacagtccactcaccgccatacccccgagaccgaggtgccaccatctaacccctggcagaactggacaagaacaccttctccgttcgaagaccggacagccttcccatccaagctggagacaaccccaacgaccagcccccttcccgagagaaaggagcacataaaagaatctacagagatcccgtcgccgttctcccccggggtgccatgggaataccacgactctaacccaaaccggtcactctcaaacgtgtttagtcagattcactgtagaccagagagctccaagggagtgattagcatctccaagtcgacagaacgcctctcaccattgatgaaggacataaagagcaataaattcaagaaaagtcagagcatagacgagattgatattgggacttataaggtgtataacattcctttagaaaactacgcctcgggatccgaccatctgggttctcatgaacggccggacaagatgctcgggcccgagcatgggatgagttctatgagtcgaagtcagtcagtacccatgttagatgacgagatgttaacctacggaagttccaagggcccacagcaacagaaggcatccatgaccaaaaaggtgtatcagtttgaccagagtttcaacccacagggttctgtggaggtgaaggcagagaagaggatccccccaccattccaacacaatccagaatatgtacaacaggctagcaagaatattgcaaaggatttaataagcccccgggcttaccgggggtaccccccgatggagcagatgttcagcttttcacagccgtcagtgaatgaggatgctgtggtcaatgcccagtttgcatcgcagggagcccgcgcaggatttctccgccgggcagacagcctggtgagtgctactgaaatggcgatgttccggcgggtcaacgagccccacgagctaccaccaactgatcgttatggacggccaccatatcgggggggcctcgatcgtcagtcaagcgtcacagtgacagagagccagttcctcaaacgaaacggaagatacgaagatgagcatcccagctaccaggaggttaaagcacaggcaggatccttcccggttaaaaatctaacccagcggcggccgttgtctgccagatcatactctactgaaagctatggggcatcacagacaaggcccgttagtgcaaggcctaccatggctgccctcctggaaaaaatcccctctgactataatttgggaaattatggcgataagccttctgacaattctgaccttaaaaccagacccacaccagttaagggagaagagtcttgcggcaaaatgcccgctgattggcggcagcaactgctgagacacatcgaggctagacgactggatcggaacgctgcctacaaacacaataccgtgaacctgggcatgcttccctacggtggcatttcagccatgcatgccggtcgatccatgacattgaatctccagaccaaatcaaaatttgaccatcaagaactcccactccagaagacacccagtcagcagagcaacatcctggacaatggccaagaagatgtttctcctagtggccagtggaatccctaccccctcggcagacgcgatgtgccccccgataccatcacaaagaaagccggatcccacatccaaacgttaatgggctctcagagtctgcagcatagaagcagagaacaacagccatacgagggaaacattaacaaagttactattcagcagtttcagtcgccactgcctatccagatccctagctctcaagctacccggggcccccagccaggacgctgcttaatccagaccaagggacaaagatcaatggacggatatccagagcagttttgcgtgcgcatagagaaaaatcccggactcggtttcagcatcagcggaggcatatccgggcagggaaacccatttaagcccagtgataaaggcatctttgtgactcgggtccaaccagatgggcccgcctccaatttactgcaacctggagataaaattttacaggccaatgggcacagcttcgtgcacatggaacatgaaaaggcagtgttgctactgaagtcattccaaaatacagtcgatcttgtcatacagcgtgagctgaccgtctag

SEQ ID NO: 192904 - DNA, 4488 bp, synthetic construct
  misc_feature 1..4488: note = Description of Artificial Sequence: Synthetic coding sequence
  source 1..4488: mol_type = other DNA
atgcagtgcctggagatgaccaccaagcggaagatcatcggccggcttgtgccttgtaggtgcttcaggggagaggaggaaatcatttctgtcctcgactattcacattgtagccttcagcaagtccctaaggaagtgttcaatttcgagcgaacccttgaggagctgtatttagacgcaaaccagatcgaggaattgccaaaacagctgttcaattgccaggctcttcgcaagttgtcgatccctgacaatgacctaagtaacctgcccacaacaatcgcttctcttgtaaacttaaaggaattggatatttcaaagaatggggtgcaggagttccccgagaacattaagtgctgtaagtgtttgaccattattgaggcctctgtgaaccctatcagcaaactgcctgatgggtttactcagttactcaacctgacgcagctgtatctcaacgacgcgttcctggagttcctgccagctaacttcggcagactagtgaagcttcggattctggagctgcgtgaaaatcatttgaagacactgcccaagagcatgcataaactcgcacagctcgagaggctggaccttggcaacaacgagttcggagagctccccgaggtattggaccagatccagaacctacgagagttgtggatggacaacaatgccctacaagtgcttcctggaagtatcggcaagttaaagatgctcgtttacctagatatgtcaaaaaacagaatcgaaaccgtcgatatggacataagcggctgtgaggccctggaggatcttttgcttagctccaacatgctgcagcagctgcccgactccatagggctgcttaaaaagcttaccacactgaaggttgacgataatcagttaactatgctcccgaatactatagggaacctatccctattggaagaattcgactgttcctgcaacgagctggagagtctgccctctacgatcgggtatctccattccctgagaactcttgcagttgacgagaacttcctgcccgagttgccccgagagattggctcttgcaaaaatgtgacagtgatgagcttgaggagcaataaactggagtttctccccgaggagattggacagatgcaaaagctgcgcgtcttaaacttaagcgataacagattgaagaatcttccatttagttttacaaagctgaaggaactggcagccctgtggctctcagacaatcagagcaaggcccttataccactgcaaaccgaggcacaccctgagacaaaacagcgggtgctgacgaactatatgttccctcaacaacctcggggcgacgaggattttcaaagcgactccgattccttcaaccctactttgtgggaggagcagcggcagcaacgcatgaccgttgcgtttgaatttgaggataagaaagaagacgatgagaacgcgggcaaggtcaaggatctttcctgtcaggctccttgggaaagagggcagcggggaataacactgcagccggcaaggctttctggcgactgctgtactccctgggcgaggtgcgaccagcagatccaagatatgccggttccgcaaaacgatccacagcttgcttgggggtgcattagcggcttgcaacaggagcggagcatgtgtacacctttgcccgtggccgcccagtccaccactctgcctagtctgtcaggcagacaggtggagatcaacctgaaacgttatcccacgccttacccagaggacctgaagaacatggtgaagagcgtgcagaacttggtgggcaaaccctcacacggcgtacgtgtggagaactctaacccaacagctaatactgagcagactgtcaaagaaaaatatgagcacaagtggccagtggcgcctaaagagataacagtggaagattcgtttgtccatcccgcaaacgaaatgcggataggcgaattgcatccaagcctggccgagacacccctctacccccctaaacttgtgctcctcggcaaggacaagaaggaatcaacagatgagagtgaagtggacaaaacacactgtctgaataatagcgtgagctctggaacatattcagactactccccttctcaggcatcatcaggatcatccaatacacgtgtaaaagttggcagcctgcagacaactgctaaggacgcagtgcataactccctatggggcaataggatcgccccttcctttcctcaacccttggattcaaaacctttgttaagtcagcgagaggcagtccctcccgggaatattccacaacgcccagaccggttgcccatgtccgacacattcaccgacaattggacagacgggagccattatgacaataccgggtttgtcgcagaggagaccaccgcagagaacgctaatagcaatcccctgctgagttctaaatccaggagtacttcatcgcacggcaggcgcccactgatcaggcaggacagaattgttggcgtcccccttgagctggagcaatcaacccaccggcatactcctgagaccgaagtccctcctagtaatccctggcagaactggacccggactccctcgccatttgaagacagaacagcctttccctctaagctcgagacaacccctacaacctcacccttgcctgaaaggaaggaacacatcaaagaaagcactgagattccctcgccttttagccctggcgttccctgggagtatcatgatagcaaccctaacaggtctctgagcaatgtctttagtcagatacactgcaggcctgagagtagcaaaggggtaatttcaatttcgaagagcaccgaaagactttctcctctcatgaaggatatcaaatccaacaaatttaagaaatctcagtccattgacgagatcgacatcgggacctacaaagtatacaacatccccctggagaactatgcctcaggctccgatcacctgggctcacacgagcgaccagacaaaatgctgggaccagaacatggaatgtcatctatgagccgatcccagtcggtgccaatgctagacgacgaaatgctgacatacggaagctcaaagggtccccagcagcaaaaggcctctatgactaaaaaagtgtatcagtttgaccaatcctttaatccccagggctccgtcgaggtcaaggctgaaaagcggatacctcccccatttcaacataacccagagtacgtccagcaagctagcaagaacatcgctaaggatttgattagtccccgagcgtataggggttacccccctatggagcagatgttctcgtttagccagccatccgtgaatgaagatgccgtcgtgaacgctcagttcgcttctcagggagcacgggccgggttcttgagacgggccgactcactggtgtccgcaaccgagatggcgatgtttaggcgcgtaaacgagccacacgagctgccacccactgaccggtacggaagacccccatacagaggaggcctggaccgacagagcagcgtgaccgtgaccgagagccagtttctgaagcggaatggtaggtatgaagatgaacacccgagctaccaagaagtcaaggcccaagctggctccttcccggtgaaaaaccttactcaaaggagaccactgtccgcaagatcttattcaaccgagtcatatggcgcttcccaaactcgtccagtgtccgcacggccaaccatggccgcattattagaaaaaattccctctgactataaccttggtaattatggcgacaaaccttccgacaattctgacctgaagacacgtccgacccctgtcaagggcgaagagtcctgcggcaaaatgccagcggactggagacagcagctgctcagacatattgaagccagaagactcgacaggaccccttctcagcagtccaatatactggacaatggccaggaggacgtcagtcccagtggccagtggaacccataccccctcggacgtcgagatgtgcctccggatactattactaagaaggcaggaagccacatccagaccctcatgggttcacagagcttacagcatcgttcaagagaacagcagccttatgaggggaacatcaacaaggtcactattcagcagttccagtctccactacctatccaaattccaagctctcaggccacgcgcggcccacaacccggtagatgtctgattcagaccaagggacagcgaagcatggatggttaccccgagcaattctgtgtgcgaatcgaaaagaaccctggcctgggcttcagcatttccggcgggatcagcggtcaggggaatcctttcaagccttccgataagggaatttttgtgacacgtgtgcagcccgatggcccagcctctaacctactgcaacccggagataaaatcctgcaggcgaatgggcacagcttcgtccacatggaacacgaaaaggctgtcctgctgctgaaaagttttcagaacactgtagacctcgtcatacagcgggagctgaccgtctag

SEQ ID NO: 192905 - DNA, 540 bp, synthetic construct
  misc_feature 1..540: note = Description of Artificial Sequence: Synthetic coding sequence
  source 1..540: mol_type = other DNA
atgaccaccaagcggaagatcatcggccggctggtgccctgccggtgtttcagaggagaggaggaaatcatctctgtgctcgactattcacactgcagcctgcaacaggtaccaaaggaagtcttcaactttgaacgcacactagaagagctgtacctcgacgccaatcagatagaggaactgccaaagcagctgtttaactgccaagcattaagaaagttaagcattccagacaacgacctgagtaatctaccgaccaccatcgcatccctggtcaacttgaaagaactagatatcagtaagaatggggtgcaggaatttccagagaacatcaaatgttgcaaatgtctgaccattatcgaagctagtgttaaccccattagcaaactgccagacgggttcacgcagctccttaacctaacccaactatacctgaatgacgcattcctggaatttctccctgcgaacttcgggcgacttgtcaaactgagaattcttgagcttagggagaatcacctgaaaacactacctaagatatag

SEQ ID NO: 192906 - DNA, 3942 bp, synthetic construct
  misc_feature 1..3942: note = Description of Artificial Sequence: Synthetic coding sequence
  source 1..3942: mol_type = other DNA
cggagcatgcacaagctggcccagctggagcggctggacctgggcaacaacgagtttggtgagctcccagaggtgctcgaccagattcagaatctgcgcgaactgtggatggacaataatgccctccaagtgctgcctggttccatcgggaagctgaagatgctagtgtatctggacatgtcaaaaaacaggatcgaaactgtcgacatggacatctcaggctgtgaagccttagaggatttactgttgagctcaaacatgctacagcaactgccggactccattggactgctgaagaagctgaccactttgaaagttgacgataatcagctaaccatgctgcctaataccattggaaacctaagcctgctggaagagttcgactgctcctgcaacgagctggagagtcttccgtccacaatagggtatcttcattccctccggacactggcagtggacgaaaatttcctgcccgaactccctcgcgagattggctcctgtaaaaacgttaccgttatgtcattgagaagcaataaactggagttcctgcctgaagagattggacaaatgcaaaaactgagagtcctcaacttaagcgacaatcggctgaaaaatttaccattttctttcacaaagctgaaagagctagccgccctgtggctgtccgataaccagtcaaaagcactgatcccactgcagaccgaagcccatccggagaccaaacaacgtgtcttgacgaattatatgttcccccaacagccgcgcggcgacgaagactttcagtccgactccgattcatttaacccgactctgtgggaggaacagagacagcaacgcatgaccgtcgcctttgaatttgaggataagaaagaggacgatgagaatgccggtaaggtgaaagatctctcctgccaggctccttgggagagaggacagagaggcatcacattgcagcccgccaggctgagcggcgattgctgtactccttgggctcgctgcgaccagcagatccaggatatgcctgtgccacaaaacgatccccagctggcctggggctgcatttctggtttacagcaggaaaggtccatgtgcacaccactgcccgtggccgcccagagcactaccctccctagcttgtcgggacgccaggttgaaatcaatctcaagcgctatccaactccttatcccgaagatctgaagaatatggtgaaatcggtgcagaatctcgtgggaaagccctctcacggggttcgcgtggagaacagcaaccctaccgccaacacagagcagaccgtcaaagagaaatatgagcacaagtggcctgttgcaccaaaggaaataaccgtggaggatagcttcgtgcatcccgccaacgaaatgagaatcggcgaactgcatcctagtctggccgaaacgccactctaccccccaaagctggtgcttttaggaaaagataagaaagagagcacagatgagtcagaggttgacaaaactcactgcctcaataattctgtgtctagcggcacctacagtgattattccccatctcaagccagcagtggaagttccaatactcgtgttaaagtcggctccctccaaaccaccgcaaaagacgcggtgcacaactcgctctggggcaatcgcattgccccttcgttcccccaacccctcgactctaagccactgctgtctcaacgagaagcagttccaccaggtaatataccacaacggccggaccgcctgccaatgtcagataccttcacggacaactggaccgacggatctcattacgacaatactgggttcgtcgcagaggagactactgcagagaatgccaatagcaatccgttgcttagctctaagtcgcgcagcacttcctcgcatggaagaagacctttgatcaggcaagatagaattgttggcgtacctctggagctggagcagtccactcaccgtcatacccccgagacagaggtccccccatcaaatccttggcagaactggactcgcacccccagcccattcgaagaccgaacagcatttccctctaaactggaaaccaccccaacaacaagccctctgccagaacgcaaggagcacatcaaagagtccaccgagatcccctcacctttctctccaggcgttccatgggagtatcacgattcgaatccgaatcggtccttatccaacgtctttagtcaaattcactgccgtcccgaatcttccaaaggcgtgataagtatctcgaagagcacagagcgactgtccccactgatgaaggacataaaatctaacaaatttaaaaaaagccaaagcatcgatgagatcgacataggaacctataaggtctacaacatacctctcgagaattatgcatccggaagtgatcacctggggtcccacgaaagacccgataagatgttaggcccagaacacggtatgagttctatgagtagatcgcagagcgtacctatgttagacgacgagatgctgacttatggctctagtaaaggcccgcaacagcagaaagcttctatgactaaaaaagtgtaccagtttgatcagagctttaatcctcaaggctctgtcgaggtcaaggccgaaaagcgcatacctccaccatttcagcataatcctgaatacgtacaacaggcctctaagaacatagcaaaagacctcatcagccctagagcataccgcggatacccacctatggagcagatgttcagcttcagccagccttccgtgaatgaggatgctgtagtaaatgcccagttcgcgagtcaaggcgctagggccggctttctccgtcgggcagacagcctggtgtccgccaccgaaatggcaatgttccgccgtgtaaatgagccacacgagctgccccctacggataggtacggcagacctccgtatcgagggggtctggatcggcagagctcagtgaccgtgaccgagagtcaattcctgaagagaaacgggcgttatgaggacgagcatccgtcgtatcaagaggtcaaggcgcaggccggttcttttcctgtaaagaatctgacacagagacgccccctttctgcccgaagctactctaccgaatcatacggagcttctcaaaccaggccagtatcagcccgtcccacaatggccgctttattggaaaaaattccttctgactacaacttgggcaattacggcgataagccgtccgataattcggatctcaagactcgccctacacccgtaaagggggaagaatcttgtggtaagatgcctgccgattggcgtcagcaactcctgaggcacattgaggcgagaaggcttgaccgtacccccagtcagcagtctaacattttggacaatggtcaggaagacgttagcccgtcaggccaatggaacccatacccactcggacgaagggacgtgcctccagatactatcacaaagaaggcagggagtcatattcaaacgctgatgggttctcagtccttacagcaccggtcacgggagcaacagccatacgagggtaacattaacaaagtaacaattcaacagttccagtctcctctaccgatacagatccctagttcgcaagctaccagaggaccgcaacctgggcggtgcctgatccaaacgaaaggccaacggtctatggacggataccctgaacagttctgtgttcggatcgaaaagaatcccggcctggggttcagtatttcagggggcatctccggacaaggcaaccctttcaaaccatcagacaaaggcatattcgtgactagggtgcaaccagatggaccagctagcaaccttctacagcccggagacaagatcctccaagccaatggtcatagttttgtgcatatggaacatgagaaggctgtcttacttctcaagagttttcaaaatacagtggatctcgtaattcagcgcgagctgaccgtctag

SEQ ID NO: 192907 - DNA, 654 bp, synthetic construct
  misc_feature 1..654: note = Description of Artificial Sequence: Synthetic coding sequence
  source 1..654: mol_type = other DNA
atgatggagaacctgatccggggccggaaccccccccagtaccagagatccccttgtaaagaggtccgggccgcgcttcgtaaaaggcctgaggaagaattacagtgcctagaaatgaccaccaaacgaaagatcatcggtagacttgtgccttgcaggtgtttccggggggaagaggaaattatcagcgtgctggactacagccattgctcccttcagcaagtacctaaggaggtgtttaacttcgagcgtacacttgaggagctgtatctcgatgcaaaccagatcgaggagttacctaaacaactcttcaactgtcaggctctgcggaaactctctatcccagataacgatctgtcaaacctgccaactaccatcgcctccctcgttaatctgaaggaactggacatcagcaaaaatggagtgcaggaattccctgaaaacatcaagtgttgcaaatgcttgacaattatagaggcttccgtgaacccaatatctaagttacctgatggctttacacagctgctcaacctaacacagctttatcttaacgatgcgttcctcgagttcctccctgccaacttcgggcggctcgtgaaacttcgcattctggagctgcgagaaaatcacctgaagaccctccctaatatctag

SEQ ID NO: 192908 - DNA, 2466 bp, synthetic construct
  misc_feature 1..2466: note = Description of Artificial Sequence: Synthetic coding sequence
  source 1..2466: mol_type = other DNA
atgaccaagatgctgggcaagctgcggatcgcccccagcttcccccagcccctcgattcaaagcctctcctctcacagagagaagcggtgccccccggaaacattccgcagagaccagataggctgcccatgagcgacacatttactgacaactggacggacggcagccattatgacaatacaggctttgtggccgaggagaccacggccgaaaacgcaaactcaaaccctctgctctcatctaagagccggagcaccagttcacatggaagacgccctctcatcagacaggatcgaatcgtcggagttcctctcgagctggaacaaagcacgcataggcatacccctgaaaccgaggtgccaccctcaaacccttggcagaattggactcgcaccccatctccattcgaggatagaactgctttcccaagcaagcttgagacgacgcccactacaagcccactccccgaaaggaaagagcacattaaggaaagcacagagattccatcccctttctcgcctggggttccgtgggaatatcatgacagtaatcccaatcggtcgcttagcaatgtgttcagtcaaattcattgtagaccagagagctccaaaggagtgatttctatcagtaagtctacggagcgtctctcccctttaatgaaagatatcaaatcaaataaatttaagaagtctcagtctatcgacgagattgacatagggacgtataaggtgtacaacatccctcttgagaactatgcaagtggaagtgatcatcttgggtcccatgagaggcccgacaaaatgttggggcctgagcatgggatgagcagtatgtctcgcagccagtctgtcccgatgctcgatgatgagatgctgacctacgggtctagcaaggggccacagcagcagaaggcgagcatgacaaagaaagtctatcagtttgatcagagcttcaacccacagggaagcgttgaagtaaaagccgaaaaaagaattcctcccccctttcagcataaccccgagtatgtacaacaggcctctaagaacatagctaaggacctcatctcccctcgtgcctaccgcggataccctcctatggagcaaatgtttagctttagccagccttctgtgaacgaagacgctgtggttaacgcgcagtttgcatcccagggcgcccgcgcagggtttctgagaagggccgattcacttgtaagcgccactgagatggctatgttccgacgggtcaacgagcctcatgagctgcctcctacagaccgatacggacgcccaccataccggggcgggctggacagacagtctagcgtcactgtgaccgagagtcagtttctgaagcgcaatggccgatacgaggacgagcatccttcgtatcaggaagtgaaggcccaggccggatcattccccgttaaaaacctgacacagagacgacccctttctgcgcgctcttactctacagagtcctatggcgcttctcaaacgaggccagtttcagcacgcccaaccatggcagccctgttggaaaagatcccttctgactacaacttggggaactacggagacaaaccttccgacaactcggatctaaaaacacggccaactcccgttaaaggcgaagagagctgtgggaaaatgcctgcggattggcggcaacagctcctacggcatattgaagctaggagactggatagaaacgccgcttacaagcataacacagttaacctgggcatgctcccttacggcggcatttcagccatgcatgccgggcggagtatgactctaaatctccagactaagtcgaaattcgaccaccaggagcttcccctacagaaaactccttcccagcaaagcaacatcctggataacggacaggaagatgtgtccccctccgggcagtggaatccctatcccttgggccgaagagatgtgccccctgacactatcaccaagaaggcagggtcacacatccagactctgatggggagccaaagcctgcagcataggtcacgtgaacaacaaccctacgagggaaacatcaataaggtcacaatacagcagtttcaatcccccctgcccattcaaatacccagttcacaagcgactagaggaccccagcccgggcgttgtcttatccagaccaagggacaaaggagcatggatggctaccccgagcagttctgcgtgcgcatcgagaaaaatccaggcctaggcttttccatctctggaggcatttctgggcagggcaacccgtttaagccaagcgataaaggcatcttcgtcacacgggtccagcccgacggacctgcaagcaatctgctgcagcctggcgacaagattctgcaggccaatgggcacagcttcgtgcacatggagcacgaaaaagccgtacttttactcaagtctttccagaatacagttgacctagtcatacagcgcgagcttacagtttag

SEQ ID NO: 192909 - DNA, 2433 bp, synthetic construct
  misc_feature 1..2433: note = Description of Artificial Sequence: Synthetic coding sequence
  source 1..2433: mol_type = other DNA
atgatccccgtgaccgagctgcggtacttcgccgacacccagcccgcgtatcgcattctgaagccatggtgggacgtcttcacagactacatctctatagtgatgctgatgattgctgtgttcggcggaactctgcaggtgacacaagacaagatgatttgcttgccttgtaagtgggtgaccaaggactcctgcaacgactcttttcgcggttgggccgctcctggacccgaaccaacctacccaaactctaccatcttacctactcccgatactggcccaacaggcatcaagtacgacctggatcgtcaccagtacaattacgtagatgctgtgtgttacgagaacaggttgcattggtttgctaaatacttcccatacctggtactgcttcataccttaatcttcctggcctgcagcaacttctggttcaaattcccgagaacctcatccaagctagagcacttcgtgtcgatccttctcaagtgtttcgattccccttggacaacccgagcactttctgagaccgtggtcgaggagtcggatccaaagcccgctttcagcaagatgaatgggagtatggacaaaaaatcttcgacagttagcgaggatgttgaggccacagttcccatgctacagcgaactaagagtcggattgagcagggcatcgtcgacaggtcagaaactggcgttctggataagaaagaaggggagcaggcaaaagcactgtttgagaaagtcaaaaagtttcggacacacgtggaggaaggagatatcgtataccgcttatacatgcggcagaccatcatcaaagtcattaaattcattctcatcatctgctatactgtttattatgttcataacatcaagtttgatgtggactgcaccgtagacatcgagtccctgacaggttatagaacctacagatgtgctcaccctctcgctaccctgtttaagattctcgcatccttttatatttctctagtgatcttctacggactgatttgcatgtacacactgtggtggatgttgcgcaggtctctgaagaagtattcattcgaatcgattagagaagagtcctcatactctgatatacctgacgtcaagaacgactttgcctttatgctccacctgattgaccagtacgatcccctctacagtaagcgttttgccgtgtttctgagtgaggtgtcagagaataaactcaggcagttgaaccttaataatgagtggactttagataaattgcgccaaagactgaccaagaacgcccaggacaaactggagctccacctgtttatgttatctggaatcccagatacggtattcgatctggttgagctggaggttctgaagttagaattgattcccgatgttactatacccccttctatcgcgcagcttaccggcctgaaagaactctggctgtaccacactgctgcaaaaatcgaggccccagccctggcttttctgcgcgagaatcttagagctctgcacataaaatttaccgacatcaaagagatacccctctggatctactccctgaaaactttagaggagctccatctaaccggaaacctcagcgctgagaataatcggtacattgttatcgacggactccgggaactgaaacggcttaaagtcctgaggctcaaaagcaatctgagtaagctgccgcaagtcgtcaccgacgtcggcgtccatcttcaaaagctctctataaacaacgagggaacgaaactcatagtgttaaactccctgaaaaagatggctaatttaactgaactggagctcatacggtgcgacctggagcgcatccctcactctatcttttcgctccacaatcttcaagagattgacctgaaggataacaatctcaagactatcgaggagatcattagcttccagcacctccaccgacttacatgcctgaaactctggtataaccacatcgcttacattcccatccagattgggaatctgaccaacctggagcgtttatatctgaataggaataaaatcgagaaaatccctacacagttgttttattgcaggaagctccgctacctcgacctgtctcataataatttgactttcttgcctgccgacatcggactgctgcaaaacttacagaacctcgctatcactgctaatcggatcgaaacactgccgcctgagctctttcagtgccgcaaactgagagccctccatcttggcaacaatgtactgcaatccctaccttcccgagtcggagagctgaccaaccttactcagatagagctgcggggcaacaggttagagtgcctgcccgtggagctgggtgagtgtcccctccttaagcggtctgggctagtggtggaagaggacctgtttaatactctccctccagaggtgaaggagagactgtggcgagccgacaaggagcaggcgtag

SEQ ID NO: 192910 - DNA, 2433 bp, synthetic construct
  misc_feature 1..2433: note = Description of Artificial Sequence: Synthetic coding sequence
  source 1..2433: mol_type = other DNA
atgatccccgtgaccgagctgcggtacttcgccgacacccagcccgcctatagaatattgaaaccatggtgggacgtcttcacagactatatttccatcgtgatgttgatgatagcagtgtttgggggtacactgcaggtgacacaggataaaatgatctgtttaccatgcaagtgggtgaccaaggattcttgcaatgattcttttcggggatgggctgcacccggccctgagccaacgtacccgaattccacaatcctgccaactcccgacaccggtcccactgggataaaatacgacctggatagacaccaatataactatgtcgacgccgtttgctacgagaaccgtctccactggtttgccaaatacttcccatacctcgtcttgctgcacacccttatctttctagcctgtagtaacttctggtttaaattccccagaacctcttctaaactggagcatttcgtaagcatcctgttgaagtgctttgattccccctggacgactcgggccctgtccgagactgtcgttgaggaaagcgatcccaagccagccttctctaagatgaacggatctatggataagaagtccagcacagtctccgaggatgtggaggccacagtgcccatgttgcagcgcacaaaatcccgaattgaacagggaattgttgaccgctccgaaacaggagttctggataagaaggagggtgagcaagctaaagcactattcgaaaaggtcaagaagtttcggacccacgtggaagagggcgacatcgtgtaccggttgtacatgcggcagacaatcatcaaggtgatcaaatttatcttgatcatttgctacactgtctattacgtgcacaatatcaaattcgatgtcgattgcaccgtggacattgagagcctcactgggtatcgaacttatagatgcgcccacccactcgctactctcttcaaaattcttgccagcttttatatctccctggtcatattctatgggctcatctgcatgtatactttgtggtggatgcttaggaggtccctaaagaaatatagctttgagagcatcagagaagaatctagctactccgacattcctgacgtgaagaacgattttgcatttatgttacatttgatagatcaatatgatcctctttattcaaaaaggtttgccgtcttcctcagcgaggtgagcgagaataaactgaggcagctcaacttgaacaacgaatggacattggataaattaagacagcggctgaccaagaacgcccaagataagctagagttgcaccttttcatgctttctgggatccccgatacagtgttcgaccttgttgagctcgaggttcttaagctggagctgatacctgatgtgactattcctccatccatcgcccagctgacgggacttaaagagctctggctctatcataccgcggccaagattgaagctcctgcactagcattcctgcgcgagaatctgagagccttgcacatcaaattcaccgatattaaggaaatccctctttggatatacagtttaaagaccctcgaagagctccacttgaccggcaatctgtccgcagaaaataacaggtacatcgtgattgatgggctccgggaactgaaaagactgaaggtcctgaggctcaagtctaacctttctaagcttcctcaggtggtcactgatgtcggggtccatttgcagaagctctctataaacaatgagggtaccaaattgattgtgttaaactcgctgaaaaagatggcgaatttgaccgagctcgagctgatccgctgcgatctggaacgaatccctcattctatcttctccttgcacaacctccaagaaatcgatctcaaagacaacaatctgaagactatcgaagagatcatatccttccagcacctccaccggctcacctgtctaaagttatggtacaatcatattgcctatatacctattcaaattggaaacctgaccaacttagaacggctgtacctaaataggaacaagatcgagaaaatcccaacccagctattctattgtaggaagctgagatacctcgacctgtcacataataacctgacttttctgccagccgacataggcctgttacagaatttgcagaacctcgccatcacagcgaatcgaatcgagaccctgccaccagagctgttccaatgcagaaaactgagagccttgcatcttggcaacaacgtcttgcagtccttgccatcaagggtcggagagctaaccaacctaactcagatcgaactccgcggaaatcgattggagtgcttgcctgtagagctgggggagtgtcctttgctgaaacggagcggcctagtggttgaggaagacctgtttaacactctcccccccgaggtgaaagagcgcctctggcgcgccgacaaggagcaagcatag

SEQ ID NO: 192911 - DNA, 2433 bp, synthetic construct
  misc_feature 1..2433: note = Description of Artificial Sequence: Synthetic coding sequence
  source 1..2433: mol_type = other DNA
atgatccccgtgaccgagctgcggtacttcgccgacacccagcccgcctatcgtatcctgaagccatggtgggacgtgttcacagattatatcagtatagtcatgcttatgatcgccgtctttggcggtacactgcaagttacccaggataagatgatatgcctgccctgtaagtgggtgaccaaagattcttgcaatgactccttcaggggttgggccgcgcctggtcccgaacccacctatcccaacagtaccatcttaccaacaccggacaccggaccaactggcatcaaatacgatctcgatcgccaccagtacaactatgtggatgccgtctgttatgaaaataggttgcattggttcgccaagtactttccgtacctcgttctgctgcacacccttattttcctcgcctgttccaatttttggttcaaatttcccaggacctcaagtaaactagaacatttcgtttcaatcttgctgaagtgcttcgactcaccttggactacccgagcgctaagcgaaacagtggtagaagaatccgaccccaagcctgccttttccaaaatgaacggcagcatggataagaagtcatctacagtgagcgaagacgttgaagccaccgttcctatgctccagagaactaagagtagaattgaacaaggcatcgtagaccgctctgagacgggcgttctcgataagaaggagggggaacaggccaaggctctgtttgaaaaggtcaagaaattcagaacacacgtcgaggagggcgatatcgtatatagactctacatgaggcagaccatcataaaggtgattaaattcattctgatcatttgctacactgtctactacgtgcataatatcaagttcgacgtggattgcactgtcgacatcgagtctctgacgggctatcgcacgtatagatgcgctcaccctctggcaaccctatttaagatcctggccagtttctacatctccttagtaattttctacgggctgatatgcatgtataccctgtggtggatgctccgtcgctctctgaagaaatactcctttgagtctattagggaggagtcttcctactcagacatccctgacgtaaagaatgatttcgcgtttatgttgcaccttattgaccagtatgaccctctctattctaagagatttgccgtcttcttatcagaagtatcagagaataagttgaggcagctaaacctgaataatgagtggaccctggacaaactgaggcagagactcaccaagaacgctcaggataagttggagcttcacctgttcatgttgtcaggtattcccgataccgtgttcgacctggtggagttggaggtcctgaagcttgaattgattccagatgtgactattcctcccagcatagcccaattgactggattaaaggagctgtggctttaccatactgcagccaagattgaagcccccgccctcgcctttttgagggagaacctgcgggcactgcatatcaagtttacagacatcaaggaaataccactgtggatttattcattgaagacccttgaagagctgcacttgacaggcaacttgtctgcggagaataaccggtacattgtgatcgacggccttcgcgagcttaagagactgaaagttcttcggctgaagtctaacctgtctaagcttccacaggtcgttactgacgtgggagttcacctgcaaaaactgagtattaacaatgaaggaaccaagctgattgtcttaaacagcctgaagaagatggccaatctgacagagttggagctgatccgctgtgacttggagcgtataccacattccatcttcagcctacataatctgcaagagatcgaccttaaggacaataacttgaagaccatagaagaaattatctctttccagcacctgcacaggctgacttgcctgaagctctggtacaatcatattgcctatatccccatccagatcggcaatctcactaacctggagagactgtaccttaatagaaacaagattgagaaaatccctacacagctgttctactgtagaaaacttaggtacctggacctcagccacaacaacttgacatttcttccggctgatataggactgttgcagaaccttcagaatttggcaattactgctaaccggatcgaaacactgcctcctgagctgtttcaatgcaggaaactgcgagcgttgcacctggggaacaatgtcctgcagagcctacctagtagggtcggagaactgacgaatctgacccagattgagctacggggcaatcgtttagagtgcctgcccgtagaactgggcgagtgccccttgctcaagcggtctggattggtggtcgaagaggatctctttaataccttgcctccagaagttaaggaacgtctatggcgcgccgacaaggaacaggcttag

SEQ ID NO: 192912 - DNA, 2412 bp, synthetic construct
  misc_feature 1..2412: note = Description of Artificial Sequence: Synthetic coding sequence
  source 1..2412: mol_type = other DNA
atgatcaccctgaccgagctgaagtgcctggccgacgcccagagctcctaccacattctgaagccctggtgggacgtgttttggtattacatcacgctgatcatgctcttggtagccgtcctcgcgggcgctctgcagctaacccaatctcgggtcctctgttgcctgccgtgtaaagtcgaattcgacaaccattgtgctgtaccgtgggatattctgaaggctagtatgaacacctcctcaaaccctggcacccctcttcctctgcctttacggatccagaatgacctgcataggcagcagtactcctatatcgatgcagtctgctatgagaaacagctgcattggttcgccaagttcttcccgtaccttgtgctgctgcatacactcatatttgctgcatgctccaatttttggctgcactacccgtccacttcttccagattggagcacttcgtggccattctccataagtgtttcgattcgccctggactactcgagctctgagcgaaacagtagcggagcagagtgtacggccactcaagctttctaaatccaagatcctcttaagtagcagtggttgttccgccgatatcgacagcggcaagcagtctctgccctacccccaacctggccttgaatctgcgggtatagagagtcccacatcctccgttctcgataagaaggagggcgagcaggctaaagccatattcgagaaagtaaagcgcttccggatgcatgtggaacagaaagatatcatttacagggtctacctgaagcagattattgtcaaagtgattctctttgtgctcatcattacttacgttccctatttcctgactcacatcaccctggaaattgattgctcggtcgatgtgcaggctttcactggttacaaacgctaccagtgtgtctattctttggcagagatcttcaaggtgcttgcttccttctacgtgatattggttatcctctacggattaacatcttcttacagcttgtggtggatgctacggagttctctgaagcaatacagctttgaagcactccgcgagaaaagcaactacagcgacatccccgatgtaaaaaatgattttgcctttattttgcatctggccgaccagtatgaccctctgtactctaagcgcttctcaattttcctcagtgaagtttccgaaaacaagctgaagcagatcaatcttaacaatgaatggacggttgaaaaactgaaatccaaactggtcaagaacgctcaggacaagatcgagttacatctgttcatgctgaacgggttgcctgacaatgtgttcgagttaacagagatggaggtactctctttggagctgattcctgaagtgaagctgcctagcgccgtgagccaattggtcaatctgaaagagctgcgcgtgtaccactctagccttgttgtcgatcaccccgccctggcttttctagaggagaacctgaagatactccgcctcaaattcacggaaatgggtaagataccaagatgggtcttccatctgaaaaatctgaaggaactgtatctatcaggttgcgtgctgccagagcagctttccacaatgcagttggagggcttccaggatctcaagaatctgcgaacactgtacctgaaatcaagcctgtctcgaatcccacaggtggtcaccgacctgttacccagcctgcagaagttgtctctcgataatgaggggtccaaattagttgtcctgaataatctaaaaaaaatggtgaacttgaaaagccttgagctcattagttgtgacttggaacggataccacattctatcttttcactgaacaacctgcatgaactggatttgcgtgagaataatcttaaaactgtcgaggaaattatttcctttcaacacctgcaaaatcttagctgtcttaagctgtggcacaacaacatcgcttacattccagcccagatcggagccctcagcaacttagagcagctgagcctggatcataataacatcgagaacttacctctgcagttgttcctgtgcacgaaactccactacttagacctgagctataaccatctgacatttattcccgaggagatccagtatttgagcaatctccagtacttcgccgtcacaaataacaatatcgagatgctgccagacggactctttcagtgcaagaaactccaatgcctccttctggggaagaacagtttaatgaatttgtctcctcacgttggcgaactgagtaatctcactcacttggagctgatcggaaactatttggagacccttccccccgagctggaaggttgtcagtctctcaagcgcaactgtctgatcgtcgaagagaatttgctgaataccctgcctctgccagtgaccgagaggctacagacatgcctcgacaagtgttag

SEQ ID NO: 192913 - DNA, 2412 bp, synthetic construct
  misc_feature 1..2412: note = Description of Artificial Sequence: Synthetic coding sequence
  source 1..2412: mol_type = other DNA
atgatcaccctgaccgagctgaagtgcctggccgacgcccagagcagttatcacattctcaagccctggtgggatgtcttttggtattacatcacactgattatgctgcttgttgcagttttggccggggctttgcaactcacgcagagcagagtcctgtgctgcctgccctgcaaggtggagttcgacaaccattgtgccgtgccatgggacattttaaaagcttcgatgaacacttcctccaatcccggcacgcccttgccgcttcccctaaggatacagaacgatctccatcggcagcagtattcctatattgacgctgtgtgctacgaaaagcagctccactggttcgccaaattctttccttatctggtcctgctgcataccttaattttcgctgcctgttcgaacttttggttacactatcctagcacctcgtctagattagaacactttgtggccatactgcacaagtgcttcgatagtccctggactactcgcgcactgtcggaaacagtggctgagcaaagcgtccggcctttgaaactgtcaaagtctaaaatccttctgtccagtagtggatgctcggcagacatcgactcggggaagcagtcccttccttatcctcagccgggcctggagtcagcaggtattgaatcccctacaagttcagtgctggacaagaaggaaggcgagcaggccaaggcaatttttgaaaaggttaaacgtttccggatgcatgtggaacagaaagatatcatttatcgcgtatacctgaagcagattattgtgaaggtgattctttttgtgctcatcatcacttatgtgccgtacttcctcacccacatcactctagaaatcgactgctcagtggatgtccaggcttttacaggctacaagcgctaccagtgcgtgtacagtcttgctgaaatcttcaaagtgctggctagcttttatgtcatactggtaattctgtatgggctcacttcctcttattccctgtggtggatgctccgctccagcttaaaacagtactctttcgaagctctgagagagaaaagtaactatagcgatatcccggatgttaagaatgatttcgcttttatcttgcatcttgcagaccaatacgaccccttatatagtaaaaggttctccatcttcctctcggaggtttctgaaaataagctgaagcagataaaccttaataatgagtggaccgtagaaaagctcaaatccaagctggtaaaaaacgcacaagataagatcgagctccacctctttatgctcaacggtttgccagataatgtcttcgagcttacagaaatggaggttttgagtctggagttgatccccgaagtgaagctgcctagcgccgtaagtcagctggtcaacttgaaggagctgagggtctatcacagctctctcgtggttgaccatccagccctcgcttttttagaggaaaatttaaagattctgcggctgaaattcactgaaatgggaaaaataccaagatgggtgtttcatctgaagaacctgaaggagctgtacctatccggttgcgttctgcccgagcagctaagcactatgcagcttgaggggtttcaagatctaaagaatttgaggaccctgtatctgaagagttcactgagccggattccacaggttgtgaccgatctgctgccctccctccagaagctctctctcgacaacgaaggatcaaaactagtcgtcctgaataatctcaagaagatggtcaatctcaagagtctggagctgattagctgcgacctcgagaggatccctcactcaatttttagcctgaataacctccacgaactagatctgcgggagaacaacctgaagacagtagaagaaattatcagctttcagcacctgcaaaacctcagctgcttgaagctgtggcacaataatatagcatatattcctgcccagatcggggctctgagcaatttggaacagctgagcctagaccataataacatagagaacttgcctttacaactgttcctgtgcacgaagctacattatctggatctaagctacaatcacttgacgtttattccagaggaaatccagtacctctctaacctgcagtattttgcggtgacgaataataacatagagatgctgcccgacggcctgttccagtgtaagaagttacagtgccttctcctgggtaaaaattccttgatgaatctttcccctcacgtgggagagctgtccaacctcacacacttagagctgatcggtaactacctcgaaacactgccgcccgaactggagggttgtcagagcctgaaaagaaattgtttgattgtggaggagaacttgctgaacacgttgcctctaccagtgactgagcgtctgcagacgtgtctggataagtgctag

SEQ ID NO: 192914 - DNA, 2412 bp, synthetic construct
  misc_feature 1..2412: note = Description of Artificial Sequence: Synthetic coding sequence
  source 1..2412: mol_type = other DNA
atgatcaccctgaccgagctgaagtgcctggccgacgcccagagcagctatcatatactgaaaccctggtgggacgttttttggtattatatcacactgattatgctcctcgtggccgtgctcgccggcgccctgcagctgacgcaaagccgggttctgtgctgcctcccctgcaaggtggaattcgataaccactgcgcagtgccttgggatattctgaaagcatctatgaatacttcatccaatccaggaaccccattaccacttcccctacggatccaaaatgacctccatcgccaacaatatagttatatcgacgccgtttgctatgagaagcagctccactggttcgcaaaatttttcccctatttggtcctgctacacaccctaatcttcgccgcctgttcaaacttctggcttcattacccctccactagttctaggctcgagcacttcgtggcgattctgcacaagtgcttcgatagtccttggaccactagagccctctcagaaacagttgccgaacagagtgtccggccccttaaactttcaaaatccaagatcctgctttccagctctggatgctctgccgacattgattccggtaagcagagcctaccatacccgcagcctggcctcgagagtgctggaattgaaagtccaactagctctgtcctcgacaagaaagagggcgagcaagccaaggccattttcgaaaaggtgaagaggtttagaatgcacgttgaacagaaggatataatctatcgcgtgtacctgaagcagatcattgtcaaagttatcctgtttgtattgattatcacatacgtcccctacttcctcacacatataacgctcgaaatagactgcagcgtagacgttcaagccttcaccggctacaagagatatcagtgcgtgtactccctggccgagatctttaaggtactggcctccttctacgtaatcttggtgatactctacggccttacctccagttacagcctatggtggatgctgaggagtagtctaaagcagtattcgtttgaggcactgcgtgagaagagcaactattccgacattcctgacgtcaaaaacgatttcgcattcattttgcatctggcagaccagtacgaccccttgtacagtaagcggtttagtatcttcctgagcgaggtgagcgaaaataagttgaagcagattaaccttaataacgagtggactgtggagaagcttaaatccaagctggtgaagaacgctcaggacaagatcgagcttcacctgtttatgctcaatggacttcccgacaacgttttcgagttgacagaaatggaagtgctcagcttggagttaattcctgaagtcaaactgccctccgctgtgtcacagctggtcaatttaaaagaactccgagtgtatcatagtagcctggtggtcgatcaccctgcgctggcgttcttggaagagaacctgaagattctgaggctgaagttcactgagatggggaagattccacgctgggtgttccacctcaaaaatcttaaggaactatacctgtcaggctgcgtgctacccgaacagctctcaactatgcagctcgaaggttttcaggatctgaagaacctgcgtactctgtatctcaaatcttcactgtctagaataccacaggtggtgaccgacttactaccctctttacagaagctaagtttggacaatgagggatcgaaactcgtcgttctgaataacttaaaaaagatggttaacctgaagagtctcgaattgatttcttgcgatttggaacgaattccacattccattttctccctgaataatctacacgagcttgatctgagagagaacaatttgaaaaccgtcgaggagatcattagctttcaacatctccagaacctgtcctgtctgaagctgtggcacaacaatatcgcctatatccccgcccagataggagctctgtcaaatctggagcagctgagcctggaccacaacaatatcgagaaccttccactccagctgtttttgtgcacaaaattgcactacctcgacctttcctataatcatttgacttttatacccgaggaaattcagtacctgagcaatctgcagtacttcgctgtaactaataataacatcgaaatgctcccagacggtctgttccagtgtaaaaagctgcagtgtctgttgctgggaaagaattccctgatgaatttgtcaccacatgtcggagagctgagtaacctgactcatctggagctgatcggaaactatctcgaaacactgccacccgagcttgaaggttgtcagtcactcaagagaaattgtctaatcgtggaggagaatcttttgaacaccctgccattgcctgtcactgagaggctgcaaacttgtcttgacaagtgctag

SEQ ID NO: 192915 - DNA, 312 bp, synthetic construct
  misc_feature 1..312: note = Description of Artificial Sequence: Synthetic coding sequence
  source 1..312: mol_type = other DNA
atgatcaccctgaccgagctgaagtgcctggccgacgcccagagcagctatcacatcctaaaaccttggtgggacgtcttttggtactacataaccctcattatgctcctggtggcagtcctggctggcgctctccaactcacacagtcacgcgtgctgtgttgtctgccctgtaaagtagaattcgataaccactgtgccgtcccttgggacattttgaaagcttcaatgaatacatcctccaacccaggcactcccctgcccttaccactcagaatacagaatgatctgcatcggcaacagtactcctag

SEQ ID NO: 192916 - DNA, 693 bp, synthetic construct
  misc_feature 1..693: note = Description of Artificial Sequence: Synthetic coding sequence
  source 1..693: mol_type = other DNA
atgatcaccctgaccgagctgaagtgcctggccgacgcccagagctcatatcatattctgaaaccgtggtgggacgttttttggtactacatcactctgatcatgctgttggtcgccgtcctggccggcgctcttcagctcacccagtcccgcgtgctgtgttgtctgccatgcaaggtggaatttgacaatcattgtgccgtaccgtgggatatcctgaaagcgagtatgaatacatcttcaaaccccggtacaccgctcccccttccccttcgcatccagaatgatttgcatcgccagcagtatagctatatagacgcagtttgctacgaaaaacagctgcactggtttgcgaaattctttccgtacctggtgctgctgcacaccctgatctttgccgcttgctccaatttttggttgcattatccaagtactagcagtagattagaacatttcgtcgccatactacacaagtgctttgactctccatggacaactagggccctgagcgagacggtcgccgagcagagcgtgagacctctgaagctgtcgaaaagcaagatcctgctaagttcatccggatgtagcgctgacatcgacagtgggaagcagagcctgccatacccccagcctggcctagaatccgctggaatcgagtccccgactagctccgtccttactgagggcggctag

SEQ ID NO: 192917 - DNA, 2412 bp, synthetic construct
  misc_feature 1..2412: note = Description of Artificial Sequence: Synthetic coding sequence
  source 1..2412: mol_type = other DNA
atgatccccgtgaccgagttccggcagttcagcgagcagcagcccgcctttagagtgctcaagccatggtgggacgtctttaccgactacctgtccgtggccatgctcatgatcggggtcttcgggtgcacactacaggtgatgcaggataaaatcatttgtctgccgaagagagtccagccagcccagaaccattcgtcgctgtcgaatgtgagccaagctgtcgccagtacgacacccctgcctcctcccaagccgtcaccagccaatcctatcaccgtggagatgaaaggtcttaagaccgatctggacctccagcaatattccttcatcaatcagatgtgctacgagagggccctccattggtatgcaaaatacttcccctatctcgtcctgatacataccctagtgttcatgctctgcagcaacttctggttcaagttcccaggttcttcctctaaaattgagcattttatttccattttgggaaagtgtttcgatagtccctggactaccagagctcttagcgaggttagtggagaggactcggaagaaaaggacaatcgaaagaacaatatgaataggagcaacaccatccaatccggtcccgaagatagcctggtcaacagtcagtctttgaaaagcatccccgagaaattcgtcgtggacaagagtaccgccggtgctttagataaaaaagagggcgagcaggccaaggctttattcgaaaaggtgaagaagttccgattgcatgtggaggaaggcgacattttatacgccatgtatgtccggcagaccgttctgaaggtcattaagttcctgattatcattgcttacaatagcgcattggtaagtaaggtgcagtttactgtcgactgtaatgtggatattcaagatatgacgggctacaagaacttctcctgcaaccatactatggcccacctgttctccaaacttagcttttgttatttgtgctttgtgtctatctatgggcttacatgcctgtacaccctttattggctgttctataggtcccttcgcgaatactctttcgagtatgttagacaggagaccggtatcgacgatatcccggatgttaagaacgattttgcctttatgctccacatgatagaccaatatgaccctctatattccaagcgattcgccgtgttcctgtccgaggtctctgaaaataagctcaaacagttgaatctgaataacgagtggaccccagacaaactgcgccaaaaattgcagacaaacgctcacaaccggttggagcttccactaatcatgctgtccgggttacccgataccgtcttcgagatcactgaattgcagtccctgaaactagagattattaagaacgtcatgatacctgctaccatcgcccaactggataatctccaggaactgagcctacaccagtgcagcgtgaaaatacatagtgctgcactgagctttctaaaggagaacttaaaggtgctctcagtcaaattcgatgacatgcgtgagctccctccatggatgtatggtctcagaaatcttgaagaattatatcttgtggggagtctctctcacgatataagtcggaacgtgacactcgaatccctaagggacctgaagtccctgaagattctgagcatcaaaagcaatgtctccaaaattccgcaggcggtagtcgacgtttcatcacacctacagaagatgtgcatccacaatgacggaacaaagttggtgatgttaaataatctcaagaagatgactaatttgacagagttagagctggttcactgcgatctggaaagaataccacacgccgttttcagtctactgagtcttcaggagctggatctaaaggaaaataatcttaagtcaatcgaggagatcgtatcatttcaacacctgcgcaagctgacagtcctaaagttatggcacaactccatcacctacattcctgagcacataaagaagctgacaagtcttgaacgtctgagtttttctcataacaaaatcgaggtcctgccttcccatttattcctgtgcaataagattaggtatctggacctttcctacaatgatattaggttcatcccccccgaaattggtgtactccaaagtttgcaatatttcagtatcacctgtaacaaagtagaatccctgccagatgagctttacttttgcaagaagcttaaaacactgaaaatcgggaaaaactccctaagcgtgctgtcccctaagatcgggaacttgctgttcctgtcatatctggacgtcaagggaaaccattttgaaatcctgccccctgagctgggcgactgccgagccctaaaacgcgccggattggtggtggaggatgccctgttcgagaccttgccctcggacgtaagggaacaaatgaagacagaatag

SEQ ID NO: 192918 - DNA, 2577 bp, synthetic construct
  misc_feature 1..2577: note = Description of Artificial Sequence: Synthetic coding sequence
  source 1..2577: mol_type = other DNA
atgttcaccctggccgaggtggccagcctgaacgacatccagcccacctataggattctaaagccttggtgggatgtgtttatggattatctcgccgtggtgatgctgatggtcgctatcttcgccggaacaatgcagctcaccaaagaccaggtggtctgtttgcctgttctgccaagtccagtaaatagcaaggcacacactccgcctggtaacgctgaggttacgacaaatatacctaaaatggaggcagccaccaaccaggaccaggacggtaggaccactaacgatatcagtttcggcacgagcgctgtgacccccgatattccccttcgcgccacttaccctcgtacagactttgccctgccgaatcaggaggccaagaaagagaagaaagatccaaccgggagaaagaccaacttggactttcagcagtacgtgttcatcaaccagatgtgctaccatctggccctgccatggtattcaaaatatttcccatatctggctctgattcacacaatcatcctgatggtttccagcaatttctggttcaagtatcctaagacttgcagtaaggtggagcacttcgtgtcaatcctgggcaaatgctttgaatcgccatggactactaaggccttgtctgaaacggcatgcgaagactccgaggagaacaagcagaggatcacaggcgctcagactctgccaaaacacgtcagtactagttccgacgaaggaagcccctccgcttcaacccctatgataaacaagaccggcttcaagtttagtgcggagaagccagtcattgaggtcccttcgatgaccatcttggacaagaaagacggggagcaggcgaaggccctattcgaaaaagttaggaaattccgagctcatgtagaagacagcgatttaatttacaagttgtatgtggttcagacagtcatcaagaccgccaaattcatctttatcctgtgttacacagcgaattttgtgaatgctatttcattcgagcatgtgtgtaagccaaaagtggagcaccttataggctacgaagtctttgaatgtacacacaatatggcctacatgttgaagaagctgttaatctcctatataagcatcatttgcgtgtacggatttatctgtctgtataccctgttttggctgttccgcattcccttgaaagagtacagttttgaaaaggtgagagaggagtcttctttcagtgacataccagatgttaagaacgatttcgcctttttactgcacatggtcgaccaatatgaccagctttatagcaaacgctttggcgtcttcctcagcgaggtgagcgagaacaaacttcgcgagattagcctgaatcacgagtggacatttgaaaaactgcggcagcatatatcaaggaacgcccaggacaaacaggaattgcacctatttatgctgagtggagtgccagatgccgtgtttgacctcacagatttggacgtgcttaaactggaactgataccagaagctaagataccggctaagatcagccagatgaccaacctccaggaactgcacttatgtcactgtccagcgaaggtcgagcagaccgccttttccttcctgagggatcacctgagatgccttcacgtgaaatttaccgatgtggccgagatccccgcttgggtctacctgctgaagaacctgagggaactttatttaataggaaatctgaattccgaaaacaataaaatgataggactggaaagtctccgcgagctcaggcatctcaagatcctgcacgtgaagtccaacctgactaaagtgccatcaaacattaccgatgttgccccccaccttacaaaattagtgatccacaatgacggaacaaaactgttggtgctgaactcattaaaaaagatgatgaatgtcgccgaattggaactccagaactgcgagctggaacgtataccgcatgctatttttagcctaagcaatctgcaggaattggacctgaaaagcaataacatccgcacaatagaagaaattatctcgttccagcatctgaaaagactgacatgccttaaactctggcataacaagatagttacaatcccccctagcatcactcacgtgaagaacctcgagagcttgtacttttctaataataaactggaatccctgccagtggccgtgttctctcttcagaagctcaggtgtcttgatgtgagttataataatatatccatgatcccaattgaaataggccttttacagaatctgcagcatcttcacatcaccgggaataaagtggacatactccctaaacagctctttaagtgtattaaactccgcacactgaatctcggccagaactgtatcacctcccttcccgagaaagttggacagctctcacagttgacacaattggaactgaaaggtaactgtctggatcgcttgcccgcccagctggggcagtgtaggatgttgaagaagtcagggctggtcgtggaagaccatttgtttgacacgctccccctcgaggtgaaggaagcgctgaatcaggatataaacataccatttgcaaacggcatttag

SEQ ID NO: 192919 - DNA, 2577 bp, synthetic construct
  misc_feature 1..2577: note = Description of Artificial Sequence: Synthetic coding sequence
  source 1..2577: mol_type = other DNA
atgttcaccctggccgaggtggccagcctgaacgacatccagcccacatacagaattcttaagccttggtgggatgtcttcatggactacctggccgtggtcatgctgatggtcgcaatcttcgccggcaccatgcagctgacgaaagaccaggtcgtgtgtcttcctgtgctgcctagccccgtgaattccaaggcacacactccacctgggaacgctgaagttacgacgaatatccctaagatggaggccgctactaaccaggaccaggatgggaggacaactaatgatatctcttttggcactagtgcggttacgcccgatatccccctgagagcaacatatccaaggacagattttgctctgcctaaccaggaagccaaaaaagaaaagaaggaccctactggacgaaagactaacttagacttccagcagtacgtcttcatcaaccaaatgtgctaccacctcgcccttccgtggtactcaaaatacttcccttatctcgcgctcattcacactatcatcctgatggtgtcatcaaatttctggtttaaataccccaagacctgcagtaaagttgagcacttcgtttctatactgggtaaatgcttcgaatccccctggaccactaaggctctctctgagactgcctgcgaggactcagaggagaacaaacagaggatcacgggagcgcagacgctccccaagcacgtatctacgtccagcgatgagggcagcccttccgcctctacaccgatgataaataagacagggttcaaattctctgccgagaagcctgttatcgaggtgccttccatgaccatcttggacaagaaagatggcgagcaggcgaaggcgctgtttgagaaagtcaggaagttcagagcccacgtggaagactccgatcttatttacaagctgtatgttgtccaaacagtgataaagaccgcgaagttcatatttattctttgctacactgcaaatttcgtcaacgcaatttcttttgagcatgtttgcaaacccaaggtggaacacctcattggctatgaggtttttgagtgtacacacaacatggcttatatgctaaagaagctcttgatcagctatatatccataatctgcgtttacggatttatctgcttgtacacgctgttttggcttttcagaatcccactcaaagagtattcattcgagaaagtgcgagaggaatcttccttctccgacatacctgatgtcaagaacgatttcgcgttccttctgcatatggtcgaccagtatgaccagctgtattccaagcgctttggggtgttcctgagtgaagtctctgaaaacaaactgagagaaatctcactgaatcacgaatggacatttgagaaactccgtcagcacattagccgtaacgcccaggataaacaagagcttcatctgtttatgctatccggtgtaccagatgctgtatttgacctgaccgacttggacgtgttgaaactggagctgatccccgaggccaagattccagctaagatttctcagatgacgaacctgcaggaactgcacctgtgccattgtcccgccaaagtcgagcagaccgccttttctttccttagagatcatctgagatgcctgcacgttaagtttacagatgtagctgagattcctgcatgggtatacctcttaaagaatttgagggagttgtacctgatcggtaacctgaactctgaaaataataagatgatcggactcgagtcattgagagagttgcgacatctgaagatattacatgtgaaatccaatctgactaaagtcccctctaatattaccgacgtggccccccatctcacaaagctagtcattcacaatgacgggacaaaattattggtcctcaacagcctgaagaaaatgatgaacgtggcagaactggagctgcagaattgtgaacttgaacggatcccacatgcaatattcagcctgtctaatctccaggaattggacttaaaatctaacaatatcagaacaatcgaagaaatcatcagcttccagcatcttaagagactgacgtgccttaagctgtggcataacaaaatcgtcactatcccgcctagtattacacacgtcaaaaatctggagtctctctacttcagcaacaacaaattagagagcttacctgtggctgtgtttagtctccagaagctgagatgtctggacgtgtcttataacaacatctctatgatacctatcgagataggcctgctgcaaaatctgcagcacctccacattacaggaaacaaggtcgatatcctgcccaagcaactgttcaagtgcatcaaactgcgcacactcaatctgggacaaaactgtatcacatctctgcctgaaaaggtgggtcagctcagtcagctaacccaactcgagctgaaaggaaattgtctggatagactccccgcccagttgggacagtgtaggatgcttaaaaagtctgggctggtggttgaggatcacctcttcgacactctgcccctggaggttaaggaggccctgaaccaggacattaacattccttttgctaacgggatctag

SEQ ID NO: 192920 - DNA, 354 bp, synthetic construct
  misc_feature 1..354: note = Description of Artificial Sequence: Synthetic coding sequence
  source 1..354: mol_type = other DNA
atgttcaccctggccgaggtggccagcctgaacgacatccagcccacataccggatcctgaagccctggtgggacgtgtttatggactatctggcagtcgtcatgctgatggtggcaattttcgcgggaacaatgcagctgaccaaggatcaggttgtgtgtctgccggtcctcccctctccagtgaacagcaaagctcacacaccccctggaaatgctgaggtgaccaccaacattccaaaaatggaagcagcaaccaaccaagatcaggatggacggaccaccaacgatattagctttggaacatcagcagtgacacctgacataccattgagggcgacatatcccaggtag

SEQ ID NO: 192921 - DNA, 825 bp, synthetic construct
  misc_feature 1..825: note = Description of Artificial Sequence: Synthetic coding sequence
  source 1..825: mol_type = other DNA
atgttcaccctggccgaggtggccagcctgaacgacatccagcccacctacaggatactgaagccatggtgggatgtattcatggactacctggcggtagtgatgctcatggtcgccatatttgctggaacaatgcagcttaccaaagatcaggtcgtgtgcctgccagtactgcccagtccagtcaattccaaagcccacactcctcctggaaacgccgaagtgactacaaacatcccgaaaatggaggcagctaccaatcaggaccaagacggccgcaccaccaacgacatatcattcggtaccagcgctgtaactcccgacattccactcagggccacatacccccgtactgacttcgccttgcccaaccaggaggcaaaaaaggagaagaaggatcctactggaagaaaaacgaaccttgattttcagcagtacgtattcatcaatcaaatgtgctaccacctggcactcccgtggtatagcaagtacttcccttatctcgcactgatccacactattattcttatggtgtcatcaaacttttggttcaagtatccgaaaacatgttccaaggtcgagcattttgtgtcaatcctgggcaaatgcttcgagtcgccttggacgacaaaggctctgtctgaaacagcatgtgaagactcagaggaaaataagcagcgaatcactggagcccagactctgccaaaacacgtgtcaaccagcagcgacgagggctcgccttcagcctctactccaatgattaacaagactgggtttaaattttcagcagagaagccagttatagaggttccgtctatgacatag

SEQ ID NO: 192922 - DNA, 96 bp, synthetic construct
  misc_feature 1..96: note = Description of Artificial Sequence: Synthetic coding sequence
  source 1..96: mol_type = other DNA
atgttcaccctggccgaggtggccagcctgaacgacatccagcccacttatcgcatcttgaaaccctggtgggacgtgttcatggactacctgtag

SEQ ID NO: 192923 - DNA, 564 bp, synthetic construct
  misc_feature 1..564: note = Description of Artificial Sequence: Synthetic coding sequence
  source 1..564: mol_type = other DNA
atgttcaccctggccgaggtggccagcctgaacgacatccagcccacctatcgcatcctcaagccgtggtgggacgtattcatggattacctagccgtggtcatgctcatggtagccatttttgctggcactatgcagttaactaaggaccaggtggtttgcttgccggtgctgccctctcccgtgaacagcaaagctcacacaccaccagggaacgctgaggtaaccacaaacatccccaagatggaagcagcgacaaatcaggatcaggacgggagaactacaaatgatatttcgtttggtacgtctgcggttacaccagatataccgctccgtgctacttatccaaggaccgattttgcgctgcccaaccaggaggcaaagaaggagaaaaaagatcccactggaaggaagacaaacttggactttcagcagtacgtcttcatcaaccagatgtgctaccacctcgcgctaccttggtactctaagtattttccgtacctggcactgatccacactatcattctgatggtgtcttccaatttttggtttaaatatccgtag

SEQ ID NO: 192924 - DNA, 369 bp, synthetic construct
  misc_feature 1..369: note = Description of Artificial Sequence: Synthetic coding sequence
  source 1..369: mol_type = other DNA
atgttcaccctggccgaggtggccagcctgaacgacatccagcccacatatcgtatcctgaaaccatggtgggacgtgttcatggactacttggccgttgtgatgctgatggtggcaatttttgctggaactatgcaactgacaaaggaccaggtggtgtgtctgcccgttctgccttcaccagtgaattcaaaagcacacacgccgcccggaaacgctgaagtgacaaccaacatccctaagatggaagcggccactaatcaggatcaggatggccggactacaaacgacataagcttcggaacttctgccgttactcctgacatccccctgcgggctacgtacccccgcacagattttgctttatag

SEQ ID NO: 192925 - DNA, 2391 bp, synthetic construct
  misc_feature 1..2391: note = Description of Artificial Sequence: Synthetic coding sequence
  source 1..2391: mol_type = other DNA
atgatccccgtggccgagttcaagcagttcaccgagcagcagcccgccttcaaggtgctgaagccatggtgggatgtactggccgagtatttaaccgtcgctatgctcatgatcggcgtctttggctgcaccctccaagtcacgcaggataagattatctgtttaccgaatcatgaactgcaggagaacctatcagaagccccctgtcagcaactgcttccacggggtatccctgaacaaatcggagctctccaagaagttaaaggcttgaagaacaacctggacctccaacagtactccttcattaaccaactgtgctacgagaccgccctccactggtacgccaaatactttccatatctggtggtgattcatactttaatttttatggtctgcacatccttttggttcaagtttcccggaacctcctctaaaattgagcatttcataagcatccttggaaaatgttttgatagtccatggacaacacgcgcattgagcgaggtgagcggggagaatcagaagggcccagcggcgaccgagcgcgcagccgccaccatcgtggcaatggccgggactggacccggcaaggctggcgagggtgagaaagagaaggtcttggcagagcctgagaaggtagtcactgagccaccagtggtaacgctgttggataaaaaagaaggcgaacaggccaaggctctgttcgaaaaggtcaaaaagttcaggatgcatgtcgaggaaggggatattctgtacaccatgtacatccgtcaaactgtccttaaggtatgtaaattcctggcaatcctggtgtataacctggtgtacgtggagaaaatcagcttcctcgtggcatgtcgcgtcgaaacctccgaggtgactggctacgccagtttttgctgtaatcacaccaaggctcacttattctccaaactggctttttgctacatttccttcgtgtgcatctacggtctaacctgcatctatacactctattggttatttcataggccactgaaagaatactcattcaggagcgtacgcgaggagacaggaatgggcgatattccggatgtgaagaatgacttcgctttcatgctgcacttaatcgaccagtatgattcgctctatagcaaacgatttgctgtcttcctgagcgaggtgtcagaaagccggctgaagcagcttaacctgaatcacgagtggacacccgagaaacttcggcagaagctgcaacggaatgccgccgggaggttagagcttgccctgtgcatgctgcccgggttgcccgacactgtgttcgaacttagcgaggttgaatccttacggttagaagcaatttgtgacatcactttccccccagggctctcccagttagtgcatctgcaggaattgagcctgctacacagccctgcccggcttcctttcagtcttcaagttttcttacgagatcacctgaaggtgatgagggtgaagtgtgaggaacttcgagaggtcccgctttgggtgtttggcttacggggcttagaggaactccacttggaggggctctttccccaagaacttgcgcgcgccgcaacacttgaatcgctgcgagagctgaaacaactcaaggttctttcattacgcagcaacgccgggaaggtgccagcatcggttaccgatgtggctggccatttacaacgcctgtctttacacaacgatggcgctaggctggtggcccttaacagtctaaaaaagttggctgcactgcgggaactggaactggttgcttgcgggttagagagaataccccatgcagttttttcgctgggtgcattgcaggaactggacttaaaagacaatcacttgagaagtattgaggagattctctcattccagcactgcaggaagctggtgacactccggttgtggcataaccaaatagcctatgtccccgagcatgttagaaaactgagaagcctagaacagctctatctgtcttacaataaactcgagactctgccaagccagcttggtctgtgttctggtttgaggctgctggatgtttcccataatggactccactccctcccgcctgaggtgggtctgctgcagaatttacagcacctagcgctgtcatataatgctctggaggccttgcctgaagagctgttcttctgtagaaagttgaggaccctactgttaggagacaatcaattgtctcagctctccccacatgtcggggccctccgcgctctgtctagattggagctgaaaggcaaccggctggaagccttgccagaagagctagggaattgcggcggcctgaaaaaggctggcctgcttgtcgaggacacactgtaccaggggctccctgctgaggtgcgggacaaaatggaggaagaatag

SEQ ID NO: 192926 - DNA, 1569 bp, synthetic construct
  misc_feature 1..1569: note = Description of Artificial Sequence: Synthetic coding sequence
  source 1..1569: mol_type = other DNA
atggacttcctgctgctgggcctgtgcctgtactggctgctgcggcgcccctccggagtggtcttgtgcttacttggcgcttgttttcagatgctcccagctgcacccagcggttgccctcaactgtgtcgctgcgagggtcgcttactgtactgtgaggcacttaatctcaccgaagcacctcacaacctgtccggacttcttggcctttctctgcggtataatagtctatccgagctgagagctgggcaatttacgggcctgatgcagctaacctggctgtacctcgatcacaaccacatctgcagcgtgcagggtgacgctttccagaagctgagaagggttaaggagcttaccctgagctccaaccagatcacccagttacccaataccaccttccggcccatgcctaacctgagaagcgtggacctgagctataacaagcttcaagccctggctccagatctgtttcacggacttcgcaaactgactaccctgcacatgcgagcaaatgccatccagtttgtgcctgtgcgcatctttcaggactgtcgctccttaaagttcctggatatcggctataatcaactgaaaagtctggctcggaactcctttgcaggcctgttcaagttgactgaattgcatctggagcataatgacttggttaaggtgaattttgcacactttccacggctgattagcctgcactccttgtgtcttaggcgtaacaaggttgcaatcgtggtgtcttcactggattgggtttggaaccttgaaaaaatggacctgagcggcaatgagatcgaatacatggaaccacatgtcttcgaaaccgtgccacatctccaatccctccagctggactcaaacaggctgacctatatcgagccaagaatcttaaactcatggaagagcctcaccagcatcaccctggcgggcaacctttgggactgcgggagaaacgtgtgtgcccttgcatcgtggttgaacaatttccagggcagatacgatggtaacctgcagtgcgcttcgcccgagtatgcccagggggaagatgtgctggacgcagtgtatgcctttcacctttgcgaagacggggcggagccgacctccggacatcttctttctgcagtaacaaaccgcagcgacctgggacctccagccagcagcgcaaccacacttgccgacgggggcgaggggcagcacgacggcactttcgaaccagcaactgtggccttgcccggcggcgaacatgccgagaatgcagtccagatccacaaggtggttactggaactatggccctaatattctcattccttatagtcgttctggttctgtacgtttcttggaagtgtttccccgccagcctacgccagcttaggcagtgctttgtgactcagaggagaaagcagaagcagaagcagactatgcatcaaatggccgccatgtctgctcaggaatactacgtcgattacaagccgaatcatatcgaaggtgccctggtgatcataaacgaatacggatcctgcacttgccaccaacaaccagcacgcgaatgcgaagtgtag

SEQ ID NO: 192927 - DNA, 1569 bp, synthetic construct
  misc_feature 1..1569: note = Description of Artificial Sequence: Synthetic coding sequence
  source 1..1569: mol_type = other DNA
atggacttcctgctgctgggcctgtgcctgtactggctgctgcggcggccttccggggtggttctgtgtctcctgggggcctgcttccagatgctcccagctgcccccagtggctgccctcagttgtgccgctgtgagggacgtttgctctactgtgaggccttaaatttgacagaggcccctcataacttaagtgggcttctaggactatcccttagatacaactccctgagcgagttgcgcgcagggcagttcacgggtctgatgcagctgacctggctatatctggatcataatcatatttgctcagtgcagggcgatgccttccagaaactgagacgggtgaaggagctgacattaagtagtaaccagattacgcaactgcccaatacaacattcaggcctatgcccaatctgcggagtgtggacctgtcatataataaactccaggccctggcccctgatctgttccatggcttgaggaaactgacaacattgcacatgcgggctaacgcaatacagttcgtacccgtgagaatctttcaggattgtaggtccttgaaatttctggatatcgggtacaatcagctcaagtccctcgcacgaaactcctttgcgggtctgttcaagcttaccgagctgcatttggaacataacgatcttgtgaaagtgaattttgcgcactttccgcggctgatttcgttacactctctctgccttaggcgtaacaaggtggccatagtcgtctccagcctcgactgggtttggaacttggagaagatggacctctccggaaatgagatcgagtacatggaaccccacgtgttcgagacagtgcctcatcttcagtcactgcagctggatagcaaccgccttacctatattgaaccccgcatactcaattcatggaaaagtctcacttctattacacttgctggaaatctctgggattgtggtcgcaacgtatgcgctcttgcctcatggctgaacaatttccaggggcgctatgacggtaacctgcagtgcgcttcacccgagtacgcccagggggaggatgtgctggatgcagtgtatgcctttcacttgtgtgaagatggcgccgagccaacgtccggacatctgctgagcgccgtaacaaatagaagcgacctgggccctcccgcatcatccgcaacaaccttagccgacggaggcgaggggcagcatgacggaacattcgagcccgcaacggtggccctgccagggggggagcatgcagaaaacgctgtgcagattcataaagttgtgacgggcacaatggccctgattttcagcttcctgattgtggtactggtgctttatgtttcctggaaatgcttccccgcctctctgcgacaattgcggcagtgtttcgtaacccagaggcgcaaacagaaacagaaacaaaccatgcatcagatggcagccatgagcgctcaagagtattacgtggattacaaaccaaaccacatcgagggggccctggtcattataaacgaatacggcagctgtacatgccatcaacagccggcgagagaatgcgaggtgtag

SEQ ID NO: 192928 - DNA, 330 bp, synthetic construct
  misc_feature 1..330: note = Description of Artificial Sequence: Synthetic coding sequence
  source 1..330: mol_type = other DNA
atggacttcctgctgctgggcctgtgcctgtactggctgctgcggcgtcctagcggcgtggtcctgtgcctgctaggtgcctgctttcaaatgttaccagccgcgcccagcggatgccctcaattgtgcagatgcgaaggcaggctgctgtattgcgaagccctcaacctgacagaagctcctcataacctgtcgggcctgctgggactgagcttaagatataatagtctatcagagctgagagccggtcagtttactggcttgatgcagttgacctggttatacctggatcacaaccatatatgttcggtgcagggagatgcattctag

SEQ ID NO: 192929 - DNA, 672 bp, synthetic construct
  misc_feature 1..672: note = Description of Artificial Sequence: Synthetic coding sequence
  source 1..672: mol_type = other DNA
atggacttcctgctgctgggcctgtgcctgtactggctgctgcggcgacccagcggggtagtcctctgcctcctgggagcctgcttccagatgcttccagctgccccgtcagggtgccctcagctgtgtagatgtgaaggaaggctcctttattgcgaagctttaaacttgaccgaagccccccacaacctttcaggattactgggcctgagcttgcgatataacagcctctctgagctaagagctggacagtttaccggcttgatgcaattaacctggctgtacctcgatcacaaccacatatgtagtgtacagggcgatgcattccagaaattgagacgagtgaaggagttgactctgagtagcaatcagatcacccagctgcccaatacaacctttcggccaatgccaaacctccggagcgtcgatctgtcctacaataaactccaggccttggcccccgacctgttccatggtctccgaaagctgacaaccctacatatgagagccaatgcaattcagttcgtgccagtcaggatcttccaggattgcagaagcttgaagtttctggacattggctacaatcagctcaaaagcctggctaggaattcatttgccggactctttaaactgacagagctccacctggaacataatgatctcgtgaagtag

SEQ ID NO: 192930 - DNA, 1569 bp, synthetic construct
  misc_feature 1..1569: note = Description of Artificial Sequence: Synthetic coding sequence
  source 1..1569: mol_type = other DNA
atggacttcctgctgctgggcctgtgcctgtactggctgctgcggcggccttctggcgtggtgctgtgcctcctcggcgcatgttttcagatgttgccagcggccccctccgggtgccctcagctctgtagatgtgaggggcgactgctctactgcgaagccctcaacctcactgaagctcctcataatttatcaggccttctcgggcttagcctgaggtataactctttgtccgagctgagggcaggacagttcacagggctaatgcagctgacatggctctacctcgaccacaatcacatatgttccgttcaaggagacgccttccagaaactgcggagagtaaaggagctgacactgagctcaaatcagataacacagcttccaaataccacctttagacccatgccaaatttgcggtcagtggaccttagctacaataagctgcaagctctcgcccctgatttatttcacgggctgaggaagctcaccacccttcatatgcgagctaatgcgattcagttcgtgccagtgcgaattttccaggattgccgttcactcaagttccttgacatcggatataaccagctgaagtccctggccaggaactcttttgccggcttgttcaaactgacagaattgcatctggaacataatgacctggtgaaagtgaattttgctcattttccccgactgatcagcttgcattctttgtgtctgcggcgcaacaaagtcgctatcgtggtctcctctctcgattgggtgtggaatctcgaaaagatggatctgtctggtaacgagatcgagtacatggaaccgcatgtgttcgagaccgtgccacatctgcagtccctgcaactggacagcaataggctcacctatattgaaccccgcattctcaacagctggaaaagcctgactagcatcactctggccgggaacctctgggattgcggaaggaacgtctgcgcactagcaagttggctaaataacttccagggtaggtacgatggcaatctgcaatgtgcttcaccggaatacgcccaaggcgaggatgtcctcgacgcagtgtacgctttccatctgtgcgaagacggggcagaacctacatctggtcatctgctgagcgccgtcacaaatcggtcagatctagggccgcctgctagtagcgctaccacgctcgcagacgggggggagggtcagcatgacggcactttcgagcctgccacagtggccctcccaggaggggagcatgccgagaatgccgttcagatccacaaagtagtgactggcacaatggcgctcatattctcatttctgatcgtggttcttgttctgtatgtcagttggaaatgctttcccgcctctcttcgccagcttaggcagtgcttcgtcactcagcggcggaaacagaagcaaaagcagactatgcaccagatggccgctatgagtgcgcaggaatattacgtggactacaaacccaatcatatcgagggcgcactggtgattatcaatgagtatggatcttgcacttgccaccagcaacctgcacgagaatgcgaggtgtag

SEQ ID NO: 192931 - DNA, 1569 bp, synthetic construct
  misc_feature 1..1569: note = Description of Artificial Sequence: Synthetic coding sequence
  source 1..1569: mol_type = other DNA
atggacttcctgctgctgggcctgtgcctgtactggctgctgcggaggcccagtggtgtcgtgttgtgtcttcttggagcgtgctttcaaatgcttcctgctgctcccagtgggtgtcctcaactgtgccgctgcgaaggacgtctattgtactgtgaagcactgaacctgacggaggccccacacaatctttctgggctcctaggcctatctctgagatacaactcgctgtctgagctacgcgcaggccaatttacaggattgatgcagctgacctggctgtatctggatcacaaccacatctgttccgtgcagggcgacgcgttccagaagctgaggcgcgtaaaggaactgaccctgtcttccaatcagatcacccagctgcccaacaccaccttcaggccgatgcccaatctccggagcgttgacctatcttacaacaaactgcaagccttggctccagacctgttccacggactcagaaaattgacgacccttcacatgcgcgcaaatgcaattcagtttgtgcctgtaaggatcttccaagattgcaggtctcttaaatttctcgacattggctataaccaactaaaaagtctggcacgcaactcattcgccggtctcttcaagttgacggaacttcacctcgaacacaatgatttggttaaggtcaatttcgcccatttcccgagactgatttctctgcacagtttatgtcttcggcgtaacaaagtcgccatagtggtatcttccttagattgggtgtggaacctggaaaagatggatctgtccgggaacgaaatcgaatacatggagccacacgtgtttgaaaccgtcccccatctgcaatctctccagctggactccaataggctcacctatattgaaccccgaatcctcaatagttggaagagtctcacctcgatcaccctggccggaaatctctgggactgtggcagaaatgtatgtgcgctggcctcttggctgaacaacttccagggacgttacgatggcaatctccagtgcgcatctccagagtatgcacagggagaagacgtgttggatgcggtttatgcctttcacttatgtgaggacggggcagaaccaacgtcaggacaccttttatcagctgtcaccaatagatccgatctcggtccgcccgctagcagtgccacaactctggccgatgggggagaggggcagcacgacggaacatttgagccagccactgttgctcttcccggcggcgaacatgccgagaacgccgtgcagattcacaaagtggtcactgggaccatggctcttatctttagcttcctgattgttgtattggtgttgtatgtgtcctggaaatgctttcccgcgagtttgagacagctgcggcaatgtttcgtgactcagcggaggaaacagaagcaaaagcagaccatgcaccagatggccgccatgagtgcccaggagtattacgtggactacaagccgaaccacatcgaaggcgctttggtcatcattaacgaatatggcagttgtacctgtcaccagcaaccagcgcgcgaatgcgaggtctag

SEQ ID NO: 192932 - DNA, 552 bp, synthetic construct
  misc_feature 1..552: note = Description of Artificial Sequence: Synthetic coding sequence
  source 1..552: mol_type = other DNA
atggacttcctgctgctgggcctgtgcctgtactggctgctgcggcgcccctcaggtgtcgtgctgtgtctgctgggggcatgctttcaaatgctgcccgccgcgccctccgggtgcccacagctctgtaggtgcgagggaaggcttctctactgtgaggcactgaacttgacagaagcgccacacaacctatcggggctgctgggactgtccttgaggtacaattctctcagtgagcttcgggctgggcagttcacaggtcttatgcagctgacatggttatatctcgatcacaaccacatctgctccgtgcagggggatgcctttcagaaactccggcgggtgaaggagctgactctgtctagcaatcaaattacacagttacctaataccacattccgccctatgcctaacttacggtcagtcgatctctcttacaacaaactccaggctttggccccagacctattccacggtctgcgcaagcttacaacactgcatatgcgggccaatgctatccaattcgtgcccgtgagaatctttcaggactag

SEQ ID NO: 192933 - DNA, 1551 bp, synthetic construct
  misc_feature 1..1551: note = Description of Artificial Sequence: Synthetic coding sequence
  source 1..1551: mol_type = other DNA
atgggcctgcacttcaagtggcccctgggcgcccccatgctggccgcaatatacgcgatgtctatggttctgaaaatgctgcccgccttgggtatggcctgtccgccaaagtgtaggtgtgagaagctgctgttctattgcgactcacagggattccatagcgtaccaaatgctactgataagggatcactgggtctgtcccttaggcataaccatatcacagagttggagagggatcaattcgctagtttttctcaactcacttggctgcacctggatcacaatcagatcagcactgttaaagaggatgcttttcaagggctgtacaagctgaaggagctcattctgagctctaacaaaatcttctatctgccaaacactacttttacgcaacttatcaatttgcagaacctcgacctgtcttttaatcagttgagtagtctccatcctgagttgttttacggcctgaggaagctacaaacactacatctgaggtccaattcgctgcgaacaatccccgtaagactcttctgggactgtcggtccctcgagtttctagatctcagcaccaatagattgcgctcactggctcggaatggttttgccggattaattaaactccgagagctgcaccttgagcacaatcagttaacgaagatcaatttcgcccattttctacggctgtcttctctgcatacactttttcttcagtggaacaagatctccaacctgacatgcggcatggagtggacttggggtacccttgaaaagcttgatctaacaggtaacgaaatcaaggctatagatctgactgtcttcgagacgatgcctaacctgaagattctcttaatggacaataataaattaaattccctcgattctaaaattctcaacagccttcgctcactgactaccgtcggacttagcggcaatctgtgggagtgttcagcccgaatttgcgctctggcttcctggctcggctcgtttcaggggagatgggagcatagcatactgtgtcactcgcccgaccatacacaaggggaggatattctggatgcagtgcacggattccagctatgttggaacctgagcaccactgtgaccgtgatggctacgacgtacagagatccaactactgaatacactaaaaggattagctcctcttcataccatgttggggataaggaaatccccaccacggctggaatcgcggtgacaactgaagagcatttccccgaaccagataacgccatctttacccagcgggtcatcactggcactatggcactcctgttcagttttttcttcattatcttcattgtatttatttcccggaaatgctgtcccccaaccctgcggcgcattcgtcagtgtagtatggtgcagaaccatcgccagctcagaagtcagactcggcttcacatgtccaacatgagcgatcagggtccatacaacgagtacgagcccactcatgaaggcccatttatcatcataaacggctacggacagtgcaagtgccagcagcttccttacaaagagtgtgaggtctag

SEQ ID NO: 192934 - DNA, 1746 bp, synthetic construct
  misc_feature 1..1746: note = Description of Artificial Sequence: Synthetic coding sequence
  source 1..1746: mol_type = other DNA
atgggcttcaacgtgatccggctgctgagcggcagcgccgtggccctcgtgatagcccctactgttctactcaccatgctgagcagtgcagagcggggctgccccaaagggtgtcgttgcgagggcaaaatggtgtactgcgaaagtcaaaaattgcaggaaattccttccagtatttctgcaggttgcctgggactgtccctccggtataattccctgcagaagttgaagtacaatcagtttaagggcctgaaccagctgacttggctctacctggatcacaatcacatcagtaacatcgacgagaatgcatttaacggcatccgaaggctgaaggaactaatcctatcctctaatcggattagctacttcctaaataacacgttcagacctgtgactaacttacgcaacttggacttgtcatataaccagcttcacagcttgggctccgagcagtttaggggattgcgaaaactgcttagcctgcacctgcgttccaatagcctgcgcacaattccagtacggatcttccaagactgtaggaacctcgagctgttagatcttggctacaaccgaatcaggtcactggccagaaacgttttcgctgggatgatacggctgaaggagttgcatcttgagcacaaccaatttagcaaactaaacttagcactttttccacgcctggtctcattgcagaacctgtacctccagtggaataaaatcagcgttatcggccagacaatgtcatggacttggtcctccctgcagaggctcgacttaagtggcaacgaaatcgaagcgtttagcgggccgagtgtctttcagtgtgtgcccaaccttcagaggctgaacttagattctaacaagctaacatttattggtcaggaaatcctcgacagctggataagcctgaacgatatcagtcttgccggaaatatctgggaatgttccaggaatatctgctccctagtgaactggctcaagtcatttaaaggactgcgggagaatactataatatgcgcttctccaaaggagctgcagggagtaaacgtgatcgatgcagtcaagaactattccatctgcgggaaatcaaccaccgaacgtttcgacttagccagagccttgcccaaacccactttcaagcctaagctgcctcgtcccaagcacgagagcaagcctcctctgccccccaccgtgggcgccactgagcccggccccgagacagatgcagacgccgagcacatctcctttcacaagatcatcgcggggtccgtggctctgtttttatcggtgttggtgatcctactcgtgatctatgtgtcatggaaaagatatccagccagtatgaaacagcttcagcagcggagcctgatgaggagacatcggaaaaagaagagacagtcactgaaacaaatgacgccatccacccaggagttttatgtggattacaagccaacaaacactgagacctcggagatgcttctgaacggaaccggcccatgcacatacaacaagtccggcagtcgcgaatgcgaaattccactgtcaatgaatgtttcgacgtttctcgcctacgaccagcctactatttcttactgcggtgttcatcatgagctattgtctcataagagtttcgagactaatgcgcaggaagacacgatggagacacatctggagaccgagctggacttgagcacaatcacgaccgcgggcagaataagcgatcacaagcagcagttggcgtag

SEQ ID NO: 192935 - DNA, 1746 bp, synthetic construct
  misc_feature 1..1746: note = Description of Artificial Sequence: Synthetic coding sequence
  source 1..1746: mol_type = other DNA
atgggcttcaacgtgatccggctgctgagcggcagcgccgtggccctggtaattgccccaactgtgttgttaacgatgctctcttctgcagaaagggggtgcccaaaaggatgtcgctgtgaaggcaagatggtgtattgcgagagccagaagctgcaagagatacccagttccatctcagccggttgcctgggcctaagcctgcggtacaattcattgcaaaagctcaaatacaaccagttcaagggactaaatcagttgacatggctctatctggatcataatcacataagtaacattgatgaaaacgcctttaacggcatccgccgtctcaaagaattgatcctgtcgtccaaccggatctcatatttcttaaacaataccttccggcccgtgacgaacctgagaaatcttgacctttcttacaaccagcttcactcactggggtcagagcagttcaggggccttcgaaagctcctgagtctgcatcttcggagcaattcactccgtaccataccagtgcgcatattccaggattgtaggaatctcgagctgttagacctcggctacaaccggattcgttctctggcccgtaacgtcttcgctggcatgatcagactgaaggaactgcacctggagcacaaccaattcagcaagttaaaccttgcattgtttcctcgcctcgtctcattgcagaacctgtatcttcaatggaacaagatctccgttattggtcagactatgtcctggacatggagcagtctgcagcggctggacctgtcaggcaacgagattgaagccttcagcggacctagcgtgtttcagtgcgtacccaacttacagaggcttaatttggactccaataagctgaccttcataggtcaggagatcctcgactcctggatctccctcaacgacatctccctcgcagggaatatctgggaatgtagccgaaatatctgcagtctcgtcaattggctgaagtctttcaagggactaagggaaaatacaattatctgtgctagtcctaaggaacttcaaggagttaacgttattgatgccgtcaaaaactacagcatctgtgggaagtcaaccaccgagcgtttcgatttagccagggcactgcccaaacctacctttaagcctaaactcccccgaccaaaacacgagtcaaagccacctctccccccaactgttggtgctacagaaccgggccctgaaactgatgctgacgctgagcacatatctttccacaagattatcgcagggtccgtcgccctgtttttatcagtgttggtgattctgttggtcatctatgtctcatggaaacggtatcccgcatcaatgaagcagctgcagcaacggtccttgatgcgcagacacaggaaaaaaaaacgccagtcgctcaagcaaatgacgcccagtacccaggagttctatgtggactacaaaccgactaacaccgaaacttctgaaatgctgcttaacggcaccggcccgtgcacctacaataagagcgggtcacgggagtgcgagattcccctgagtatgaacgtgagcacctttttggcctacgatcagccaactatctcttactgtggagtgcatcacgaactccttagtcataagtcctttgagacgaatgcccaggaggacaccatggaaacccacctggaaacagaacttgacctgagcactatcacgacagcgggacgaatctcagatcacaaacaacagctggcctag

SEQ ID NO: 192936 - DNA, 1557 bp, synthetic construct
  misc_feature 1..1557: note = Description of Artificial Sequence: Synthetic coding sequence
  source 1..1557: mol_type = other DNA
atgggcttccacctgatcacccagctgaagggcatgagcgtggtgctagtcttactgcccacccttctcctcgtaatgctgaccggtgctcagcgcgcctgtccgaagaattgcagatgcgacggcaagattgtatactgcgaatcccacgccttcgctgatattcccgaaaacatctctggtggatcccagggcctttcattaagattcaattctattcagaagttgaagtcaaatcaatttgccggattaaaccaacttatctggctctatttagaccataattatatttccagtgttgatgaggatgcattccaggggatacggcgtctgaaggagcttattctctccagcaataaaattacatacttacataacaaaacctttcatccagtccctaacctacggaacctcgatctcagctacaacaagttacaaaccttgcagtctgagcaattcaaaggcctgaggaagttaatcatccttcacctgaggtcaaactcacttaaaactgtgcctatccgggtttttcaggactgtagaaacctggatttcctggatctgggatataatcggttgagaagcctgagtcgcaacgctttcgccgggctacttaagttgaaagaattacacctcgagcacaatcaattcagcaagataaatttcgcccacttcccaagactgtttaatctgcgtagtatatatctgcagtggaatagaatacggtctatctcccaaggcctgacctggacctggtccagcctgcacaacctggacctgagtggcaatgacatccaaggcatcgaacctggaacttttaagtgccttcccaacctccaaaagctaaatctggacagcaataagttaactaatattagccaagagaccgtgaacgcctggatcagcctgatctccatcaccctctctgggaacatgtgggagtgctctagatccatatgccccttgttttactggctgaaaaacttcaagggaaacaaggagtctaccatgatttgcgccggcccaaagcatatccagggcgaaaaggtgtcagacgctgtggagacctataacatttgttccgaggtgcaggttgtgaacactgagcgctcccacctcgtcccccagacgccacaaaaacccctgattataccccgtcctacaatttttaaaccggatgtgacccagtctaccttcgaaaccccgagtccaagtcccgggtttcagattccgggtgctgaacaggagtatgagcacgtgtcattccataaaatcatcgcagggtccgtcgccctcttcctttctgttgctatgatcttacttgtgatctacgtttcatggaagcgctaccctgcctccatgaaacaacttcagcaacattctttgatgaagcgcaggcgcaaaaaggcccgggagtctgaacgccagatgaactcacctttacaagaatactatgtggactacaaacctacaaactcagagaccatggacatctccgtcaatgggagtggaccctgtacttatacaatctccggtagcagggaatgcgaggtgtag

SEQ ID NO: 192937 - DNA, 1773 bp, synthetic construct
  misc_feature 1..1773: note = Description of Artificial Sequence: Synthetic coding sequence
  source 1..1773: mol_type = other DNA
atgggcttccacctgatcacccagctgaagggcatgagcgtggtgctggtgctcctgcccactctactgttggtaatgctcactggcgcccagagggcatgcccaaagaattgtagatgcgatggcaagatcgtttactgcgagtcacacgcattcgctgatattcctgaaaacatcagcggtgggtctcagggcctttcccttaggttcaactccatacagaaactgaagtctaaccagtttgccgggctcaatcagctaatctggctctacttggaccataattacatatcgagcgttgacgaggacgcgttccagggaattaggcggcttaaagaattgattctgtcaagtaataagattacgtacctgcacaataagaccttccaccctgtgccgaatctgaggaacttggacctcagctataataaactgcagaccctgcagtctgaacaatttaagggcttaaggaagctgatcattttgcacctccggtccaacagcctgaagacggtgcctatccgcgtgtttcaggattgtcggaacctggacttcctggatcttggctacaacagactacgctccttgtctagaaatgcatttgccggactcctgaagctaaaagagttacacttagagcataaccagttctccaagatcaactttgcccactttcctaggctcttcaacctccgaagtatctacttacagtggaacaggatccgtagtatctcacagggcttaacatggacatggtctagcctgcacaacctcgatctgagtggcaatgatatccagggaattgaacctggaaccttcaaatgcctacccaacctccagaagctcaacctcgatagcaataaactcaccaacatttcacaggaaaccgttaatgcctggatatcactgataagcataaccttatctggaaacatgtgggaatgttcaaggtccatctgtcccctcttttactggcttaaaaactttaagggcaacaaagaaagcaccatgatctgcgctggccccaagcacattcagggtgagaaagtcagcgatgccgttgagacctataacatctgctccgaggtgcaggtggtgaatacggaaagatcccatctggtgccccagacgccccagaaaccactgattatacccagacccaccatcttcaaacctgatgtgacacagtcgacattcgagacccccagcccttcacccggcttccagatccccggcgcagagcaggaatacgagcacgtgtccttccacaagattatagcagggtctgtggcactttttctatcagttgctatgattttgttggtcatctacgtgtcatggaaacggtatcccgcttctatgaagcaactgcagcaacactccctgatgaagagaaggagaaagaaagcacgggagtccgaacggcaaatgaactcccccctgcaagaatattatgtcgattacaaacccacaaatagtgagacaatggatatcagcgtgaatgggtctggaccctgcacgtacacaattagtggaagtagggagtgcgaaatgcctcaccatatgaagccgttgccctactatagttatgaccagccagttatcggttactgtcaggcccatcagccgctccacgtcacaaagggatacgaaactgtatccccagagcaagacgagagcccaggacttgagctggggcgagaccattcttttatcgcaacaatcgcacggtctgccgcccccgccatttatctcgagagaatcgccaattag

SEQ ID NO: 192938 - DNA, 1773 bp, synthetic construct
  misc_feature 1..1773: note = Description of Artificial Sequence: Synthetic coding sequence
  source 1..1773: mol_type = other DNA
atgggcttccacctgatcacccagctgaagggcatgagcgtggtgctggtgctgctacccactctcctgctcgtgatgttaacaggagcccagcgagcctgtccgaaaaactgtcgttgtgacggaaagatcgtgtactgcgagagccacgcctttgctgacatcccggagaacattagcggcggttcccaaggactatcactaaggttcaacagtattcagaaattaaaatcaaaccagtttgccggcctcaatcagcttatctggctgtacctggatcacaattacatctctagcgtcgatgaagatgcctttcaaggcatccggcgtctaaaggaacttatccttagctcaaataagatcacctatcttcataataaaactttccaccccgtgccaaatctgagaaacctggacctgagctacaataagctccagacgttacagtcagaacagtttaagggcctacgcaagttgataatccttcacctgaggtcgaactctctcaaaacggttccaatcagggtgtttcaggactgtagaaatcttgattttctggacctcggctacaatagactgaggtctctgtcccgcaatgcttttgcgggcttgctgaaactcaaggaacttcatttggaacataatcagtttagcaagattaatttcgcgcattttccacggctatttaacttgagatcaatctatctgcagtggaataggatccgctcgatatctcagggcctcacatggacatggtcgtccctgcataacctcgacctgtccggaaatgatattcaggggattgagccagggacgtttaaatgtttgcctaacctacagaagctcaacctcgattctaacaagcttaccaatatctcacaggaaacagtgaacgcatggatttctctgataagtataacattgtcaggtaatatgtgggaatgtagtcgatcaatttgccccctgttctattggctgaaaaattttaagggaaacaaagagagcacaatgatctgtgccggccctaaacacatccagggagagaaagtcagcgatgcggtcgaaacatacaatatttgtagtgaggtacaagtggttaataccgagcgtagccatctggtgccccagactccacaaaaacccctgatcattccacgtccaaccatattcaaacctgacgtgacgcaatctaccttcgagacccccagcccctctcctggctttcagatcccaggcgcagaacaggagtatgagcatgtatcatttcataaaattatcgccggaagcgttgcactgtttctcagcgtggctatgatcctgctggtgatttatgtatcatggaagagatatcccgccagcatgaagcaattacagcaacactccttgatgaagcgccggcggaagaaagcccgcgagagtgagcggcaaatgaattctcctttacaggagtattatgtggattataagccgacaaatagtgaaaccatggacatcagcgtaaacggatccggtccctgcacctataccataagtggctctcgtgaatgtgagatgccgcaccatatgaaacctttaccgtactacagttacgaccaaccagttatcggctactgtcaagcccatcagcctctgcacgtaacaaagggctacgagaccgtttcccccgagcaggacgagagcccagggctggagcttggccgggaccactcctttatcgcaaccattgcccgctcagccgcccctgcaatctatcttgaacgcatcgctaactag

SEQ ID NO: 192939 - DNA, 1776 bp, synthetic construct
  misc_feature 1..1776: note = Description of Artificial Sequence: Synthetic coding sequence
  source 1..1776: mol_type = other DNA
atgcccggcttccacctgatcacccagctgaagggcatgagcgtggttctggttctgttgcctactctgttgcttgtcatgctgaccggcgctcagcgcgcctgcccaaagaactgtcgttgtgacggaaaaatcgtgtactgcgagagccacgcctttgccgatataccagagaatataagcggagggagccagggcctgtcgttgagattcaatagtatccagaagctgaagagtaatcagttcgctggactgaaccagctgatttggctgtacttggaccacaactacattagttccgtcgatgaagacgccttccagggaataaggcgcttgaaagagttgatactatccagtaataaaattacttacctgcacaacaaaacatttcacccagtacctaatctccgaaatctggacctgagctacaataagctccagacattgcagtcagaacagttcaaaggattgcgaaagctgatcatactgcacctgcgcagcaacagcttgaaaacagtgccgattcgcgtctttcaagactgccgaaacctcgattttctggaccttggttataatagattaagatcgttgtcaagaaacgcttttgccggtcttctcaaactgaaggaactgcacctggagcacaatcagttcagcaagattaattttgcacatttccctcggctgttcaaccttagatcaatctatctacagtggaatagaataagatcaatctcccagggcttgacttggacatggagtagtctgcacaacctggacctgagcggcaatgatatccagggcatcgagcccgggaccttcaagtgccttccgaatctgcagaaattaaatctggatagcaacaaactgactaacatctcgcaggagactgtgaacgcctggatctctttgatctccattaccctttccggcaacatgtgggaatgttcgaggtcaatatgtccccttttttactggcttaagaactttaaaggaaacaaggaaagcaccatgatatgcgccggccctaaacacattcaaggtgagaaggtcagcgacgccgtggaaacttacaacatctgcagtgaggtgcaggtcgttaataccgaacggagccatctggttccacagaccccccagaagccactgatcatccctaggccaaccatttttaagccagacgtgacacagtctacattcgagacaccctcaccttcgcctgggttccagattcccggggccgagcaggagtacgaacatgtctctttccataagataatcgccggttcggtggccctgtttctgagcgttgcgatgattttgctggtgatttacgtgagttggaaacggtaccctgcatctatgaagcagcttcaacagcattcactcatgaagcgaagaaggaaaaaagcccgggaatcagaacgccagatgaacagtcccttgcaagagtattatgtagattacaaaccaactaatagcgaaacaatggacatcagtgtgaacgggagcggcccctgtacctacacaataagcgggagtagagaatgcgaaatgccccaccacatgaaacccctgccatactattcctatgatcagcccgtgatcggttattgccaggcacaccagccgttgcatgtcactaaagggtatgagacagttagtccagagcaggacgagtctccaggacttgaactgggcagggaccacagcttcatcgctacgatcgctaggagtgccgcccctgcaatctatctcgaacggatagctaactag

SEQ ID NO: 192940 - DNA, 579 bp, synthetic construct
  misc_feature 1..579: note = Description of Artificial Sequence: Synthetic coding sequence
  source 1..579: mol_type = other DNA
atgaacaagcgggactacatgaacaccagcgtgcaggagccccccctcgactactcctttagatcgatccacgtaatccaagacctcgtgaatgaggagcctaggactggcctgcgcccactgaaaagatctaagagtgggaaaagtctgacgcagtcactgtggctgaataacaatgtgctgaacgacctccgagacttcaaccaggtcgcctctcaactcttggagcatccggagaacctagcctggatcgatctctcgtttaacgaccttacaagcattgatcctgtccttactacattctttaacttaagcgtgctctatctgcacggaaattcaattcagaggcttggggaagtcaacaagctggccgtcctccctcggcttcgaagtctgaccctgcacggaaaccccatggaggaagagaagggatacagacaatacgtgctgtgtactctgtctcgaatcacaacatttgacttttctggcgtcacaaaagctgataggaccactgctgaggtgtggaagaggatgaatatcaaaccaaaaaaagcctggaccaagcaaaatacactatag

SEQ ID NO: 192941 - DNA, 876 bp, synthetic construct
  misc_feature 1..876: note = Description of Artificial Sequence: Synthetic coding sequence
  source 1..876: mol_type = other DNA
atgggcaccccctggcggaagcggaagggcatcgccggccccggcctgccagatttgtcttgcgccttggtgcttcaaccacgggctcaagttggcacgatgtcccctgctatcgctctcgcctttttgcccctggtcgttacattgttagtgcgctataggcattacttccggctgttggtgagaactgtgctattgcggtccttgcgggattgtctcagcggcctccgcattgaagagcgtgccttttcctacgtcctcactcacgccctcccgggtgatcctgggcatatcctcaccacccttgaccattggagtagccggtgcgaatatttatcacacatgggccctgtcaaagggcaaatcctgatgcgcctcgtagaagagaaggcaccggcttgtgtgctagagctgggtacatactgtggctacagcaccctgctcatcgccagagccctgccgccaggtgggaggctacttactgtggaaagagacccgaggacggctgccgttgctgagaagctcatcagactggctggttttgatgagcatatggttgagcttatcgtcggatcatccgaagacgttatcccatgtcttcggacacagtaccaactctcgagagccgatcttgttctgcttgcccacagaccaaggtgctacctgcgcgacttgcagctcctcgaagctcacgccctcctgcctgccggggctacggttctcgctgaccatgtgctttttcccggagccccacgattcttgcagtatgcgaagtcttgtggaaggtatagatgcagactgcaccatacaggcctccccgatttccctgccattaaggacggaattgcgcagctgacttatgccggcccaggttag

SEQ ID NO: 192942 - DNA, 441 bp, synthetic construct
  misc_feature 1..441: note = Description of Artificial Sequence: Synthetic coding sequence
  source 1..441: mol_type = other DNA
atgaacaagcgggactacatgaacaccagcgtgcaggagccccccctggactatagtttccgctcaatacacgtcatccaggacttggtgaatgaggagccaagaaccggcctccgaccattgaagcggtctaaaagtggaaaaagcctcacccagagcctgtggctcaacaacaatgtacttaatgacctccgggacttcaaccaggtggctagtcagctactggagcaccccgaaaacctggcgtggattgacctgagcttcaacgacctcactagtattgatcctgtccttacaaccttcttcaatttatccgtcttgtacttgcatggaaactctatccagcgcttaggggaggtgaataagctggcagtgctgccgcggctgcgatccctcaccctacatggaaaccccatggaggaagagaagggttaccggtag

SEQ ID NO: 192943 - DNA, 756 bp, synthetic construct
  misc_feature 1..756: note = Description of Artificial Sequence: Synthetic coding sequence
  source 1..756: mol_type = other DNA
atgggcaccccctggcggaagcggaagggcatcgccggccccggcctgcctgacttatcttgcgctctggtgctgcagccgtcccttagggattgcctttccggcctgcgaatcgaagaaagggcttttagctatgtgctgacccatgccctaccaggagatcccggccatattttgacaacactcgaccattggtcctcacggtgtgaatacctcagccacatgggccctgtcaaaggacagatcctcatgagattggtcgaagaaaaagcccctgcctgtgttctggagttaggcacctactgcggctatagcacactgttgattgccagggctcttccccccggagggcgcctgctcactgttgagcgggatccaaggactgccgccgtggccgaaaaattaatacgtctggcaggattcgatgaacacatggtcgagctaatagtggggtccagcgaagacgttataccatgccttagaacgcagtaccagctgtctcgcgccgacctggtcttactggctcaccgaccaagatgctacttgcgggatctacagctattggaggcccacgctctactgcccgcgggggccacggtgctcgctgatcacgttctgttccctggcgcacctaggtttctacagtacgctaagtcctgcgggcgctacagatgcagactgcaccataccggcctgcctgattttcctgctataaaggatggtatcgcccaactgacttacgccggtcccggttag

SEQ ID NO: 192944 - DNA, 876 bp, synthetic construct
  misc_feature 1..876: note = Description of Artificial Sequence: Synthetic coding sequence
  source 1..876: mol_type = other DNA
atgggcaccccctggcggaagcggaagggcatcgccggccccggcttgcctgacctatcttgcgctctggtgctgcagccaagggcacaggtcggaaccatgtctccggccattgcactggctttcctgccactggtggtgaccctcctcgtgcggtacagacattacttcagacttcttgttagaaccgtgcttttacggagcctcagagattgtctgagtggccttcgtatcgaggagagggcctttagttacgttctgacacacgcgttaccaggcgatcccggacacattcttaccaccctcgatcattggagttctcgttgcgagtacctgagccatatgggccctgtaaaggggcagatcctcatgcgtctggtcgaagagaaggcgcctgcatgcgtcttggaactaggaacttattgcgggtacagcactcttctcatagcaagagctttgccaccaggcgggcggctgctcacagttgaacgggatccacgtacagctgcagttgcagagaaacttatccggctcgccggatttgacgagcacatggtcgagttgatagtcggctcctccgaagacgtcataccatgcttacgaactcagtaccagttgtcgcgggcggaccttgtgttgctcgcgcaccgtcctcgatgctacttgagggacttacagttactggaggctcacgccctcttgcccgccggggccaccgtgctggctgatcacgttttgtttccgggcgcccctcgtttcctgcagtacgctaagtcctgcggcaggtataggtgccgcttgcatcatacaggattgcccgattttcccgctatcaaggatggcatagcccagttgacttatgctggccctggctag

SEQ ID NO: 192945 - DNA, 477 bp, synthetic construct
  misc_feature 1..477: note = Description of Artificial Sequence: Synthetic coding sequence
  source 1..477: mol_type = other DNA
atgaacaagcgggactacatgaacaccagcgtgcaggagccccccctggattacagtttccgcagtattcatgtgatccaggatttggtgaacgaagagcctcgcaccggactgcggcccctcaagcgctcgaaatccggcaagtcccttactcagagcctgtggctgaataacaatgtacttaatgacctaagagacttcaatcaggtcgctagtcaactgctcgagcaccctgaaaatctagcctggatcgatctgagcttcaatgatttaacctccatcgaccctgtcttgaccacctttttcaatctgtctgtgctctatttacacgggaacagcatacaacgattaggagaggttaataagctcgctgtgctgcctagactgcgctcgctgactctgcacggcaatccaatggaggaagagaaggggtaccgggttcctgggtccgtggaaatgccacacaggccaccatag

SEQ ID NO: 192946 - DNA, 279 bp, synthetic construct
  misc_feature 1..279: note = Description of Artificial Sequence: Synthetic coding sequence
  source 1..279: mol_type = other DNA
atgaacaagcgggactacatgaacaccagcgtgcaggagccccccctggactactcctttaggtcaattcacgtgattcaggatctcgtcaatgaggaacccagaactgggttgagacctctaaagcgctcaaaatcaggaaagagcttaacccagtctctctggctgaacaacaatgttttgaacgacctgcgagattttaaccaagtggcgtctcagcttctggagcatccggagaacttggcctggatcgatctgtcttttaacgatcttacctag

SEQ ID NO: 192947 - DNA, 579 bp, synthetic construct
  misc_feature 1..579: note = Description of Artificial Sequence: Synthetic coding sequence
  source 1..579: mol_type = other DNA
atgaacaagcgggactacatgaacaccagcgtgcaggagccccccctggattactcctttaggtcgatacacgtgatccaggacctcgtgaacgaagaacccaggactggccttaggcctctcaaaaggtccaaatcgggaaaaagccttacccagagcttatggctgaacaataacgttctcaacgatttgcgggattttaatcaggtggcatcacaacttctagagcatcctgaaaacttggcctggattgacctgagcttcaacgatttgaccagcatcgatcccgtgctgactaccttcttcaatcttagcgtcctctatttgcacggaaattctatacagcgcctgggggaagtgaataaactagccgtcctcccacgacttcgatcactaactctacacggaaaccctatggaagaggagaagggatacaggcagtacgtgctatgcactttgtcccggataacaacattcgacttctctggcgtcactaaagctgatcgtactactgctgaagtgtggaagagaatgaacatcaaaccaaaaaaagcatggactaaacagaacaccctgtag

SEQ ID NO: 192948 - DNA, 477 bp, synthetic construct
  misc_feature 1..477: note = Description of Artificial Sequence: Synthetic coding sequence
  source 1..477: mol_type = other DNA
atgaacaagcgggactacatgaacaccagcgtgcaggagccccccttggactactcctttcggtccattcatgtgattcaagatttggtgaacgaggagccgcgcaccggtctgcgtcctttaaagaggtccaagagcggcaaaagtttaacccagtctttgtggctgaacaataacgttcttaatgacctgagggactttaaccaggttgcatcccagcttttggagcatcccgaaaatctcgcatggattgatctgagttttaatgacctcacctcaattgacccagtgctcacaactttctttaacttatctgtgctgtacttacacggaaacagtatacagaggctgggggaagtaaacaagttggcggtgctgccaaggctgagatccttgacactccatggcaacccaatggaggaggagaagggataccgtgtgcccggtagtgtagaaatgccccaccgccctccatag

SEQ ID NO: 192949 - DNA, 315 bp, synthetic construct
  misc_feature 1..315: note = Description of Artificial Sequence: Synthetic coding sequence
  source 1..315: mol_type = other DNA
atgaacaagcgggactacatgaacaccagcgtgcaggagccccccctggactactctttccgttcgatccacgtgattcaggaccttgtcaacgaggaaccccgtaccggcctgcgacccctgaagcgtagcaaaagcgggaaatctctcacccaaagcctgtggctcaacaacaatgtcctaaacgatttaagagactttaatcaggttgcctctcagctgctcgaacatcccgagaatctcgcctggatagatctgtcctttaatgatttaaccagcatcgaccctgtgttaacgacctttttcaatctgtag

SEQ ID NO: 192950 - DNA, 525 bp, synthetic construct
  misc_feature 1..525: note = Description of Artificial Sequence: Synthetic coding sequence
  source 1..525: mol_type = other DNA
atggtggagttccagcccagcgtgaccgacctggtgaacgaggagcccagaactggcctccgtccactgaagcgatctaagtctggaaaaagccttactcagagcctttggcttaacaacaatgtactcaatgatttgcgcgattttaatcaggtggctagccagttgttggagcaccctgagaacttggcgtggatagatctcagtttcaatgacctcacatccatcgatcccgtactcaccaccttcttcaatctttcagtgctgtatctgcatggtaacagtattcagaggctcggcgaagtcaacaaactcgccgtcttgcctaggcttcggtccctaaccctgcacggaaacccaatggaagaagagaaaggatatcgccaatacgtcctctgcaccctgtctaggatcaccacatttgacttcagcggagtcactaaggcagataggaccacagccgaggtgtggaaacgtatgaacatcaagcctaagaaagcctggactaagcaaaatactctgtag

SEQ ID NO: 192951 - DNA, 3231 bp, synthetic construct
  misc_feature 1..3231: note = Description of Artificial Sequence: Synthetic coding sequence
  source 1..3231: mol_type = other DNA
atggccgagttcaccagctacaaggagaccgccagcagccggcacctccgtttcaagctccagagtctgtccaggaggctcgatgaattggaagaggccaccaagaacttgcagaaggccgaggatgagctactcgacctacaggacaaagttattcaggcggagggatcgaactcctccatgctggctgaaatcgaggtcctcagacagcgcgtattgcggatcgagggaaaagacgaggagatcaaacgcgctgaagatttatgccgacttatgaaggagaagttagaagaggaggagaatcttactagagagctcaagtccgagattgaacggctgcagaaaaggatggcggagcttgagaaacttgaggaggctttttctcggagtaaaaatgattgcacacagctgtgcttgtctctaaatgaggaacgtaatctgacaaagaagataagtagcgaattggagatgctgagggtgaaagtgaaagagctggagtcctccgaggacaggctcgacaaaactgaacagagcctggcatctgaactcgagaagttaaagtctctgacccttagctttgtgtctgagagaaagtatctcaacgaaaaggaaaaagaaaatgagaagttaattaaagagttgacacaaaagcttgagcagaacaagaagatgaacagggactatacaagaaatgcttccaaccttgagagaaatgatctgagaatcgaggacggaatctcttctaccttacccagtaaagagagcagacgtaaggggggcctggactatttaaagcaggtcgaaaatgagacacgcaacaaatcagagaatgaaaaaaacaggaatcaggaggataacaaggtgaaagacttaaaccaggagatagagaagctgaaaactcagatcaagcatttcgaatccctggaagaagagcttaagaagatgaagagcaagaacaacgatttacaggataactacctgagcgaacagaataagaacaaactacttgccagccagctcgaagagatcaaactccaaattaaaaagcagaaagaacttgaaaacggggaggtggaaggcgaagacgcattcctctcttcgaagggaagacatgagagaacaaagtttcgtgggcacggcagcgaggcctctgtgagtaagcataccgcaagagaacttagcccccaacacaagagagaacgtttgcgaaatcgagaattcgccctaaataacgagaactacagcctgagcaaccggcaggtgtcaagtcctagttttacaaatagacgggccgcaaaggccagtcatatgggagtgagcacggactctggaacccaggaaacgaaaaagaccgaggatcggtttgtgccaggttcctcacagagtgagggcaaaaaaagcagggagcagccaagcgtactatcaagatacccccccgccgctcaggagcatagtaaggcttggaagggaactagtaagccagggaccgagagcggcttgaaggggaaggtggagaagactacaagaacgttttcggataccacccacggttccgtgcctagtgacccactgggtcgcgccgataaagcctctgatacaagcagcgagactgtcttcggcaagcgcgggcacgtgctcggtaatggatcacaagttactcaagccgccaatagcggttgtagcaaggctataggggctttagcttcgtcccggagatcatcgtccgaggggctgtctaaaggaaaaaaggctgcgaacggccttgaagcagataattcttgtcctaactcaaaggccccagtcctgagcaagtatccatacagttgccgatctcaggagaatatcctgcagggcttttccaccagccacaaggagggagtaaatcaaccagcggcagtcgtgatggaggattcgagtcctcacgaggccttaagatgcagggtgattaaaagcagtggccgggagaaacccgattctgatgacgatctcgacatcgcctcactggtcaccgccaagctggtcaacacaactatcacccccgagccagagcccaaaccacagccaaatagcagggaaaaggctaagactagaggcgctcctcggacctccttatttgaaaacgataaagatgctggtatggagaacgagtcggtaaagagcgtaagggcatccaccaacaccatggaactaccagatacaaatggtgctggggttaagtcccagcggcccttctcaccacgagaagctctaaggtctagagcaattattaaacccgtcatcgttgacaaggatgtgaaaaagatcatgggaggtagtgggaccgagacaaccctcgaaaagcagaaacctgtctctaagcccggtcccaacaaggtcacctctagtataacaatatatccgtcagattcctcatctcctcgggcagctcctggagaggccctaagggagcgtcacaccagcacctctaacatccaggtcgggcttgccgagttaacctcagtttctaatcatgtatcttccccttttgaactatcaatacacaaacacgatatcaccctccagctggcggaggccgagcgaatggcagacggtcccctaaaggacagacccgaaacagtcgtctcacgttcgtctattataataaagccaagcgaccccgtggaacgcaatagtcacgctccccccgcagagactattcggtggaagagccattccgctcctagtgaagtggggttctcagacgcccggcatgttacggtccgcaatgcgtggaagtcccggcgggaccttaagagtttagaggatccacctacaaggattggtaaaaatgtggaatctacgaatagcaacgcgtacacgcagcggtcatccacagattttagcgaactggagcaaccccggagttgcttgttcgagcagggcacacggagagtgggaccatcctccggtgacgccccggaaccaagctcacgaaggacacagtccagcttgactgtgtcagaggtccttactaggcgcaatcgtgtgggcgatactataaccgtggcagcgtggaaccacagcgcttcaatggaggaggaaggtgaggactgcacgctgagtgtgtacagacagttacacaactctctagatccttctgagttgccgggaaaacaaggcctccctgagtcaggaagggtacgcgccgaggagcgcctcagacccacccgcccttgcgccgaggagaattag

SEQ ID NO: 192952 - DNA, 3081 bp, synthetic construct
  misc_feature 1..3081: note = Description of Artificial Sequence: Synthetic coding sequence
  source 1..3081: mol_type = other DNA
atggccgagttcaccagctacaaggagaccgccagcagccggcaccttagatttaaattgcagtcgctctcgagacgactggatgaactcgaggaggcaacaaaaaatctccagaaggccgaggacgagcttttggatcttcaggacaaggttattcaggcagagggaagcaatagtagcatgttggctgaaatagaggtcctcaggcagcgagtgctgcgaatagagggaaaagacgaagaaatcaagcgtgcggaggacctgtgtcgcctgatgaaggaaaagctggaagaggaggaaaatctgactagagaattaaaatccgaaatcgaaagattgcagaagcgcatggcggagctggagaagctcgaagaggcctttagcagaagcaagaatgactgcactcagctctgcttgtcgctgaacgaagaacgtaatttgaccaaaaagatctcctccgagctggagatgctgcgagtcaaggttaaagagcttgagagctccgaggacaggctcgataaaacagaacagtccctggctagcgagctggaaaaactgaaatctttaacactatccttcgtgtcagagaggaaatacttaaacgagaaggaaaaagagaacgaaaagcttatcaaagagctaacgcaaaaactggagcagaacaagaaaatgaatagagattatactcgcaatgcgagcaacctggaacggaacgaccttcggatcgaggatggtatctcctcaactctcccatccaaggagtcccggcgcaagggcgggctcgactatctcaaacaggtggagaacgagactcggaacaagtctgaaaacgaaaagaacagaaaccaggaagataacaaagtgaaggaccttaaccaggagattgagaaactcaagacgcagattaaacattttgaatcactcgaagaggaactcaagaaaatgaagagcaaaaataacgatctccaggataactacctttcagagcagaataagaataaactgctggcctcacagctggaggaaattaaactccagatcaaaaaacagaaagagcttgagaacggagaggtggaaggcgaagatgcattcctgtcaagtaaaggcaggcacgagcggacgaaattccgtggccacgggtccgaggctagtgtgagcaagcacactgcccgggaactgagtccacagcacaaacgtgagcgcctccgcaaccgcgaattcgccctgaacaatgagaattattctctgagcaaccgacaagttagttcccccagctttacaaatagacgggccgctaaagcctcccacatgggtgtatcaacagatagtggcacccaagagacgaagaagactgaggacaggtttgttcctggctctagtcagtccgaaggtaagaagagccgcgaacagccatccgtcctcagccggtatccgcccgctgctcaggaacatagcaaggcttggaagggcacctccaagccgggcaccgagagcgggctgaaagggaaggtagagaagacaacacggactttctctgacacaacacacggttcagtcccatctgaccccctggggcgggctgacaaggcttctgatacctcctcagagactgtttttggtaaacgcggacatgtgctagggaacggctcacaggtgactcaagccgcaaattctggctgctcaaaggcgatcggtgctttggcctccagcagacggagctctagcgaggggttgtccaaaggcaaaaaagctgccaacggcttagaggccgacaactcgtgtcccaacagtaaggcccctgtactctccaaatacccatactcatgccggtcccaggagaacatactgcagggctttagtactagtcataaggaaggagtgaaccagcccgcagccgtggttatggaagattcttcaccccacgaggcacttaggtgccgggtaataaaatctagcggacgggagaagccagattcagatgacgatctggacattgcatctctcgtgaccgccaagctcgtcaataccacaataacgcctgagcctgagccaaagccccagcctaacagccgtgagaaagccaagacaagaggtgccccacgtaccagtctatttgagaacgacaaagacgctggcatggaaaatgagagcgtgaagtcggttcgggctagtaccaatacaatggagctcccagacaccaatggcgccggagtcaagtcgcaacgaccattcagtccacgagaggcgctgcgatcccgcgccattatcaagccggtgattgtagataaggatgtgaagaaaatcatgggtggtagcgggacggagacgactttagagaagcaaaagccagtctcaaagccaggtcccaataaggtgactagtagtatcaccatatatccctccgactcgagctctcctagagcggcccccggcgaggccctccgggagaggcacacatctactagcaatatccaggtagggctcgcggaacttacaagcgtttcgaatcacgtgtcctcgccattcgaactgtcgatccataagcatgatattaccctacagctggccgaggctgagcggatggcagacgggccactcaaggacagaccagagacagtagtgagccgttcatcaatcattattaagccttctgatcccgtggaacgtaactcccatgctccccccgccgagaccatcaggtggaaaagtcattcggcgccctccgaggttggattctccgacgcacggcatgtgacagtgcggaacgcttggaagagtagacgggatcttaaatctctggaggatcctccaacacgtatcggcaaaaatgtagagtcgacgaactccaacgcctatacacaacgcagtagcaccgacttcagtgagctcgagcagcctagatcctgcctcttcgaacagggcacacgacgggtggggccttcctctggagatgcccccgaaccctccagtaggcgcacccagagttcattaacggtaagcgaggtgctgacccggagaaatcgcgtgggcgacacaatcaccgtggccgcttggaatcactccgcatctatgagtagctag

SEQ ID NO: 192953 - DNA, 3231 bp, synthetic construct
  misc_feature 1..3231: note = Description of Artificial Sequence: Synthetic coding sequence
  source 1..3231: mol_type = other DNA
atggccgagttcaccagctacaaggagaccgccagcagccggcacctgcgcttcaagctgcagtccttgtcaaggagactagacgaattagaggaggcgacaaaaaacttacagaaagccgaagatgaactgttagacctacaggacaaagtcatccaggctgaggggagtaactctagcatgctggccgaaatagaagtgctcaggcagcgggtcctacgcatcgagggtaaagacgaggagattaagagggccgaagatctgtgcagattgatgaaagaaaaattagaggaggaggagaacctgacaagggaactgaaatctgagatcgagagactgcagaagagaatggcagagctggaaaagctcgaagaggctttctccaggagcaaaaacgattgtacgcaactgtgcttgtccctcaatgaagaacgcaatttgaccaaaaagattagctcagaacttgagatgttgcgcgtcaaggtgaaggagttggagtcctccgaagatcgcctggacaagaccgaacagagcctggcttccgagcttgaaaagcttaagagcctgaccctgagctttgtttctgagaggaaatatcttaacgagaaggaaaaggaaaacgagaaactgatcaaagaactcacccagaaactcgaacaaaacaaaaagatgaaccgcgactacacccgtaacgccagtaatctagagcgtaacgacctgcggatcgaagatggcatctcaagcactctacctagtaaggagtctcgccgtaaaggcgggctcgattacctaaagcaggtggaaaatgagactcgcaataagtcggaaaacgagaaaaacagaaatcaggaagacaacaaggttaaagatctcaaccaggaaatagagaaactgaaaacccagattaagcacttcgaatctctggaagaggagctcaaaaagatgaaatcaaagaacaacgacttacaagacaattacctatctgagcagaataaaaataaactcttggccagtcagctggaggagataaaattacagatcaagaaacagaaagagctcgagaatggcgaagtggagggcgaagatgcatttctctcatctaagggacgccacgaacgcacaaaattccggggccacggatcagaggcttccgtcagcaaacacactgctcgtgaactaagccctcaacacaaacgcgagagacttagaaatcgcgagtttgcgttaaataacgagaactactccctttccaaccggcaggtttcatcgccatcttttactaatcggagggctgccaaagctagccacatgggcgtgagcacagactccgggacacaggaaaccaagaagactgaagacaggttcgtccctggttcatctcagtccgaggggaagaaaagtagggagcaaccctctgtcctttctagatatccaccagccgcgcaggagcattctaaagcctggaagggcacgtccaagcctggcacagagtcggggttgaaaggtaaggtggagaagacaacacgcactttctccgacaccactcacggctctgtgcctagtgatcctctcgggcgcgcggacaaggcaagcgatacgtcttccgaaacagttttcggcaagaggggacacgttctcggtaacggctctcaggtcacccaggccgccaattcggggtgctccaaggcaatcggggcacttgctagttctaggagatccagtagtgagggactgtcaaagggaaaaaaagcagcaaacgggctcgaggccgacaatagttgtccgaatagtaaggcccctgtgctttctaaatacccctatagctgccggtcccaggaaaatatcttacaaggctttagtaccagccacaaagagggggtgaaccagccagccgccgttgtcatggaggatagttctccccacgaggcgctgagatgccgggtcattaaaagttccggcagagaaaaacccgatagcgatgacgatctggatatagcttctctagtgactgctaagctggtgaataccactataacaccagaacccgagcctaagccgcagccgaactctcgcgagaaggcaaagaccaggggtgctcctcgtacttctttattcgaaaatgacaaggatgctggaatggagaacgagtccgttaagagcgttcgcgcatccacgaatacgatggaactgcccgacactaacggcgctggcgtaaagagccagcgacccttctctccccgggaagcacttagatcacgtgccattatcaagcctgtaatcgtggataaggacgtgaaaaaaattatgggaggatccggaaccgaaaccacactagaaaaacagaaaccagtaagcaaaccaggcccaaataaagttacgtccagcatcactatataccctagcgattccagcagtccccgcgcagctccgggtgaggctctgcgggaacggcacacgagcacttctaacatccaggttggactggcggaacttaccagcgtgtccaatcatgtgtcctcaccttttgaactcagcatccacaagcatgacatcactctgcagcttgctgaagcagagcgaatggcggacggacccctgaaagatcgccctgagacagtcgtgtctaggtcgtccatcatcatcaagccctcagatccagtcgagcgtaatagccatgccccccccgctgagaccattcggtggaaatctcactcagcaccctccgaggtcggattctccgatgctcgtcatgtgactgtcaggaatgcatggaagagccggcgtgatttgaagtccctggaggatccccctacgcggatcgggaagaacgtcgagtccacgaacagcaacgcgtacacacagagatccagcactgatttttccgagcttgagcaaccccgatcatgtctctttgaacagggcaccagacgcgtcgggccctcttccggggatgcacctgaaccaagctcacgccgaacacagagtagcctgaccgttagtgaggttctgacccgcaggaatcgagttggcgatacaatcacggtggcagcttggaaccactctgcatccatggaagaggagggagaggattgtaccctgagtgtttaccgccagctgcacaactcactcgacccttctgagctgcccggcaagcaggggctccccgaaagcgggagagtgcgggcagaggaacgactccgtcctactagaccttgcgctgaagagaattag

SEQ ID NO: 192954 - DNA, 3231 bp, synthetic construct
  misc_feature 1..3231: note = Description of Artificial Sequence: Synthetic coding sequence
  source 1..3231: mol_type = other DNA
atggccgagttcaccagctacaaggagaccgccagcagccggcacctgaggttcaaactgcagagcttgagtaggcggctcgacgagttggaggaggcaaccaagaatctgcagaaggccgaagacgagctgctagacctgcaggataaggttatacaggcagagggaagtaatagcagcatgctcgctgagattgaggtcctgagacagagggtgctgcggattgagggcaaggacgaagaaatcaagcgtgccgaggacttatgccggctgatgaaagagaagctcgaagaagaagaaaacttaactagagagctgaaatccgagatcgagcgccttcagaaaaggatggcggagctggagaagttggaggaggcctttagtaggtctaagaacgattgcacccagctctgtctctctctcaacgaggaaagaaatttaacaaagaaaatttcgtctgagctggaaatgttgagagtcaaagtcaaagagctggaatcatccgaggatcgactggacaagacggaacagagcctggcatcggaactggaaaaattaaagtctcttactctgtcatttgtgtcagagcggaaatacctgaatgagaaggagaaggaaaatgaaaaattgatcaaggagttgacccaaaagctggaacagaacaagaaaatgaatcgcgactatacgaggaatgccagtaatctagaaaggaatgaccttcggatcgaagatggaatctctagtactttgccgagcaaggagtcgagaaggaaaggcggcctggattacctgaagcaggtggaaaatgagacaaggaacaagagtgaaaacgaaaagaacagaaatcaggaggacaacaaggtgaaggacctgaatcaggaaatcgaaaagcttaagacacaaattaagcacttcgagagtttagaagaggagttaaagaagatgaagtcaaaaaacaacgaccttcaagacaactacctctctgaacagaacaagaacaagcttctggcttcacagctagaggaaataaaacttcagattaagaagcaaaaggagttagagaacggcgaagtagaaggtgaagacgcattcctgagcagtaagggcagacacgagcgaaccaagtttcggggtcacggatccgaagcatcagtatccaaacacaccgctagagagctgtccccccagcacaagcgcgaacgtctgcgcaaccgggaattcgccttgaacaacgagaattatagtctttccaatcggcaggtatcttctccgtcgttcaccaatcgtcgggctgcaaaagcaagccacatgggagtgtcaactgactctgggacacaggagacgaaaaagacagaggatagatttgtacccgggtccagtcagagtgagggaaagaagagcagagagcagccatcagtgctgtccagataccctcctgcggctcaagaacattctaaagcctggaagggcaccagtaaacccgggaccgaaagcggcttaaagggcaaagtcgagaaaacgacaagaaccttttcagacaccacccacggctctgtacccagcgaccctctgggcagagccgataaggcgtctgatacaagttccgagacggtgtttgggaagcgaggccacgtgctcggtaatgggtcacaggtcacccaggctgctaattccgggtgctcaaaagccatcggtgccctcgcaagctctcgtagatcaagttcagaaggcctttctaaggggaagaaggcagctaatggactcgaggctgacaactcgtgccccaactccaaggcaccagtactgtcaaaatacccatacagctgtcggtcccaggagaacattctgcaaggttttagcacgagccacaaagaaggagtcaaccagccggctgcagttgtcatggaagattcctctccacacgaggccctgcgctgccgcgtgataaagagctcagggcgagaaaaacctgatagtgacgatgacttggacattgcatccttggtaaccgcaaaactagttaacactacgattacccctgagccggaacccaagccacagccgaactcacgggaaaaagctaagactaggggggctcctcgtacctctctcttcgagaacgataaggacgctggaatggagaatgaatccgtaaaatctgtgagagccagtactaacactatggagcttcctgatacaaatggagccggcgtcaaaagccagcgcccgttctcaccaagggaggccctgaggagccgggccatcataaagccggttatagtagataaagatgtgaaaaagattatggggggctctggcaccgagacaaccttagagaaacagaaaccagtttccaagccaggtcctaataaggtcacctcaagcatcactatctacccgtcagactctagcagccccagggccgctccaggagaggcccttagggagcggcatacctctacctctaacattcaagttgggctcgccgagttgacatccgtcagtaaccacgtgtcctcaccattcgagctgtccattcacaaacatgatattaccttgcaactcgctgaggctgagcggatggccgacgggcctttaaaagaccgccctgagaccgtcgtttccaggtcttcaatcattattaaaccttctgatcccgtcgagcggaattcgcacgccccacctgccgaaactattaggtggaagtcacatagtgctccaagcgaggttggcttttccgatgccaggcacgtgacagtgagaaacgcctggaaaagtcgccgggatctgaaatctctggaggatccccctacgaggatcggcaagaatgttgaaagcacgaattctaacgcctatacccaaaggtcatccacagattttagcgaattggagcagcccagatcgtgtctttttgaacaggggactaggcgggtggggcccagttctggggatgcccccgagccttcttcccgcagaacccagagcagcttaactgtgtccgaggttctgactcgcagaaacagggtgggtgataccatcactgttgccgcctggaatcactcggcttccatggaggaagagggagaggattgtaccctatcagtctatcggcaactgcacaattcactggatccctcagagctgcctgggaagcaggggctccctgagtcaggcagggtgcgggccgaggagcggctccgtccaactaggccatgcgcggaagagaattag

SEQ ID NO: 192955 - DNA, 822 bp, synthetic construct
  misc_feature 1..822: note = Description of Artificial Sequence: Synthetic coding sequence
  source 1..822: mol_type = other DNA
atggccgagttcaccagctacaaggagaccgccagcagccggcacctgaggtttaaacttcagtcccttagtaggcggcttgatgagttagaagaagctactaaaaacttgcagaaggccgaagacgagttgctggacctgcaagacaaggttatccaggccgagggctcaaactcctctatgctggctgaaatcgaagtcctgcgacagcgcgtgctgagaattgaaggaaaggatgaggagatcaaaagggccgaggacctgtgccgcctgatgaaagagaaacttgaagaggaggagaacctcacacgggagctaaagagcgagattgagaggctgcagaagcggatggcagagctggaaaagctcgaagaagctttctcccgaagcaagaacgattgcacccagctctgcctctccctgaatgaggagcgcaacctgactaagaagatcagcagtgagctcgaaatgctccgtgtcaaggttaaagaattggagagtagcgaagataggctggataagactgagcagtctctggcatccgaactggaaaagttgaagtccttgaccttatcgttcgtaagcgagcgcaaatacctcaacgaaaaagaaaaagagaacgaaaaactaataaaggaattgacgcagaaactagaacaaaataagaagatgaatagggactatactcggaacgccagcaatctagaaaggaacgatctaaggattgaagatggcatctcgtctacattaccctccaaggagtcacggagaaaaggtggattggactacctgaagcaagtagaaaatgagacccggaactag

SEQ ID NO: 192956 - DNA, 108 bp, synthetic construct
  misc_feature 1..108: note = Description of Artificial Sequence: Synthetic coding sequence
  source 1..108: mol_type = other DNA
atggccgagttcaccagctacaaggagaccgccagcagccggcacctgaggttcaagttgcagagtttgagcaggagactagatgagctggaagaggccactaagtag

SEQ ID NO: 192957 - DNA, 1041 bp, synthetic construct
  misc_feature 1..1041: note = Description of Artificial Sequence: Synthetic coding sequence
  source 1..1041: mol_type = other DNA
atgaagttcagccccgcccactacctgctgcccctgctgcccgccctggtactgtctaccagacaggactacgaggagttagagaagcagctcaaagaagtcttcaaagaaagatccaccatactacggcagttgacaaagaccagtcgcgaactggatgggatcaaggtgaatctgcagagcctcaaaaacgacgaacaatccgcaaaaactgatgtgcaaaagctactggaactgggccagaagcaaagggaagaaatgaagagtttgcaggaagccctgcagaatcaacttaaggagacaagcgagaaagctgaaaagcatcaagctacaattaattttctgaaaactgaagtggagcgaaagtcaaaaatgatacgcgacctgcaaaatgagaataaaagccttaaaaacaagctgctgagtggtaataaactatgtggcattcacgccgaggagtctaaaaagattcaagcacagttgaaggagttaaggtacggtaagaaggatctcctattcaaggcccagcagctgacagatctggagcagaagctggctgtcgctaaaaatgaactcgagaaggccgccctggatcgtgagtctcagatgaaagccatgaaggagactgtacagctctgtttgaccagcgtgtttcgcgatcaaccgcccccccccctgtctctgatcacctcgaatccgacccgtatgctcctcccccctagaaacatagccagcaagttgccagatgcagccgccaaatccaaaccccagcaaagtgctagtggcaataacgagtcatctcaggtggaatccacaaaagaaggcaatcccagcaccacggcctgtgacagtcaggacgaggggagaccatgttccatgaagcacaaggagagtcccccttccaatgctactgccgagactgagcccatacctcagaagctgcagatgcctccatgcagcgaatgcgaagtaaagaaggcccccgaaaagcctctgacctctttcgagggtatggcagcccgggaggaaaagatcttgtag

SEQ ID NO: 192958 - DNA, 783 bp, synthetic construct
  misc_feature 1..783: note = Description of Artificial Sequence: Synthetic coding sequence
  source 1..783: mol_type = other DNA
atgaagagcctgcaggaggccctgcagaaccagctgaaggagacctctgaaaaagccgaaaaacatcaggccaccatcaacttcctcaagactgaagtggaaagaaagtccaaaatgatcagagatttacaaaacgagaacaaatcactgaagaataaactgctgtccggcaataagctttgcggcatccatgctgaggagtccaaaaagattcaggcccagctaaaggagctcagatacgggaagaaagacctgcttttcaaagcccaacagctcacggacctcgagcagaagctggcggtggctaagaacgagctggaaaaagccgcccttgatagagaatcccagatgaaggccatgaaggaaaccgtccagttgtgcctgacctcagtatttagggaccagcctccgccccctctgtcactgatcacatccaaccccacacggatgctgctgccccctcgaaatatcgccagcaagcttcctgatgctgctgccaagtccaagccccagcagagtgcatcgggcaacaatgagtctagccaagtagagagcaccaaggaagggaacccctcaaccaccgcctgcgactctcaggacgagggacggccgtgttcgatgaaacacaaagaatccccaccttcaaacgcgacagcggaaacggagcccattccccagaaattacaaatgccaccctgttcagaatgtgaggttaaaaaggcccccgagaaaccactcactagttttgaaggcatggctgcccgggaggagaaaattttatag

SEQ ID NO: 192959 - DNA, 900 bp, synthetic construct
  misc_feature 1..900: note = Description of Artificial Sequence: Synthetic coding sequence
  source 1..900: mol_type = other DNA
atggccgagctgggcctgaacgagcaccaccagaacgaggtgatcaattacatgagatttgcaaggtccaaacgcgggttgcggctgaaaactgtcgattcctgcttccaggatctgaaagagtcacgcctagtagaagacacatttacaattgacgaggtgtccgaagtcctgaatggattgcaggcagtcgtgcattctgaggtagagagcgaattaatcaacaccgcttacacgaacgtactgctgctccgccaactttttgcgcaggcagaaaagtggtatctgaaactgcaaacagacatcagcgaactggaaaatagggaactgttagaacaggtagcagaattcgaaaaggcggaaatcacttctagcaataaaaagccaatcttagacgtgacgaagcccaaactagcgcccctcaatgagggaggcaccgcagagctgttaaataaagagatcctccggttacaagaagaaaatgaaaagctgaagagtaggcttaagaccatcgaaatccaggccacaaatgctctggatgagaagtccaaactcgaaaaagctctgcaagatctccagttagaccaggggaatcagaaggattttatcaaggcgcaggatctgagcaacctggaaaacaccgtggccgctctgaagtccgaattccagaagactcttaatgataagacggaaaatcagaagtcgcttgaagagaacttagcgacggccaagcatgatctcctgagggttcaggagcagctgcatatggccgaaaaggaactggagaagaagtttcagcaaaccgcggcttaccggaacatgaaggagatcctgactaaaaagaatgaccagataaaagatctgcgcaagcgcctggctcagtatgagccagaagattag

SEQ ID NO: 192960 - DNA, 849 bp, synthetic construct
  misc_feature 1..849: note = Description of Artificial Sequence: Synthetic coding sequence
  source 1..849: mol_type = other DNA
atgcggttcgcccggagcaagcggggcctgcggctgaagaccgtggacagttgctttcaagatctcaaggaatcaagactggtcgaggatacatttaccattgacgaggtgtctgaggtcctgaacggtctgcaagccgtagtccattctgaggtggaatcggagctcatcaataccgcttatacgaatgtcttgttgttaagacagttgttcgcccaggcggagaagtggtatctgaaactgcagacggacatctccgaactcgagaatagagagctgctggaacaggtggccgaattcgagaaagcggaaattacctcttccaataaaaaacctatcctggacgtcacgaagcctaaattagcccccttgaacgagggaggcactgctgaactcctcaacaaggagattctgcggctacaagaagaaaacgagaaattaaagagcaggcttaaaaccatcgaaatccaggctacaaatgcgctggatgaaaagtctaagttagaaaaggctctgcaggacctgcagctcgaccagggcaaccagaaagacttcattaaagctcaggacctgtccaacctcgaaaacactgtcgccgcccttaaatccgaattccagaaaactctgaatgacaaaaccgagaaccagaagtcactggaggagaatctcgccaccgccaagcacgacctgttacgggttcaggagcagcttcatatggccgaaaaggagctagagaaaaagttccaacagaccgcagcctataggaatatgaaggagatcctcaccaaaaagaacgatcaaattaaggatctccgcaagagactggctcagtacgagccagaggactag

SEQ ID NO: 192961 - DNA, 771 bp, synthetic construct
  misc_feature 1..771: note = Description of Artificial Sequence: Synthetic coding sequence
  source 1..771: mol_type = other DNA
atgcggaaccaggaccccggcaagatgggccggcagcggaagagcattaaactctatcccacacatcccctggtcactttcccccgctcttgggccaagtttcaagagaaggctctattggtcgaggacacgttcacaattgacgaggtgtcagaagtattaaatggattgcaggccgttgtgcatagcgaggtcgaatccgaactaattaacaccgcctatacaaacgttctgttactgcgccagcttttcgctcaagcggaaaagtggtacctcaagctccagaccgacatctcagaacttgagaatcgagagctactggagcaagtggctgaattcgaaaaggctgaaataacttctagcaataaaaaacccatattggacgtgaccaaacccaaattggcgccactcaacgagggcgggacagcagagctgttaaacaaggaaatactccgcctccaggaggaaaacgaaaaactcaagagtaggttgaagacaattgagatccaggctactaacgcgctagacgagaaaagtaaacttgagaaggcactgcaggacctgcaattggatcagggcaaccaaaaagatttcattaaggcccaggacctctcaaatttggagaacactgtagccgctcttaaatcagaattccagaaaacattgaacgacaagactgagaatcaaaagtcccttgaggaaaacctcgccacagcaaagcacgatctcctcagagtgcaggagcagttgcatatggccgagaagatctag

SEQ ID NO: 192962 - DNA, 441 bp, synthetic construct
  misc_feature 1..441: note = Description of Artificial Sequence: Synthetic coding sequence
  source 1..441: mol_type = other DNA
atggtggacgagctggtgctgctgctgcacgccctgctgatgcggcacagggccctgtccatcgaaaatagccaattgatggagcagctgagattgctagtgtgcgaacgggctagccttctaaggcaagtgcgccctcctagttgtcccgtccccttcccagagactttcaatggtgaaagttcccgcttgccagagtttatagtccaaacggcttcatacatgctggtgaacgaaaacagattttgcaacgacgccatgaaggtggctttcctgatcagtctattaaccggggaagcagaagaatgggtagttccctacatcgagatggatagccccatccttggtgattaccgggcatttttggacgaaatgaaacaatgctttggctgggatgatgacgaagatgatgatgacgaagaagaagaggacgattactag

SEQ ID NO: 192963 - DNA, 2220 bp, synthetic construct
  misc_feature 1..2220: note = Description of Artificial Sequence: Synthetic coding sequence
  source 1..2220: mol_type = other DNA
atggccagcatcctgctgcggagctgccggggccgggcccccgcccgtttacctccccctccacggtacacggtacctaggggaagccccggcgatcctgcccacctgagctgcgcatcgacgttgggcctgcgaaattgtctgaatgtgccattcggctgttgtactcctatccacccagtgtatacgtcaagtcgcggcgaccatctgggctgttgggcactccggcccgaatgtctgaggatagtctccagggctccatggactagtacgagtgtgggatttgtagccgtgggcccccagtgtttgcctgtccgaggatggcatagctcgcgtcctgtgagggatgactctgtggtggagaaatccctgaaaagccttaaagacaaaaacaaaaaactagaagagggaggcccagtctactcaccacccgctgaagtggttgtgaaaaaatccctggggcagagggtgttggatgagctgaagcactactatcacggcttccgcctgctgtggatcgacacgaagattgcagcgcggatgctgtggagaattctgaacgggcactcattgacccgcagggagaggcgacagttcctcaggatctgcgcagatctgttcaggctggtcccattcctggtattcgttgttgttccgttcatggagttcctcttgcccgtggccgtcaaactctttcccaatatgttgccaagcacttttgagactcagtccctgaaggaggagagactcaagaaagagctcagagttaagctagagcttgccaaatttcttcaggatacaatagaggaaatggccctgaagaacaaggccgcaaaaggatcagcaacgaaagacttcagcgtgttcttccagaagattagagagaccggtgagcgcccaagcaacgaagaaatcatgcggttctcgaagctcttcgaggatgaactgactcttgacaatctcacaagaccccaactcgtggcactgtgcaagctgctggagctccaatccattggaaccaataattttcttagatttcagttgaccatgcgcctacggtctatcaaggcggatgataagttgattgcagaagaaggggtggattccctcaacgtgaaggaactccaggcagcctgcagggcccgaggcatgagggcgctgggagtgaccgaggatagattaagaggccagctgaaacagtggttagacttgcacctccaccaagaaattccaacctctctgctcattcttagcagggcgatgtatctgccagacacattatcccccgccgatcagctcaagtcaactcttcagacattgcctgaaatagtggcaaaggaagcccaagtgaaagtagccgaagttgagggcgaacaggtagataataaagcaaaattggaagctacactgcaggaggaagccgcgattcaacaggagcatcgagagaaagaactgcaaaaacgctcggaagttgccaaggatttcgaacccgagcgggtagtggcggccccccagcgacctgggaccgaaccgcagcccgaaatgcccgataccgtcctacagtcggaaactctgaaagatacagcccccgtgctggaaggattgaaggaagaagagatcacgaaggaggaaattgacatcttgtctgacgcatgtagcaaactccaggagcagaagaaaagcctcaccaaagagaaagaagaactcgagctgcttaaagaagacgtacaggattattccgaagatcttcaggagattaaaaaggaactgtcaaagaccggagaagaaaaatatgttgaggagtccaaagcctccaagaggttgaccaagagggtgcagcaaatgattggacaaattgatggcctgataagccaactagaaatggaccagcaagcgggaaaattggcaccggccaatggaatgccaaccggagagaacgtcatctccgtcgccgaactgatcaatgccatgaaacaagttaaacacattcccgagtcaaaattaacaagcttggccgccgccttggacgagaataaggacggtaaggttaatattgacgatctcgtcaaagttatcgaactcgttgataaggaggatgtgcacatcagtactagccaggtagctgagattgtggcaactcttgagaaagaggaaaaagtggaagaaaaggaaaaagccaaagaaaaggctgaaaaggaagtagcggaagtaaaatcatag

SEQ ID NO: 192964 - DNA, 759 bp, synthetic construct
  misc_feature 1..759: note = Description of Artificial Sequence: Synthetic coding sequence
  source 1..759: mol_type = other DNA
atgcggcacacctggcccttccggaacgtgcccttcggctgctgcaccccgatccatcctgtctacaccagtagcaggggtgaccacctggggtgctgggcattacgtccggagtgcctcagaatcgtttctagggccccctggacatccacgtccgtcggcttcgtggctgtgggaccccagtgcctgccagtcagagggtggcactcaagccggcccgtacgcgatgactctgtggtggaaaagtccctgaagtcccttaaagataagaacaagaagctggaggagggcggcccagtttattccccacctgccgaagtggtggtaaaaaaatctctcggccaacgggtcttagacgagctgaaacactattaccacggcttccggcttctatggatcgacactaaaatcgcagcgagaatgctttggcgcatcttgaacggccattcactgacaagacgggagagacgacaatttctgcgaatatgtgccgatctgttccgtcttgtgccattcttggttttcgtcgtggtgccctttatggagttcttgttgcccgtggctgtaaaactcttccctaatatgctccccagtaccttcgaaacgcaatcgttgaaagaggagcggctgaagaaggagctgcgcgtcaaacttgagctggctaaatttttgcaggacacaatcgaagagatggccctgaagaataaggcggcgaaggggagtgcgacaaaggatttttcagtgtttttccaaaaatag

SEQ ID NO: 192965 - DNA, 4185 bp, synthetic construct
  misc_feature 1..4185: note = Description of Artificial Sequence: Synthetic coding sequence
  source 1..4185: mol_type = other DNA
atggccgccctgctgcggagcgcccggtggctgctgcgggccggcgccgcacctcgactcccacttagtttgaggctgctgccagggggacccggccgcctccacgccgcctcctacttgcccgcagcccgtgccggtcccgtggcaggcggacttctgtcgccagccagactttatgcaattgctgcaaaagagaaagatattcaggaggagtctacattttccagcaggaagattagcaaccaatttgactgggccctgatgagactcgatctctcagttcgcagaaccggtaggattccaaaaaagttattacaaaaagtgtttaatgatacctgccggtcagggggcctgggcggaagtcacgcgctgttgcttctcaggtcttgcggatcgctgttaccggaacttaagctggaggagaggacagaattcgcccacagaatttgggacaccctacaaaaactcggagctgtgtatgatgtcagccactataatgcattacttaaagtctacctgcagaacgagtataagttttcacctacagacttcctggcgaagatggaggaagccaacatccaacccaacagagtaacgtaccagaggctcatcgccagctattgcaacgttggagatatcgagggggcctcaaaaatcttgggattcatgaagacaaaagatctcccagtcacggaggccgtcttcagtgctctcgtgaccggtcacgctcgcgctggggatatggaaaatgccgagaacatcctaactgttatgcgggatgctggaatcgagcccggtccagacacctacttggctctcttgaacgcctacgcggaaaaaggggatattgatcacgttaagcagacgctcgagaaggttgaaaagtctgagctgcacttgatggatcgcgacctgctccagattattttctctttttctaaggcgggttacccgcagtatgtgagtgagattttagagaaagtaacctgcgagagaagatacatcccagatgcaatgaacctgatcctgttgctggttacagaaaagctggaggacgtggccttgcagattctcctcgcttgcccagtctccaaagaagacggacccagcgtcttcgggtccttttttctccagcattgcgtgacaatgaacacacctgtggagaagctcacggattactgcaagaagctgaaagaagttcagatgcactccttccccttacagtttacactccactgcgccctgctcgcgaataagacggatcttgctaaagcactgatgaaagccgtgaaggaggaaggttttcccatccgccctcattacttctggcccctgctggtggggagacggaaggagaaaaacgtgcaggggatcattgagatcctcaagggcatgcaggagctcggtgtgcatccagaccaagagacctatacggactacgtgattccgtgctttgacagtgtgaacagcgctcgcgctatactgcaggagaacggttgtctaagtgattccgacatgttctcccaggctggcctgagatccgaggctgccaacggcaatctggactttgtcctaagcttccttaagtccaatacgctgccgattagccttcagtctatcaggagtagcctcttacttggattccggagatcaatgaacattaatttgtggtctgagatcaccgagcttctttacaaagacggccggtattgccaggaaccaagaggtccgacggaagccgtcggctactttctctataatctgattgattctatgtcggactcagaggtacaagccaaagaggaacaccttcgtcagtactttcatcagctggaaaaaatgaacgtcaaaatcccggaaaatatatacagagggatccgcaacttgttagaaagttatcatgtacccgagcttatcaaggatgcccatctgctggtggaaagcaaaaacctcgatttccagaaaacagtccaactgacatcctcagagttggaatctaccctggagacactaaaggccgaaaatcaacccattagagatgttttaaaacagctgatactggtgctctgtagcgaggaaaacatgcaaaaagctctggaactgaaggccaaatacgagtctgatatggttacaggtggatacgccgcccttatcaacctgtgttgccgccacgacaaggtggaggatgccctgaacctcaaggaagagttcgacaggctggatagttcggccgtcttagacaccggaaaatatgttggactggtgcgagtcctggccaaacacggaaagctccaggacgccataaacattctgaaggaaatgaaagaaaaagacgtcttgattaaggataccactgccctcagcttcttccacatgcttaatggggcagctctgcgcggagaaattgaaacagtgaagcagctacatgaagcgattgttacactcggcttagccgagccttccacgaatatctctttcccacttgtgacggtgcatcttgagaagggtgacttatcaacagccctcgaggtcgccatagactgttacgagaaatataaagtgctcccacggatacatgacgtgctgtgtaagctagttgagaagggcgagaccgatttgatacagaaggctatggactttgtttcccaagaacagggggaaatggtgatgttgtatgatttattctttgccttcctgcagaccggcaattataaggaggcaaagaaaatcattgaaactccaggaattagggcacgaagcgcaagactgcaatggttctgtgacagatgcgtggccaataatcaggtggaaacactggaaaagctggtcgaactaacccagaaacttttcgaatgcgacagagaccaaatgtattataatctgttaaaactttacaaaattaatggggactggcaacgcgcggatgcggtttggaacaaaatccaggaggagaacgtgataccacgcgaaaaaaccctgcggctgctagccgaaatcctgagagagggcaaccaggaggtcccctttgacgtacccgaattgtggtatgaggatgagaaacacagtctgaacagttcaagcgccagtaccacggagcctgatttccagaaagatatcctgatcgcatgtagattgaaccagaagaagggggcctacgatatatttctcaacgccaaggaacagaacattgtctttaacgcagagacgtacagcaatcttataaaactcctgatgtccgaggattatttcacccaggccatggaggtgaaggcattcgctgaaacacacatcaaaggattcactctgaatgatgctgccaatagccgcttgatcatcacccaggttcgccgtgactatctgaaggaagccgtgactacattaaaaactgtactcgaccagcagcagaccccttcccgtctggctgtgacgagagtaattcaggccctggctatgaagggggacgtggagaatatcgaagttgtccagaaaatgctcaatgggttagaagacagcattgggctcagcaaaatggtcttcatcaataacatagccctggcacaaattaaaaataacaacatcgacgccgccattgagaacatcgagaacatgttgacttcagaaaataaggttattgaaccacagtacttcgggctggcctatctttttcgaaaagtcatcgaggaacagctagaacctgccgtggagaaaattagtatcatggccgagaggctggccaaccagtttgccatttacaagcccgtgacagacttctttctgcagctggtggacgcagggaaggtcgatgacgccagagcgcttctgcagcgctgtggagcaatcgctgaacaaaccccgatcctgcttctgtttctgctccggaactcacggaagcagggcaaggcttccacagtgaaaagcgtactggagctcatcccagaactgaacgaaaaggaagaggcctataatagcctgatgaagtcctacgtaagcgagaaggatgtgacatccgctaaagcactttatgagcacctgaccgcgaagaatactaagctcgacgacttattccttaaacgatacgcgtccctgctaaagtatgccggggagccagtgcccttcatagaacctcccgagagtttcgagttctacgcacagcagctgcgaaaactgcgggaaaactcttcatag

SEQ ID NO: 192966 - DNA, 3264 bp, synthetic construct
  misc_feature 1..3264: note = Description of Artificial Sequence: Synthetic coding sequence
  source 1..3264: mol_type = other DNA
atgcccccccccatctgcccccccctggcccccggcccctggcccggcgggttgggtggatcacacgctctgctgctgctcaggtcatgcggctcactgctgcccgaactaaaactcgaagaaaggaccgaatttgctcacaggatctgggatacactgcaaaagctgggagctgtatacgacgtgtctcactataatgccctactgaaagtgtacctgcagaacgagtacaaatttagcccaactgacttccttgccaaaatggaagaggctaatatccagccgaatcgggtgacctaccaaaggctgattgcttcatattgtaatgtaggcgacattgagggcgcatccaagattctgggcttcatgaaaaccaaagatttgcctgtgaccgaggcagtattctctgctctggtgacaggacatgcccgagcaggcgacatggaaaacgccgaaaacattctcacagtgatgcgagacgccgggattgagcctggacccgacacttacctggctcttttgaatgcttacgccgagaaaggcgacattgatcacgtgaaacagacactggaaaaagttgaaaaatctgagctgcatctgatggaccgggacctgctccagattatctttagtttcagcaaagcaggatacccccagtatgtctcagagattttggaaaaagtgacttgcgagcggcggtacattccagacgctatgaatctcattctcctgcttgtcaccgagaaattggaggatgttgccctccagattctgctggcctgtccagtctcaaaggaggacggcccatcagtgtttgggagcttcttccttcaacattgtgtaactatgaatacgcccgtggaaaagctgacagattactgtaagaagctgaaagaagtgcagatgcactcgtttccgttacagttcaccctccactgcgccctgctggctaacaaaactgatttggccaaggcgctaatgaaggcagtgaaagaggaaggttttcctattaggccccactacttttggccacttttggtgggacgacgcaaagaaaagaatgtccaggggataattgagattctcaagggcatgcaggaactcggtgtacacccggatcaggaaacctacacggattatgtgatcccctgcttcgattccgtcaatagcgctcgggcaattcttcaggaaaacggttgcttatctgactcagatatgttttcccaagctgggctccggtcggaagccgccaacgggaatctggatttcgtgctgtcgttcttgaagtctaacactctccccatctcacttcagagcattagaagcagtcttttgctaggattccggaggtccatgaatatcaatttatggtcggagatcaccgaattgctatacaaagatgggcgatattgtcaggaaccaaggggccctactgaagctgtggggtactttctttacaatctgatagactcgatgtcggacagcgaggttcaggctaaagaggaacacctaaggcagtactttcatcagctggagaaaatgaacgtgaagatcccagaaaatatctatcggggtattaggaacctacttgagtcttaccatgtgcctgagctcataaaggacgctcacttacttgtggagtccaagaatctcgacttccagaagaccgtgcagctgacttcaagcgaattagagagcaccttggaaactctcaaagccgaaaaccagcccatcagagacgtgttgaagcagctcatactggtcctttgtagtgaggagaacatgcagaaggctcttgagctgaaagcgaaatacgagtccgatatggtgacaggtgggtatgcagcccttatcaacctttgttgccgccacgacaaagtggaagatgcactgaacctgaaggaagagtttgaccgcctggattcctcggcggtgttagacaccggcaaatacgtgggactcgtacgtgttctcgccaagcacggcaaattgcaggatgccattaatattctcaaggagatgaaggaaaaggacgtcttgataaaagacacgactgccttgtccttctttcatatgcttaatggcgcggctttacgcggtgaaattgaaacggttaaacagctccatgaggccatcgtaactctgggcttggccgagccaagcactaatatcagcttccccctggtgaccgtccatctggaaaagggggacctgtcaaccgccctggaggttgccatcgattgttatgaaaagtataaggtcctaccgagaatacatgatgtcctgtgcaagttggtggagaagggggagacagatctgatacagaaggccatggatttcgtgtctcaagagcagggggagatggtcatgctgtacgatctattcttcgctttcctgcagacaggcaattataaagaggcgaagaaaatcatcgagacacccggcattagagcaaggtccgcgagactgcagtggttttgcgatcggtgtgtggctaacaatcaggtggaaacactggagaagcttgttgagcttacgcagaaactctttgaatgcgatcgtgaccagatgtactataacctactcaagctgtacaagatcaatggagattggcagcgagctgacgctgtctggaataagatacaggaagagaatgtcatcccgagagaaaaaacccttcgactgttggccgagattctacgggaaggtaatcaggaggtccccttcgacgtgccagagctatggtatgaggacgaaaagcactctctgaactcatcttctgcctctaccaccgaacccgactttcagaaagacatactcatcgcttgtcggctcaaccagaagaagggcgcttatgatattttcttaaacgccaaggaacagaatatagtgttcaacgcagagacctactccaatctcatcaaactgttgatgagcgaggattactttacgcaggccatggaggtaaaagcgtttgccgaaactcatatcaagggatttacattgaacgatgctgctaattcgagattgatcatcactcaggtaagaagggattacctcaaagaggccgtcacaacacttaagacggtcctggatcagcagcagactcctagtcgactggccgtcacccgggtcatccaggcattggcaatgaaaggggacgtcgagaatatcgaagtcgtgcagaaaatgttgaacgggctggaggattccattggcttgtccaagatggtgtttattaacaatatcgccctggcccagtag

SEQ ID NO: 192967 - DNA, 2856 bp, synthetic construct
  misc_feature 1..2856: note = Description of Artificial Sequence: Synthetic coding sequence
  source 1..2856: mol_type = other DNA
atgcccggccccctgggcctgctgtgcttcctggccctgggcctgctagggtccgccggaccttccggggctgctccccccctgtgcgccgcgccttgttcatgcgacggggatcgccgggtggactgcagtggaaaaggcttgactgccgtcccagaggggctgagtgcttttactcaggcattggacatcagcatgaacaacattacccagctgcccgaggacgccttcaagaacttccccttcctcgaggagttgcaactggctgggaatgaccttagctttattcatccaaaggctctgtcaggattgaaagagttgaaagtgctgacccttcaaaacaaccagttaaagacagtaccttccgaggctatccgcggactgtctgccttgcagtccctgcgcctggatgcaaatcacattaccagcgttccagaggattctttcgaaggactggtgcagttaaggcacctgtggttagacgacaattccctgaccgaggttcccgtccatcccctgagcaatttaccaaccctccaggcactaacacttgcacttaacaagatctcatcaatccctgacttcgcatttactaacttgtctagtctcgttgtcttacatctgcataacaataagattcgatccctttcacagcattgctttgacgggttggacaacctggagactctggatctgaactataataaccttggcgaattccctcaggcgatcaaggctcttccgagcctgaaggagttgggcttccacagcaactccatctccgttatccccgacggtgcattcgatggcaatcctctcctgcgcaccatccacctctacgacaatcctctgagcttcgtgggaaactccgcgttccataacttgtctgatctgcattcattagtgatacgaggggcctctatggtgcagcagtttccaaaccttacaggcacagttcatctcgagtcactcaccttaactggaactaaaatctcctccatccctaacaacctgtgtcaggaacaaaaaatgctgaggacactggatctgagttataacaatattcgtgatctgccatccttcaacggttgtcatgcccttgaagaaattagcctccagcggaaccagatttaccagattaaagagggaacatttcagggccttatctcccttagaattttggacctgtcccgcaacctgattcacgagattcattcacgtgcattcgcaacactggggccaattactaacctggatgtgagtttcaacgagctgacatccttcccaacagagggcctgaatggcctgaaccagctgaagctcgtcggcaacttcaagctcaaagaggccctggccgccaaagacttcgtgaatctgagatcattaagcgtgccctatgcctatcaatgttgcgccttttggggctgcgacagttacgcaaacctgaatactgaggacaatagtctgcaggatcattcagtggcccaggaaaagggtaccgccgacgcagcaaacgttacctccaccttggaaaatgaagagcattcccagatcataattcattgcaccccttccactggagccttcaagccttgcgagtacttgctcggcagctggatgatccgcctgaccgtctggtttatttttctggtcgcactctttttcaacctactcgtgatacttactaccttcgcctcctgtacaagtctccccagcagtaagctctttattgggctgatttcagtgtccaatttgtttatgggaatatacaccgggatattgaccttccttgacgcagtgtcttgggggagattcgccgagtttggaatttggtgggaaactgggtccggctgcaaggttgcaggatttttggccgtcttctccagcgaaagtgctatcttcctgctcatgttggcaactgtggagcgttctctgagcgctaaggacatcatgaagaacggtaaatccaaccacttgaaacagttccgcgtcgctgcccttctggcgttcctcggtgcaaccgtcgcaggctgcttccccctctttcacaggggtgagtactcagcttcccctctgtgcttgccttttccaacaggagaaactcccagcctgggtttcaccgtgacgcttgtattgcttaactccctggccttcctcctcatggcagtcatatataccaagttgtattgtaacttggagaaagaggacctctcagaaaattcacagagtagtatgataaaacatgtcgcgtggttgatctttacaaactgtattttcttttgtcctgtagcatttttttctttcgctccactcattacagcaatcagtattagccccgaaattatgaagtctgtgactctgattttcttccccctgccagcgtgtctgaatcctgtcctctacgtgttctttaatcccaagtttaaggaggactggaaactgttaaagcgcagagtgaccaaaaagtcgggctccgtgtctgttagtatctcctctcaaggcggctgcctcgaacaggatttctattacgattgtgggatgtacagccatttgcagggcaaccttacagtttgtgactgctgcgaatcatttctactgactaagccggtaagttgcaaacaccttattaaaagccattcctgtcctgccttggctgttgcgtcatgccagcgtcctgagggttactggtcggactgtggcacccagtcagctcactctgattatgctgatgaggaggattcttttgtgagcgactccagcgaccaggtgcaggcgtgcggacgagcctgtttctaccagagtaggggcttcccactggtccgctacgcttacaatctgccacgcgtgaaagattag

SEQ ID NO: 192968 - DNA, 2724 bp, synthetic construct
  misc_feature 1..2724: note = Description of Artificial Sequence: Synthetic coding sequence
  source 1..2724: mol_type = other DNA
atggacaccagccggctgggcgtgctgctgagcctgcccgtgctgttgcaactcgccacaggcggatctagcccaagatcgggggtgttgctgcgaggatgcccaacccactgccactgcgaaccagacgggcggatgcttctcagggtcgactgctcagacctgggcctgtccgagttgcccagtaacctgtcagtttttacgtcttatctggacttatcgatgaataacatttctcagcttctgcctaacccactcccttctttgcgattcctggaagagcttagactagccggcaacgctctgacatatatcccaaaaggagcatttaccggactgtacagccttaaggtcctgatgttgcaaaataatcagctccggcatgtgcctacagaggcgctgcagaatctgcgtagcctgcagtccttaaggctggacgcgaatcatatctcgtacgtgccaccatcttgctttagtggacttcacagtcttcggcacctgtggctcgatgataacgctctaaccgaaataccagtgcaagccttcaggagcctgtccgccctccaggccatgacattggctctgaacaagattcatcacatccctgactacgctttcgggaacctaagcagcctggtcgtgttacatctgcacaacaatcgcatccactctcttggaaagaaatgctttgacggcctccacagtttggagaccctcgatcttaattacaacaaccttgacgaatttccaacagcgatcagaacattatcaaacctgaaggaactaggatttcatagcaacaatatcaggagtatcccagagaaggccttcgtgggtaatccttctcttatcactatccatttttatgataaccctatacagttcgtggggcgaagcgcattccaacatttgcccgagcttcggacccttacgcttaacggtgcttcccagattacggagttcccagacctcacaggcactgcaaacctggaaagcctgacactgaccggagctcagataagtagtttgcctcaaactgtctgcaaccagctgcctaacctacaggtgctggatctgtcatacaatcttctggaagacctgccttctttttctgtgtgtcagaagctgcaaaagattgatttgcgtcacaacgagatatatgagatcaaggtagacaccttccaacagctgttgtcacttcgatccctgaacctagcatggaacaagatagcaatcattcacccaaatgccttttctactctccctagccttatcaaactcgatctctcctctaatctgctctcttctttccccataaccggtctccacggcctgacccatctgaagctgaccgggaaccacgcactgcaaagcctcatttcttctgagaactttcccgaacttaaagtcatagaaatgccatacgcttaccagtgctgcgcttttggggtgtgtgaaaatgcttataaaatatctaatcaatggaacaaaggcgataactctagtatggacgatctgcataagaaggatgctggcatgttccaggctcaggatgaacgcgatctggaggattttttgctggacttcgaagaggatttgaaggccctccattccgtgcagtgctcccccagcccgggtccttttaagccctgtgagcatctcctcgatggttggctcatccgaatcggggtttggacaatcgctgtattggctctaacttgtaacgcacttgttaccagcactgtctttcggtctccactatacattagcccaataaagctgctcattggtgtcatcgctgctgtgaatatgctgaccggcgtgtccagcgctgtgctggctggtgtggacgccttcactttcgggtctttcgccagacatggagcttggtgggagaatggagtcgggtgccatgtcatagggttcctgtcaatctttgcctctgagagctctgtttttcttctgaccctggccgctctggaacgcggcttttctgtcaaatactccgccaaatttgagacaaaggcaccttttagtagcctgaaggtgatcattctcctgtgtgcactgctcgctcttaccatggctgcggtgcccctgctgggagggtctaagtatggagctagcccactatgtctgcccctcccttttggcgagccttccactatgggatacatggtcgcgctcatactgctgaattccctgtgctttttaatgatgacgattgcttacacgaaactatattgcaacttggataagggagacctcgaaaatatatgggattgctccatggtcaagcatatcgcactcctgttattcactaattgcattctgaattgtcctgtggcttttctctccttttcaagcctgattaatcttacatttattagcccggaggtcatcaaatttatactcctggtggtggtgccgttgcccgcttgcctgaatccactattgtacatcctgttcaatcctcactttaaggaggatttggtctcactgaggaaacaaacatacgtatggacacggtctaagcatccaagtttaatgagcatcaactctgacgatgttgaaaagcagagctgcgactctacacaggccctggtcaccttcacgagctcttccataacatacgacctccctcccagctcggttcccagccccgcctatccggtgacagaaagttgccacttaagctctgtagcattcgtgccctgtctttag

SEQ ID NO: 192969 - DNA, 2334 bp, synthetic construct
  misc_feature 1..2334: note = Description of Artificial Sequence: Synthetic coding sequence
  source 1..2334: mol_type = other DNA
atggacaccagccggctgggcgtgctgctgagcctgcccgtgctgttgcaactggcaacaggaggtagctctccacgcagcggagtgctgctcaggggctgccccacccattgccattgtgagccggacgggcggatgctcctgcgcgttgattgttcagatttgggcctgtccgagctccctagcaacctgtcagtgtttacgtcctacctggaccttagcatgaacaacatcagtcagttattacctaacccgctcccttcccttcgctttctggaggaactcaggctcgctggtaacgcactgacctatataccaaagggcgccttcacagggctgtactccttgaaagtgctcatgctgcagaacaatcagcttcgtcacgtccccaccgaagcacttcaaaatctaaggagtctacaaagcttgcgactcgatgctaaccatatcagttatgtaccacctagctgtttcagcgggctgcactccctgcggcacctgtggcttgacgacaacgcattaacggaaatccctgtgcaggcgtttagaagtctaagcgcactgcaggccatgactctggccctgaacaaaattcatcacatacccgactacgcattcggaaatctttcttctctcgttgtgctgcacttacacaacaacaggatccacagcctcggcaaaaagtgcttcgatggcctgcactctttggagacattagatctcaattataacaatctggacgagttcccaactgccatccgaaccttaagcaatctgaaggaactagggtttcactctaataatattcggagcatcccagaaaaggctttcgttggtaaccccagtctgatcaccattcacttctacgataaccctatccagtttgtgggtagatccgcctttcagcatctccctgagctcagaacccttacgctgaatggtgctagccaaattactgaatttccagatctgaccggtaccgcaaacttagaaagcctgactttgactggggctcagatctcaagcctaccacaaacggtgtgtaaccagcttcccaatttgcaggtgctggatctgtcgtacaacttgttagaggatctaccttcctttagtgtgtgccagaagttgcagaaaatcgatctgcgacataatgagatctacgagatcaaggtcgatacttttcagcagctcttgagtcttcgcagccttaatctggcctggaacaagatagctatcattcaccctaatgctttctccacactcccgagcctgataaagttagatctcagtagcaacctgctgagtagctttccgatcactggactgcacgggctgacgcatcttaaactgaccggtaatcacgccctgcagtccttgattagcagcgaaaatttccccgaactgaaggtgatcgaaatgccatacgcatatcagtgctgcgccttcggcgtgtgcgagaatgcgtacaaaatttccaaccagtggaataagggggacaactccagcatggatgacctgcataagaaagatgctgggatgttccaggcccaggacgaacgggatctggaggacttcctgttagatttcgaagaagacctcaaggctctgcacagtgtgcagtgtagcccctctccgggccctttcaaaccttgtgaacacctcctggacggatggctgattagaatcggagtttggacaattgccgtcctggcgttgacttgtaacgccctggtcacgtcaaccgttttcaggagcccattgtacatcagtccaattaagttgctaatcggagtcattgccgccgtgaatatgctgaccggagtgtcgtctgcggtcctcgccggagtggacgctttcaccttcggttctttcgcccgccacggcgcctggtgggaaaatggggttggatgtcacgtcatcggcttcttgtctatattcgcatctgagtcatcagttttcctactgacgctggcggcactggaacgcgggttctccgtgaaatacagtgccaagttcgagaccaaagccccattttctagtctcaaggttatcatcttgctatgtgccctgctagccctgacgatggctgccgtccctctcctcgggggatctaaatacggcgcttcacctctgtgccttccacttctccctcatgacgatcattgtctgcaccaagccctgctgcagttcggacagggccgccctggcgagtacctcggcctactctatggtaaaacacactgccccgtggcccttcaccagctacaccctaagctgccttgcggctttctcgtcctgctcttatttaataaaccttacatctatcagtcctag

SEQ ID NO: 192970 - DNA, 2508 bp, synthetic construct
  misc_feature 1..2508: note = Description of Artificial Sequence: Synthetic coding sequence
  source 1..2508: mol_type = other DNA
atggacaccagccggctgggcgtgctgctgagcctgcccgtgctgcttcaactggctacaggcggttccagcccccgctcgggggtactgctcaggggttgtcccacccactgtcattgtgagccagatggccggatgctgttgcgcgtagactgtagcgacctaggtctgtcggagctgccatccaatctgagcgtcttcaccagttacctggacctgtctatgaataatatctcacagctcctgccaaaccccctgccctccctccgatttctcgaggagctacgtctcgcagggaatgcgctaacctacattcccaagggggcatttactggattgtacagcctgaaagtcttgatgctgcagaacaatcagctgcggcatgtgccaacggaggcgctgcaaaaccttaggtctcttcaaagcctgcacctgcataacaatcgcatacactcccttggcaaaaagtgctttgatggtctacacagtttggagaccctcgatctgaactacaacaacctggatgagtttccgaccgcgatccgcacattatccaacttgaaggagctgggttttcacagtaataatataagatccatacccgagaaagcttttgtgggcaatccatccttgattactattcatttttacgataacccaatccaatttgtaggccgttccgccttccagcaccttccggagcttcggactctgaccctgaacggggcatcccagattactgagtttcccgatctcaccggcaccgccaatctggaatccctgactctgaccggagctcaaataagttcgctgccacagaccgtgtgcaatcaattgcccaacctacaggtgctagacctgtcatataacttactcgaagatctccccagcttttcagtgtgtcagaaactgcaaaaaattgacctgaggcataacgagatctatgaaattaaggtcgacaccttccagcagctcctatctctgcgtagcctcaatctagcctggaataaaatagcaattatccatccaaacgcgtttagtactctaccctctctgataaagctcgatttaagttccaaccttctgtcctcgttccctattactggacttcatggtctgacccatttaaagttaactgggaatcacgccctgcagtctctgatctcttcagagaattttccagagctcaaggttatcgagatgccatacgcatatcaatgctgtgcctttggagtatgtgaaaacgcttataaaatctccaatcaatggaacaagggagacaacagctcaatggatgatctccataagaaggatgcaggcatgtttcaagcccaggatgaacgggacctagaggattttttattggattttgaggaagaccttaaagcactccactcagttcaatgctcaccttctcctgggccattcaagccatgtgagcatctgctcgatggctggctgattagaattggggtatggaccattgctgttttggctctgacctgcaatgccctcgtgacttccactgtgttccgatcacctttgtacatcagccccatcaagctgctcattggtgtgattgctgcagtgaacatgctgaccggcgtttcaagcgccgtgctcgccggcgtcgacgcatttactttcggaagttttgctcggcacggggcttggtgggaaaatggtgtaggctgtcatgtcatcggattcttgtcgatatttgccagtgaatcctctgtgtttctgctaacgctggccgcactcgagcgaggcttctcagtaaagtactcagcaaaatttgagacaaaggcccccttctcatctctgaaggtaatcattctcctttgtgctttgttggccctgactatggctgcagtccccttactgggtgggagcaagtatggtgctagtcctctttgcctgccgcttccatttggcgaaccgtctacaatgggttatatggtggctttgatactgcttaactctctctgttttttgatgatgaccatcgcctatactaagttgtattgtaacctcgacaagggagacttggaaaacatctgggattgcagcatggtaaagcacatagccctcttgcttttcaccaactgcatcctcaactgccctgttgcttttctctcatttagttccctcattaatctaaccttcatttcccccgaagttatcaagttcatcctcctggtggtagttcccctgccagcctgcctcaaccccctgctgtacattctgttcaatccccactttaaagaggacctggtatcactcagaaaacagacttatgtgtggacacggtcaaagcatccctctcttatgtcgattaattccgacgatgtcgagaagcagtcatgtgattcaactcaagcccttgtcacctttacctctagttccataacctatgatctgccacccagcagcgtcccttctccggcctaccctgtcacagaaagttgccacctgtctagcgtagctttcgtgccttgtctctag

SEQ ID NO: 192971 - DNA, 2652 bp, synthetic construct
  misc_feature 1..2652: note = Description of Artificial Sequence: Synthetic coding sequence
  source 1..2652: mol_type = other DNA
atggacaccagccggctgggcgtgctgctgagcctgcccgtgctgctgcagctggcgaccggtggaagttcgcccagatcgggcgtgttactccgaggctgtccgacacactgtcactgtgaaccggatggcaggatgctgttacgcgttgattgctccgatctggggctgtctgagctcccctccaatctcagcgtcttcacctcctacctcgatctatccatgaataatatctcccagctgttgcccaacccactcccctctctccggtttctcgaagaattgagacttgccggtaatgccctcacatacatacctaaaggagcattcaccgggctctattccctcaaggtgctgatgcttcaaaataatcaactaagacatgtgcctacagaggcccttcagaatttaaggtccttgcagtccctaaggcttgatgctaaccacatttcatatgtccctccgagctgttttagcggccttcactctctgcgacatctctggttggatgacaacgcactgactgagatccccgtccaagcttttcggtctctctcagctttgcaggctatgacgctggcgcttaataagatccaccatattcccgactatgccttcggaaatctgtcttccttagtggtacttcatctgcacaacaatcgaatccactcgcttggtaagaaatgcttcgacggcctccattcactggagaccctggaccttaactataacaatcttgacgagtttcccaccgcaatacgaacactgtctaacctcaaagagctccatttttatgacaatcccattcagtttgtcggcagaagcgctttccagcacctgccggagttgcgaaccttaactttgaacggcgctagccaaattaccgaatttccagacctcactgggaccgctaacttggagtccctaaccctgacaggcgcccagattagctcgcttccgcagactgtatgcaaccagctgcccaacttgcaagtcctggatcttagctacaacctgcttgaggacctgccctctttctcggtgtgtcaaaagctccagaagattgacctgcggcacaatgagatctatgagattaaagtggacacattccagcagctgttaagcctgagaagccttaatcttgcttggaacaagattgccatcatccaccctaacgccttcagtaccttacccagcctaattaagttagacctgagcagtaatctcctgtcatcgttccccataactggtttgcacggactgactcacctgaagttgacaggaaaccacgccctgcaaagtctgatttctagtgagaattttcccgagcttaaggttattgaaatgccatacgcttaccaatgctgcgcctttggtgtatgcgaaaatgcctataaaatctccaaccagtggaataagggtgacaactccagcatggacgacttacacaagaaggacgcagggatgttccaggcccaggatgagagggatctggaggactttctccttgactttgaagaggacttgaaggcgctgcattcagtgcaatgttcaccatctccaggacccttcaaaccctgcgagcacctgctggatgggtggttaatccgaatcggagtctggacgatcgctgtcctggccctgacgtgtaatgctttggtcaccagcaccgtttttcgctctccactatatatctcgccaatcaagctcctgattggagtgatcgcggcggttaacatgttaaccggagtatcaagtgcagttctcgctggggttgacgcattcacatttgggtcttttgcaagacacggcgcttggtgggagaacggagtaggatgtcacgtgattggcttcctcagcatctttgcctctgagtctagtgttttcctgttgacactggctgcattagaacgtgggttttcagtcaaatattccgccaagtttgaaactaaagcaccattctctagcctcaaagtaatcatcctcttgtgcgccctcctggccctgacaatggccgccgtccccctactcgggggttctaaatatggtgctagtcccctttgcctcccattgccgtttggcgaaccctctaccatggggtatatggtcgcattgatcctgttaaactctctttgcttcttgatgatgacaatcgcctacacgaagctatactgcaacctggataaaggcgacctcgagaacatatgggactgctcaatggtcaaacatattgcactccttctgtttaccaattgcatcctcaactgccctgtggcctttctgagtttcagtagccttattaacctcaccttcatcagtccagaggttattaagtttatactgcttgtggtggtacccctcccagcttgtctcaatcccctgctgtacatcttgtttaatcctcatttcaaggaagacctggtctcccttagaaaacagacatatgtatggactcgttctaagcatccttccctcatgagtattaacagtgacgacgtcgaaaagcaaagctgcgacagcacacaagcattagtgacctttacgagttctagtatcacctatgacctgccaccttccagtgttccgtcccccgcctaccccgttacagaatcctgtcacctgtccagcgttgctttcgttccatgcctttag

SEQ ID NO: 192972 - DNA, 2748 bp, synthetic construct
  misc_feature 1..2748: note = Description of Artificial Sequence: Synthetic coding sequence
  source 1..2748: mol_type = other DNA
atgggccggccccggctgaccctggtgtgccaggtgagcatcatcatttccgcgcgcgatctatccatgaataacttgaccgaacttcagccaggcctcttccaccacctcagattcctggaggagctgcgcctgagcggaaaccacttgtcgcatattccgggacaggccttctccggcctctacagtctgaaaatcctgatgctgcagaacaatcagctgggcgggatacccgctgaagccctgtgggaattgccctccctgcagagcctgcgtttggatgcaaatttaataagcctggtccctgaacggtcgtttgaaggtctcagctcactcaggcacctttggctggacgataacgcccttacggaaataccagtgcgcgcactcaacaatctgcccgccctgcaggctatgacccttgcactcaaccggatctctcacatccctgactacgcctttcagaacctaacctcattagtggtcttgcacctgcacaacaacagaatccagcatctgggcactcacagcttcgaaggactacacaatttggaaaccctcgacttgaactacaacaaactccaggagttcccagttgcgatcagaaccttgggtaggctgcaggagttagggttccacaacaacaatatcaaggccatcccagaaaaggcgtttatgggtaacccccttctccaaactatacatttctacgacaatcctatacagtttgtgggccgctcagccttccagtacctgcctaagttgcacactctgagcctcaacggggccatggacattcaggagttcccggatttaaaggggacaacatcgcttgagattcttaccctgacacgagccggaataaggctgcttccatctggcatgtgtcagcagctgcctaggctgcgcgttctggaactctctcacaaccagatcgaggagctccccagcttgcaccgttgccagaagctggaggagatcggcctgcagcacaacaggatttgggagattggggccgatactttttcgcagctttcaagcctccaggctctcgacctttcctggaatgcgatccggtcaatacatccagaggccttctctaccctgcacagtctggtaaaattggacctaacggacaatcagcttacgacactgccactagctggcctgggcgggttaatgcacctgaagctgaagggtaatctcgctctatcccaggcctttagtaaagactcattcccaaagctgaggattcttgaagtgccttacgcctaccagtgttgcccgtatggaatgtgcgcctcattcttcaaagcctctgggcagtgggaagctgaggaccttcacttggacgacgaagaatcttcaaaaaggcctttgggtctgctggcacgccaggctgagaatcactatgaccaagaccttgatgagctccagctcgagatggaggacagtaaaccccatccctctgtgcaatgcagtcccacacctggaccttttaagccctgtgaatacctgtttgagagttggggaatccggcttgcagtgtgggcaattgtactgctgagcgttctctgcaacggcctggtcctgcttactgtctttgctggtggtcctgtacctctgccgccagtgaagttcgtggtgggagccatagcaggggccaacacccttaccggcatcagttgcggacttctggcttcagtggacgccctgacctttggccaattctctgagtacggcgctcgctgggagactggattgggatgccgggcaactggattcctggccgtcttgggctctgaggcctctgtgcttctgctgacgttagctgcagtacagtgctcggttagtgtttcttgcgtgcgcgcctatggtaagtcccctagtcttggaagcgtgcgggctggggttttaggctgtctggctctcgccggcctcgccgccgccctgccccttgcaagcgtgggggaatatggcgccagcccactatgtctgccatatgccccacctgaggggcagccggccgcactgggattcacggtggccctggtgatgatgaattccttttgtttcttggtggttgcgggtgcctacattaaactatactgtgacctaccccgcggcgactttgaagctgtctgggactgtgccatggttcggcacgtggcttggctgatattcgccgacggcctcctgtattgccccgtcgcctttctgagttttgcctccatgctcggcctcttccccgtaacgcccgaggcggtgaagtcagtcctcctcgtggtcttgccgctccctgcttgcctgaatccacttttgtacctgctgttcaaccctcatttcagggacgatctgaggcgtctgcgcccacgcgcgggggattcgggccctctcgcctatgcagctgccggggagctagagaagtccagctgtgatagtactcaggccctggtagctttctcagatgtcgacctgattcttgaagcctcagaggccggtcggcctcctggcctcgagacatacggcttcccaagtgtgacactgatttcctgtcaacaacccggcgccccccgactcgagggcagccactgtgtggaacccgaggggaatcacttcgggaacccccagcccagcatggatggagagctactgctgagggccgagggctcaactccagctgggggggggttgtctggaggcggaggctttcaaccaagtggccttgcattcgcgagtcacgtctag

SEQ ID NO: 192973 - DNA, 699 bp, synthetic construct
  misc_feature 1..699: note = Description of Artificial Sequence: Synthetic coding sequence
  source 1..699: mol_type = other DNA
atgaacaacctgaccgagctgcagcccggcctgttccaccacctgcgttttttggaggaattacgcctcagcggcaatcatttgagccacatcccgggtcaggccttttcgggcctctattccctgaaaatcctcatgttgcagaacaatcagctgggaggtattccagccgaagcactgtgggaattgccgagtctgcagtccctcagattggatgccaatcttatttcactggtgcccgagagatcttttgaaggcttgagctctcttcgacatctctggcttgacgataacgcactcaccgaaataccggtacgtgccctaaataatctaccagccttacaagcaatgacattagccttaaaccgcatttcgcatatcccagattacgcatttcaaaacctaacatctctagtggtgctagacctgaactataacaagcttcaggagtttccagtggccataaggacccttggtaggctacaagaactgtctttgaatggagcgatggacatccaggaattccctgacctgaaagggaccacaagtctagagatccttacactgaccagagccggaatccgactgctaccctctggcatgtgccagcagcttcccaggctgcgcgtactggagttatcacacaatcaaatcgaggagctgccatccttgcacagatgccagaaactggaggaatag

SEQ ID NO: 192974 - DNA, 2904 bp, synthetic construct
  misc_feature 1..2904: note = Description of Artificial Sequence: Synthetic coding sequence
  source 1..2904: mol_type = other DNA
atgcccagcccccccggcctgcgggccctgtggctgtgcgccgccctgtgtgcgtcccggagggctggcggagcaccacagcctggaccagggcccacagcgtgtccagcaccctgtcattgtcaggaggacgggataatgctaagtgctgactgctccgagttaggtctcagcgctgttccaggagatcttgaccccctcacagcgtatcttgacttatcaatgaataatctgacagaacttcaacctggtctctttcatcatttacgattcctggaagaactgaggctgagtggaaaccacctcagtcacatcccaggacaggcattctcgggtctctattctctcaaaatccttatgctgcagaataaccaactgggggggatacccgctgaggctttgtgggagctgccctcccttcagtctcttcgactcgatgctaacctcattagtctggtgccggaaaggtccttcgaggggttgagctccctgcggcacctgtggcttgacgataacgccctgaccgagatcccagttagagccctgaataaccttcccgccctccaggccatgacccttgcattgaaccgtatatctcatattcccgactacgcatttcagaatttgacctcactggtggtgcttcacctccacaataataggattcagcatctggggacgcattcattcgaaggtcttcataacttggagaccctcgatcttaattataacaagctacaggagtttcctgtagccatccggactctggggagactacaggaactcggattccacaataacaacattaaagctataccagaaaaggcgtttatgggcaaccccctcttacaaactattcatttttatgataatcctattcagttcgtaggcagaagcgctttccagtatctccccaagctgcatacactatctcttaacggagcaatggacattcaagagtttcccgaccttaagggtaccacttctctggaaatcctcaccttgactcgcgccggtattcgtttgttgccctccggcatgtgccaacaactgccgaggcttcgggtgctggaacttagccataatcagattgaagagctgccaagcttacaccggtgccagaagctcgaggagatcgggctccaacataaccgcatctgggagatcggcgccgatacctttagccagcttagttccctccaggcgttggacctgagctggaacgctattcggagtatccatccggaagcattcagtacgctacacagccttgtgaagctggatctgaccgataatcaactgactacactgcctctggcgggcctgggcggactcatgcacctgaaactcaaagggaacctggccctgtctcaagcattctctaaggactcattcccgaaactgaggatcctagaggtcccatacgcctaccagtgttgcccctacggaatgtgtgcctcctttttcaaagcgagtggacagtgggaggctgaggacctgcacctggacgatgaggagtccagtaaaagacctctcggactgctggcccgacaggccgagaaccattacgatcaggacctggatgagctccagctcgagatggaggatagcaaaccccatccatcagttcagtgcagccctacccctggaccgttcaagccttgcgagtatctgtttgagagctgggggatcagactcgccgtgtgggccatcgttctcctgtcagtattgtgtaatggactggttttgcttactgtcttcgccggaggtcctgtccctctcccgccagtcaaatttgtcgtgggggcaatcgcaggagccaatacactgactggcatcagctgtggtcttttagcttccgtggacgcgcttaccttcggccagtttagcgaatatggcgcccgttgggagacgggactggggtgtagagccacgggctttctggcggtcctcggatccgaggcttctgtgctgcttttgactctcgcagcggtccagtgttccgtatcagtcagctgtgtgcgtgcctatggaaaatcacctagtctgggcagtgtccgcgcaggcgtactcgggtgtcttgccttggcgggtctggccgctgccctccccctggctagtgttggcgaatacggagcttccccactctgcctgccatacgcgcccccagaaggacagcctgcagcccttgggtttactgttgctctagtcatgatgaatagtttctgctttttggtcgtggcaggagcttatattaagctctattgtgacctgcctcgtggcgactttgaagccgtgtgggactgcgccatggtgcgacatgtggcatggttaatattcgccgatggccttctgtattgcccggttgcatttctctcattcgcgtccatgctggggcttttcccagttacacccgaggctgttaaatccgtgcttctggtcgtactgccactgcccgcctgcttgaatccacttctgtatctactgttcaatccccatttccgtgacgacctgcggcggctcaggcctcgggctggcgacagcgggcctctcgcttatgccgccgccggcgagcttgagaaaagctcgtgcgattcaacacaggcgctcgttgcattttccgatgtggatcttatcctcgaagccagcgaggcagggcggcctccgggactggaaacatacggtttcccttctgtgacacttatcagctgccagcagcccggggctcctcgactcgaggggtcacattgcgtagaacctgagggtaatcattttgggaacccacagccgagtatggacggcgaattgctgttaagggcagaagggtctacccctgctggagggggactttctggaggcggagggttccaaccatccggcctagcattcgcctctcatgtgtag

SEQ ID NO: 192975 - DNA, 228 bp, synthetic construct
  misc_feature 1..228: note = Description of Artificial Sequence: Synthetic coding sequence
  source 1..228: mol_type = other DNA
atgctgagcgccgactgcagcgagctgggcctgagcgccgtgcccggagatttggatcccttgaccgcctatctagccgttcccggcatggtggcagaaggcaaggcagacaggacgggcggggggggtagttcaaggccggagaagacccgcagatctctggaagaagccattgacaggactatcggcggtgcccaggaactgtgggctcccgaggtcagttcttag

SEQ ID NO: 192976 - DNA, 2487 bp, synthetic construct
  misc_feature 1..2487: note = Description of Artificial Sequence: Synthetic coding sequence
  source 1..2487: mol_type = other DNA
atgcggctggagggcgagggccggagcgcccgggccggccagaacctgagcagggctgggagcgcaaggcgtggcgccccaagggatctttctatgaacaacctgactgaattacagccaggtctgtttcaccacttgagatttctcgaggagttgcgcctgagtggtaaccatctgtcacacattcccgggcaggctttcagcgggctttatagtctcaagattctgatgcttcaaaacaatcagctcggtgggattcccgccgaggccctctgggaactcccctctctccaaagcctggacctgaactataataagcttcaagaattcccagtcgccatccgaactctcgggagactacaagagctaggctttcacaacaacaacataaaagcaattcccgaaaaagcatttatgggaaatcctctccttcagacaatccatttctacgacaatccaattcagttcgtgggcagatccgctttccagtatctgccaaagttgcataccctgagcctaaacggggccatggacatccaggaattcccggatctcaaagggaccacaagcctggagatcctgacactgacacgggcaggcattaggctgctcccctcggggatgtgccagcagctgcccagactgagggtgcttgagctgagccataatcagattgaagagctgccgagcttgcaccggtgtcagaagctggaggaaattggcctgcaacataaccgtatatgggagataggcgccgacaccttcagtcagctgtcttcactgcaggcacttgacctgagctggaatgccattcgatccatacatcctgaggctttcagcacgctgcatagcctggtgaaactcgacctgaccgacaaccaactcactactctgcctttagccgggctgggcgggctgatgcaccttaagctgaagggaaatctcgccctgtcacaggccttctcaaaagactccttccctaaactgagaatacttgaagtgccgtatgcctaccagtgttgtccctatggcatgtgcgcgagttttttcaaagccagcggacagtgggaagccgaggatctgcatctggacgacgaagagagtagtaaacgcccactaggcctcctggcgcggcaggctgagaatcactacgaccaggaccttgacgaattacagctcgagatggaagattccaagccacaccctagtgttcagtgcagcccaacacccgggcccttcaaaccgtgcgagtatttattcgaatcatgggggattagactggctgtgtgggctattgtgctgcttagcgtcctgtgcaatggcttagttcttctcaccgtttttgctggaggccctgttccattgcctcccgtgaagttcgtcgttggcgcaatcgcaggggccaatacacttaccggcatcagttgcgggctattggccagcgtcgacgcactgacgttcggacaattttcagagtacggagcaaggtgggagaccggccttggatgccgagcaaccggatttctagctgtgcttggatcggaggctagtgtgcttctgctgacgttagctgcagtgcagtgttccgtaagtgtgtcatgtgtccgcgcttatggcaagtccccgagcttaggatccgttagggctggagtcctaggctgcttggccttagccgggctcgccgccgcattacccctggctagtgtaggagagtacggcgcttcaccattatgcctgccttacgctccgccagagggacaaccagcggcactgggcttcacagtcgcgcttgtcatgatgaacagtttttgtttcttggtggtagccggagcttacattaaattgtattgcgacctgccaaggggtgatttcgaggctgtgtgggactgcgctatggtgaggcatgtggcatggttgattttcgcggatggtctgctctattgccccgtggcgttcctgagcttcgcgtcaatgctggggttgtttcccgtcactccagaagcagtgaaatccgtgttactggtagtgctgcccctccctgcatgtctcaaccctctgctatacctcctgttcaatcctcactttcgtgatgacctgagaaggctgagacctcgggcaggcgactcagggccactcgcttacgccgcagccggtgagttggaaaaaagttcctgcgatagcacgcaggcattggtggctttcagcgacgtggaccttatcctcgaggctagtgaggccggaaggcctcccggacttgagacctatggcttcccaagtgtcacgctgatctcctgtcaacagcccggggctccaaggctcgaaggatctcattgtgttgaacccgaagggaaccattttggcaaccctcaaccctccatggacggagaactcctcctccgcgctgaaggctctactcctgctggaggtgggctatcaggtggtggggggtttcagccctccggcctggcctttgcctctcacgtttag

SEQ ID NO: 192977 - DNA, 6039 bp, synthetic construct
  misc_feature 1..6039: note = Description of Artificial Sequence: Synthetic coding sequence
  source 1..6039: mol_type = other DNA
atggagaccctgaacggcgccggcgacaccggcggcaagcccagcactagagggggcgaccccgctgcccggtcacgaaggaccgaaggaatccgagctgcctacaggcgaggcgaccgcggtggcgcacgagatttgctcgaagaggcttgtgatcagtgtgcgtctcagctggagaagggtcagctgcttagcatccccgccgcctacggagatttggagatggttcgttatctcctttcaaaaaggctagtggagcttccaacagagcctacggacgataaccccgcagtggtggctgcttacttcggccacaccgcagtcgttcaggaactgctcgagccactgaccccaaaacagacagagtgggagcagaccgcacccttctcaggaaccttcccactttcttgtcatttactgcctggaccttgtagtccacaacgtttgttaaactggatgctcgccctagcgtgtcagcgaggccatttgggtgtggtcaaactcttggtgctgacccatggcgccgatcccgaatcctacgccgtccgcaagaacgagttccctgtgatagtgagacttccactgtacgccgccatcaaatcagggaatgaggatatcgccatcttcctacttcgacatggcgcttatttctgctcatacattttgctggactcgcccgatccatccaagcatctgctgaggaagtactttatagaggcaagtcccttaccctctagctacccagggaaaactgccttacgtgtaaagtggagccaccttcggctcccctgggtggacctggactggctgatcgacataagctgccagattactgaactggatcttagtgctaattgtctggcgaccctgccgtcagttatcccatgggggctgattaacctgcggaaattaaatctgtcagataaccatctcggcgaactcccaggagtacaatcctccgatgagatcatttgctcaaggctgctggagatcgacatctcttcgaataagttgagtcacctgcctcctggatttctccatctttccaaactccagaagctgactgcaagtaaaaactgccttgagaaactgtttgaagaggaaaatgccactaactggatcgggctgcgtaagctccaagaactggacatttccgataataagctgacggaactaccagccctttttctgcacagcttcaagagcctaaactccctgaatgtgagcagaaacaatttaaaagtcttcccggacccctgggcttgcccactgaaatgttgtaaggcttcaaggaacgccctggagtgtctgccagacaaaatggcagtcttctggaaaaaccatctgaaggacgtcgactttagtgagaacgccctgaaggaggttcctctcgggctcttccaattggatgcgctgatgttcttacgattgcagggaaatcagttagcggcgcttcccccacaggagaagtggacctgtaggcagttaaaaacgttagatctttcgcggaaccagctgggcaaaaatgaagatgggctgaagactaagcgaatcgcattcttcaccacacgcgggagacagcgcagcggtaccgaagccgccagtgtgctcgaatttcccgcctttctgtcagaaagccttgaggtgttatgcctgaatgataaccacctggataccgtaccaccatctgtctgtttgctcaaatcactttcagagctctatctcggtaataaccccggccttagagagctgccacccgagctaggtcaactcggcaatctctggcaactggatactgaggatctgacaatcagcaacgtccctgcagaaatccagaaagaaggtcccaaggcgatgctcagttatttgcgcgcccagctccggaaggcagaaaagtgtaaactcatgaaaatgattatagtgggcccacccaggcagggtaagagtactttactggagatcctccagacagggcgtgctccccaggtcgtgcacggggaagcaactatcaggaccactaaatgggaattacagcggccggctgggtcccgcgccaaagtagaatcagtggagttcaatgtttgggatataggtggccctgcaagtatggccaccgttaaccaatgcttcttcacggataaggcgctatacgtggtagtctggaatctggccctaggtgaagaagctgttgccaacctgcagttctggctgttgaacatagaagccaaagcgccaaacgccgtggtgctggtagtgggaacacacttggatttgatagaggcaaagtttcgggtggagcgtatcgctaccctgcgagcatatgtccttgcgctgtgcagatctccctccgggtcacgtgcgacaggttttccagatatcaccttcaagcacctccatgagataagctgcaagtccctggagggccaggaaggtttacggcagcttattttccatgtgacctgttctatgaaagacgtgggctcgactattggatgtcagagactagccggccgactgattccacgttcatatctgagcctacaggaagctgtgctagccgagcagcagcgcaggtcacgcgacgacgatgtgcaatacctgaccgacagacaactggagcaactcgtggaacagacacccgacaacgacatcaaggattacgaggacttgcagagcgccataagcttcctcatcgagactggaacacttctgcatttccccgatacttcccacggcctgcgaaatctttactttctggatccaatctggctgtccgaatgcctgcaacgcatctttaatattaaagggagccgatcagtggccaagaatggtgtgatacgtgccgaggacttgaggatgcttctggtggggaccggctttacacagcagaccgaggaacagtatttccaattcttggcaaaatttgaaattgccctccccgtggctaatgacagctatctcctaccgcacctgcttcctagcaagccaggtcttgacacccatggaatgaggcacccaacagccaacacaatacagcgcgtctttaaaatgagcttcgtgccggtgggcttctggcagagatttatcgcgcgtatgttgatttcactggctgagatggacttgcaactgttcgagaacaaaaaaaacaccaaaagccggaacaggaaggtgaccatctactccttcactggcaaccagcgcaaccggtgtagcacctttagagtgaagcgaaatcagacaatctactggcaggagggattgttggtgacattcgacgggggatacctgtctgtcgaatcctccgacgtcaactggaagaaaaagaaaagcggcggaatgaagattgtatgtcagagcgaagtgcgggatttttcggccatggccttcattactgaccacgtcaatagccttatagatcagtggtttcctgctctgacagccacagagagtgacggcacccctcttatggagcaatacgtgccatgccccgtgtgcgagacagcctgggctcagcacaccgatccttcagaaaaatcagaggatgttcagtacttcgacatggaagactgtgttctcaccgcaattgaacgcgactttatctcctgtccacgacacccagacctccctgttcccttacaggaactggtaccagagctgtttatgactgactttcctgcacggctgtttctcgagaattcaaagctagagcactccgaagatgaggggagtgtcctagggcaaggaggctccggcactgtcatttatcgggcgcggtatcagggacaacccgtcgctgtgaagagattccatattaaaaagttcaaaaattttgccaacgtccccgcagatacaatgctgcgacacctccgggcgactgacgctatgaaaaacttctctgagttcaggcaagaagctagcatgcttcacgcccttcagcatccttgcatcgtggcccttatcggaatttctattcaccccctctgctttgcactcgagcttgccccactatccagccttaatactgtgctctctgagaatgctagagattccagctttatccctcttggacacatgctgacacagaaaatcgcataccaaattgcgagcggcttggcatatttgcacaagaagaacatcatattttgtgatctgaaaagtgataatatcctggtctggagccttgatgtgaaggagcatattaatatcaaattgtctgactacggcatttcccggcagagtttccacgagggcgccttaggagttgaggggaccccgggatatcaggcccctgagatccgtcctagaattgtgtacgacgaaaaagtggatatgtttagttacggcatggttttatatgaattgctgtcaggccagcgtccggcacttgggcaccaccagctgcagattgccaaaaaactctccaagggcatcagacccgtgcttgggcagcccgaagaagtgcagttccggcgcctgcaagcactcatgatggaatgttgggatacaaaaccagaaaagaggcctctggctctcagcgtggtttcacagatgaaggaccctacatttgctaccttcatgtatgagttatgttgcggaaagcaaaccgccttcttctcctcccagggccaggagtataccgtggtgttctgggatgggaaagaagagagccgcaactataccgtggtcaacaccgagaagggactgatggaggtgcaacgcatgtgctgtcctggaatgaaggtgagttgccaactgcaagtccagcggtccctctggactgccacggaggatcagaagatttacatttatactctcaaaggcatgtgccccctcaataccccccaacaagccctcgacacccccgccgtagtaacttgctttctggcagttccggttattaaaaagaatagctatctggtgctggccggcctcgctgatgggctggtggcggtgttccccgtcgtccgagggacacccaaagattcttgctcctacctgtgtagccacacggctaaccgctcaaaattctccattgccgatgaagatgcacgacagaacccataccctgtgaaagccatggaagtagtgaatagtggcagcgaagtttggtacagcaatggtcccggactgctggttatagactgtgcctctttggaaatttgtcggcgactagaaccctatatggcgccaagcatggtaactagcgtggtgtgttcatcagagggcagaggcgaagaggttgtttggtgtctcgacgataaagccaattcgctggttatgtaccactcaacgacctatcaactttgcgcgagatacttttgtggcgttcccagccctctccgtgacatgtttcctgtaagacctctggatacagagcctcccgccgcatctcataccgccaatcccaaggttcctgagggcgattcaattgccgatgtctccatcatgtatagtgaggagttgggcactcagatactgatacatcaggagagtctaactgattactgcagcatgtctagctactcatcttctccaccccggcaggccgcccgcagcccttcttcactcccatcaagccctgctagttcatcgtccgtccccttcagcacggactgcgaggactcagacatgctacatacacctggcgccgcaagtgacagaagcgagcatgatctgaccccaatggacggggagacgttcagccagcacctgcaagccgtgaaaattcttgcagtgagagatttgatctgggtcccgaggaggggtggagacgtcatcgtgattggactagagaaagatagcggagctcagcgtggtcgggtgatcgccgtgctgaaggctcgcgagctcaccccccacggagtgctggtggacgctgccgtagttgccaaagatacagttgtctgtactttcgaaaacgaaaacacagagtggtgcctagccgtttggaggggctggggcgcccgcgaatttgacatcttctaccagtcctacgaagaactgggaaggttggaggcctgcacgaggaagcgcagatag

SEQ ID NO: 192978 - DNA, 6048 bp, synthetic construct
  misc_feature 1..6048: note = Description of Artificial Sequence: Synthetic coding sequence
  source 1..6048: mol_type = other DNA
atggccggcatgagccagcggccccccagcatgtactggtgcgtggggccagaagaaagcgcagtgtgccctgaacgggctatggagaccttgaatggcgctggggacactggtggcaagccaagtacacggggaggcgaccccgccgcccgcagtaggcggactgaaggaatcagagccgcgtacaggcgcggcgaccgcggcggtgcgagggatctcttggaggaggcttgtgaccaatgtgctagtcagcttgagaaggggcagctgttgtccattccagccgcatatggggatctagaaatggttaggtacctactaagtaagcgcctcgtggaattaccgactgaacctactgatgataaccccgctgttgtggccgcttattttggccacaccgcagtggttcaggagttgttggagagcctccctggcccttgctctccgcaacgattgctaaactggatgctggccctggcttgccagcgcggacatctgggcgttgtgaagctgctcgtgctgacacatggcgctgatcccgaaagttacgctgtgaggaagaatgaatttcccgtaatagtacgactcccactgtatgccgctattaaatcaggtaacgaagatatcgctatcttcctcctacgacatggcgcttacttctgctcatacatccttctcgatagccctgatcccagcaagcacctgttgcgaaagtacttcattgaggcatcgccactaccctcgtcctatcccgggaaaacagccctcagagtcaagtggagtcacctgagattgccatgggtggatctcgattggctgatcgacatctcctgtcagataacagaattagacctctctgccaattgtttagctacattgccctccgtgataccctgggggctgatcaatcttaggaagctgaatctgtctgacaatcacctgggggaactgccaggcgtccagagttctgatgagattatttgttcccgcctgctggagattgacatctctagtaataaactgtcacatctccctcctggtttcttacatctctccaaactgcaaaaattgaccgcctcaaagaactgcctcgagaagttatttgaggaggagaacgcaactaactggatcggccttaggaaactacaggagctggatatctccgacaataaacttacagagctgcctgctctcttcctgcattctttcaagtccctgaattcgttgaacgtgtcacggaacaatctcaaagtgtttccagatccctgggcatgtcctctgaaatgctgtaaggcttcgcgcaacgccttagagtgtctgccagataaaatggcagtgttctggaaaaatcacttgaaggatgtcgatttctccgagaacgctctcaaggaggtacctctggggctctttcagcttgacgctctgatgtttctacgtctgcagggcaaccaattagccgccctacccccccaggagaaatggacttgccgacagctgaaaacgttggacctgagcaggaatcagttggggaaaaacgaagacggattgaagacaaagaggattgccttcttcacgacaagagggcgtcagcgcagcggcacagaggcagcctcagtgctggaattccctgcatttctgtccgagtccttggaagtgctttgcctgaacgataaccatttggacacagtcccccccagcgtctgtctgctgaaatcactgtcagagttatacttgggcaataacccggggctgagagagctaccccccgaactggggcagttggggaacttgtggcagttagataccgaagacctgacaattagcaacgtaccagcagagattcaaaaagagggaccaaaggcaatgctgtcctacttgagggcacagttgcggaaagcagaaaagtgtaagcttatgaagatgataattgttggtcctccacgacaaggaaagtcaaccctgctagaaatcctgcagactggacgagcacctcaggtggtgcacggggaggctactatcaggacaactaagtgggaattacagaggccagctggatcacgcgcgaaggtagagtccgtcgagttcaacgtatgggatataggagggcctgcgtccatggccacagtgaaccaatgcttcttcacggacaaggcgctgtacgttgtggtgtggaatctggccctgggcgaggaagcggttgcaaatctccagttctggcttctgaacatcgaggctaaggcccccaacgccgtggtgctcgtcgtgggcactcatctggaccttatcgaggctaaattccgggtggaacgtatcgcaacattacgtgcatatgtgcttgccctctgtagatcaccttccgggagcagagctacagggttcccagacattacctttaaacaccttcacgagataagttgcaagtctctcgagggacaggaagggcttcggcagctcatctttcatgtcacctgttccatgaaagatgtgggctctaccatcggatgtcagcgtcttgcaggcagacttatcccaaggtcctacctctctctgcaggaggccgtgctcgcagagcaacaaagacgtagtagagatgatgacgtgcagtatcttacggataggcagctggagcagctcgtcgagcagacccccgacaatgacatcaaggattacgaggatcttcagtctgctatctccttcctaatagagaccggaacgctcctacacttcccagatacctctcacggtctgcgaaacctctactttctggatccaatatggttgtcagaatgcctccaacgaatttttaatattaaaggcagtcgctcagtggccaaaaacggtgtcattcgtgccgaagacctgcgaatgctcctcgttgggaccgggttcacacaacaaactgaggagcagtacttccagttcctggctaaattcgaaatagcactcccggttgctaatgactcctacttgcttccccacctgctcccctctaaaccagggttggacacacacggaatgcgccatccaaccgccaacacgatacagagggttttcaagatgtcgttcgtgcctgtaggcttctggcaacggttcattgccagaatgttgattagcctggccgaaatggacctacaactgttcgaaaacaaaaagaacactaagagcagaaatcgaaaagttactatttatagcttcacaggaaatcagagaaacaggtgttccacttttcgcgtcaagagaaaccagaccatttactggcaggaaggactgttggtcacttttgacggcgggtaccttagtgtggagtcctcagatgttaactggaaaaagaagaaatcgggcggcatgaaaatagtatgtcaaagtgaggtcagagatttctctgccatggcctttattaccgaccacgtgaactcactgatagatcaatggtttccagctttgacagccaccgagtccgacggcactcccctgatggaacaatacgtgccctgcccagtctgtgagacagcatgggcacaacacaccgacccaagcgaaaagagtgaagatgtgcagtatttcgatatggaagattgcgtacttactgctatcgagagggacttcatttcttgtcctagacatccagacctacccgtgcccctgcaagaattggtgccagagctgtttatgacagattttcctgccaggctgtttctggagaattcaaagctggaacatagcgaagatgaggggagcgtcctcggtcaggggggctccggaacggtcatttaccgagcccgataccagggacagccagtcgccgtcaagcgtttccacatcaagaagttcaagaactttgccaacgtgccggccgataccatgctgcgccacctgcgggccactgatgcgatgaagaatttttccgagtttcgacaggaagcatccatgctccacgccctgcagcatccttgtatcgtggcactaataggaatttctattcatccgctgtgcttcgccctggagctggctcccttaagctcactcaacaccgtgttaagtgaaaatgctcgagatagttcttttatacccctaggacacatgctcacacaaaagattgcataccagatcgcgtcaggcctcgcctacttgcataaaaaaaacatcatattttgtgacctgaagagcgacaacatcctggtgtggagcttagatgtgaaagaacacatcaatattaaactcagtgactatggaatttctcgccagagttttcatgaaggggcactgggagtggagggaacccccgggtaccaggccccagagatacggccacggatcgtttatgatgaaaaagtggatatgttctcgtacggaatggttctgtacgaactcctgagcggacagagacctgctctcggccaccatcaactgcagattgcaaaaaaactgtccaagggcatccgacccgttctcgggcagcccgaagaggtgcagtttcgtcgcctccaggccttgatgatggaatgctgggatacaaaacctgagaaaaggccgttagccctaagcgttgtttctcagatgaaagatcccacctttgccaccttcatgtacgagctgtgctgtgggaagcagacagctttcttttcttctcaaggacaggagtacacagtagtgttctgggatgggaaggaggagagccgaaactacactgtggtaaacacagaaaagggtctgatggaggtacaaagaatgtgctgccctggaatgaaagtatcctgccagctgcaggtacaacggtccttgtggactgccacagaagatcagaagatttatatttataccttgaaaggaatgtgcccactgaacacgccgcagcaggccctagacacacccgctgtggttacctgcttcctagctgtccccgtgatcaaaaagaatagctacctcgtactcgcagggttagcagacggattagtagcggtctttccggtcgttcgaggcacccccaaagacagctgctcttatttatgctctcacaccgcaaataggtcaaagtttagtattgctgatgaggatgcgcggcagaacccgtatcctgtcaaggcaatggaagtggtgaactcaggcagtgaggtctggtattctaacggtcccggtcttctcgtcatcgactgtgccagcctggaaatctgccggcgactcgagccatacatggcgcctagtatggttacctctgtggtctgttcctcagaaggtcgcggggaagaagtggtttggtgtcttgacgataaggcgaattccctggtgatgtaccacagcactacgtatcagttatgtgcgaggtacttttgcggggtaccctctcctctgagagacatgttccctgtaaggcccttagacacagaacctcccgccgcatctcataccgcgaatcccaaagtgcctgaaggagactccatcgcagacgtatctattatgtattccgaggagttaggcacacagatcctcatccatcaggagagcctgaccgactactgttctatgtcttcctattctagctctccccccaggcaggctgcgaggagcccttcgagtcttccttctagtcccgcttctagctcctcagtacctttttcaacggactgcgaggactcagatatgctccacaccccaggtgccgcctccgaccggtccgagcacgaccttacccctatggatggcgagacatttagccagcaccttcaggccgtgaagatcctggccgtccgcgacctcatctgggtgccacgtcgaggaggcgacgtcatagtgattggattggaaaaggacagcggagcacagcgcgggcgggtgattgccgtgttgaaagcccgggaactcacacctcacggcgtgctagtcgatgccgccgtggtggcaaaggataccgtggtctgtacgttcgagaatgagaatacagagtggtgcttagctgtttggcggggatggggtgcccgggagttcgatatcttctatcaaagctacgaagagcttggtcgtttagaggcgtgcacacgaaagagacgttag

SEQ ID NO: 192979 - DNA, 2025 bp, synthetic construct
  misc_feature 1..2025: note = Description of Artificial Sequence: Synthetic coding sequence
  source 1..2025: mol_type = other DNA
atgctgcacgccctgcagcacccctgcatcgtggccctgatcggcatctcaatacatccattgtgcttcgctttggaactagcccctctctcgtctctaaacactgttctgagtgaaaatgctcgggattcatctttcatccctctgggccacatgctcactcagaaaatagcttaccagatcgcgtctggcctggcataccttcataaaaaaaacattatcttttgtgatctaaagtctgacaacatcctggtttggtccctggacgtgaaggaacatattaacattaagctttcagactatgggatctcgaggcagagctttcatgaaggagccttaggcgtcgagggtacgcctggataccaggctcccgagattcgtccacgaatagtctatgacgagaaggttgatatgttttcctatggcatggtgctttatgagctgctctccggccaacggccagctttgggccatcaccagctgcagatcgccaagaagctcagtaaagggattcgccctgtcttagggcagcctgaagaggtgcaattcaggcggttgcaggcgctcatgatggagtgctgggacaccaagccagagaagcgccctctcgctctctctgtagtgagtcaaatgaaggatcccactttcgctaccttcatgtatgagctttgctgcggcaagcagactgctttcttttcaagccagggccaggagtatacagtggtcttctgggacggaaaggaagagtccagaaactacactgtggtgaataccgaaaaaggcctgatggaggtacagagaatgtgttgcccaggcatgaaggtgagttgtcagctgcaggtacagcggtccctgtggactgcaaccgaagaccagaagatatacatctataccctcaagggcatgtgcccactgaacaccccccagcaggccctggacacccccgccgtcgtgacttgcttccttgcagtgccagtaatcaagaagaactcctatttagtgttagcggggttggccgacggattagtggccgtctttcctgtcgtccggggcaccccgaaggatagttgctcatatctgtgcagccacaccgctaatcgctctaaattttcaatcgccgacgaggatgccagacaaaacccgtatcccgtgaaggcaatggaggttgtcaactccggatccgaagtgtggtacagcaacggcccaggactcctcgtaatcgattgtgcaagtttggagatttgccggcgtctagagccttatatggcgcccagcatggtgacttccgtggtctgcagttctgaggggagaggagaagaagttgtgtggtgcctggacgataaagctaacagcttggttatgtatcattcaaccacatatcagctctgtgcaagatacttttgtggtgtgccgagtcctcttagagatatgttccccgtacgccccctggatacagagcctcccgccgccagccatactgcaaatcctaaagtgcccgagggcgactcaatcgctgacgtcagtataatgtactccgaggagctgggaactcagatacttatccaccaggagtcactgacggactactgctcgatgtcatcatatagctccagccctcctcgccaagcggctagatcgcctagcagtctgcctagttccccagcctcatcctccagcgtaccttttagcactgattgcgaagactccgatatgctgcacacccccggcgccgcatccgataggagcgaacacgacctgacacccatggatggcgagaccttcagccagcacctccaggccgttaagatcctcgcggtgcgcgacctgatttgggtgccgcgccgaggcggcgatgttatcgtgatcggcctggaaaaggactccggcgctcaacggggcagagttatcgcggttcttaaggcaagagagctcactccacacggtattatgccagttagtagcgtcaaagtttgttgggcggggtggcctgtaagagacatggtgtatatggtcgccgtcatgtag

SEQ ID NO: 192980 - DNA, 99 bp, synthetic construct
  misc_feature 1..99: note = Description of Artificial Sequence: Synthetic coding sequence
  source 1..99: mol_type = other DNA
atggccggcatgagccagcggccccccagcatgtactggtgcgtgggacctgaggaatcagccgtctgtcccgaaagggctatggaaacgctgaactag

SEQ ID NO: 192981 - DNA, 1506 bp, synthetic construct
  misc_feature 1..1506: note = Description of Artificial Sequence: Synthetic coding sequence
  source 1..1506: mol_type = other DNA
atgttcagctacggcatggtgctgtacgagctgctgagcggccagcggcccgccttaggtcatcatcagctccaaattgccaagaaactgtcaaaagggattcggccggtgcttggccagcctgaagaagtgcaattcaggaggctgcaggcattaatgatggagtgctgggacactaaaccagagaagagacccctggctttgagcgtcgttagccagatgaaggaccccacgttcgctacctttatgtacgaactttgctgtggaaagcaaactgccttcttcagtagccaggggcaggaatatacagttgtgttctgggatgggaaggaagagtccagaaactacacagtagtaaacaccgagaaaggcttaatggaggtccagagaatgtgctgtccaggtatgaaggttagctgtcagcttcaggtccagcgtagcctgtggactgccactgaagatcaaaaaatatatatatatacgctcaagggtatgtgcccccttaacaccccacagcaggccctcgacacccctgctgtcgtcacatgttttttggccgtccctgttattaagaagaattcgtatcttgtgctggccgggctagccgatggtctggtggcagtttttccggtcgtgcggggcacgccaaaagatagctgttcatacctatgttcccacacagccaataggtcaaaattttctatcgctgatgaagacgccagacagaacccctaccccgtcaaagctatggaagtggtgaacagcggctctgaagtttggtattctaacggacctgggctgctggtgatcgactgcgcttctctcgaaatctgccgccgcttggaaccctacatggccccctcaatggtcacttccgtcgtgtgctctagtgaagggaggggtgaagaggtagtatggtgcttggatgataaggctaactcccttgtgatgtaccatagcaccacgtaccagctctgcgctcgatatttttgtggtgtcccctcccctctgcgtgacatgtttcctgtccgaccactggacaccgaaccccccgctgcctctcatactgcaaaccctaaggtgccagaaggagacagcatcgctgacgtctctatcatgtattccgaagagttgggcactcaaatcctgatacaccaggagagcctgacagattattgttccatgtcttcatatagctcatccccaccgaggcaggctgcccgatcaccttcttctctgcctagttccccagcttccagctcatctgtccccttcagtactgactgtgaggactctgatatgctccacacacccggggccgcctctgatcggagcgaacatgatttaacaccgatggacggcgagacattttctcagcatctccaggcagtgaaaattctcgcggttcgagacttgatctgggtccctaggcgtgttgagatgctgtcttccctggcttggcggcggattcttgccccgtccggtgctgaatcccttcctagttag

SEQ ID NO: 192982 - DNA, 7584 bp, synthetic construct
  misc_feature 1..7584: note = Description of Artificial Sequence: Synthetic coding sequence
  source 1..7584: mol_type = other DNA
atggccagcggcagctgccagggctgcgaggaggacgaggagaccctgaagaaacttattgttagattaaataacgtacaagaggggaaacagatcgagaccctggtgcagatcctggaagatttgctcgtgttcacttattcagaaagggcctcaaaactcttccaaggcaaaaatatacatgtacctctccttattgtcctggactcgtatatgcgggtcgccagtgtacagcaggtagggtggagtttgctgtgcaagctgatcgaggtctgccccggcacaatgcaatcccttatgggaccccaggatgtcggcaacgactgggaagtcttaggagtgcaccagctgattctgaaaatgctcactgttcataacgcgagcgtgaatttgagcgtcatcggcttaaagacccttgacctgctcctcaccagtgggaaaattactctactgattcttgatgaggagtcagacattttcatgttaatcttcgatgcaatgcattcatttcccgctaacgacgaggttcagaaactcggatgcaaagccttgcatgtgcttttcgagcgcgtgagcgaagaacagctgacagagtttgttgagaataaggattacatgatcctactatcggcactcactaacttcaaggatgaagaagaaatcgtgctgcacgtgctgcactgtcttcattccctggctatcccatgcaataacgtggaggtcctaatgagcgggaacgtgcgatgctacaacatcgttgtggaggctatgaaagccttccccatgagcgagagaatccaggaagtttcatgttgcctgctgcatcggctcaccttagggaacttcttcaatatcctggtgctgaatgaagtgcacgagttcgtggtaaaggccgtgcaacagtaccccgagaacgcagctctccagatatctgccttgagttgcctcgctctcctcaccgaaaccatctttctgaaccaggatctggaggaaaaaaacgaaaatcaggaaaacgatgacgaaggcgaagaagataagcttttctggctggaggcttgttacaaagcactgacatggcaccgaaaaaacaagcacgtgcaggaagctgcctgttgggcactgaacaatctgctgatgtatcagaactccctccacgagaaaatcggcgatgaggacgggcacttcccagcgcacagagaggttatgctgtctatgctaatgcacagttcttctaaagaggttttccaggcttcagccaatgcgctgtcaacacttctcgagcagaatgtgaatttccggaaaattctgctctccaagggcattcatctcaatgtcttagagctcatgcagaagcacatccatagccctgaggtggctgagagtggatgcaagatgctgaaccacctgtttgagggttccaatacatcactcgatattatggctgccgtggtcccgaagatcctgactgtgatgaaaagacatgagaccagtttacccgtgcaacttgaggccctgagagccatcctgcatttcattgtcccagggatgcctgaagaatcacgggaggatacggaattccatcacaaactaaatatggtaaagaagcagtgtttcaagaacgacatccacaaactggtactggccgcgttaaatcgttttattggaaatcctggcattcagaagtgcggcctgaaagtcattagcagtatcgtgcacttcccagacgccctcgagatgctgtcccttgagggcgccatggactcagtcctccacaccctgcagatgtatcctgacgaccaagagatccagtgcctcggactgtctctgatcggctacctgatcacgaagaagaatgtgtttattgggactggccacctgctggcaaaaattttagtttcatccctatacaggtttaaggatgtcgctgaaatccagacaaagggttttcaaaccatcttggccatcctgaaattgtctgcctccttctcgaagctccttgtgcaccactccttcgatctcgttatttttcaccaaatgtcaagcaacattatggagcaaaaggaccagcagttcctgaacctctgctgcaaatgctttgctaaagttgcaatggacgattacctgaagaacgtcatgttggagcgggcctgcgatcagaacaactccatcatggtggaatgcctgttgctgctgggagccgatgcgaatcaggccaaggaggggtcctccctcatatgccaggtgtgtgaaaaggagtcgagccctaagctggttgaacttctacttaacagcggctcaagagagcaggatgtaagaaaagccctgaccatctccattggtaagggagatagccagattatttcccttttgctgcgtcgattggctctggacgtagcaaacaattcgatctgtctgggcggattttgtatcgggaaggtggaaccgtcttggcttgggcccctgttccctgataagacttcaaacctgcggaagcagacgaatattgcgtccactcttgcacgcatggttattaggtaccagatgaagtcagctgtcgaagaaggcactgccagtggttcagacgggaacttctccgaggacgtccttagtaaatttgatgaatggactttcattcccgactctagcatggacagtgttttcgcacaaagcgacgacttggactccgagggaagcgaaggaagtttccttgtgaaaaagaagtccaatagtatcagtgtaggtgaattctatcgggatgccgtacttcagagatgcagtcccaatcttcaacgacactccaactcccttggcccaattttcgaccacgaggacctgctgaaacgtaagaggaaaatcctatcttctgatgactctctgcgctcttctaagctgcaaagccatatgcgacactctgacagtatctcctcgttggcttctgagagagaatacataacgagcctggatttatcggccaacgagttgcgggacatagacgccctgagccagaaatgctgcatatccgtgcatcttgagcacttagagaagctggaactccaccagaacgccctcacttcctttccgcagcagctgtgcgaaactctaaaaagcctcacgcacctggatctgcattctaacaaattcacaagctttccctcctatctgctgaaaatgtcctgcatcgcgaatctggacgttagccggaatgatatcggaccatctgtagttctcgaccccacagttaaatgccccacactgaaacagttcaacctgtcttacaatcagttgtcttttgtgccagaaaatctgactgatgtggtggaaaaactggagcagctcatcttagaaggcaacaaaatcagcggcatctgttctcctctgcgcctgaaagagttgaaaattctcaatctgagtaagaatcacatttcatccctatcagaaaatttcctggaagcctgccccaaagtggagtccttctctgcacggatgaactttctcgcagcaatgcccttcctgcccccctccatgactatactgaagctgtctcaaaacaaattttcatgcatccccgaggcaatcttgaatctgcctcatcttcgatccctggatatgagctctaatgacatacaatacctgcctggcccagcccactggaagtctttaaatctgcgggaattactattttcacataaccagatcagcatcctagacctttctgaaaaggcctatttatggagtcgggtcgagaagctgcacctgtcacacaacaagctgaaggaaatccccccagagatcggatgcctcgaaaaccttacctctctagacgtctcctataacctcgagctgcggagcttcccgaacgaaatgggcaagttatccaaaatttgggacttgcctctggacgaattacatttgaattttgattttaaacatattggctgcaaagcaaaagatatcattagatttctgcagcagagactcaaaaaggccgtcccatataatcgcatgaaactgatgattgtcgggaacacgggatcagggaagaccacactgctgcagcaacttatgaagacaaagaaatctgacctgggcatgcaaagcgcaaccgtggggattgacgtgaaagattggcccatccagattcgggacaagagaaagcgagatctggtgctgaatgtttgggacttcgcgggtcgcgaggaattttactctactcacccacattttatgactcagagagccttgtacttggccgtctacgacctatctaagggtcaagctgaagtggacgccatgaaaccatggctcttcaacatcaaagcacgggccagttcctcccctgtcatcctggtgggcacacatttagatgtttccgacgaaaaacaaagaaaggcctgcatgtcgaaaatcactaaggaattattgaataagagaggctttcccgctatcagagactatcacttcgtaaacgccacagaggagtccgacgccctggccaagttaaggaagaccataataaacgaatcactgaatttcaaaatccgtgaccagctggtggtggggcaattgattcctgactgttacgtcgaactggagaaaattattctgtcagagaggaaaaatgtgcccatcgaatttcctgtaatcgataggaaaagattactgcaacttgtgcgcgaaaaccagcttcagctcgacgagaacgaattaccacacgctgtccatttcctgaacgagtctggtgtcttgctgcattttcaggatcccgccttgcagctctcagacctgtattttgtggagcccaagtggttgtgcaagatcatggctcagatcctgaccgtgaaagtggagggatgcccaaagcacccgaaaggcataatttctcgccgggatgtcgagaagttcctaagtaagaaacggaagttccccaaaaactatatgagccagtattttaagctgctcgagaaatttcagattgccctgcccatcggcgaggagtacttgctggtgccttcatccctgagcgaccaccgtcccgtgatagagcttcctcactgcgagaattccgagattattattcgtctctatgaaatgccatattttcccatgggcttctggtctaggctgatcaatcggctgctagaaatctccccctatatgctgtctggaagggagcgggcgctgagacctaatcggatgtactggcgccaaggaatatatctgaattggagccctgaggcttactgtctcgtgggcagcgaggtcctagataatcaccccgaatcttttctcaaaattaccgtgccgtcctgtcgcaagggctgtattctgctggggcaggtggtagatcacattgacagcctgatggaggaatggttccctgggctgctggagattgatatctgtggagaaggcgagaccctacttaagaagtgggctctctattcatttaatgacggagaggaacatcagaagattcttcttgatgacctaatgaagaaagcagaggagggcgatctgctcgtgaatcctgaccagcctagattgacaattccaattagccagattgctccagaccttattctggctgacttaccaaggaatattatgttgaacaatgatgagctcgaattcgagcaagcccctgagttccttttgggagatggttcattcggcagcgtatatagggccgcatacgaaggagaggaagtcgctgtcaaaatatttaacaagcacacctcattgaggttgcttcgacaagaattagtcgtgctttgtcacctgcatcacccaagcttaatttcgctgcttgccgcggggatacggccacgaatgctggtcatggagctggccagtaagggctcattggatagacttctgcaacaggataaagcaagccttaccagaactcttcaacaccggatcgccctgcacgttgccgacgggttaagatatcttcacagtgcaatgattatttacagagatcttaagccacataacgtcctgctttttaccctgtatcccaacgctgcgatcatcgctaaaattgcagactatggcatcgcccagtactgctgtcggatgggaattaagacctcggaggggacccctggttttcgggcccccgaggtcgcacgaggaaatgtgatctataaccagcaagctgatgtttactctttcggcttgctcttgtatgatatcttgacaactggcggccgaattgtggaaggactcaaatttccaaacgagtttgatgagctcgagattcaggggaaactgcctgaccctgttaaggagtacgggtgcgcgccctggcccatggtcgagaaactcattaagcagtgtcttaaggagaaccctcaagagcgtcctacctccgctcaggtcttcgatattctgaattcggcggaattggtctgtctgaccagacgaatccttctgcccaagaatgtgatagtagaatgtatggttgctacacaccacaattcccggaatgcctctatatggctggggtgtggtcacacagatcgcggccaactttccttccttgatcttaacaccgagggatatacttctgaagaagtcgcggattccagaatcctttgcctcgccctggtacacctcccggtagagaaggagtcttggatcgtcagcggaacccagtcgggcactctgctggtaattaacactgaagacggcaaaaaacgccataccctggagaaaatgacggactccgtgacctgcctctattgcaacagcttcagcaagcagtctaagcagaaaaacttcttgctggtgggaaccgccgacggaaaactcgcgatcttcgaggataagaccgtcaaattaaagggcgccgcccctttgaagattctgaacattggcaatgtttccactcccctgatgtgcctgtccgaaagcaccaacagcactgagaggaacgtaatgtgggggggttgcggtactaagatcttttccttttctaatgatttcaccatccagaaacttatagaaacgaggacgagccagcttttctcttacgcagcatttagcgatagtaacatcataacagttgtagtcgacacagctctgtatattgcaaagcagaattctcctgtggtagaggtttgggataagaaaacggagaaactgtgcggcttaatcgattgtgtgcattttctgcgagaggtgatggtcaaagaaaataaagagtctaaacataaaatgtcatattctggcagggtgaagacactttgtttgcagaagaacacggcgctatggattgggacaggcggaggacacatcctgctgctggacctgagcacccgccgcttgattcgggtgatatacaatttctgtaacagcgtcagggtcatgatgaccgcccaactggggtctctgaagaatgtgatgctggtgcttggctataatcggaaaaataccgagggcactcagaagcaaaaagagattcaatcttgtctgacggtctgggacattaatctacctcacgaggtgcagaacttggagaagcacatcgaagtacgcaaggagctagcggagaaaatgcggcgaacaagcgttgagtag

SEQ ID NO: 192983 - DNA, 582 bp, synthetic construct
  misc_feature 1..582: note = Description of Artificial Sequence: Synthetic coding sequence
  source 1..582: mol_type = other DNA
atgaccagcagctgcttccggagcaccacccggcggagcctgagctctcagacggctcagcgactggtgtgtcctcagtttataaacggaactgccaaggattctattctgacctcacgttctcaggtccccatcatactgcagtggaacaaatctagcaagaagtttgtccctcatggtgacattcctaacatggaagacgtgttagcagttaagtccttccgaatgcagaatacattgtacctgtctctgaccagattcataggcgactctagggtcatgagatggaactccaagcagttcgtcgaaatccaggctttgcctagccgcggggcaatgaccctgcagcccttttctttcaaggacaaccactacttggccctgggaagtgattatacattttcccagatttaccagtgggataaggaaaagcagcttttcaaaaagttcaaggaaatttatgtacaggctccgagaagctttaccgccgtgtccacggatcgccgagactttttctttgccagttcctttaaggggaaaactaagatcttcgagcatatcatcgtggatttatcattgtag

SEQ ID NO: 192984 - DNA, 1638 bp, synthetic construct
  misc_feature 1..1638: note = Description of Artificial Sequence: Synthetic coding sequence
  source 1..1638: mol_type = other DNA
atggccctgcggcggggcggctgcggcgccctgggcctgctgctgctactccttggggcagcgtgtctgattccgcgctccgctcaggtgaggcgtctggccaggtgccccgcaacctgctcttgtaccaaggagagtatcatttgtgtcggtagcagctgggtacctaggattgtgcctggagatattagttctctgtcgctggtgaacggtaccttcagcgagattaaagataggatgttcagccatttgcccagtctgcagctcctcttgctgaatagtaactctttcactatcatcagggacgatgcctttgctggcctgtttcacctggagtacttgtttatagagggaaataagattgaaaccatatccagaaacgcttttaggggcctgagggatctgacccacctgtctctcgctaataatcacattaaggccctgccaagggacgtattctcagatttagacagtctgatcgagctggatctgcgtggcaacaaatttgaatgtgattgcaaagctaaatggctgtacctgtggctcaagatgactaactccaccgtgtccgacgtgctttgtattggccccccagaataccaggagaagaaactgaatgatgtgaccagttttgactatgaatgcaccacgacagattttgtagtgcatcagacgttaccctatcaatcagtcagtgtggacactttcaattctaagaatgatgtatacgtggctattgctcaaccatccatggagaattgcatggtgctcgagtgggaccacatagaaatgaattttcgatcatacgacaatatcaccgggcagagcattgtggggtgcaaggccattctgattgatgaccaggtctttgtcgttgtggcccagctttttgggggctctcacatctataagtatgatgaaagttggaccaagtttgtgaagtttcaggatatcgaggtgtcccgcatttccaagccgaatgatattgaactctttcaaatcgatgacgagaccttcttcgtcattgccgatagcagtaaagctgggctctcaactgtgtacaaatggaattccaaggggttctattcctaccaatctctgcacgagtggtttcgggacaccgacgccgaattcgtggacattgatgggaaatcccatctgattctcagcagccggtcccaggtgcctataatactgcagtggaacaagtcatcaaaaaaattcgtgccacacggtgacatcccaaacatggaagatgtgttggccgtcaagagctttagaatgcaaaacacactgtacctctcactgacacggtttattggtgactcgcgggtgatgcgctggaacagcaaacaatttgtagagatccaagcattgccctccaggggagcaatgactctgcagcctttttcgttcaaggacaaccactatctagcgctggggtctgattacacattttcccagatctatcagtgggacaaagagaaacagttattcaaaaaattcaaagagatttatgttcaggccccaaggagctttacagccgtttccacggacaggcgagatttttttttcgcgtcctcatttaaaggaaaaacaaagattttcgagcacatcatcgtggatctcagtctatag

SEQ ID NO: 192985 - DNA, 1647 bp, synthetic construct
  misc_feature 1..1647: note = Description of Artificial Sequence: Synthetic coding sequence
  source 1..1647: mol_type = other DNA
atggccggcctgcgggcccggggcggccccggccccggcctgctggcgctctccgcacttggcttctgcctgatgttgcaggtaagcgccaagcgcccaccaaaaacacccccatgtccaccttcgtgcagctgtactcgcgacactgcattctgtgtcgatagcaaagctgttccacgtaatcttccctccgaagttatttccctgacgctggtgaacgcagccttctctgagatccaggacggtgccttctcgcatctccctctgcttcaattcttactcctgaatagtaacaaattcactctgatcggagacaatgcttttaccggactgagtcatctgcaatatctcttcattgagaataacgatatctgggctttatctaagttcacatttcggggactgaagtccttgacccacctgagtctggccaataataacctgcagactctcccccgcgatattttccgccccctcgatattttaaatgacttagacctgcgcgggaattcactcaactgtgactgcaaggttaagtggttagtggagtggcttgcccatacaaatacaactgttgcgccaatttattgcgctagcccaccacgattccaggagcataaagttcaggatctgccactcagggagtttgattgtatcacgaccgatttcgtgttgtatcagactctggcattccctgcagtctcagccgaacctttcctatactccagcgatctttacctcgctctcgcgcaacccggcgtcagcgcatgcactatactcaaatgggactacgtcgagcgtcagctaagggattatgatcgtatccccgcacccagtgctgtgcactgcaagccaatggttgtagattcccaactgtacgtggttgtggcccagttattcggaggctcctacatttaccattgggatccaaacacaacaagattcaccagactacaagacatcgacccgcagcgtgtgcggaaaccaaacgacctggaggctttccggatcgacggcgactggtattttgctgtagcggacagttcaaaagctggggccacaagtctttaccgctggcatcagaacggattctactctcaccaggcactgcacccatggcaccgcgatactgacctcgagttcgtggatggtgaaggcaagccacgcttgattgtcagctccagctcccaagctcctgtcatctaccaatggtcgagaacccagaaacagttcgtcgcccagggcgaggttacccaggtccctgatgcgcaggccgtgaagcactttagggctggcagagactcatatctgtgcctgtcacgttatatcggcgatagtaagatccttcgatgggaaggcaccagatttagcgaagtgcaggccctgccgtcaagaggatcactggctctgcagccatttctcgtgggagggcggaggtacctggcactgggctctgacttcagttttacacagatctaccagtgggatgaaggcaggcagaagttcgttcggttccaagaactcgccgtccaggcgccacgagctttctgctatatgcctgccggggacgctcagcttttgttggctcctagcttcaaaggacagactctcgtatacagacatatcgtggttgatctgagcgcatag

SEQ ID NO: 192986 - DNA, 1614 bp, synthetic construct
  misc_feature 1..1614: note = Description of Artificial Sequence: Synthetic coding sequence
  source 1..1614: mol_type = other DNA
atgggcggcgccggcatcctgctgctgctgctggccggcgccggcgtggtcgtcgcttggaggcctcctaagggtaagtgtcccttaaggtgttcttgttcaaaagactcagccctttgcgaagggtctcccgacctacccgtgtcttttagcccgaccttactcagcttgagtttggttagaacgggcgtaacccaacttaaggccgggagctttcttcggattccttccctccacttgctgcttttcacgtctaacagtttctcagtcatcgaggatgacgcctttgctggactttcacacttgcagtaccttttcatcgaggataatgaaatcggcagcatctcgaaaaatgcgctgcgcggtctgaggagtctgacgcacctcagcttggctaacaaccacttagagacgctgccgcgtttcctcttccggggactggacactcttacccacgtggatttacgaggaaacccattccagtgcgactgccgagttctctggctccttcagtggatgcccaccgtcaacgcatcggtgggcacaggtgcctgcgctgggcctgcctctctcagtcacatgcagctgcaccatctggatcctaagaccttcaagtgccgcgctatcgaactctcttggtttcagactgtcggcgaatccgcacttagtgtcgaaccatttagctatcaaggcgaaccgcacatcgtcctggcccagccttttgcaggccggtgtctgattttatcatgggactacagcctgcaacgtttcagacccgaggaggagcttcctgctgcgagcgtggtttcatgcaagccactggtcctggggccatcccttttcgttctggccgccagactttggggagggtctcagctatgggcaagaccctctccaggtttgcggctggcacccactcagacactggccccaaggcggctattaaggccaaacgatgccgaactcctatggctcgaaggacaaccatgcttcgttgtggccgatgcttctaaagcagggtcaacaacgctgctctgcagagacgggcctggcttttatccccaccagtctctacacgcatggcatcgggacaccgatgcagaagccctggagcttgacggtcggccccatctccttctggccagcgcctctcagcggcctgtgctgtttcattggacaggcggcaggtttgagcgccggacggatatccccgaggctgaggacgtctatgcaacgagacatttccaggcaggtggagatgttttcctctgtctgaccagatacattggggattccatggttatgcgctgggacggaagcatgttcagattgttacagcagctgccctcacgaggggctcatgtctttcaacccctccttattgcccgggaccaacttgccatactggggtccgactttgcttttagccaggttttaagactggaaccagacaaaggcttgctggagcctttgcaggagctgggtcccccagccttggtcgcaccccgtgcctttgcccacattactatggccggcaggagattcctctttgcagcctgctttaaaggtcccacgcagatttatcaacatcatgagatcgacctgtctgcctag

SEQ ID NO: 192987 - DNA, 1485 bp, synthetic construct
  misc_feature 1..1485: note = Description of Artificial Sequence: Synthetic coding sequence
  source 1..1485: mol_type = other DNA
atgggcggcgccggcatcctgctgctgctgctggccggcgccggcgtggtggtggcttggcgaccaccaaagggtaaatgcccccttcggtgcagctgctcaaaggactcagccctgtgcgagggctcccccgacctgcccgtgagcttcagcccaaccctcctgtcactctctcttgtgcgcaccggagtgacacaactcaaggcaggcagttttctccgaattccttctctgcacctccttctgttcacctcaaatagcttctcagtgatcgaagatgatgccttcgcaggcctgtcgcacttgcagtatcttttcatcgaagacaatgaaattggtagcatcagcaagaatgccctcaggggcctcaggtcactcacacacctctccttagctaacaaccatctggaaaccctaccacggtttctcttccgaggcctggacacactcacgcacgtcgacttgcgtgggaacccatttcagtgtgactgcagagtcctttggcttctccaatggatgcccactgtaaatgccagcgtaggaacaggagcctgcgctggcccagcttcattgtcacatatgcagcttcatcacttggacccaaagaccttcaagtgtcgagctatagagttgtcctggtttcagactgtcggggaaagcgctctgtcagttgagcctttttcttaccaaggagagccccacatcgtgcttgctcaacctttcgccggcaggtgtctgattctgagttgggactatagcctgcaaaggtttcgccctgaagaagaactgcctggcgagccgccaccaagaccatccgcctgtcctgcagcgtgcctcgccggactgacctgtttaccaacatccccgcaaaggccgccctggtgccccgcttctcattggtgttgggcccgggcgtcctcctgctggctgcctgcctgtggaggagctcattcttgtgggcctggtcctgtcccggcctgtgcttggccccagaggcgcccttggccacgggggggttgctgcggcccaatgactccatcatcttgtggttggaagggtaaccctgcttcttggtggcctatgccacctaggagagcagcacccagatgttgtgctgctaccggtcccgcttttactagaacgagggcctgcacaccggggacagggactcgaaccctacgcccctggtcatggaccgcgggccctacttgctgttggcccagactgccctccgggccatgtagttcaactgggccagtcgccgcctcccgggacgcgcagacctcccccagaccgagaatgagcatgccacatgccacatcacggcttgtaggaacttgctcgtgtgcttctcatgccacattgggaactccatggagttgcgctggaacagctccctgctttgtgtgttgttctaacttcccccgagctgtaccaactagtagtagccactgctcgtcccccgggacaagttggccctcttag

SEQ ID NO: 192988 - DNA, 1617 bp, synthetic construct
  misc_feature 1..1617: note = Description of Artificial Sequence: Synthetic coding sequence
  source 1..1617: mol_type = other DNA
atgggcggcgccggcatcctgctgctgctgctggccggcgccggcgttgtggtggcctggaggccgcccaagggcaaatgtcccctacggtgctcttgctccaaagacagcgccctttgtgaaggttctcctgatctgccagttagtttcagcccaacccttctgtccttgagtctggtgcgcacaggagtcacccagctgaaagcaggcagcttcctacggatcccgtctctgcatctgctcctcttcacatcgaacagctttagtgtgatcgaagacgatgccttcgctgggctctcccaccttcagtacctcttcattgaggacaatgaaatcggttccatatcaaagaatgcactgcgaggactaaggagtctcacacatctgtccctggctaacaaccatcttgaaacccttccacgtttccttttccgcggactcgataccctgacgcacgtcgacttacgggggaaccccttccaatgcgactgccgcgtgttatggcttcttcagtggatgccaacagtgaatgcatcagtggggactggggcatgcgccgggcccgcaagcctgtctcacatgcagctgcatcatctggatccaaaaaccttcaagtgtcgggcaattgagctaagctggtttcagacagtgggcgagtcagctctaagtgtcgagccattcagctatcagggagagccgcatatcgtgttggctcagcccttcgcaggaaggtgcttaatcctctcatgggactactctctgcagaggtttagaccagaggaagagttgccagccgcctcagtcgtcagctgcaagcccttggtgcttgggccctctctgtttgtgctggctgctcgattgtggggtggctctcagctatgggcgaggccctcccccggcttgcggctggcacctacacaaactttagccccacgtcgtttgcttcgcccgaacgatgccgaactgctgtggctcgaggggcagccctgtttcgtggtggcagacgcaagcaaagctggctcaaccacgctactgtgccgtgacggccccgggttttacccccaccagtcactccacgcttggcatcgagacaccgatgccgaagcgctggagctggatggacggccccatcttctgttggcttccgcttctcagcggccagtgctgtttcattggactggcgggcggtttgaacgaaggaccgatatccctgaagcggaggacgtgtacgctacaaggcatttccaggccggtggcgacgttttcctatgccttacgcgatatataggagactcgatggtggttatgagatgggacggcagcatgttcagactgctccagcagctcccgtctaggggagcacacgtgtttcagccacttctgatcgcacgggatcagctggccattttggggtctgattttgccttttcccaagtactaagactggaaccagacaaagggcttctcgagccactgcaggaattgggtccacccgccctagttgcaccccgggccttcgcccatatcaccatggccgggcgcaggtttctattcgcggcctgtttcaagggccctacacagatctaccagcatcatgagatcgatcttagtgcctag

SEQ ID NO: 192989 - DNA, 2091 bp, synthetic construct
  misc_feature 1..2091: note = Description of Artificial Sequence: Synthetic coding sequence
  source 1..2091: mol_type = other DNA
atggccacccccggcagcgagccccagcccttcgtgcccgccctgtcagttgcaactctgcatcccttacatcaccctcatcatcaccaccaccatcaccagcaccatgggggaacaggcgcgccaggcggggccgggggcggtggaggtggttccggtgggttcaacctgcccttaaatagaggcctggaaagggctctggaggaggcagcgaactcagggggcctcaacctcagcgctaggaagctgaaagaatttcccagaactgccgccccaggtcacgaccttagtgatacagtacaggccgatctaagcaagaacaggctggtggaagtgcctatggaactttgccactttgtgtccctagagatacttaacctgtatcataactgtatcagggtgatcccggaagccatcgtgaaccttcagatgctcacatacctgaatttatctaggaaccagctgtccgcattaccggcctgcttatgtggcttacctctcaaggtcctgattgccagtaataacaagctcggatctctgcctgaggaaattggacaactgaagcaactgatggagcttgatgtcagttgcaatgagattacagccctaccgcagcagatcggtcaactgaaatcactgcgggagttaaacgtcaggcgcaattatctcaaagtactccctcaggagctggtggatttgtcgcttgtgaagttcgacttctcttgtaacaaggtgctggtgatcccgatatgtttcagggagatgaagcagctccaggttttgttgctggagaacaacccgctccaaagtccaccagctcagatttgcacaaaaggcaaagtacatatcttcaagtacctttctatccaggcctgccagatcaagactgccgactccttgtatctgcataccatggagagaccccacctgcatcagcacgtagaggacggcaagaaggactcggatagtggcgttggcagcgacaatggagacaaacgattgtctgcaacagagccatctgacgaagacactgtttcactaaacgtccctatgtccaacatcatggaagaagagcagatcatcaaagaagacagttgccatcgcctctcacccgtgaagggtgagtttcatcaggagttccaaccagaaccctccttactgggcgatagtactaattcaggggaggaacgagatcagttcacagatcgcgctgatggcctgcactccgagtttatgaactataaggctcgagccgaggattgtgaggagcttctcaggatcgaagaggacgtccactggcaaacagagggcatcattagctcttccaaggatcaggatatggatatagccatgatcgaacagcttagagaggccgtcgacttactgcaggatccaaacgggttgtctacagacatcacagagcgttctgtactaaacctgtacccaatggggagcgctgaggccctggagctgcaagattctgcactgaatggtcagatccagttagaaacatcgcccgtgtgcgaggtgcaatctgacctgaccctccagagcaatggttctcaatatagccccaacgagatacgcgagaacagtccagctgtgtcacctactaccaatagtactgctccatttgggcttaagcccaggagcgtgtttttgcgcccacagcggaaccttgagtcaatcgaccctcaatttaccatccgccggaagatggagcagatgagagaggagaaagaactggtggagcagctgagggagagcatcgagatgagactgaaggttagtttacacgaggacctgggggcagcccttatggacggggtggtgctgtgccaccttgtgaaccatattcggcccaggtcagtggccagtatccacgtgccatcccctgctgtgcccaagctgagtatggccaagtgtcgcagaaacgtcgaaaactttctggaggcctgcaggaaacttggcgtgccagaggagaagctgtgcctgcctcaccatattcttgaagagaagggactagtgaaggtaggcattactatccaagcactgctggatatcaccgtaacaaaggcactgttcacatag

SEQ ID NO: 192990 - DNA, 2187 bp, synthetic construct
  misc_feature 1..2187: note = Description of Artificial Sequence: Synthetic coding sequence
  source 1..2187: mol_type = other DNA
atggccacccccggcagcgagccccagcccttcgtgcccgccctgtccgtggcaactctgcacccactccaccacccccaccaccatcaccaccatcaccagcatcacggcgggacaggcgcccccgggggcgcaggggggggcggcgggggctctgggggtttcaatctcccattaaacagggggctggaacgggcattggaagaggccgcaaactcaggcggcctgaatctttctgcccggaaacttaaggagttccctagaaccgccgctcccggccatgatctatccgatacagttcaggccgacctatcaaagaataggctggtggaggtgccaatggagctgtgtcattttgtttctctggaaatccttaacctctatcataattgtatccgagttatacctgaggcaattgtgaacctccagatgcttacctatctgaatctgagccgcaaccagctctcggcactgccagcatgcttatgtggactgccactgaaggtgctgatcgccagcaacaacaagctagggagtctcccagaagagatcggacagctgaaacaattgatggagctggacgtttcatgcaatgaaattaccgctcttcctcagcagattggtcagttgaagagccttcgggagctcaatgttcgtcgcaactacttgaaagtcttgcctcaggaactggtcgaccttagcctcgtaaagttcgatttttcctgtaataaagtgctagtcatacctatatgcttccgggagatgaagcaactgcaagttcttttgctcgaaaacaatccgctgcaatctcccccagcacagatttgcaccaaaggaaaagtccatatcttcaaatacctatctatccaggcttgtcaaattaaaacagcagactcactgtacttgcatacaatggagcgaccgcacctgcatcagcatgtggaggatgggaagaaggacagcgacagcggagttggctctgacaacggagataaacggttatcggcgacggaaccatccgatgaggacacagtgagcctgaatgtgccaatgtctaacatcatggaagaggagcagattataaaagaggactcctgccaccgactcagcccagtaaagggcgaatttcatcaagaattccaaccagagccctcgctgctgggagatagcacaaattccggggaggaacgcgaccagttcaccgaccgggcagacggcttgcacagcgagtttatgaactataaagcccgggcagaagattgtgaggagctgctgagaatcgaagaggatgtacattggcagaccgaagggattatctcctcaagcaaagaccaggatatggatatcgccatgattgaacagctgagagaggctgtggatctcttgcaggacccaaatggacttagcacagacatcaccgagagatctgtgctgaatctgtacccaatgggcagcgccgaggctctggaattgcaggacagcgccctgaatggacagatccagctagagacaagccctgtttgtgaggttcagtctgatctgaccctacagtctaatggcagccagtactcgcccaacgagatccgggaaaattcacctgccgtgtctccgacgaccaattccactgctccatttgggctcaagcctagatctgtgttcctgaggccacagagaaatctagagagcatcgatccccaattcaccatccgccgcaaaatggagcagatgcgcgaggagaaggagctggttgagcagctgcgggagtcaattgaaatgaggttgaaggtgagtcttcacgaagatttgggcgccgcgctgatggatggggttgttctttgccacctggttaatcacatccgaccacgctcggtggccagcatacacgtgccttcacctgcagtgcccaagctgtcaatggcgaaatgtcgccggaacgttgagaacttcctggaagcctgtaggaaactgggggtgccagaggcagacctgtgctcaccatgcgacatccttcagcttgatttccggcacattcggaaaaccgtggacaccctgttggcattgggagagaaagcccctccacccacctcagcgcttaggtcaagagacctaatcggattctgccttgtgcacatcctgtttatcgtcctggtgtatatcacttatcactggaacgcgctatctgcctag

SEQ ID NO: 192991 - DNA, 2292 bp, synthetic construct
  misc_feature 1..2292: note = Description of Artificial Sequence: Synthetic coding sequence
  source 1..2292: mol_type = other DNA
atggccacccccggcagcgagccccagcccttcgtgcccgccctgagtgtggctaccttacatccactgcatcacccccaccatcaccatcatcatcatcagcaccacggcgggactggggctcccggtggtgctgggggaggtggcggcggaagcggaggcttcaatttaccccttaacaggggcctcgagcgggctctggaggaggccgcaaactcgggcgggctcaatttgagtgcacgcaaactgaaggaattcccccggacagccgcacccgggcacgatttatccgatacagtgcaggcagacctatccaaaaacaggcttgtggaggtcccaatggagctctgtcacttcgtaagccttgaaatccttaacctttaccacaactgcatccgggttattcctgaggctattgtaaatctacagatgttgacatacctgaacctttcgcgcaaccagctctcagctcttcccgcctgcttatgcggactgcctctgaaagtgctcattgccagcaacaacaaactgggttctttgccggaggagatcggtcagctgaagcagcttatggagctggacgtatcttgtaacgagataacggccctgccccagcaaattggccagctgaaatccctgagagagctgaacgtgcggaggaattatctaaaagtgttgccccaggagctcgtggacttaagtcttgtgaaattcgacttcagctgcaacaaagtgctggtcatcccgatctgctttagagaaatgaagcagctgcaagtgctgctgctggagaacaacccgctccaatcgccgccggcgcagatctgcaccaaaggaaaggttcatatatttaaatatttaagtatccaggcctgccaaattaagacagccgattcactctatctgcatacaatggaacgccctcacttacaccaacatgtagaggatggcaagaaggacagtgactccggagtaggcagcgataacggggataagcggttgtctgctactgaaccctccgatgaggacacagtgagcttgaatgttccaatgagcaacataatggaggaagaacagattattaaagaagattcctgtcaccggctttctcctgtgaaaggagaattccaccaagaattccagccagaacccagcctactgggtgactctactaattcaggtgaggaaagggatcagtttaccgacagagctgatgggctgcatagcgaatttatgaactataaagccagagccgaagattgcgaggaattgctgagaattgaagaggatgtgcattggcagactgagggtataatatcctcctccaaagaccaagacatggatattgcgatgatcgagcagctgagagaagcagtagacctgctgcaggatccgaatggtctgagcactgacatcaccgagagatcagtactgaatctgtatccaatgggttctgcggaggcgttggagctgcaagacagcgctctgaacgggcagattcagctggagacttctcccgtttgtgaggtccagtcagacctgacactgcaaagcaacggtagtcagtactccccaaacgaaatccgcgaaaacagtccagccgtttctcctacaaccaatagcacagctccttttggactgaagcctcggagcgaccctgctctcattttaccccccatctctttcaacaccctcacacaggcacagacctgggatagctcatcttattcagtgccttctgagggagactccgataatgtttttctgcgcccacaacggaatctggaatccatagacccacagttcactatacgccgaaaaatggagcagatgcgtgaggagaaagaactagtagaacaactgagggagagcatcgaaatgcggctcaaagtctctttgcatgaggacctcggcgccgccctgatggacggcgtggttctgtgccacttggtgaatcacattagaccccggagcgtcgcaagtatccatgtgcctagtccagctgtcccaaagctttccatggctaagtgtcgaagaaacgtggagaatttcttagaagcctgtagaaagctgggagttccagaggccgatctttgttccccttgtgatatcttgcagctcgattttagacacatccgaaagacagtagacactctcttggctctcggcgagaaagccccccccccaacatccgcccttagatcaagggatttgatcggattctgccttgttcacattctttttatcgtgctggtgtacattacctaccactggaatgccctatctgcttag

SEQ ID NO: 192992 - DNA, 3282 bp, synthetic construct
  misc_feature 1..3282: note = Description of Artificial Sequence: Synthetic coding sequence
  source 1..3282: mol_type = other DNA
atggcccggcccgtgcggggcggcctgggcgccccccggcggagcccatgcctgctattattgtggctgttgctgcttaggctggaacctgtcaccgccgcagctggtccacgcgccccttgcgctgctgcatgcacctgcgccggggatagcctcgactgcggtggcagaggactggctgcgctgcccggcgacctaccctcttggacccgcagtttgaatctgagctataataaactgtctgaaatcgatccagcggggtttgaggacttgcctaatctgcaggaggtctacctgaacaacaacgagctgacagccgtgccctcattgggggcggctagcagccatgtcgtcagcttgttcctacaacataacaagatcaggagtgtcgaggggagccagctgaaagcttacctgagcttagaagttctggatttgagtctcaataacattacagaggtacgcaacacttgttttcctcacgggcccccgatcaaagagctcaatttggccggaaatcggattggcactctggaacttggagcgttcgacgggctgtcgaggtctctcctgaccctaaggctctctaagaatcggataactcagctcccagttagggcattcaagctgccccgactgacacagctggacctgaatcgaaatagaattaggcttattgagggattaaccttccagggcctcaatagcctcgaggtcctgaaactgcagcgcaacaacatttctaaacttacagatggggctttctggggactgtccaagatgcacgtgctgcacctagaatataactccctggtggaggtgaattccgggtccctttatggcctgaccgccctgcaccagctgcatctttctaacaatagtattgctcgaatccatagaaagggctggtcattttgccagaaattgcatgagcttgtcctgtcgttcaataatctgactcggctggatgaagagagtctggctgaactgagcagtttgagcgtgctgaggctgagtcacaacagcatttctcatatcgctgaaggcgcttttaaaggcctccggtcattgcgggtgttggacctggaccataatgagatttcagggactattgaagacacatctggtgctttctccggactcgactccctaagcaagctgaccctctttgggaacaaaatcaaaagtgtggcgaagagggctttttcaggtttggaaggccttgaacacctcaatctcggaggcaacgctatacgctccgtgcagttcgatgcattcgttaaaatgaagaacctaaaggagttacacatttccagtgatagcttcctgtgtgattgtcagctcaagtggttaccgccgtggctgatcggtcggatgttacaggccttcgttactgccacctgcgctcaccccgagtcacttaagggccagtcaatcttctccgtaccacccgaaagtttcgtttgtgacgattttctaaagcctcagattattacacagccagaaaccacgatggcaatggttgggaaagacatcagattcacatgttccgccgcatcttcttcctcgtcacctatgaccttcgcatggaagaaggataacgaagtattgacaaacgctgacatggagaactttgtgcacgtgcacgcccaagatggcgaggtcatggagtatactaccattcttcaccttcgccaggtgactttcggtcatgagggccggtatcagtgcgtcattaccaatcattttggctctacctatagccacaaagccaggttgacagtgaatgtgctgccctctttcaccaagactccgcatgacataaccatccggacaactactatggcccggcttgaatgtgcagctaccggacatcccaacccgcagattgcttggcagaaagacggtggaacagatttccccgcagccagggagcggcgcatgcatgtgatgccagacgatgacgttttctttattacggatgtgaaaatcgatgacgccggagtgtacagctgcacagcccaaaactctgcgggtagcatcagtgccaatgctacactgactgttcttgaaacccccagcctggtggtgcccttggaggacagggtagtgtccgtgggcgagactgtcgccctccagtgcaaagccacaggcaatccaccgccaaggatcacttggttcaagggcgatcgcccactaagcctgaccgagcgacaccatctcacacctgacaaccaactgctggttgtccagaatgttgttgcagaggacgcgggacggtacacctgcgagatgtccaacactcttgggactgagcgagcacacagccagttgtccgttttgcctgctgctgggtgtcgcaaggatggaacaactgtcggcatctttactattgccgtggtgagtagtatcgtgctcacaagcctggtctgggtatgtattatctaccagaccaggaagaagtcggaagaatacagtgtgactaatacagatgagaccgttgtgcctccggacgtgccctcctatctctcctcacagggaacactgagcgacaggcaggagactgttgtgcgcacggaaggcggcccccaggccaacgggcacatcgaaagtaatggtgtttgtcctcgcgacgcctcccacttcccagaacccgatacccattccgtggcctgcaggcagccgaagctttgtgcgggctctgcctaccacaaagagccttggaaagcaatggaaaaagcggagggcaccccaggaccgcataagatggagcacggaggcagggtggtgtgttcagactgtaataccgaagttgattgctattcgaggggccaggcctttcatcctcagcctgtgtcacgtgattctgctcagccatctgctcctaacggccccgagccaggaggctccgaccaggagcacagccctcatcatcaatgcagccggactgccgcagggagctgtccggagtgccagggaagtctgtatcccagcaaccatgaccggatgttaacggctgtgaaaaagaagccgatggcctctctcgacggaaaaggcgatagtagctggactctcgctcgtttatatcaccccgactcgacggagctgcagccagcatctagcctgacctccggaagccctgagagggcagaagctcagtatctgctcgtctccaatggacatctgccaaaggcatgcgatgcctcccccgagtcaacgcccctgactgggcagttacccggcaagcagcgcgttccactccttttggctcccaaatcttag

SEQ ID NO: 192993 - DNA, 2991 bp, synthetic construct
  misc_feature 1..2991: note = Description of Artificial Sequence: Synthetic coding sequence
  source 1..2991: mol_type = other DNA
aacctgagctacaacaagctgagcgagatcgaccccgccggcttcgaagatctgcctaatctgcaggaggtgtatcttaacaacaatgagctaacggccgtgccaagccttggagccgccagtagccacgttgtgtccctgttcctgcagcacaataaaatccgctcagttgagggcagtcagcttaaagcgtacctctctctggaggtgctagatttgtctctgaacaatatcacagaggtacgaaatacatgcttccctcatggaccgcctattaaggaacttaacctcgctgggaaccgtattggtaccctggagctgggcgcttttgatggcctgagccggtctctgcttaccttgaggttgtctaagaatcgtattacccagcttccggtacgggctttcaaactgcccaggctcacacaactagacttgaacaggaaccgcatccggcttatcgaagggctgacatttcaggggcttaacagtctggaagttcttaagctgcaaagaaacaacatttccaagcttaccgacggagccttctggggcctgtcgaagatgcacgtgttgcatctggaatacaactcccttgttgaggtgaacagcgggtctttgtatgggcttactgccctccaccagttacacttgtcgaataactccatcgcacgcatacacaggaaaggatggtccttctgccagaagctccatgaactggtgctgtcctttaataacctcacccgactcgacgaggagtctttagcagaattgagcagtttgagtgttctgaggctgtcacacaattctattagccacatagccgagggcgcttttaaaggactgcgcagtttacgggtgctggacctggatcacaatgagataagcgggacgattgaggacacaagcggcgcatttagcggccttgattcacttagcaagctaaatttaggaggcaatgccattcggagcgttcagttcgacgcgtttgtgaaaatgaagaatctcaaggagctgcacatctcctccgattccttcctgtgcgattgtcagcttaagtggctgcccccgtggttgatcgggagaatgctccaggcatttgtaactgctacatgcgcccaccccgagagcctgaaaggtcagagcattttctcggtacctcctgagtcattcgtctgcgatgatttcctgaagccgcagatcattacccagccagaaaccaccatggctatggtcgggaaagacatccgctttacatgttctgcagcatcttcaagcagctcgccaatgactttcgcatggaaaaaagataatgaggttctcacaaacgccgacatggaaaattttgtacatgtgcacgcccaagatggtgaagtgatggagtataccacaatattacaccttagacaggtaaccttcgggcatgaaggcaggtatcagtgtgtgattaccaaccacttcgggtctacatactcgcacaaggctagattgacagtcaacgtgcttccaagcttcaccaagactcctcatgacataacaatccgcaccacgacaatggcccgccttgaatgtgccgccaccggccatcccaaccctcagattgcttggcaaaaagatggcggcaccgatttccctgctgcgcgcgagaggcggatgcacgtgatgccagatgatgacgttttcttcatcacagacgttaagattgacgacgcaggtgtttactcctgtacagcccagaatagtgcagggtccatttcagctaacgctaccctgacagtcctcgagacacctagcctggtggtgcccctggaggaccgagtggtatcggttggagagactgtagccctgcaatgtaaggcaactggcaatccaccaccacgcatcacttggttcaagggcgatagaccactgtctctgactgaaagacatcaccttacacccgacaatcagctcctggtcgtccagaacgtcgtcgcagaggacgccggcagatatacctgcgagatgtccaacaccttggggacagagcgagcccacagccagttgtctgtcctgcccgccgctgggtgtaggaaagatggtacgacagtaggaatattcacaatagccgtcgtgtcatctattgttttaacgagcctggtatgggtctgcatcatctatcaaacccgcaaaaagagcgaggagtatagcgtaacaaataccgatgaaacggtggtgccccccgacgtgcctagctacctgagtagccagggaactctttccgaccgccaggaaacagtggtccgcacagaaggtgggccccaggccaacgggcatatagagtccaacggtgtgtgcccacgcgacgcatcgcactttcccgagccagatacgcattcagtggcctgccgacagccaaagctgtgcgctggcagtgcgtaccacaaggagccttggaaggccatggagaaagcggagggtacaccagggccgcataaaatggaacatggcggccgggtggtctgttccgactgcaatactgaagtggattgttactcaagagggcaggccttccacccacagccggtaagtagagactcagctcaacctagcgcacctaatggtcctgagccaggaggctcagaccaggaacacagccctcatcaccagtgtagtcgcacagccgccggtagttgtccagaatgtcaggggtctctgtaccctagcaaccacgatcgcatgcttaccgctgtaaagaaaaaacccatggcctcactggacggtaagggcgattcctcatggaccctggccaggctgtaccatcctgattcaacggagcttcagcccgcttcttcgctaacatctggcagtcctgaacgggccgaggcacagtacctgcttgtatcgaatgggcacttgcctaaggcatgtgacgcatctccagagtcaacaccgctcactggacagttgcccggcaaacagagggtaccactgctcttggctcccaagagctag

SEQ ID NO: 192994 - DNA, 3213 bp, synthetic construct
  misc_feature 1..3213: note = Description of Artificial Sequence: Synthetic coding sequence
  source 1..3213: mol_type = other DNA
atggcccggcccgtgcggggcggcctgggcgccccccggcggagcccatgtttattactcctttggctgctcctgttgaggctggagcctgtgactgccgccgccggacctcgagcgccgtgcgctgccgcctgtacatgtgccggcgattctctagattgcggcggacggggactggcagccctgccgggtgatcttcctagctggacacgcagcttgaacttgtcctataataagctgtctgaaatcgaccccgccggcttcgaagatctccccaacctgcaagaagtgtatctcaacaacaatgagcttactgcggtgccatccttgggggccgcctcctcacatgtggtcagcctcttcctacagcacaacaagatcaggtccgtcgagggcagccagctgaaagcttacctctcacttgaggtacttgacctgtcattgaataatatcacagaggtaagaaacacctgttttccccacggtccccccatcaaggaacttaacctcgctgggaataggattggcaccttagagttgggtgcctttgatgggttgtcacgatctctactcacactcagattaagcaaaaacagaatcacccagttaccagttcgcgcttttaagctgccaagacttacccaattggacttgaatcgaaatcggataaggttaatcgaaggtctgactttccagggactcaattccctagaggtgctcaagcttcagaggaataacatttccaaactgaccgacggcgccttctggggtctgtccaaaatgcacgtgctgcacctcgagtataactcgctggtggaagtaaatagcgggtccctgtacgggctcaccgctctgcatcaactccacctctcaaataatagcattgctaggatccatagaaagggctggagcttttgtcaaaaactacacgaactggtgctatcctttaacaacctgaccagactggacgaggaatccttggcagagttgtcatccttatctgtgctgaggctttctcacaacagcatcagccatatcgccgaaggggcctttaagggattaaggtccctgcgtgtgctggatctggaccataacgaaataagtggcacaatagaggatacatcaggcgcattctcaggcttagactccctaagcaagctgctactgctggagccttcacagtcagctggttgttcaagcccctctcagccacacatgtcagctggaggccgaactcttttcggaaataaaatcaaatctgtagctaagcgcgccttctctggactggagggcctggagcatctcaatctaggcggcaatgccattagaagcgtgcaatttgacgcctttgtcaagatgaaaaatctgaaagagctgcatatcagttctgacagcttcttatgtgactgccagcttaagtggctgccaccgtggctgattgggcggatgctgcaagccttcgtcacagcaacttgcgctcaccccgagagtttgaagggtcagtccattttttctgttccgccggaaagctttgtatgcgatgacttcttaaaacctcagatcataactcagcccgagactactatggctatggttggaaaggacattcgctttacatgttccgctgcatcaagctcgagcagccccatgacgttcgcttggaaaaaggacaacgaggtcttaactaacgcagatatggagaactttgtacacgtccacgctcaggacggagaggtcatggaatatacgaccatccttcacctacgacaagtgaccttcggacacgaaggcagataccagtgtgtcatcaccaaccactttggctcgacgtatagccataaggcccggctgactgttaacgtgttgcctagtttcacaaagactccacacgacattactatccgtaccaccactatggctcggctggagtgcgctgccaccggccaccccaaccctcagattgcatggcagaaggacggcgggactgactttccagctgctcagacacccagccttgtagtccccctggaagacagggtggtgagcgtgggagagaccgtggcgctgcagtgcaaggcaacgggtaacccgccccctcgaatcacttggtttaagggggataggcccctgtctctgactgagagacaccacctgactcccgataatcagctgctcgtggtgcagaatgtggtggccgaggacgctggcagatacacttgcgagatgtcaaataccctcggcacagagcgcgctcattcccagctaagcgttctacctgccgccggatgtagaaaggatgggacaacagtcggcatcttcaccatcgccgtggtcagctccatagttctgaccagtctggtatgggtgtgcatcatctaccagacccgcaaaaagtcggaggagtactccgtgactaacaccgacgagacagtggtcccaccggatgtcccctcatacctgtcctcacagggaacgctgtccgatcggcaggagactgtggtgaggacagagggcggcccacaggcgaacggtcatatagaaagtaatggggtgtgtcccagggatgcctctcactttcccgagcccgatacccattccgtagcatgtagacagcccaaactctgcgccggcagcgcttaccataaagagccttggaaagctatggaaaaggcggaaggcactccaggcccgcataagatggagcacggcggacgtgtggtgtgcagcgactgtaacacagaagttgactgctattccagaggccaggcattccatccgcagcccgtgagccgggatagtgcgcagccttcagctccaaatggcccagaacctggaggatcggaccaggagcattcgccacatcaccagtgtagccgaaccgccgctggttcttgccctgagtgccagggttctctgtatccttctaatcacgatagaatgctgacagctgtcaagaaaaaaccgatggccagtttggacggaaagggtgattcgtcatggacgttagccagactgtaccatccagacagcaccgaactccagcccgcttcctcgctaacttccggaagcccagagcgcgcagaagcccagtatctgctggtctccaatggccatctgcccaaagcttgtgacgcatcgcccgagagcacgcctctgaccgggcaacttccgggtaaacagagagttcccctgctactggctcctaagtcctag

SEQ ID NO: 192995 - DNA, 3198 bp, synthetic construct
  misc_feature 1..3198: note = Description of Artificial Sequence: Synthetic coding sequence
  source 1..3198: mol_type = other DNA
atggcccccgcccccctgggcgtgcccgaggagcagctgctgggctgtaggtcccgcgtgctatcaaggctccttttcatcgcgcagaccgcacttctccttctgcctgccgctggagctgggctgtgtccagcgccctgctcatgtcgtatccctcttttggactgttctcggagaaagctgccagcacccagctggcgagctctgagtgggctcctaccccccgacactgccatcttggactttagtcataacaggttgagcaattggaatatctcactggaatctcagacactccaggaggtaaagatgaattacaacgagttgactgaaataccatattttggggaaccaactagcaacattacactcctatctcttgtccacaatattatcccggaaattaacgcacaggcgcttcagttttatccagctctggaatctctggacctgtccagcaacattattagtgaaatcaaaacctcatcattccctcgaatgcagctcaaataccttaacctgtctaataatagaattactacactcgaggctggatgttttgacaatctgagctcctccctactggtggtcaagctgaataggaaccggatgtctatgatcccaccaaaaatctttaagcttccccaccttcagttcttggagctaaaaagaaatcggataaagattgtggagggccttacattccagggcctcgactctttgcgcagcctaaaaatgcagaggaacggcatctcgaaacttaaggatggcgctttcttcggcctgaataatatggaagaactcgagctcgaacataacaatctgactagggttaacaagggatggttatacgggctccgcatgttacaacagctgtacgttagtcagaacgccatagaacgcatttcaccggacgcctgggaattttgtcagcgactgtctgagcttgacctgtcttacaaccagcttactagactggatgagtccgcattcgtcggcctttctctgctcgaacgccttaacctgggcgataatcgggtcacacacatcgctgatggcgtcttcagattcctttctaacctgcagactctggaccttcgcaataatgagatctcttgggccattgaagacgccagtgaggccttcgctggtctgactagtctgaccaagctcattctccagggcaaccaaatcaaatctatcactaaaaaggccttcatcgggcttgagtccttggagcaccttgatctgaataataacgccattatgtcaatccaagaaaatgcatttagccagacgcatttgaaagagctcatcctaaatacctctagcctgctgtgtgattgccacctaaagtggctgttgcagtggctggtcgacaacaactttcagcactctgttaatgtctcgtgtgcccatccagaatggcttgcgggccaatccatcctgaatgttgacctgaaggacttcgtttgtgacgatttccttaaaccgcagatccgcacccacccagaaacaattatagccctgaggggtatgaatgtaactcttacatgtaccgcagtcagttcgtctgacagcccaatgtctactgtatggaggaaggactccgagattttgtacgatgtggatactgaaaattttgttcgctactggcagcaagcgggcgaggctctagagtacacatccatcctccatctcttcaatgtgaactttacagacgaaggcaagtatcagtgcattgtaaccaatcactttgggtctaattactcccaaaaggccaaactaacagtcaacgaaatgcccagctttctcaagacacccatggatctgacaatcaggactggagccatggcccgtctggagtgtgcagccgagggccaccctgccccacagatctcttggcaaaaagacggtggaacggactttccagctgcccgggagagacggatgcatgtcatgcctgaggacgatgtcttcttcatcgcaaatgtgaagatagaggatatgggcatatactcttgcatggcccagaatacggctgggggccttagcgccaatgcatctctcaccgtccttgaaacgccctccttcatcaggccgctggaggacaagactgttacccggggcgaaacggccgtcctccagtgtatagctggaggttccccggctccccgattgaactggacaaaggacgacggacctctgctggtcaccgagcggcatttctttgcagccgccaatcaactcctgatcatagtcgacgcagggctggaggacgctggcaaatacacttgtattatgtccaacactctgggtacggaacgtggccatatttatttaaatgttatctcttctcctaactgtgatagcagtcaatcctctatcggacatgaggatgatgggtggacaaccgtgggaatagtgataatcgttgtggtgtgttgcgtggtgggcactagccttatttgggtgatcgtgatttaccatatgagacggaaaaacgaggattactcgattactaacacagaagagctcaatttaccggctgacattcctagctacctgagctcacagggcactctcagcgagccccaagagggatacagtaatagcgaagccggcagccaccaacagcttatgccacccgccaacgggtacatacataagggaaccgacggcggcaccgggacacgtgtaatttgcagtgactgctatgataacgcaaacatctacagcagaaccagagaatattgtccgtacacctatatagcggaggaggatgtacttgatcaaactctttcctctttgatggtgcagatgcctaaagaaacctacctcgttcacccacctcaggacacgactgccctggagtctctgatcccttccgcgaaccgagagccgtctgcattccccacaaatcatgaacgcatatcagaaaagaaactgccaagcacacagatgtcaggagagactttgcagcggccagtctggaatattaacagagagttaggcctcccccatcctcctttctctcagcagccggtacatgagtcccctcagcttcaccaaaacgaaggcttggcgggacgagaacccgattgctccgctagtagcatgtcttgtcatagattgcaggaccacgcgtttgacttctccaggacgaggaacatacaggacggcagcgaaggcacatag

SEQ ID NO: 192996 - DNA, 876 bp, synthetic construct
  misc_feature 1..876: note = Description of Artificial Sequence: Synthetic coding sequence
  source 1..876: mol_type = other DNA
atggagagcgagcggagcaagcggatgggcaacgcctgcatccccctcaagcgcatcgcatactttttatgcctgctgtccgccctgcttctaacagaggggaagaaaccagccaagcccaagtgtcccgcagtgtgtacctgcacaaaggacaacgctttgtgcgagaatgcccgttctattccacgaacagtaccgccagatgtgatctctctgtccttcgtgcgatcagggttcacagagatctctgagggttcattcctgttcacaccaagcttgcaactgttattgtttacctctaactcattcgacgtaattagtgacgatgcattcattgggctaccccatcttgagtacctgtttatcgagaataacaatataaaatccatttccagacacaccttccgaggtctcaagagcctcatccatctctcgctggctaataacaacctgcagacccttccaaaagacatctttaagggtctggatagccttacaaatgtggacctgcgggggaatagttttaattgcgactgcaagctcaagtggctggtcgagtggctcggacatactaatgccacagtcgaagatatctactgcgaaggtcctcccgagtacaagaagcggaagatcaattcattgtcatctaaggactttgactgcataatcaccgagtttgccaagtcccaggacctgccatatcaatcccttagtattgacaccttcagctacctcaacgacgaatatgttgtgattgctcagccttttacaggtaagtgcattttcttggaatgggaccacgtcgaaaagacgtttcggaactacgataacataacagtgcttagagaaatccacaggttcaccaacatgtcatag

SEQ ID NO: 192997 - DNA, 1674 bp, synthetic construct
  misc_feature 1..1674: note = Description of Artificial Sequence: Synthetic coding sequence
  source 1..1674: mol_type = other DNA
atggagagcgagcggagcaagcggatgggcaacgcctgcatccccctgaagagaatcgcttactttctgtgtctattgagcgctctgcttctcacggaaggtaagaaacctgccaaaccaaaatgtccagccgtctgcacctgcactaaggacaatgcactatgtgagaatgccaggtccattcctcgcacagtcccccctgacgtcatctccttaagcttcgtgcggagtgggttcacagagatatcagaagggtctttcttgttcacaccttcgctgcaattattgctctttacgtccaattcttttgacgtgattagtgacgacgcctttattggactgcctcatttagaatatctcttcatcgagaataacaacatcaaatccatatcaagacatacttttaggggattgaagtcactcatccacctgtccctcgctaacaataatctacaaacactgcctaaagacatctttaagggactcgatagtctgactaacgtcgatctgcgcggaaactcgttcaactgtgattgcaaattaaaatggctggtggagtggctcggtcacaccaatgccacagtcgaagacatctactgtgaagggccgccagagtacaagaaaaggaaaattaatagcctgtctagcaaggattttgactgtatcataacagagttcgccaagtcacaggatctcccttaccagtccttatccatcgataccttctcttatctgaacgacgagtacgtggtgattgcacagccatttacggggaaatgtatctttcttgagtgggatcacgttgagaagaccttcagaaactacgacaacattaccggcactagtactgtggtctgtaaacctatcgtcatagagactcaactttatgtgatagtggcccagctcttcggcggatctcacatctataagcgggatagtttcgcaaacaaattcatcaagattcaggacattgaaatcctgaaaatacgcaagcctaatgatatcgaaacttttaaaatcgaaaataactggtatttcgtggtcgctgatagttccaaggccgggtttaccacaatttacaaatggaacggtaatggcttctacagtcatcagtcactccatgcatggtaccgcgatacggacgtggaatatctcgaaatagtccgcactccacagacactgcgtacaccacacttaatactcagctcttcttcgcaacgccccgtgatctaccaatggaataaggcaacccagctcttcaccaaccagactgacataccgaacatggaggatgtgtacgcagttaaacacttcagcgtaaagggtgacgtttacatctgtctgacgagattcattggcgactccaaggtcatgaagtggggcggaagttcattccaggacatccagcgaatgcccagtagagggagcatggtattccagcccctgcaaataaacaattaccaatacgccattctggggagcgactactcctttactcaggtttacaattgggacgctgaaaaggccaagtttgtgaagttccaggagttgaacgtacaagcgcctcgaagcttcacacacgtttccataaacaaacgtaacttcctgttcgcgtccagcttcaagggaaatacccaaatatataagcatgtaatcgtagacctgagcgcctag

SEQ ID NO: 192998 - DNA, 1530 bp, synthetic construct
  misc_feature 1..1530: note = Description of Artificial Sequence: Synthetic coding sequence
  source 1..1530: mol_type = other DNA
atggagagcgagcggagcaagcggatgggcaacgcctgcatccccctgaagagaattgcctacttcctgtgcttgctgagcgctctgttgctaacggaaggcaaaaagcccgctaagcctaaatgtcctgccgtctgcacctgtaccaaggataacgctttgtgtgagaacgcaaggtccataccgaggactgtgccacctgatgtgatatctttatcatttgtgaggtccgggttcacggaaatttctgagggatctttcctcttcacacctagcttgcagctcctctccctcgctaacaataacctccagacactgccgaaggacattttcaagggtctggattccttgacaaacgtggatttgagaggaaattctttcaactgcgactgtaaattgaaatggctagtggaatggcttggccacacaaacgctacggtcgaggacatctactgcgaaggcccccctgagtacaagaaaaggaaaatcaattcactcagttccaaggatttcgactgcatcatcaccgaatttgcgaaatctcaggacctgccttaccagtcactctccatagacacatttagttacctgaacgacgaatacgtagtgatcgcccagccattcaccgggaaatgcatctttctggagtgggatcatgtggagaagacctttaggaattacgataacattactggaacatccacggtggtatgcaagcctattgtgattgagacccaactctatgtgatcgttgcacaactgttcggcggaagccacatttacaagcgcgactcatttgccaataaattcatcaaaatacaagacatcgagattcttaaaatcagaaaacccaacgacatagagacctttaagatcgagaacaattggtatttcgtcgtcgctgactctagcaaggccggctttactaccatctataaatggaatggaaatggattttactcacaccaatcgctgcatgcttggtatcgggatactgatgtggagtatcttgaaattgtgcgcacgcctcagacgctgagaacaccgcatctaatcctatcttccagttcgcagagacccgtcatctaccagtggaataaagcaacccagttattcactaatcagaccgacataccaaacatggaggacgtgtatgccgtcaagcatttttctgtgaaaggcgatgtctatatctgtctcacaagattcataggggattccaaggttatgaagtggggcgggagtagttttcaggacatccaacgaatgccatctaggggctccatggtgttccagcccctgcagattaacaactatcaatacgcgattctgggctctgattacagtttcacacaagtgtacaattgggatgccgaaaaggcgaagttcgttaaattccaagagcttaatgttcaggcgcctcgttctttcacccatgtgtcgattaacaaaaggaacttcctttttgcgtccagtttcaagggaaacacacagatttataaacacgtaatagttgatctatcagcatag

SEQ ID NO: 192999 - DNA, 777 bp, synthetic construct
  misc_feature 1..777: note = Description of Artificial Sequence: Synthetic coding sequence
  source 1..777: mol_type = other DNA
atgagcgcctaccccaagagctacaaccccttcgacgacgacggcgaagacgagggggcccgcccagctccctggcgcgacgcccgcgatttaccagacggccccgacgctcctgcagataggcagcagtacttgagacaagaggtgcttcgccgagccgaggccaccgccgcctccacatcacggtctctggccctcatgtacgagtctgagaaggttggtgtggcctcatccgaggagctcgctcgccagaggggggttctcgaacgtaccgagaagatggtagacaagatggaccaggatctgaaaatttcgcagaagcatattaactcaatcaaaagcgtctttggtggcttggtgaactatttcaaatcaaaaccagtggagactcctccagagcagaatgggacattaacctcccagcctaacaaccgtctgaaggaagctataagcaccagcaaggagcaagaagcaaagtatcaggcctcccatcctaacctgcggaagttagatgacacggatccggtccccagaggagccggcagtgctatgtctaccgacgcatatccgaagaatccacacctccgcgcttaccatcagaaaattgatagcaatctggacgaattatccatgggactgggacggttaaaagacattgcccttggtatgcagactgaaatcgaggaacaggatgacattcttgaccggctcaccacaaaggtggataagctcgacgttaatattaaatcgacagagcggaaggtgcgtcagctgtag

SEQ ID NO: 193000 - DNA, 2466 bp, synthetic construct
  misc_feature 1..2466: note = Description of Artificial Sequence: Synthetic coding sequence
  source 1..2466: mol_type = other DNA
atggccggccccggcagcaccggcggccagatcggcgccgccgccttggccggcggagctcgttctaaggtcgctcccagcgtggattttgaccactcctgcagcgattccgtggaatatcttaccctcaacttcggccccttcgagacagttcataggtggaggcggctcccaccatgcgatgagtttgtcggtgcccggcgaagcaagcacacagtggttgcatataaggacgcgatctacgtattcggcggcgataacggcgctttcaccaccggcactcctccagcccccaggtaccatcacagtgctgtcgtgtacggtagttctatgttcgtgttcggaggatacacaggagatatttattcaaacagcaatctcaaaaacaaaaatgatttattcgagtacaagtttgccacaggtcagtggaccgagtggaagatagaggggcgtcttcccgtagcgaggtctgctcatggggccactgtttattccgacaagctgtggatttttgccggttacgacggtaatgcacgccttaatgacatgtggaccatcggattgcaagatagagagcttacttgctgggaagaggtggcccaatctggggaaatcccaccctcctgttgcaatttccccgtagccgtgtgtagagataaaatgtttgtattctctgggcagagcggcgctaagatcaccaataatctctttcagtttgaatttaaggacaagacctggactcggattccgactgagcacctcttaaggggaagcccaccccctccccagcggagatatggccacactatggtggctttcgatcgacacttgtatgtttttggtggcgctgcagacaacactcttccaaacgaactccactgttacgacgtagacttccagacctgggaagttgtccaaccaagttccgacagcgaagtgggtggagccgaggttcctgagcgggcttgcgccagtgaggaggttccgactctcacttacgaggagagagtaggatttaagaagtcccgtgacgtctttgggttggatttcggaaccacctccgcgaagcagccaacacagcctgcttcggaattgccgtcaggccggctgttccatgccgcggctgtgatatctgatgccatgtatatattcggcggcaccgtggataataacattcggagcggcgagatgtacaggtttcagttcagctgctacccgaaatgtaccctacacgaagattatgggcggctttgggaaagcagacaattttgtgacgtggagttcgtgctcggtgagaaggaggaatgcgtccaaggtcacgtcgccatcgtaaccgcccgtagcaggtggctgagaaggaagatcacccaggcccgcgaacgcctcgcgcagaagttggaacaagaggctgcacctgtcccgcgtgaagcaccaggggtggcagcgggcggggctcgcccacccctactccacgtggcaatcagagaggcagaggctcggcctttcgaggtgcttatgcagtttctgtatacagacaagatcaaatacccccgaaagggtcacgttgaggacgtgctacttataatggacgtctataagctggcattgtcctttcagctgtgccgactggagcagctctgcagacagtacatcgaggcgtctgtggacctgcagaatgtgctagtcgtatgtgaaagcgccgcacgcttacaactctcccagcttaaagagcactgcttaaacttcgttgtcaaggagtctcactttaaccaggtgataatgatgaaggagttcgaaaggttaagctcgccacttatcgtagaaatagtacgacggaagcaacagcctcctcctcgcactccgttagaccaaccagtggacataggaacatcccttattcaggatatgaaggcgtacctggagggcgcaggggcggaattctgtgacataacgctgctcctcgatggccacccccgccccgcccataaggcaattctcgccgcacggagttcttacttcgaggctatgttcaggagtttcatgccggaagacggacaggtgaacatctcaatcggcgagatggtgccaagccggcaggccttcgagtccatgctgcgctacatctattacggcgaggtaaacatgccccccgaagactcactgtacttgttcgcggccccctattactatgggttttacaacaacaggctgcaggcctactgtaaacagaacttggagatgaacgtaactgtacagaatgtgttgcagatactagaggctgcagacaagactcaggccctggacatgaagcgtcactgtcttcatattattgtgcatcaatttacaaaagtctcgaagctgccaaccctgcgttccctgtcacagcagcttctgcttgatattattgacagcttagcatctcatatttctgataaacagtgtgcagaattaggggctgacatctag

SEQ ID NO: 193001 - DNA, 2400 bp, synthetic construct
  misc_feature 1..2400: note = Description of Artificial Sequence: Synthetic coding sequence
  source 1..2400: mol_type = other DNA
atgaactacgaccccatcgtgagcaaggtggccgaggtgctggcctcgggacgcgcaatccgcaagcgcgaggttgagagatccaaacacacggttgttgcttataaggatgccatatacgtgttcggcggagacaatggcaagacaatgctgaacgatctactacggtttgatgtcaaagactgctcttggtgccgcgcctttaccacaggcactcctcctgctccccgctatcaccactccgcagtggtatatggctcttccatgtttgtctttggcggttatacaggcgatatatatagcaatagcaaccttaaaaacaaaaacgacctgttcgaatataaatttgcgaccggtcagtggaccgaatggaagatcgagggcagacttcccgtagcacgctcagcccatggcgccacagtatattcagacaaactgtggatattcgcagggtacgatggaaacgctcggctgaatgacatgtggacgatcggccttcaggacagggaattgacctgttgggaggaggtggctcagagtggcgaaattcctccatcttgctgtaatttccccgttgccgtgtgtcgagacaagatgtttgtcttctcaggccagtcgggtgctaagatcactaataacttgttccaattcgagtttaaggacaaaacctggacgcgtatacctaccgagcacctgctacgtggatctcctccgcccccccaacggcgatatgggcatacaatggtggctttcgaccgccacctctacgtctttggaggggctgcggacaacaccttacccaatgaactacactgttacgatgtggatttccaaacttgggaggtcgtccagccaagttctgattcagaggttggaggcgccgaagtgcccgagagggcatgtgcgtcggaggaggtccctacactcacttatgaagagcgggtcggttttaagaagtctagggatgtttttggactcgatttcgggactacaagcgccaagcagccaactcagcctgcgtctgaactcccaagtgggaggctgtttcatgcggctgctgtgatcagtgatgcaatgtatattttcggaggtactgtagacaacaatatcagatctggagaaatgtatagattccagtttagctgttaccccaagtgtactttgcacgaggattatgggcgtctatgggagagcaggcaattctgcgacgtggaattcgtgcttggcgagaaagaagaatgcgtccaaggccacgttgctattgtaacagcccggagccgctggctccgacgaaagattacgcaggcgagagagagactagcgcagaaactggagcaagaggccgccccagtgcctagggaagccccaggggtggccgcggggggagcccggccccctctgctgcacgtggcaattagggaggctgaggccagaccttttgaagtactcatgcagtttttatatacagacaagatcaaatacccacgaaagggccacgtcgaggacgtcctattgatcatggacgtttacaagctcgccctaagctttcaactgtgccgactggagcagctctgcaggcagtatattgaggcatccgtagatttgcagaatgtgcttgtggtttgcgagtccgctgccaggctccagctcagtcagctaaaagagcactgcctcaatttcgttgtcaaggagtcacattttaatcaggttattatgatgaaggagtttgaacgtttgtcatcgcccctgatcgtcgagatcgttcggagaaaacagcagccacccccacggactcctctcgaccagccagtagacatcggcactagcctgattcaagatatgaaggcctaccttgagggcgctggggccgagttttgcgatattacactcctcttggacggtcacccccgccctgcccataaagccatcttagccgcccgttcttcgtacttcgaggccatgtttaggtctttcatgccagaggacggacaagtcaatattagcattggggagatggtgccttcccgacaagccttcgaaagcatgctgaggtatatttactatggcgaagtcaacatgcctcctgaggactcgctttacctgttcgcagccccttattactacgggttctacaataaccgcctgcaggcttattgcaagcagaacctcgagatgaatgtgacagtgcagaatgtgcttcagatcttggaagccgccgataaaacccaggctctggacatgaagcggcactgcttgcacataattgttcatcaatttactaaagtgagtaaattacccacattaagaagtctgtcgcagcagctgctgttggatatcatagattccctggcttcacacatctctgacaaacagtgtgccgagctgggagcagacatatag

SEQ ID NO: 193002 - DNA, 1560 bp, synthetic construct
  misc_feature 1..1560: note = Description of Artificial Sequence: Synthetic coding sequence
  source 1..1560: mol_type = other DNA
atgagctacccccagttcggctacccctacagcagcgccccccagtttctgatggccacaaacagcttgtccacttgttgtgaatccggtggcaggaccttggccgattcaggacctgctgcctctgcccaagcccctgtgtattgtcccgtttacgagagccgcctcctggccaccgcacgccatgagctgaatagtgctgccgctctcggcgtttacggcgggccttatggcggctcccaaggatatggcaattacgtcacgtacggctctgaggcctccgctttttattcgttaaacagcttcgatagcaaggacggtagcggaagcgcccacggcggccttgcacccgccgccgcagcctattacccctatgagccagccctgggtcaatacccatacgatagatacggcacaatggacagtggcacgagacgcaagaatgctaccagggagaccaccagcactcttaaggcatggctacaggaacacagaaagaacccatatccaactaagggagaaaagataatgcttgctatcataaccaagatgacactcacccaagtctcaacttggtttgccaacgctagaaggagactgaaaaaggaaaacaaaatgacttggccccctcgaaataaatgcgcagatgagaagcgtccgtatgctgaaggcgaagaggaggagggaggagaggaggaagcccgcgaagaaccactcaagtccagtaagaatgctgaacccgtcgggaaagaagagaaagaattggagctctctgacctggatgatttcgaccctctggaggccgaaccaccggcctgcgagttaaaacctccatttcactcacttgatggaggactggaacgtgtgcctgcggctcctgacggaccagtgaaggaggcctcgggtgccctgagaatgtcattggcagctggtgggggggccgctcttgatgaagacttggagcgcgcgcgaagttgtcttaggtccgccgctgccggccctgagccgttaccaggcgctgaagggggaccacaggtttgtgaggccaaacttggatttgtgccagccggggcgtctgcgggattggaggctaagccgaggatttggtccctagcccacaccgctacagctgccgccgcagctgctacgagtctttcccagacagaatttccatcctgtatgctgaaaagacaaggcccggcagctccagccgccgtttcaagcgcacctgcaacctcaccttcagtggctctgcctcattctggggctctcgataggcatcaggacagccccgtgacgtccctccgcaattgggtcgatggcgtcttccatgatccaatcttgaggcacagcacattgaatcaagcctgggcaaccgccaagggagctctgcttgatcccggtccactgggtcgctcattgggcgccggcgccaatgtcctgacagcccctctggcgagagcctttccccctgccgtgcctcaggacgccccagccgctggtgcagctcgagaactgcttgccctgcctaaggcaggtggcaaacctttttgcgcctag

SEQ ID NO: 193003 - DNA, 3036 bp, synthetic construct
  misc_feature 1..3036: note = Description of Artificial Sequence: Synthetic coding sequence
  source 1..3036: mol_type = other DNA
atgatcgagaacagcatgttcgaggaggagcccgacgtggtggacctcgctaaggagccctgcttgcaccccctagaacctgacgaggtcgaatacgagccccgggggtcgaggctactggtgagagggttgggggagcacgagatggaggaggatgaggaggattatgagtctagcgccaaattgttgggcatgtcattcatgaaccgatcttcaggtctgagaaacagtgctactgggtacagacagtctcccgatggagcttgcagcgtgccatccgcgagaaccatggtcgtgtgcgccttcgtgatcgtggtcgccgtgagcgtgatcatggtgatttatctactgcctaggtgtacattcacaaaggaaggatgccataaaaaaaatcagagcatcggactgatccagccttttgctaccaacggcaagttattcccctgggcccagattaggctgcctactgccgtggtacctctaaggtatgagctctcactccatcctaatctgacttctatgacctttcggggttcagtgacgatcagcgtgcaggctctccaggttacgtggaatattatcttgcattcaacaggccacaatatttcgcgtgtgacgttcatgagcgccgtttcctcccaggagaaacaagccgagatcttggagtacgcatatcatgggcaaatcgccatcgtcgcccctgaggcactgttagccggccataattacaccctcaaaatcgagtattcagctaacatcagttcaagttattatggcttctatggtttttcgtacaccgacgagtctaatgaaaaaaaatatttcgctgccactcaatttgaacctcttgctgccaggtcggcctttccatgctttgatgaacctgctttcaaagctactttcattatcaaaataatccgtgacgagcagtataccgccctgtcaaatatgcccaaaaagagtagcgtggtcctcgacgacgggctcgttcaagatgaatttagcgagtccgtgaagatgtccacttatctggtcgcgtttatcgtgggggagatgaagaacttgtctcaggacgtaaatggcacccttgtgagtatctacgccgtgccggagaagataggacaagtacattacgcgctcgagaccacggtcaaactcttggaatttttccagaattattttgaaatacaatatcctttgaagaaacttgacttagtggcaattcccgacttcgaggccggggccatggagaactggggactgctgactttccgagaggagaccctgctatatgattccaacacctcctctatggcagacagaaaactggtaaccaagatcatcgcacatgaacttgctcaccaatggttcggcaacctggtgaccatgaagtggtggaacgacctctggcttaacgaaggatttgcaaccttcatggagtatttcagtctcgaaaaaatctttaaagagctgtcttcctacgaggatttcctggatgcccggttcaaaactatgaaaaaggattccttaaatagttcccaccctatttcatctagcgtgcaaagttccgaacagattgaggaaatgtttgactccttgtcatacttcaaggggagctctttactactcatgctgaaaacgtacctctccgaggacgtgtttcaacatgcagtcgtgctctacctccacaatcatagttatgcttctattcagtcagatgacctgtgggactcttttaatgaagtaaccaaccagacgctggatgtgaaaaggatgatgaaaacttggaccttacagaagggttttcccttagttacggtgcagaagaaggggaaagagctttttattcagcaagaacgcttttttctgaacatgaaacccgagatccaaccctccgatacatcgtacctgtggcatatacctctatcatatgtcaccgaaggccgcaactattctaagtatcagagtgtctcgctccttgataagaaatctggggttataaatttgacggaggaagttctctgggttaaggtcaacatcaacatgaatgggtactacattgtgcactatgccgacgacgactgggaggctctgatccatcagctcaagatcaacccctatgtactatccgataaggacagggccaaccttatcaacaacattttcgagctggctggcttgggcaaagttccgcttaaacgcgcctttgatctcattaactatctgggtaatgaaaaccacactgctcctatcacggaggcactgtttcagacagatttgatctataacctcttagagaaactgggatatatggatttggcctccaggctggtgacgcgggtgttcaaactgttgcagaaccagattcagcaacagacatggacggatgaaggaacaccctccatgagggagctgcgctccgcacttttggagttcgcgtgtacgcacaacctgggaaactgttctactactgccatgaagctgttcgacgactggatggcttccaacgggacccagtctctgccaactgacgttatgacaaccgtgttcaaagttggcgctaagactgacaaaggatggagttttctcttaggtaaatacatctccatcggcagtgaggctgagaaaaataaaatcctggaggccttggcctcctctgaggatgtgagaaaactctattggctcatgaagagtagtcttaacggcgataatttccgcacccaaaagctttctttcattattcgcaccgtaggcaggcactttcctgggcatctgctcgcctgggatttcgtgaaagagaactggaacaagctagtccaaaagttccccttggggagctatacaattcagaacattgtggctggatccacttatcttttttccacgaaaactcacctgtccgaggtgcaggccttcttcgaaaatcaatctgaagccacttttaggctgcgatgcgtacaagaggctttggaggtaatccagctcaatattcaatggatggagaagaatctgaaatctctgacatggtggctttag

SEQ ID NO: 193004 - DNA, 3450 bp, synthetic construct
  misc_feature 1..3450: note = Description of Artificial Sequence: Synthetic coding sequence
  source 1..3450: mol_type = other DNA
atggccgagcggaagggcaccgccaaggtggacttcctgaagaagattgagaaagaaattcagcagaaatgggacactgaacgggtcttcgaggttaatgctagtaacctggaaaaacagacttccaaggggaagtacttcgttacattcccatatccctacatgaatgggagattgcacctggggcacaccttcagccttagcaaatgcgaggcctgcgccgataaacttaaacgagaaatcgaactgtacggctgcccaccagattttcctgacgaagaggaggaagaagaagagacatccgtgaagacagaggatattatcatcaaggacaaggccaagggaaagaaaagcaaggccgccgccaaggccggatccagcaagtaccagtggggaataatgaaatccctaggactgtcggatgaagagattgtgaagttcagcgaggccgaacattggcttgactatttcccacccctggccattcaggatctcaaaagaatgggacttaaggtagactggaggaggtcctttatcacaaccgacgttaacccatattacgatagtttcgtcaggtggcaattcttgacattgcgtgagcgcaacaaaataaaattcggtaagagatacaccatctacagccctaaggacggacagccctgcatggaccatgaccgccagactggagaaggtgtcggcccccaggaatataccctgttgaaattgaaagttctggagccttacccctccaagctgtccggtctgaaagggaaaaatatctttcttgttgcagcaacactccgccccgagaccatgttcggccagaccaactgttgggtccgacccgacatgaaatacatcggcttcgagactgtgaatggagatatcttcatctgcacgcagaaggcagctaggaacatgtcgtaccagggtttcaccaaggataatggagttgtacctgtcgttaaagagttaatgggcgaggagatcctaggagccagcctttcagcgcccctcacaagctacaaggttatctacgttctgcctatgctgaccatcaaggaggataaggggaccggggtggtgacgtccgtcccctccgattcaccagacgatatcgctgctctcagagatctcaaaaaaaaacaggcccttcgagccaagtatggaatcagagacgatatggtgcttccatttgaaccagtccccgtcatcgagatcccaggtttcgggaatctgagcgcagtcacaatctgcgatgaattgaagatccagtctcaaaacgatcgtgaaaaacttgctgaggccaaagagaaaatctacctcaaggggttttacgaagggattatgctcgtggacgggttcaagggtcagaaggtccaggatgtaaagaagaccatacagaagaagatgatagacgctggcgatgccttgatatacatggaacctgagaaacaggtcatgtctcggagttccgacgaatgtgtggtggccctatgtgatcagtggtatctagattatggggaagagaattggaaaaagcagacctcccagtgtctaaagaacttagagaccttctgtgaggagacgcgccggaactttgaagccaccctgggctggcttcaggagcatgcctgtagcagaacctacggccttgggacccacctgccttgggatgagcagtggctgatcgagtcactgtcagactctaccatctacatggctttctacactgtggctcacttactacaaggcggaaatctgcatggacaggccgagtcacctttgggcatcaggccccagcaaatgactaaggaggtctgggactacgtcttcttcaaagaggcccctttcccaaagacccagattgccaaggagaagctagatcagcttaagcaggagttcgagttttggtacccagttgaccttagagtatccggcaaggacctcgtgccgaaccacctttcctattacctgtacaatcatgttgccatgtggcctgaacagtcggacaaatggcccacggctgtcagggccaacggacatctactcctgaattctgagaaaatgagcaaatccaccggcaatttcctcacactgacccaggcaattgataaattctccgcagatggtatgcgactggcactggccgacgcaggtgacaccgtggaagatgcaaatttcgtagaagcaatggctgacgccggcatccttagactttatacttgggtggagtgggtcaaggagatggtggctaattgggattctcttcggagtggacctgcctcaacgtttaacgatcgagtgttcgctagtgagctgaacgctggcatcatcaagaccgaccagaactacgagaagatgatgtttaaagaggccctcaaaactggattttttgagtttcaagctgcaaaggacaagtacagagaactggcggttgaaggaatgcaccgcgagctcgtttttcgatttattgaagtgcagacattgctgctggctcccttctgtccacatctctgcgagcacatttggactctgctcgggaaacctgatagtatcatgaacgccagttggccggtagccggtcctgtgaatgaggtcctgattcactcgagccaatatctcatggaagtgacacatgaccttagacttcgactcaagaattatatgatgcccgctaagggtaagaaaaccgacaagcagccattgcaaaagcccagccattgcaccatctacgtcgctaagaactacccaccatggcagcacactacgttgtccgtgttgaggaagcatttcgaggcaaataacggaaagctgcccgataacaaagtgatcgccagtgagctgggttccatgcccgagctgaagaaatacatgaagaaagtgatgcccttcgtggctatgattaaggagaacctcgagaaaatgggacctagaatcctcgacttgcagctggaatttgatgagaaggctgtgctgatggagaacatcgtgtacctcaccaattcacttgagctcgaacacatcgaggttaagtttgcctcggaagctgaggacaaaatcagagaggactgctgcccaggaaagcctttgaatgtgtttaggatcgaacctggagtcagcgtctcactcgttaacccacagccatccaacggccacttttccacaaaaattgaaattagacagggcgacaactgtgatagcattattcgccgcctgatgaaaatgaaccgtggcatcaaggatctcagtaaggttaagctgatgagattcgatgaccccctgcttggtcccaggagggtgccggtgctgggaaaagaatacaccgaaaagacacctatatccgaacatgccgtctttaacgtggatttgatgagcaagaagattcacctgaccgaaaatgggatccgggtcgacattggagataccataatctaccttgtacattag

SEQ ID NO: 193005 - DNA, 480 bp, synthetic construct
  misc_feature 1..480: note = Description of Artificial Sequence: Synthetic coding sequence
  source 1..480: mol_type = other DNA
atggccgagcggaagggcaccgccaaggtggacttcctgaagaagattgaaaaggagattcagcagaagtgggacactgagcgcgtatttgaagtcaatgccagcaacctggaaaaacagactagtaagggcaaatacttcgtgacatttccctacccctatatgaacgggcgtcttcacctcggacatactttttccctgtccaagtgcgaattcgctgtaggataccaaagattgaagggtaaatgttgtctgtttccattcggtctacactgcaccggtatgccaatcaaggcgtgtgctgataagctgaagcgagagatcgagctttatggatgcccccccgactttccagacgaggaggaagaagaggaggagacctctgtcaagacagaggatatcatcattaaggataaggctaaaggcaaaaaatccaaagctgccaagcttgatctactcaatacatcgggcgccctgtag

SEQ ID NO: 193006 - DNA, 3531 bp, synthetic construct
  misc_feature 1..3531: note = Description of Artificial Sequence: Synthetic coding sequence
  source 1..3531: mol_type = other DNA
atggccgagcggaagggcaccgccaaggtggacttcctgaagaagatcgagaaagaaatccagcagaagtgggatacggagcgtgttttcgaagtaaacgcctccaacctagaaaaacagacttccaagggaaaatactttgtgaccttcccctacccgtatatgaatggccggctgcacctgggacacaccttctctttgtcaaaatgcgagtttgcagtgggctatcagcgcctcaaaggaaagtgttgtctgtttcctttcggtctccattgcacgggcatgcccatcaaggcatgcgctgataaactcaagcgtgagattgagctgtacggctgcccccccgatttcccggatgaagaagaagaagaggaagagacctcagtgaaaaccgaggacatcattatcaaggataaggcaaaaggcaagaaatcaaaagctgccgctaaagcaggcagctcgaagtatcaatgggggatcatgaagagcttgggcctgagcgacgaggagattgtcaaatttagcgaggccgaacattggctggattacttccccccactcgccatacaggatctcaagaggatgggtctcaaagtcgattggcgacggtcctttatcacaactgacgtgaacccatattacgactcattcgtcaggtggcagttccttacgctccgggaacgtaataagattaagttcggcaaaagatacacgatatactcacctaaggatgggcagccctgcatggatcacgaccgccagacaggtgagggggtgggaccccaggagtatactctcttaaaactgaaagtgctcgagccctatccttcgaagctctctgggttaaagggaaagaacattttccttgtcgcagccactctgcgccccgaaaccatgtttggccaaacaaattgctgggtacggcccgatatgaagtatattggattcgaaactgttaatggcgatatttttatctgtactcaaaaggcagcgagaaatatgtcttaccaggggttcactaaggacaacggtgtggtacccgtggtgaaagagctaatgggggaggagatccttggtgccagcctgtccgccccactaacgagttataaggttatatacgttctgcccatgcttacaattaaggaggacaaggggaccggagtagtaacttctgtgcccagcgactcccctgacgacatcgctgccctgagagatttaaagaagaaacaagctctgagagccaaatacggcatcagagatgacatggtcttaccctttgagccggtgccagttatagagattcctggattcgggaatctgtccgcagtgactatttgcgacgagctgaaaattcaatctcaaaatgatcgcgagaagctcgcggaggccaaagagaaaatctacctgaaggggttctacgagggaattatgctcgtggatggcttcaaaggacagaaggtgcaggacgtaaagaaaactatacagaaaaagatgatcgatgccggagacgctttgatttacatggagcccgagaaacaggtcatgagtaggagtagcgatgaatgtgtggtcgcgctttgtgaccagtggtatctagattatggtgaggagaactggaaaaaacagacatcccagtgcctgaaaaacctggaaaccttctgcgaggagactcgcaggaacttcgaagccaccctcggatggctgcaagaacacgcttgctctaggacctacgggctggggactcacctgccctgggacgagcagtggctgatcgaatccctctccgacagtacaatttacatggccttctacacagtcgcacacctcctacagggagggaaccttcacggacaggccgagtccccgcttggaattcgacctcagcagatgacgaaagaagtctgggactatgtcttttttaaggaagctccctttccaaagacacagatcgccaaagagaagttagaccagttgaaacaggaatttgagttctggtaccctgtggatctgagagttagcggcaaggatcttgtcccaaaccatctcagctattatttgtataaccatgtggccatgtggcccgaacagtctgataaatggcctaccgcagtgagagcgaatggacatctcctgcttaactcagaaaaaatgtccaagagcacaggcaactttctgacactgactcaggctattgataaatttagcgctgatggcatgcggttggcattggctgatgctggagatacagtggaagatgcaaactttgtggaagccatggctgacgcaggtattctgcgcctttatacttgggtggagtgggtaaaggagatggttgcaaattgggattccttacgatccggccctgcctctacctttaacgacagggtgttcgcttccgaacttaacgccgggattattaaaacagatcagaattacgagaagatgatgttcaaggaagctctcaaaacaggtttcttcgaattccaggctgcaaaagataaataccgcgagctggccgtagaaggaatgcatagggagctggtcttccgctttatcgaggttcagacattgttattggccccattttgtccacatctttgtgaacatatttggaccctcttagggaaacccgatagtattatgaatgcaagctggccggtcgccggtccagtgaatgaagtcctgattcattcaagtcaatatctgatggaggtgacgcacgatctgcgtcttaggcttaagaattacatgatgcccgcaaaaggcaagaaaactgataagcagcctctgcagaaacccagtcactgtacaatctacgttgccaaaaattatcctccctggcagcacacaaccctcagtgtgctgagaaagcacttcgaggccaataacggtaagctacctgacaataaggttatcgccagcgaactgggctcgatgccagagctcaaaaaatatatgaagaaagtgatgcctttcgtggctatgattaaggagaacctggaaaaaatgggccctaggatcctcgatcttcagctggaattcgacgagaaagcagtacttatggagaatattgtgtatctgacgaatagcctggagttggagcatattgaggttaagttcgcctccgaagcggaggacaaaattcgcgaggattgctgcccagggaagccactcaatgtgtttagaatcgagcccggcgtttcagttagcctcgtgaatcctcagccatcaaatgggcatttcagtaccaaaattgagataaggcagggcgacaactgtgacagcattattaggcgcctcatgaagatgaatcgcggcattaaggatcttagcaaagtcaagttaatgagatttgatgatccgctacttggccctcggagggtgccggtattggggaaagagtatacggaaaaaacacccataagcgagcacgctgttttcaacgtcgatctgatgtctaaaaaaattcatttgaccgagaatgggatccgagtggacattggagacacgatcatctaccttgtgcattag

SEQ ID NO: 193007 - DNA, 3369 bp, synthetic construct
  misc_feature 1..3369: note = Description of Artificial Sequence: Synthetic coding sequence
  source 1..3369: mol_type = other DNA
atgaacggccggctgcacctgggccacaccttcagcctgagcaagtgtgaatttgccgtcgggtaccaacggctaaaaggtaagtgctgcctctttccattcgggctgcattgcacaggcatgcccattaaagcctgcgctgataaactcaagagagagattgaactttatggctgcccccctgatttcccagacgaggaggaagaagaagaggaaacgtccgtgaagactgaagatatcattatcaaagacaaagcgaaagggaaaaaaagcaaagctgctgcaaaagccggtagctcaaagtaccagtggggtattatgaagagtttgggcctgagtgacgaagagatcgtgaaattctctgaggcagagcattggctagactacttcccccccctggcgattcaggatctcaaaagaatggggctcaaagtggactggaggagatctttcataacaacagatgtaaacccctattatgactcctttgtacggtggcagtttttgacactgcgggagcgcaacaaaatcaagttcgggaaacggtataccatctactcccctaaagatgggcagccctgcatggatcacgataggcagacaggagagggcgtcggccctcaggaatacacattactgaagctgaaggtgcttgagccgtacccatcaaagttgagcggcctgaagggcaagaatatcttcctcgtggctgctaccctgaggcccgagacgatgtttggccaaactaattgctgggttcggccagatatgaaatatattggtttcgaaacagtgaacggggacatcttcatctgtacgcagaaagcagccagaaacatgtcatatcagggattcaccaaagataacggcgtcgtgcccgtcgtgaaggagttgatgggtgaagaaattttaggcgctagtctcagcgcccccctgacatcttacaaggttatctacgtgctgcccatgctgacgatcaaagaggacaaaggaaccggagtcgtgacttccgtcccttcagacagccccgacgatattgcagcacttagggatctgaagaagaagcaggctctccgcgccaaatatggcatccgagatgacatggtgcttccatttgaacccgtaccagtgatcgaaatccccggatttggtaatctgtccgccgtaactatatgcgacgagctgaaaatacagagtcaaaacgatcgagagaagctggccgaagccaaggagaaaatctacctgaagggtttctatgaggggatcatgctagtggatggattcaagggtcaaaaggtccaggatgtgaaaaaaaccattcagaaaaaaatgatcgatgccggcgatgccctgatttatatggaaccggagaagcaggtcatgtcacggtcaagcgacgaatgcgttgtcgcactgtgcgatcaatggtatcttgactacggtgaggaaaattggaagaagcagacctcccagtgtctcaaaaatctggaaaccttctgtgaggaaactcggaggaactttgaagctaccttagggtggctgcaggaacacgcctgctcccggacatacggcttaggaacgcacctgccctgggacgagcagtggctcatcgaatcgctgtctgacagtaccatctatatggcgttctataccgtggcccacctgctccaagggggtaatctccacggacaggctgagagtcccctgggaattcggccgcagcaaatgacaaaggaggtctgggactacgtgtttttcaaggaagcaccatttcctaagacacagattgccaaggagaaactcgatcaacttaaacaggagtttgagttctggtatccagtcgatctcagggtcagcgggaaggatctggtccctaaccacctttcctactatttgtacaaccatgtggcgatgtggccagagcagagcgataagtggcccacggctgttcgagccaatggacatctgctgctcaactccgaaaagatgtctaaaagcacaggcaattttcttacactgactcaggccattgacaaattctcagctgatggtatgcggctcgccttagctgacgcgggtgacactgtggaggacgctaacttcgtggaggccatggcagatgccgggatcctgcgcctctatacatgggtcgaatgggtgaaggagatggttgccaactgggactccctacggtcaggccccgcgagtaccttcaacgatcgcgtttttgctagcgagttaaacgcgggaattataaaaaccgaccagaactacgagaagatgatgttcaaggaggccctgaagacaggattcttcgaatttcaggctgccaaggacaaatacagagagcttgccgttgaaggtatgcatcgtgagctagtcttccgcttcatcgaagttcagacattgctgcttgcccctttttgcccacacctctgtgaacatatatggaccctgctgggcaagcccgattccatcatgaacgccagctggcccgtggctggtcccgtgaatgaggtgctgatacactcaagccagtaccttatggaggttacccacgacctgagactcaggctgaagaattatatgatgccagccaaaggcaaaaagacggacaaacaaccccttcagaagccgtctcactgcactatctacgtcgcaaaaaattatccgccatggcagcacaccaccctctcagtactgcggaagcattttgaggccaacaatggtaagctgcctgacaacaaggtgatcgcgagcgagctggggagtatgcctgaactgaaaaaatatatgaaaaaagtgatgccatttgttgccatgattaaagaaaacctggagaagatgggccctcggatactcgacctgcagttggagttcgacgaaaaggccgttttgatggagaatatcgtgtatctgaccaactctctggagctagagcacatcgaagtcaaatttgcttcggaggcagaagataaaataagggaggactgctgcccaggaaagcctctgaacgtgtttcgcattgaaccaggcgtgtccgtctccctagttaacccccagccaagcaacgggcacttctccaccaagattgagatcaggcagggcgataactgcgattccattatccgtagactgatgaaaatgaacagaggtattaaggacctgtcaaaggtgaaactcatgcggtttgatgatccgctgttaggaccccgccgggtgcctgtactcgggaaggaatatacggagaagactcctatttcagagcacgctgtgtttaacgtggatctcatgtccaagaaaatccacctgacagaaaatgggattagagtcgacatcggggacacaatcatttacctcgtccattag

SEQ ID NO: 193008 - DNA, 372 bp, synthetic construct
  misc_feature 1..372: note = Description of Artificial Sequence: Synthetic coding sequence
  source 1..372: mol_type = other DNA
atgtggcccgagcagagcgacaagtggcccaccgccgtgcgggccaatggccatctcctcctgaatagcgaaaagatgtccaagtccactggaaatttcctcaccctgactcaggccatagataaattcagtgcagatggcatgcgcttagctcttgcagacgccggtgacacagtggaagacgccaactttgttgaagcaatggcagatgctggcattttgcggttgtacacatgggtggagtgggtgaaggaaatggtagctaattgggacagtctgaggtcgggccccgccagcacctttaacgatcgggtatttgcaagcgagctgaacgcaggtattatcaagaccgatcaaaccatgaagcgctag

SEQ ID NO: 193009 - DNA, 1458 bp, synthetic construct
  misc_feature 1..1458: note = Description of Artificial Sequence: Synthetic coding sequence
  source 1..1458: mol_type = other DNA
atgtggcccgagcagagcgacaagtggcccaccgccgtgcgggccaatggccacctcttgctgaactctgagaaaatgtcaaaatcaacggggaacttcctgacacttactcaagctatcgacaaattctcggcggacgggatgagattagccctagctgacgccggcgataccgtggaggacgctaacttcgtggaagccatggcagacgcgggtatccttagactgtatacttgggttgaatgggttaaggagatggtggccaactgggattcccttagatcagggcccgccagtacttttaacgacagagttttcgcaagcgagctgaacgctggtatcattaagactgaccagaattacgagaaaatgatgtttaaagaggcactaaagactggtttcttcgaatttcaggctgcgaaagataaataccgcgaactggccgtggaagggatgcatcgggagctagtgttccgttttatcgaggtacagaccctattgttggccccgttctgcccgcacttgtgcgaacatatctggaccctcctggggaagcccgactctatcatgaacgccagttggccggttgccgggccagttaacgaagtgctgatacattccagccaatacctcatggaagtcacgcacgacctacgcctgaggctgaagaattatatgatgccagctaagggaaagaagaccgataagcagcccctgcagaagccttcccactgtaccatttacgttgccaaaaattatcctccctggcagcacaccacattatccgtcctgcgtaagcactttgaagcaaacaatggtaaactccctgataataaggtgattgcttccgaactcggctccatgccggaacttaaaaaatatatgaaaaaggtgatgccctttgtggcaatgattaaagaaaacctggagaaaatggggcctcgaatccttgatcttcagctggaatttgacgagaaagccgtgctcatggagaatatcgtgtacctgaccaatagcctggagctggagcatatagaggtgaaattcgcaagcgaagcagaagacaaaataagagaggactgttgtcctggcaagcctctgaatgtcttcagaatcgagcccggcgtttctgtctcactggtaaatccccagcctagtaatggccatttttccacaaaaattgagatcagacagggcgacaattgcgatagcatcattagacgcctgatgaagatgaatagaggcattaaggatctgagcaaggttaaactgatgcgattcgatgacccactgctgggtccgaggagagttcctgttctcggcaaagagtatacagaaaaaacccctatttcagaacacgccgtgttcaacgttgatctcatgtccaagaaaatacatctgactgagaacggaatcagggtggatattggcgataccatcatctacctggtgcactag

SEQ ID NO: 193010 - DNA, 3393 bp, synthetic construct
  misc_feature 1..3393: note = Description of Artificial Sequence: Synthetic coding sequence
  source 1..3393: mol_type = other DNA
atggccgagcggaagggcaccgccaaggtggacttcctgaagaagattgagaaagagattcagcaaaaatgggacacagagagagtgttcgaggttaacgcctccaacctggaaaaacagacttctaaaggcaaatactttgtcacatttccctacccgtacatgaatggtcgacttcatctcggacatacgttttctctttcgaaatgcgagtttgcagtgggttatcagcgcctcaagggcaaatgttgtctcttcccatttggacttcattgtacgggcatgccaatcaaaagcaaagctgctgcgaaagcgggcagtagtaagtatcagtgggggattatgaagagcctcggtttatccgacgaagaaatcgtgaagttttccgaagcagaacactggcttgattatttcccccctctcgccatacaggatctgaagcggatgggcttgaaggttgactggaggcggtccttcataacaactgacgtcaacccatattacgactcatttgtccgatggcaatttctaactctgagagaaagaaataagattaaattcggcaaacgttataccatctactcgccaaaagacggtcaaccttgtatggaccacgaccgtcaaaccggcgagggagttggtccccaggaatatacactcctcaaactgaaagtgctggaaccttacccttcaaagctcagcgggctgaagggcaaaaatatctttttagtggcagctaccctgcgtcccgaaactatgttcgggcagacgaattgctgggtcagacccgacatgaagtacataggcttcgagacagtgaatggcgacatctttatatgtactcaaaaggctgcccgaaatatgtcttatcagggtttcacgaaagataatggtgtggtgcctgttgtgaaggaattgatgggtgaagaaatcctgggcgcttcactgtctgcccccttaacctcatacaaggtgatatatgtccttccaatgttaacaatcaaagaggacaagggtaccggcgtggtgacctcagtaccgagcgactccccagatgacatagccgcactgcgagacctaaagaaaaagcaggctctgagagcaaagtatggaattagggacgacatggtgttgcctttcgagcctgtgccagtgatagagatccccggctttggcaaccttagcgccgtcaccatatgtgatgagcttaagatccagtcacagaatgatagggaaaaactcgccgaggccaaggaaaagatttacctaaagggattctatgaggggatcatgctagttgatggatttaaaggccagaaagtgcaggacgtgaaaaaaacgatccagaaaaaaatgatcgacgctggagacgccttgatttatatggaacctgagaaacaggtcatgagcaggtctagcgatgaatgcgtcgttgcgctgtgtgaccagtggtatctcgattacggcgaggaaaactggaagaaacagacctctcagtgcttgaagaatctggagacgttttgcgaagaaactcgaaggaacttcgaggcaaccctgggttggctccaggaacacgcatgttctcgcacctacggtctcggaacacacttgccgtgggacgaacagtggctgattgagtcgttgagtgattcgactatctatatggccttctatactgttgcacatctgctgcaggggggcaatttgcatggccaagcagaaagcccactcggtatcaggccgcagcaaatgacaaaggaggtgtgggactatgtcttctttaaagaagctcctttccctaagactcagattgcgaaggagaagctggaccagctgaagcaggagtttgagttctggtatcccgttgacctgagagtttccggcaaggatttagtgcccaaccatctgagttattatctctacaaccacgtagccatgtggcctgaacagtccgataaatggccaaccgccgtgcgcgctaacggccacctcttgctgaatagcgaaaaaatgagcaaatccacaggcaactttctcaccttgacacaggccattgacaagtttagtgcggacggcatgaggctggctttggcagatgccggcgatacggtcgaagacgccaactttgtagaggccatggcagacgccggcatattaagactgtacacttgggtagagtgggtcaaagagatggtggccaactgggactccctgagatcagggccagcatcaacgtttaacgatcgagtctttgcatccgagctcaacgccggaatcatcaaaactgaccaaaattatgagaaaatgatgttcaaggaggccctcaaaacgggctttttcgagttccaagctgccaaagataaatatagggaactcgcagtcgagggcatgcatagagagctggtatttcgttttattgaagtgcagaccctgttgctggcgccattctgcccccacctgtgcgaacacatctggaccttgctcgggaaacctgactccattatgaacgcgagctggcccgttgccggaccagtgaacgaggtgcttatccacagctctcagtatctgatggaggtgacccacgacctgcggctgagacttaagaattacatgatgccggccaaaggcaagaagacagacaaacagcctctgcaaaaaccaagccactgtacaatctacgtagccaagaactaccctccatggcaacatactactctgtcagtccttcgaaaacattttgaggccaataatggcaagctcccggacaataaggttatcgcttccgagttggggtctatgcccgagctcaagaaatatatgaaaaaggtgatgcctttcgtggccatgatcaaagagaatctggaaaagatggggccccgcatcctggatctgcagttagagtttgatgaaaaagctgtactcatggagaacatcgtgtaccttacgaactcgcttgagctggaacacatcgaagtaaagtttgcctcagaagcagaggacaagatccgcgaggattgctgtccaggcaagccactgaatgtttttcggatcgaacctggtgtaagtgtgagtctggttaacccgcagccaagcaatggccactttagcacaaagattgagatcagacaaggcgataactgtgatagtatcatacgaagactaatgaaaatgaatcgcggtatcaaggatctgagtaaggttaagttgatgcgattcgatgatcccctgctcgggccacgcagggtacccgttcttggaaaagagtacacagaaaaaacgcccatctcggagcatgcagtgttcaatgtggatcttatgagcaagaagattcatctgactgagaacgggataagggtggatattggcgataccattatctacctcgtccattag

SEQ ID NO: 193011 - DNA, 2712 bp, synthetic construct
  misc_feature 1..2712: note = Description of Artificial Sequence: Synthetic coding sequence
  source 1..2712: mol_type = other DNA
atggccagcgtgtggcagcggctgggcttctacgccagcctgctgaagaggcagcttaatggtggcccagatgtcataaagtgggagcggcgggtcatccctggttgcacgcggagcatctatagtgccaccgggaaatggactaaggagtacaccctgcaaactcgtaaagatgttgagaaatggtggcaccagcgtatcaaggaacaggcgagtaagatatccgaagcagataaatctaagcccaagttctatgtactcagcatgtttccttatccatctggcaagttgcacatgggtcatgtgcgtgtatacactatcagtgacaccattgctaggttccagaaaatgcgaggtatgcaggtgattaacccaatgggctgggacgccttcggcttgcccgccgaaaacgcggccgtggagcggaacctgcaccctcagtcttggacgcagagcaacataaagcacatgaggaagcaactggataggctcggcttgtgtttctcatgggaccgcgaaattaccacgtgtctgcccgattactacaagtggacccagtatctttttataaaattgtatgaggccggactggcctaccagaaagaggcccttgtcaactgggatcctgttgaccagacggtgctggccaatgaacaagtcgatgaacacggatgttcatggaggagcggagccaaggtggaacagaaatatttaaggcagtggtttattaagacgacagcctatgcaaaagcgatgcaggacgctctcgccgacctgcctgaatggtatggtattaagggcatgcaggcccactggataggggattgtgttggatgtcacttggacttcaccctgaaagtgcatgggcaggccaccggtgaaaagctgacagcttacactgcaacacccgaagcgatctacggcaccagccacgttgcgatctcaccttctcaccgcttgctgcatggccatagcagtcttaaggaagcattgaggatggcgttggtgcccggaaaagattgcctcacgccggtcatggcagttaatatgctgacccaacaggaggtacctgttgtcatccttgcaaaggccgatcttgaggggagtctcgatagcaagatcgggatcccaagtacttcaagcgaggacactatcctggctcagaccctgggcctggcctattctgaggtaatcgaaacacttccagatggaaccgagcgtcttagcagctccgccgaattcaccggcatgacacggcaggacgcatttttggctctgacccaaaaggcacgtggtaaaagggtcgggggggatgtaacctctgacaagttgaaggactggctgattagtagacagcgctattggggcacccccattccgattgtccactgcccagtttgcggtccgactcccgtccccctcgaggacctccccgtcactctgcccaatatcgcctccttcactggtaaagggggccccccccttgccatggcaagtgagtgggtgaactgcagttgtcccagatgcaagggcgccgccaagcgggagacagacactatggataccttcgtggattccgcctggtattactttagatacaccgatccacataacccgcatagtcccttcaacaccgccgtagctgactattggatgcccgtggacctttacatcggagggaaggagcatgccgtcatgcacctgttttacgcgagatttttctcccacttttgtcatgatcaaaagatggtaaaacatcgtgagccctttcacaaacttctcgcccagggtttgatcaaaggacaaacattcagattgccctcgggtcagtatctgcaacgagaggaggttgatctgactggaagcgtgcccgtgcacgccaagactaaggagaaactggaggtgacgtgggagaagatgtctaagtctaagcacaatggagtggatcctgaggaggtggtggaacaatatggaatagacaccattcgtctgtatatcctcttcgccgccccccccgaaaaggacattctgtgggatgtgaaaactgatgctctaccgggagtgctgagatggcagcagcggttgtggacccttaccacaaggttcatcgaggcccgagcctctggaaagtcgccgcagccacagctcctgtctaacaaggaaaaggctgaggccaggaagttatgggagtacaaaaactcagtgataagtcaggttacgacccacttcactgaggatttcagcctgaactcagctataagccagttaatgggcctgagcaatgccctgtcacaggcatcccaaagcgtcatcctgcattctcctgaatttgaggacgcactgtgcgcgttgatggtcatggcagcaccactggcaccacacgtgactagcgagatttgggcgggactagcactagtgccacgaaaattgtgcgcacattatacgtgggacgcctctgtcctcctgcaagcttggcctgcagtggatcccgagttcctccagcagcctgaggtggtgcagatggctgtgctcatcaacaacaaggcttgcggaaaaattcctgtgcctcagcaggtggctagggaccaagacaaggtacacgagtttgttttgcagtctgaactgggcgtaaggctgctgcaggggcggagcatcaagaagagctttctgagcccccgcaccgccctcattaacttcctagtgcaggattag

SEQ ID NO: 193012 - DNA, 2583 bp, synthetic construct
  misc_feature 1..2583: note = Description of Artificial Sequence: Synthetic coding sequence
  source 1..2583: mol_type = other DNA
atggccagcgtgtggcagcggctgggcttctacgccagcctgctgaagcgccaattgaatggaggacccgacgtgattaagtgggaacgcagagtgattccaggctgtacaaggtccatctatagtgccaccgggaaatggactaaggagtatactcttcagacccgaaaggatgtggaaaagtggtggcatcaacggatcaaggagcaggcttccaaaataagcgaagcggacgtcattaatcccatggggtgggatgcttttggactaccagcagaaaacgccgctgtggaacggaatctacacccacagtcctggacccagagcaacattaaacacatgaggaaacagctggacaggctagggttgtgcttcagttgggatagagaaattaccacgtgtctgccagattactataagtggacacaatacctatttataaagttatatgaagcagggttagcgtaccagaaagaggcccttgtcaattgggacccagtagatcaaactgtattggctaacgaacaagtggacgagcacggttgtagttggagaagtggcgccaaagtggagcagaaatacttgcgccagtggtttattaaaactacggcctacgcaaaggccatgcaggacgctttagcggacctgcctgaatggtatgggattaagggcatgcaggcccattggatcggcgattgtgtgggctgccatttagacttcaccctgaaggttcacggtcaggctaccggggaaaaactgaccgcttacactgctacgcctgaggctatctatggcacatcccatgttgccatatcaccctcccatcgcctcctgcacggacactcatcactgaaggaggcacttcgaatggcactggtccctggcaaggactgcctcactcccgtgatggccgtgaatatgctaactcagcaagaagtgccggtggtgatcctggccaaggcggatctggagggctcactggacagcaaaatcggtatcccctctacatcctctgaggatacaatcttggcgcaaaccctcggtctggcctacagcgaggtgatagagacactaccagacgggactgagcgcctgtctagctctgcagaattcaccggtatgacccggcaggatgcttttcttgctctgacacaaaaagcacgggggaaacgagtcggcggcgatgtgacctccgataagctgaaagactggttgatttctagacaacggtactggggaacaccaattcctatcgttcactgtccagtttgcggacccacacctgtaccactggaggacctcccagtcaccctgcccaatatcgcctcatttactggtaagggcggcccaccgctcgctatggcctctgaatgggtcaactgtagctgccccagatgtaaaggcgcagcgaagcgggagacagacacgatggacacgttcgtcgacagcgcctggtactattttcgctatactgacccccataacccccacagccccttcaacactgcggtggctgactactggatgccagtcgatctctacattgggggtaaagagcatgccgttatgcatctgttctatgcaagattcttctcccatttctgccacgatcagaaaatggtcaagcaccgcgaaccattccacaaattactggcccagggccttattaagggacagacttttcgtctccccagcggccaatatctacagcgcgaggaggtggacttgaccgggagtgttcctgtacacgctaaaaccaaagaaaaactggaggtgacttgggaaaagatgtctaagagtaaacacaacggggtggatccagaagaggttgtcgagcaatatggcattgacaccataaggctgtatatcctgttcgccgcacctccagagaaggacatattgtgggacgtaaaaacggacgcgctgccgggagtgctccgttggcagcagcggctgtggaccctgacgacgagattcatcgaggctcgggcatctgggaagagcccccaacctcagctcctgtctaacaaggaaaaggctgaggccagaaagttatgggaatacaagaattctgttatctctcaggtcaccactcactttactgaggacttttctctgaatagtgcaatttctcagctcatgggcctgagtaacgcactgtcccaggcatctcaatccgtgattctgcacagtccagagtttgaagacgcactttgcgcactgatggtgatggcggctcctcttgcgccgcacgttacaagtgagatctgggcaggactggccctggtgcctcgcaagttgtgtgcacattacacatgggatgcttctgtgctcctccaggcgtggcctgcagtggatccagaatttcttcagcagccggaagtggtgcagatggccgtcctgattaataacaaggcttgcggtaagatccccgtgccccagcaggtcgctagagaccaggacaaagtgcatgagtttgtgctgcagtccgagttgggtgtgagattacttcagggcaggagtattaaaaagagtttcctgtcgccccggaccgccttgatcaattttctcgttcaggactag

SEQ ID NO: 193013 - DNA, 2712 bp, synthetic construct
  misc_feature 1..2712: note = Description of Artificial Sequence: Synthetic coding sequence
  source 1..2712: mol_type = other DNA
atggccagcgtgtggcagcggctgggcttctacgccagcctgctgaagcgccagttgaatggcggaccggatgttatcaagtgggagcggcgcgtgatccccggatgtacaaggtccatttattccgccaccggcaagtggaccaaggagtatacactccagacgagaaaagatgtggagaaatggtggcaccaacgcatcaaagagcaggcctccaagatctcggaggccgacaagtctaagccgaagttttacgtgctgtctatgtttccatatccgtctgggaagctccacatgggacatgtgcgggtttacaccatctctgacacaatcgcccggtttcaaaaaatgcgcgggatgcaggttatcaatccgatggggtgggacgcatttggactgcctgcagagaatgccgcggtggagcgtaacctgcacccccagagctggacgcaatctaatattaagcatatgagaaagcagctggacaggctaggcctgtgtttttcttgggatagagagatcacaacgtgcctgcccgactactataaatggacgcagtacttgttcatcaagctctacgaggctgggctggcttatcagaaagaagccctggtgaattgggaccctgttgaccaaaccgtattggcaaatgaacaagtcgacgagcatgggtgctcctggcgatccggcgcaaaagtagaacagaagtatcttcgccaatggtttattaagacaaccgcttatgcgaaggccatgcaggatgccttggcagatctgcctgaatggtacggcattaaaggtatgcaagcgcattggatcggtgactgcgtggggtgccatctggatttcaccttaaaagtacatggacaggccaccggcgagaagttaacggcttacaccgccacgccagaagcgatttatggcactagccacgtcgccatctctccgagtcacaggcttcttcacgggcactcatcactgaaagaggcgctgcgcatggctcttgtgcccggaaaagactgcctgacgccagtgatggcagtcaacatgctgacccagcaggaagttcctgttgtcatcctggccaaagccgatctggaaggtagcctggactcaaagataggaattccctcgacatccagtgaggataccattttggctcagaccttgggcttggcctattccgaggtcatcgaaacattaccagatggcaccgagcgcctctcttcctcagctgagtttacaggcatgacaaggcaggacgcattccttgcattgacacaaaaagctagaggaaagagagtgggtggcgatgtcacaagcgataaacttaaagactggttaatctctcggcagagatattggggcacccctataccaattgtgcactgccctgtctgtgggcccactcctgtccctttagaggacctccctgtcaccctgccaaatattgcttcgtttactggaaagggcggtccccctctggcgatggctagcgagtgggtaaattgctcatgcccccgatgtaaaggcgctgcaaagcgcgaaactgacactatggacacatttgtcgattccgcttggtattactttaggtacacggatccacacaacccccactcccctttcaataccgcagtggctgactattggatgcccgtggacctgtatatcggcggaaaagaacatgccgttatgcacctcttctacgcacgctttttctctcatttctgtcacgaccagaaaatggtcaagcatagggaaccgtttcacaagttgttggctcagggtctcatcaagggacagactttccgcctgcccagtggccagtacctccaacgtgaagaggtcgatttgacaggctccgtaccagtccatgcaaagactaaagaaaaattggaggtcacctgggagaaaatgtccaaaagtaagcacaacggggtggatccagaagaagtcgttgaacaatacggtatcgacaccattaggctgtacatccttttcgccgctccccctgaaaaggacatattatgggatgtcaagactgatgcactccctggggtgctccgttggcagcagagactgtggaccctgaccacccggttcatcgaggcacgtgcaagcggaaagagtccccagcctcagctgctcagcaacaaggaaaaggctgaggcacggaaactctgggaatacaaaaattctgtcatctctcaggtgacgacccattttaccgaggatttcagtctgaattccgctatttcgcagcttatgggcctttccaatgctctttcccaggcaagccaaagtgtcatcctccactctccagagttcgaagatgctctgtgtgccctgatggtgatggccgcacctctggctccacatgtcacatccgagatctgggctgggctagccctggtgccaagaaaactttgcgcccactacacctgggacgcgtccgtgctgcttcaggcctggccggccgtagatccagagttcttacagcagcccgaagtggtgcagatggctgttctcatcaacaacaaggcctgtggaaagattccagttccccagcaagtcgcaagggaccaggacaaggtgcacgaattcgttttacaaagcgagttaggcgtacgtttactgcagggacgttcaattaagaaaagtttcctgagtccacgcacggcccttatcaatttcttagtgcaggactag

SEQ ID NO: 193014 - DNA, 345 bp, synthetic construct
  misc_feature 1..345: note = Description of Artificial Sequence: Synthetic coding sequence
  source 1..345: mol_type = other DNA
atggccagcgtgtggcagcggctgggcttctacgccagcctgctgaagcgccagttgaatggcggacccgatgtcattaagtgggagcgtagagtcattcccggatgcacacgctctatctactccgcaacgggcaagtggacaaaggagtacacactccagacacggaaagacgtggagaagtggtggcatcagagaattaaagagcaggcatcgaaaattagcgaggccgataagtctaagcccaagttctatgtgctgtctatgttcccctaccccagtgggaagcttcatatgggtcacgtcagagtgtatactatctccgacaccatagccagattttag

SEQ ID NO: 193015 - DNA, 609 bp, synthetic construct
  misc_feature 1..609: note = Description of Artificial Sequence: Synthetic coding sequence
  source 1..609: mol_type = other DNA
atgaaggtgctggccgccggcgtggtgcccctgctgctggtgctgcattggaaacacggcgcaggcagtcccctgcctatcacccccgttaatgctacgtgtgcgatccggcacccctgccacaacaacttgatgaaccagataaggagtcagctggcccagctgaatgggtcagctaacgccctgtttatcctctactataccgcccagggcgagcccttccctaataatcttgataagctttgtggacccaacgtcactgacttccctccattccatgctaatggaaccgaaaaggccaagctggtagaactgtatcggatcgtggtgtacctggggacatccctcggtaatatcaccagagaccagaaaatcctgaatccctctgccctttctctacattccaagttgaacgctaccgccgatattctccgaggccttcttagcaatgtgctctgccgtctgtgttccaagtaccatgtcggacatgtcgatgtgacctatgggcctgataccagtggcaaggacgtctttcagaaaaagaaacttggatgccagctacttggcaagtataagcaaatcattgctgtcctggctcaggccttttag

SEQ ID NO: 193016 - DNA, 3294 bp, synthetic construct
  misc_feature 1..3294: note = Description of Artificial Sequence: Synthetic coding sequence
  source 1..3294: mol_type = other DNA
atgatggacatctacgtgtgcctgaagcggcccagctggatggtggacaataagcggatgagaacagcatcgaatttccagtggctactgagcacatttatcctcctctacttaatgaaccaggtcaattcacagaagaagggggccccgcacgatttgaagtgcgtcaccaacaatctccaagtgtggaactgctcctggaaggcgccctcaggcaccggccgcggaaccgactacgaggtttgcatagaaaatcgctctaggtcttgctatcagctggaaaaaacttcaataaagattccggccctgagtcatggcgactacgagattacgattaacagcttacatgattttgggagctctacctccaagttcaccctaaacgaacaaaacgtgtctttaataccagacacaccggaaattctcaatctgtcggccgatttttcaaccagcactctgtatctcaaatggaacgataggggctctgtgtttccacataggtcaaacgttatttgggagattaaggtgctccgtaaagaatcaatggagctggtcaagctggttacccataacactactctgaacggcaaggacacattacaccactggagctgggcctcagatatgcccctggagtgtgccatccacttcgtggagatccgatgttatatcgataacctccacttttctgggctcgaggagtggagtgattggtcgcccgtcaagaatatctcttggattccagatagtcagaccaaggtcttcccacaggataaagtgatcctggtcggatcagatatcaccttttgctgtgtgtctcaggaaaaggtcctgtctgcccttataggacacacgaattgcccactgatccatctagatggggagaacgtagccatcaaaatccggaacatttccgtgtccgcaagctctggtaccaatgttgtattcacaacggaggataacatctttggcacagtgatatttgcaggttaccctcccgacactccgcagcaactgaactgcgagacgcacgatcttaaggaaataatatgcagttggaatcctggaagggtgactgcactggttggacctagggcaacatcgtacacactagtggagtccttttccggaaaatacgtgcgtcttaagcgagctgaggctcctactaacgagtcttatcaactcctctttcagatgctacctaatcaagagatttataacttcacacttaatgcccataaccccctcggacggtcacagtccaccattctcgtgaacatcactgagaaggtttacccccacacacccacatcttttaaggtaaaagacataaattctacggctgtgaagttgtcctggcacctacctggcaatttcgccaagataaactttctgtgcgagatcgagattaagaaatctaacagtgtgcaggagcagaggaacgtgactattaagggcgtggagaattcatcctacctggtcgcactcgacaaattaaacccatataccttgtacacatttagaattagatgttcaacggagactttttggaagtggtcaaagtggtccaataaaaaacagcacctaactacagaggccagcccaagcaaagggccggatacctggcgcgaatggtcttccgatggcaagaacctgatcatctactggaagcctttgccaatcaacgaagccaacggcaaaatcctgtcatacaatgtgtcatgtagttccgacgaggaaacccagtctctgagtgaaatcccagatccccagcacaaagcagagatcagactcgacaagaacgattatatcatctcggtcgttgcaaaaaattcagttggtagctctccgccaagcaaaatcgccagcatggagattcccaatgacgaccttaaaatcgagcaggttgttggtatgggaaaggggatcctcttgacctggcattatgaccccaatatgacatgcgactatgtgattaagtggtgcaactcaagtaggtccgagccatgtctgatggattggcgcaaagtgcccagcaacagtaccgagaccgtgatcgaaagcgacgagtttcgcccaggcatcagatacaatttcttcctctatggctgcagaaatcagggctaccagttgctgcgatcaatgattggctacatcgaagagctggcccccatcgtggctcctaattttaccgtggaggacacttcggctgacagcattttagttaagtgggaggacattccggtggaagagttgcgcggattcctgcgggggtacctcttttatttcggcaagggtgaaagagacacatctaaaatgcgagtgctggagagtggacggtctgacataaaagtgaagaacattacagatatctcacaaaagactctgaggatcgctgacctacaggggaaaaccagttaccacctggtcctgcgcgcctacacagacggaggagtcggtccagagaagtccatgtatgtcgtgactaaggagaacagtgtcggcctgattatagccatcctgataccggtcgctgtggcagtaatcgtgggggtagtgacctccatcttgtgctatagaaagagggagtggattaaggagactttttatcctgatatacctaatcctgagaattgcaaggctctccagttccaaaaatccgtgtgcgagggctcctctgccctaaaaaccttggagatgaacccttgcacgcctaacaatgttgaggttctcgagactagatcagccttccccaagatcgaggatactgaaataataagtcccgtggccgagagacccgaggaccggagtgacgctgaacctgagaatcacgtggtcgtctcatattgccctcctataattgaggaagaaattccgaaccctgcagccgatgaggcaggcgggaccgcccaagtaatctacattgacgtgcagtccatgtaccagccacaggccaagcctgaggaagagcaggaaaatgacccagtaggaggtgccggttacaagccgcaaatgcacctccctatcaactctaccgtcgaggacatcgcggctgaggaggatctcgacaaaacagctgggtaccggcctcaagccaacgtcaacacttggaacctcgtatccccagacagccctagatccatcgactctaattcagagatagtaagttttgggtctccctgctccatcaatagcagacagtttcttatcccgcccaaagacgaggacagtcccaaatctaatggcggcggttggtcttttacaaacttttttcaaaacaaacctaatgattag

SEQ ID NO: 193017 - DNA, 3294 bp, synthetic construct
  misc_feature 1..3294: note = Description of Artificial Sequence: Synthetic coding sequence
  source 1..3294: mol_type = other DNA
atgatggacatctacgtgtgcctgaagcggcccagctggatggtggacaacaaacgcatgcgtaccgccagcaactttcaatggctgttatccaccttcatattgctgtatcttatgaaccaggtgaattcgcagaagaaaggagccccacacgatctgaagtgtgtgaccaataacttgcaggtctggaattgttcttggaaggcgcccagcggtacgggcagaggtacagattacgaagtgtgcatcgagaatcggtcccggtcatgttaccagcttgaaaaaacgtctatcaaaattcccgccctatcccacggggattacgaaatcacaataaattccttgcacgactttggaagcagcacatcaaaatttacactaaacgagcaaaacgtctctctgattcccgatactcccgagatcctgaatctcagtgctgactttagcactagcaccctgtacctgaaatggaacgacagaggatccgtattcccgcacaggtccaacgttatctgggaaatcaaagttctgcggaaggagtcaatggagctggtaaaactcgtcacgcacaatacaactttaaacggaaaggacactctgcatcattggtcgtgggcttccgacatgcctctcgaatgcgcaattcacttcgtggagattagatgctatattgacaatctccacttcagtggtttggaggaatggtctgactggtctcctgttaagaacatttcctggatcccagatagtcagaccaaggtctttccgcaggataaggtcattcttgtgggtagcgacatcactttttgttgtgtctcacaggagaaggttctgtctgcactcataggtcacacaaactgtcctcttattcacttagatggtgagaacgttgctatcaaaatccgcaatatctcagtgtcagcaagctctggcacgaacgttgtgtttactactgaagacaatattttcggcacagtgattttcgcgggctatccccccgatacaccccagcagctcaactgtgagacccacgatcttaaagaaattatatgcagttggaaccccggaagggttaccgcgctcgtgggcccccgtgccacatcttacacccttgtagagtcatttagcggcaaatacgttagactgaaacgcgccgaagcacccacaaatgagtcctatcaactgctttttcagatgcttccaaaccaagagatctacaactttacactgaatgctcacaatccccttggtcggagtcagtctacgatcttggtgaacattacggaaaaggtttacccccacaccccaacatcttttaaggtgaaggacattaattctaccgcagttaagctgagctggcacctaccgggcaacttcgctaagataaacttcctgtgtgaaatcgaaatcaagaagagcaatagtgtgcaggagcagcggaacgtgacaatcaaaggcgtggagaattcctcatatctggtggccctggacaagctgaatccatatactctatatacttttcggatccgctgttccaccgagacattttggaagtggtcgaagtggtcgaataaaaaacagcatctgacaacagaggcctccccatcgaagggaccagacacctggagagagtggtcctccgatggcaaaaatttaatcatctattggaaacctctccctattaatgaggccaatggaaaaattctcagttataatgtgagctgctcttcagatgaggaaacacagagtttgtccgaaattcccgatccgcagcataaagctgaaattcggctggacaagaacgattacatcatcagcgttgtcgctaagaactcggtcggatcttcacctcctagcaaaattgctagcatggagatacctaatgacgacttgaaaattgagcaggtggtcgggatggggaaagggatcctattgacgtggcattacgacccaaatatgacctgtgactatgtgatcaaatggtgtaattcttcgcgaagcgagccctgcttaatggactggcggaaggtgccatccaattccaccgagacagtgattgagtctgatgagttccgtcccggaatccgctacaatttctttctgtacggttgccgaaaccagggctatcagctgctgcgctctatgattggctatatcgaggagctggctcccatcgtcgctcctaacttcacggtagaagatacgagcgccgacagcatcttggtgaagtgggaagatatcccagtcgaagagctacgtggttttcttagaggttatctattttactttggaaagggggaaagagacacttctaagatgagggtgttagagagcggcaggtctgatatcaaggtcaaaaatatcaccgatatcagccaaaagacgctcagaattgccgatcttcagggcaagacttcttatcacttggtgttaagagcatacacagacggtggggtggggccggagaagtcgatgtatgtggtcaccaaggaaaactccgtcggactgatcatcgccatcctaattcccgtggctgtggccgtgatagtgggagtggttacctctatcctgtgttaccgaaagagggaatggattaaggaaaccttctacccagatattccaaatcccgagaactgcaaggccctccaatttcagaagtcagtgtgtgagggatctagtgccctgaaaacattggagatgaatccttgcacaccgaataatgtcgaagtcctcgagactcggtctgcctttcctaaaatcgaagatacagaaatcatatcccccgtggcagaacgccctgaagatcgcagcgatgccgaaccggagaaccacgtggtggtgtcctactgccctcccatcatcgaggaggagatccccaatcctgcagccgacgaggcaggtggcacagcacaggtcatatacatcgacgtccaatcaatgtaccagcctcaggccaagcccgaagaagagcaggaaaacgatcccgtggggggagccgggtacaaaccgcagatgcatctgcccatcaattccaccgttgaggacatagccgctgaggaggatttagacaagaccgctggctatcggccccaggccaatgtgaacacttggaatcttgtttctcctgacagcccccgcagcatcgactccaactcagagatcgtttcttttggctctccatgctcgattaattcacggcagttcctcatacctcccaaggacgaagactctcctaagtctaacggtggcggctggagcttcaccaacttctttcagaacaagccaaatgactag

SEQ ID NO: 193018 - DNA, 381 bp, synthetic construct
  misc_feature 1..381: note = Description of Artificial Sequence: Synthetic coding sequence
  source 1..381: mol_type = other DNA
atgatggacatctacgtgtgcctgaagcggcccagctggatggtggacaataagcgaatgcgaacagcaagcaatttccagtggttactgagcacttttatactgctgtatctaatgaaccaagtaaactcccagaaaaaaggagccccgcacgatctaaagtgtgtgaccaacaacttacaggtgtggaactgctcatggaaggcccccagcggcacaggccggggaaccgattatgaggtgtgtattgagaaccggtcacgctcgtgttatcaacttgagaagacgtctattaagatcccagctctgtcccatggagattatgaaattacaataaatagtctccacgacttcggcagcagcacctcaaaattcacttag

SEQ ID NO: 193019 - DNA, 228 bp, synthetic construct
  misc_feature 1..228: note = Description of Artificial Sequence: Synthetic coding sequence
  source 1..228: mol_type = other DNA
atgatggacatctacgtgtgcctgaagcggcccagctggatggtggataacaaacggatgcgaacggcgagtaacttccaatggctgctcagtactttcattctcttgtatctcatgaaccaggtgaacagccagaaaaagggagcccctcatgaccttaaatgtgtgactaacaacttacaggtttggaactgttcctggaaggctccgtccggcacgggtcgttag

SEQ ID NO: 193020 - DNA, 456 bp, synthetic construct
  misc_feature 1..456: note = Description of Artificial Sequence: Synthetic coding sequence
  source 1..456: mol_type = other DNA
atgttcagcaccaaggccctgctgctggccggcctgatcagcaccgcactggccggaccttgggctaatatctgcgcaggtaagagctctaatgaaatccgaacttgtgacagacacggttgtggccagtactcggcccagaggagtcaacgcccccaccaaggcgtagacattctctgctccgctggatctactgtctacgctcctttcacgggcatgatcgtcggacaggagaaaccataccagaataagaatgccattaataacggagtcagaatttctggacggggtttctgcgtcaagatgttctacattaaaccgattaaatacaagggcccgatcaaaaagggtgagaagctgggtactcttctccctctccagaaagtctacccaggaatccagtcccatgtgcacatcgagaattgcgacagctccgaccctacagcttatctgtag

SEQ ID NO: 193021 - DNA, 1128 bp, synthetic construct
  misc_feature 1..1128: note = Description of Artificial Sequence: Synthetic coding sequence
  source 1..1128: mol_type = other DNA
atgacccccatcctgaccgtgctgatctgcctgggcctgagcctggatcctcgcactcacgtgcaagcagggccactccccaagcccaccctttgggctgaaccggggtctgttatcactcaaggcagtcccgtaaccctgagatgtcagggatctcttgagacccaagagtatcacctctaccgcgaaaaaaagactgccctatggattacacgcatccctcaagagcttgttaaaaaaggccagttcccgattctctcaatcacatgggagcacgcggggagatactgttgcatctacggatcccatacagctggcttgagcgagtcttctgaccccctcgagctggttgtgaccggcgcttatagcaaaccaacattgtccgctctgccgagcccggtggtcacttctggtgggaatgtgacaattcagtgcgattctcaggtagcttttgacgggttcatcctttgtgtgagcaaaaaacccagtcttagcgtgcagcctgggccagtggttgctcctggggaaaagctgacgttccagtgcgggtcagacgcagggtatgaccgattcgtcctgtacaaggaatgggggagggactttttacaacgccccggaagacagccacaggcggggctatctcaggccaattttacactggggcctgtctcgcgctcctatggtggtcagtatacatgtagtggcgcctacaatctgagctcagagtggagcgctccgtccgaccctttggacatcctaatcactggccagatcagagcacggcccttcctgtctgtgaggcctggaccaacagtagcttcaggagaaaacgtcacactcctctgccagtcacagggcgggatgcacacttttctgctgaccaaggagggtgcagccgactcgcctttgcgcctcaagtccaaacgccagagccataaatatcaggccgagtttcccatgtctcctgtgactagcgctcacgcaggtacgtatcgctgttatgggtcactcagctcaaatccttatttactgacacatccttctgacccgctggaactggttgtttctggggccgcagaaacactcagccccccccaaaataagtccgactccaaagccggggagtag

SEQ ID NO: 193022 - DNA, 1956 bp, synthetic construct
  misc_feature 1..1956: note = Description of Artificial Sequence: Synthetic coding sequence
  source 1..1956: mol_type = other DNA
atgacccccatcctgaccgtgctgatctgcctgggcctgagcctgggaccacgtacacatgtccaagcggggcatctccctaagcccaccctgtgggcagaaccaggctcagtcatcactcaggggagtcccgtgacattgaggtgtcagggtggtcaggagacccaggaatacagactgtatcgcgagaaaaagacagctctgtggattactcgaattcctcaggagctggtgaagaagggccaattccctatacctagcataacatgggaacacgcaggcagatatcgctgctactacggatccgatacagctggacgctcagagtccagtgacccattagaactcgttgtgacaggagcctacattaaaccaaccctcagcgcccagccttcacccgtggttaactccggtggaaatgttattctccagtgtgactctcaggtcgccttcgacggatttagtctctgcaaagaaggtgaggacgagcatcctcagtgtctgaactcccagccacacgctcggggttcttctcgggcgattttctcagtcggccctgtctccccatcccgccgatggtggtatagatgctacgcttacgactcaaatagtccgtacgaatggagcctgccctccgatctgctcgagctattggtgttaggggtctccaagaagccctccctgtccgtccagccagggcccatagtggcccctgaagaaaccttgacactgcagtgtggaagtgacgcagggtacaatcgtttcgtgctgtataaggacggggagagagattttttgcaacttgccggagcccagccacaggctggcctcagccaggctaattttaccctggggccggtgtctcggtcctacggggggcagtatcgttgttacggggctcacaatctatcctcggaatggtcagctcctagcgacccactggatatcctaattgccgggcaattctatgatcgggtctccctatctgtccagcccgggcccacggtggctagcggcgagaacgtcacactgctgtgtcagagccagggctggatgcagaccttcctcctcaccaaggaaggtgcagctgacgatccatggcggcttaggagcacgtatcagagtcaaaaatatcaggctgagttccctatggggccggttacgtctgcccacgctggcacatacaggtgttatggcagccagtcctccaaaccgtacctgcttacccatcctagtgatcccttagagctggtggttagcggcccttcaggcgggccaagcagtccaactacgggaccaacctcaaccagcgctgggcctgaggaccagcccctgacaccaaccggatcggacccacagtctggtctggggaggcaccttggtgtggtaattggcatcctggtggctgttattctcctgttgctgctccttcttctcctattcctcatcctgcgccaccgacggcaagggaagcactggaccagcacacaacggaaggctgattttcagcatcccgccggagctgtgggccccgagccaaccgacaggggtttacagtggcgaagtagccccgcagctgacgcacaagaagaaaacctctacgccgccgtcaagcatacccagcccgaggacggcgtcgaaatggataccagaagcccacacgatgaggatccccaggcggtaacgtacgctgaagttaaacactcacgacctaggagggagatggcttccccccctagccccctttcaggggaattcctcgacaccaaagacaggcaggcggaggaggataggcaaatggacaccgaggccgccgcgtctgaggctccccaagatgtgacttatgcccagcttcactccctcaccctaagaagggaggcgactgaacctcccccgagtcaggaagggccaagcccggctgtgccaagcatctacgccactcttgccattcactag

SEQ ID NO: 193023 - DNA, 1956 bp, synthetic construct
  misc_feature 1..1956: note = Description of Artificial Sequence: Synthetic coding sequence
  source 1..1956: mol_type = other DNA
atgacccccatcctgaccgtgctgatctgcctgggcctgagcctgggtcctcgtacacacgtgcaggctggacatctcccaaagcccacactctgggcggagccaggttctgttataacccaaggaagcccggtcacactcagatgtcagggtggacaggagacgcaagaataccgcttatatcgggagaagaaaaccgctctctggattacgcggattcctcaggaactggtcaagaagggccaatttccaattccatctatcacatgggagcacgcaggtagatatagatgctactatggctcagacacagcaggccgctctgaatcttccgacccactcgagctggttgtcaccggtgcttacatcaaacccaccttaagtgcccaaccatccccagtcgttaactcaggggggaatgttatactgcagtgcgattcacaagtggcatttgatggattctcgctgtgtaaggagggagaggatgaacatcctcagtgcctgaattcacagccgcatgccaggggcagctcccgggccattttttccgtggggccggttagtccctctcgtcggtggtggtaccgctgttacgcatacgacagtaactctccatacgaatggagcctgcccagcgatctcttagagctcctggtgctcggtgtgtccaaaaaaccctccttaagcgttcaaccaggtcccattgtggcccccgaggagaccctgacgctgcagtgcggatcagatgcaggctacaatagatttgtgctctacaaggatggcgaacgggatttcctgcaactggcgggcgcgcaaccacaggccggtctgagtcaggctaatttcactctgggccctgtgtctcgatcatatgggggccagtataggtgttacggagcccataacctttcaagtgagtggtcggctccaagcgatcctctcgatattctgatcgctggtcagttttacgatcgcgtgtccttaagtgttcaacccggtcctaccgtcgcctctggggagaacgtaactctcctttgtcaaagccaggggtggatgcagacttttctgctaacaaaggaaggcgcagcggacgatccttggagacttaggagcacatatcaaagccagaaataccaggcggaatttccaatgggaccagttaccagtgcccacgctgggacttatagatgctacggcagccagagctcgaagccttatctccttacccaccccagcgatcctctggagctcgtggtgtccggacctagtggaggcccatcgtctccgactaccggaccaacaagcactagtggcccggaagatcagcctctgaccccaaccggatcggatccacagagcgggctcgggcgacaccttggcgtagtgatcggtatactggttgcagtgatccttctgctcctgctgctccttttgctgttcctgattctacggcaccggcggcagggtaaacactggacctcaactcagaggaaagctgattttcagcaccctgcaggtgcagtgggacccgaacctactgatcggggactgcagtggagaagcagccctgccgctgacgctcaggaagagaatctttatgcagctgtcaagcacacgcagccagaagatggtgtcgaaatggacaccagacaatcaccccacgatgaagaccctcaggccgtgacctacgccgaagtgaaacacagcagaccccgccgcgagatggcctcaccaccaagtcctctttctggcgagtttctagacacaaaggataggcaggccgaggaagatcgtcaaatggacaccgaggcagccgccagcgaggcgccccaagatgtgacctacgcccaactccacagcttgacactgcgaagggaggctacagaacctccacccagtcaggagggcccctctcccgctgtcccctccatttacgccaccctggcaatccactag

SEQ ID NO: 193024 - DNA, 1794 bp, synthetic construct
  misc_feature 1..1794: note = Description of Artificial Sequence: Synthetic coding sequence
  source 1..1794: mol_type = other DNA
atgacccccatcgtgaccgtgctgatctgcctgggcctgagcctggggccccggactcacgtgcagaccggtacaattcctaagcctacgctttgggccgaaccggactctgtcatcacacagggcagcccagttacactgtcctgccagggtagcctcgaagcacaggagtacaggctctaccgtgagaaaaaatcggcctcttggattaccagaattcgcccagagctcgtgaagaacggtcagttccacattcccagtatcacatgggagcacacaggccgatatggctgtcagtactactctcgcgcccggtggtcggagttatctgatcctctcgtgcttgttatgacaggagcttatcccaagcctaccttgtctgcccagccctctcccgtggtgacttccggtgggcgtgtgaccctacagtgtgaaagtcaggtggcctttggcgggttcatcctctgtaaggaaggagaagaagagcatccgcagtgcttgaattcccagccccatgcccggggttcaagccgggccattttctcagtggggcctgtgtcacccaaccgacggtggagtcatcggtgttacgggtatgatctgaactccccttacgtgtggtcatccccctccgacctcctggaactgctcgtgccaggggttagtaaaaaaccctcactgtccgttcagcctggccccgttgtggctcctggagaaagcttgacactacagtgtgtttccgacgttggctatgatagatttgtcctctataaggaaggcgagcgggatctccggcagctgcctggtagacagcctcaggcaggtctatcgcaggcaaattttaccttaggtcctgtgagtcgtagttacgggggacagtatcggtgttacggagcccataacttatcgtccgaatgctccgcgccttctgacccattggatatcctgataactggccagatcagagggaccccctttataagcgttcagcctgggcctacggtggcaagcggtgaaaatgtcactctcctttgccaaagctggcgtcagttccataccttcctgctgacaaaggctggagccgccgatgcccctcttcggctgcgcagcatacatgaatatcccaagtaccaagccgagtttcccatgagcccagtcacttccgcccatgctggtacgtataggtgctacggctctctgaattccgacccctatctcctatcacacccatctgaacccctggagcttgtagtgtccggaccatccatgggtagctccccacctcctactggacccatctcgaccccgggaccggaggatcagcctctgacacccaccgggtctgacccacagtccggccttgggaggcacctaggagtagttattgggatccttgtggcagtagtgcttctgttgctcttactactgctgctgttcctgatactcagacataggagacaagggaaacactggactagcacccagcggaaggccgacttccaacacccagccggcgcagtaggccccgaaccgactgatcgaggccttcagtggcggagcagccctgccgcggacgcgcaggaagagaacctgtacgcagcagtgaaggacactcagccagaggacggtgtggagatggataccagagccgctgcaagtgaggcgcctcaggacgtaacttatgcacagcttcattcgctgacactacggcgtaaagctacagagcctcctcctagccaagagcgggaacctcctgccgagccatccatctacgcaacactggccattcactag

SEQ ID NO: 193025 - DNA, 1899 bp, synthetic construct
  misc_feature 1..1899: note = Description of Artificial Sequence: Synthetic coding sequence
  source 1..1899: mol_type = other DNA
atgacccccgccctgaccgccctgctgtgcctgggcctgagcctggggccccgcactcgggtgcaggccgggcccttccctaagcccacattatgggcagaacctggaagtgtgatttcatgggggagcccagttacaatctggtgccagggatcccaggaagcgcaggagtacagattacacaaagagggttcaccggagccgttggacaggaataaccccctcgagcctaagaataaagcacggtttagcatcccatctatgaccgagcatcacgcaggacggtatcggtgtcactattacagctcagctggctggagtgagccttctgaccccctggagatggtcatgaccggcgcctattctaaaccgacgctgtccgccttgccaagcccggtggtcgcttctggaggcaacatgacgttgaggtgcggctcccagaagggctaccatcactttgtcctgatgaaagagggggaacaccagctgccaagaacacttgattcccagcagctgcattcacggggtttccaggccctcttcccagtcggccctgtgacaccttctcacaggtggaggtttacatgctattactactatactaacactccttgggtctggtctcaccccagcgacccgctcgaaattctgccatctggggtgtcacgtaaacctagcttgcttacactgcagggcccggtcctcgctccaggccaaagtctgaccttacagtgtggatcagatgtaggatacaacagattcgtgctatataaagagggggaacgagactttctgcagcgtccaggacaacagccacaagccggcctgtctcaggcaaacttcacactgggccccgtgagcccatcaaacgggggtcagtaccgctgctatggggcccataatctaagtagtgagtggtctgctccgtccgacccactgaacattcttatggctgggcagatctacgacaccgtgagcctgagtgctcagcccggacctacagtggcttccggtgaaaatgtcacgttactctgtcagtcatggtggcaatttgacaccttcttgttaacgaaggaaggcgcagctcatccgcccctgaggctgcgaagtatgtacggcgcacacaagtaccaggcagaattcccaatgtcccctgtaacaagcgcgcatgccggcacgtatcgctgctacggatcatattcgagtaatccccatcttctgtcacacccgagtgaaccgttggaattggtggtatccgggcactctggaggctctagtcttcctccgacaggaccgcctagcactcctggactcggccgatatcttgaggttttaattggggtgagcgtcgcctttgtgctcctgctctttctgttattgttcttgctactgcggaggcagcgccacagtaaacatcggacctctgaccaacgtaaaactgattttcagcgccccgccggcgccgctgagactgagccaaaagataggggactcctgcgaaggtcatcaccagcagctgacgtccaggaggagaacctctatgctgcagtgaaagacacccaatccgaagacagggtagagctggactcgcaacagagcccccacgatgaggacccacaggcagtcacttatgcccctgtgaaacattctagtccacggcgggaaatggcctcgccccccagtagtctgagcggggaatttctggacacgaaagacagacaggtggaggaggatcgacagatggacacagaagctgccgcatccgaggcctcccaggatgtgacctatgcacaactgcacagcctcacgttgcgacgaaaagccactgagcctccaccctcacaggaaggagaaccacccgccgagccatccatctatgctaccctcgcaattcactag

SEQ ID NO: 193026 - DNA, 1344 bp, synthetic construct
  misc_feature 1..1344: note = Description of Artificial Sequence: Synthetic coding sequence
  source 1..1344: mol_type = other DNA
atgatccccaccttcaccgccctgctgtgcctgggcctgagcctgggtccccggactcacatgcaggcgggcccgctcccaaagcccacactttgggccgagcccggtagcgtcatcagttggggaaactcggtgacgatctggtgtcaggggaccctggaggccagagagtatcgattggacaaggaggaatcaccggcaccctgggaccgccagaacccactggagcctaagaacaaggcacggttctcaatccccagcatgaccgaggactacgccggacgctatcgttgctactaccgaagccccgtgggctggtcccaaccatcagacccactggagctcgtgatgacaggagcctacagcaaacctacactttccgcattgccctctcccctggtgacaagcggaaaaagcgtgacgctgctttgtcagagcaggagccctatggacaccttcctgctcatcaaagagagggcagcgcaccccctgctccaccttcgttccgagcacggggcccagcagcaccaggctgagtttccgatgagccccgtgacaagcgtgcatggcggaacataccggtgttttagcagccacgggttctctcattatttactcagtcacccctcggatcccctggaactcatcgtctccgggagcctggaagatccccggcctagtccaaccagaagcgtctccaccgcggccgggcctgaggatcaaccattgatgcctactggcagcgtccctcactcaggtcttagaaggcactgggaggtccttatcggagttctggtggtgtcaatcctcctgctgagccttctcctcttcttgctcctgcagcactggaggcagggaaaacaccgtacactagctcagagacaggctgactttcagcgacctccaggcgccgccgagcctgaacctaaggatggaggcctgcaacggagatcttcacccgcagccgatgtccagggggagaacttctgtgccgccgttaagaatacccagcctgaagacggcgtggaaatggatacccgcagtccgcacgacgaggacccgcaggcagtgacttatgccaaagttaagcattcacgacccagacgcgaaatggcttctcccccatcaccgctctctggcgagttcctggataccaaagacagacaggccgaggaagacagacagatggacactgaggctgcagcctccgaagccccccaggatgtcacctacgcccagctgcatagttttacattgcgccagaaggctaccgaacccccaccttcacaggagggggcctctcctgccgaaccgtccgtgtatgctactctggcaatccattag

SEQ ID NO: 193027 - DNA, 1476 bp, synthetic construct
  misc_feature 1..1476: note = Description of Artificial Sequence: Synthetic coding sequence
  source 1..1476: mol_type = other DNA
atgaccctgaccctgagcgtgctgatctgcctgggcctgagcgtgggaccccgaacatgtgtacaggctgggaccttaccaaagccaaccctttgggccgagccagcctctgtgattgcccgcggaaagccagtcactttgtggtgccaaggacctcttgaaaccgaggagtaccgcctggataaggaaggcttgccgtgggctcgaaagcgacagaatcctctggagcctggggcgaaggccaagttccacattccatcaaccgtctacgattcagcaggtcgataccgatgttactatgagacacccgccggttggtctgagcctagcgatccactggagctggtcgctacaggagtctctcggaaacctagcttgttaattccccaggggtctgtagtggcccggggtgggtccctcacactgcagtgcaggtccgacgtaggatacgacatatttgtactctacaaggaaggggaacacgatcttgtgcagggttctggtcagcagccccaggccggcctgtcccaggcgaatttcactctcggccctgtttctagatctcacgggggtcagtacaggtgttacggtgcccacaatctcagtccaaggtggtcggcccctagtgaccctcttgatatcctaatagcagggctgatcccggatatcccagcgttgtctgtccagcctggacctaaggttgcctctggggagaatgtgactttactatgccagtcatggcatcagatcgacacgttcttcttgacgaaagaaggcgcagcacaccccccattgtgcctaaaaagcaagtaccagtcctaccggcaccaggccgagtttagcatgtcacctgtgacgtccgctcaaggtggaacttatagatgctactctgcgattcggagttacccctatctgctcagcagcccttcttaccctcaggaattggtcgttagcgggccttcaggcgatccttccttaagtcccacggggtcaacccctactcccgctggacccgaagatcaaccacttactccgactggcttggacccccaatctggtcttggccggcatctgggagtggtgaccggtgtctcggtggcgttcgtgctgctattgttcctcctgctgtttctgctgctcagacacagacaccaatccaagcacaggacgtccgcgcacttttacaggccagccggagccgctggaccagagcccaaagatcaagggttgcagaagagggcctccccagttgcggacattcaggaagagatcctcaacgcagctgtgaaggacacccaaccaaaggacggcgtcgagatggacgctcgggccgcagcttcagaggcaccccaagacgtcacgtatgcccagcttcatagtttaactttaaggagggaagctaccgagcctcccccttcccaggagcgcgaacccccagccgaaccttctatctacgcaccgctggccatccattag

SEQ ID NO: 193028 - DNA, 1470 bp, synthetic construct
  misc_feature 1..1470: note = Description of Artificial Sequence: Synthetic coding sequence
  source 1..1470: mol_type = other DNA
atgacccccatcgtgaccgtgctgatctgcctgcggctgagcctggggccacggactcacgtgcaggctggtacccttcccaagcctactttatgggcagagccgggtagtgtcattacacagggaagcccggtgacactctggtgccagggcatcctcgaaacacaagagtacaggctttacagggagaagaaaacagccccatggattacaaggatcccacaggagatcgtgaagaaaggccaatttcccatcccaagcattacatgggagcacactggcagatataggtgtttctacggctctcacaccgcaggttggtccgagcctagcgacccattggagcttgtggtgacaggggcttacatcaagccaacgctgagcgctttgccctctccagttgttacaagcggcggtaatgttacactccattgtgtttcacaggttgcctttggatcttttatcttgtgtaaagagggtgaagatgaacacccccagtgcttaaatagtcagcctcgcacccacggatggagccgggcaatcttctctgtgggtccagtcagcccctcaaggagatggtcctaccgctgctacgcctatgatagcaactcacctcatgtgtggagtctgccctccgacttgcttgaactgctagttctcggtgtgtctaaaaagcccagcctgtctgtgcaacccgggcccatcgttgcacctggagagtccttgactctgcagtgtgtatcagacgtttcatacgaccggttcgtcctctacaaggaaggtgagagggactttctccagctgcccggcccccagccgcaagctgggttgtcccaagctaactttaccctgggacccgtgtcgaggtcttatggcggccaatatcgttgttctggagcttacaacctgtcgagcgagtggtccgctccctccgatcctttagatattttgatcgctggccagtttagagggcgaccgttcatctctgttcacccaggacccacagtggcctctggtgaaaatgttacactcctttgccaatcatggggcccttttcacaccttccttctgactaaagccggggccgctgatgccccccttaggctacgcagtattcatgaataccccaagtaccaggcagaattccctatgagtccggttacatcagctcattctggcacttatcggtgctacggtagcctgtcttcgaacccataccttctctcccaccccagtgattccctggagcttatggtgtcgggagcagctgaaaccttgagtcctccccaaaataagtccgattccaaagctggagctgcgaacacactgtccccgtcccaaaacaaaactgcctctcatcctcaggattataccgtcgaaaacttgattcgcatggggatcgctggtctcgtactggtagtgttgggcattttgctgtttgaggcccaacatagtcagagaagcctctag

SEQ ID NO: 193029 - DNA, 1401 bp, synthetic construct
  misc_feature 1..1401: note = Description of Artificial Sequence: Synthetic coding sequence
  source 1..1401: mol_type = other DNA
atgacccccatcctgaccgtgctgatctgcctgggcctgagcctgggcccccggacacacgttcaagccggccacctccctaaacctaccttatgggctgagcccggatccgtgatcattcagggcagccccgttacactgcggtgtcagggttcccttcaagcggaagaatatcacctgtatagagaaaataagtctgcttcttgggtgcggcggatacaggagccaggcaagaacggtcaatttccaattcctagtataacctgggagcatgctggcaggtaccactgtcagtattatagccataaccattcaagtgaatattccgacccactcgagcttgtcgtgactggcgcctactctaaaccaactctcagtgctctgcccagccccgtcgtcacactcggtggaaacgtcactctccaatgcgtgagtcaggtggcttttgatggctttatactgtgcaaggaaggggaggacgaacatccccagcggctgaatagccattcccacgcccggggttggtcttgggccatcttcagcgtgggtcccgtgtccccttcaagacgctggagctaccgatgctacgcttacgacagcaactccccttatgtgtggagcctcccatcagatctacttgagcttctagtgcctggtgtgtcaaagaagccttctttgtcggttcagcctggcccaatggtggcaccgggcgagagccttacgcttcagtgtgtgtccgatgtgggctacgataggtttgtcttgtacaaggagggcgagcgcgatttcctacaacgccctggatggcagccccaagctgggttgagccaggccaactttaccttagggcctgtgtctccttctcacggaggacagtataggtgctatagtgctcataatctaagctccgagtggagtgcaccctcggatcccttagacattctcatcacaggacagttttatgataggccatctctcagcgtgcaaccagtcccaacagtagcacccggcaagaatgtaaccctgctctgccagagtcgggggcagtttcacaccttcctcctcacaaaagagggggctgggcacccacctctgcacctgaggagcgagcatcaggcccagcaaaaccaggcagaatttagaatgggccccgtgacgtccgctcacgtgggcacctaccgctgctattcatcactctctagcaacccctaccttctgtcccttccatcagacccgttggagctggtcgtgtctgccagtttgggccagcatccacaggattatacagtagagaatctgatcagaatgggcgtagcaggcctggtcttagttgttttaggtatcctattattcgaggcccaacacagccagagatcattgcaggatgctgctgggcgctag

SEQ ID NO: 193030 - DNA, 1452 bp, synthetic construct
  misc_feature 1..1452: note = Description of Artificial Sequence: Synthetic coding sequence
  source 1..1452: mol_type = other DNA
atgacccccatcctgaccgtgctgatctgcctgggcctgagcctgggccccaggacccatgtccaggcagggcatctgcccaagcccaccctgtgggcggagcccgggagcgtgattattcaaggatctcctgtcacactgcggtgccaggggagtctccaggctgaagagtaccacctgtatcgcgagaacaagtcggcttcctgggtaaggagaatccaggaaccaggtaagaacggccagttccctataccatctatcacttgggaacatgccggacggtaccactgccaatactatagccataatcacagttcggaatacagcgaccctctggaacttgttgtcacgggggcctatagcaaaccaacattgtctgcattaccttcacctgtcgtaactctcggcggcaatgtcaccctccaatgcgtttcgcaggtggccttcgacggatttattctttgcaaggagggagaagatgaacaccctcaaaggctaaactcccacagtcacgcacgtggatggagttgggccatcttcagcgtgggacctgtttcgcctagtaggaggtggtcttataggtgctatgcttacgattccaactcaccttatgtctggagcctaccttctgatttgctggaactcctggtgccaggcgtctcgaagaagccttccctaagcgttcagcctggcccaatggtcgcccctggcgagagtttgactctgcagtgcgtgagcgacgtcggttatgatcgtttcgtgctgtacaaggagggggagagagatttcctgcaacgccccggctggcagccccaagccggactgagtcaggccaatttcaccctgggacctgtgtctcccagccacggtgggcagtaccgatgctactccgcgcacaatctgtccagtgagtggtctgccccctccgaccctctggatatcttgatcaccggccagttttatgatcggccctctctgagtgtccaaccagtgccaacggtggcccctggcaagaacgttacattgctctgccaaagccgagggcagttccacactttcttgcttactaaggaaggggcaggacacccacctttacacctgagaagcgagcaccaagcccaacagaaccaggctgagttcagaatggggcccgtcacttccgcccacgttggcacatatcgctgttactcctcgctttcgtctaatccttacctattgtctctcccttcagaccccttggaactcgtggtttcagaagcagcagagactctctctccttcgcagaacaagacagatagtacaaccactagtcttggacaacatccccaagactacactgttgagaatcttatccggatgggcgtggcaggcctggtgttggttgtattaggcatcctgttgtttgaagcccaacactcccagaggagtctgcaggatgccgctgggcgttag

SEQ ID NO: 193031 - DNA, 1452 bp, synthetic construct
  misc_feature 1..1452: note = Description of Artificial Sequence: Synthetic coding sequence
  source 1..1452: mol_type = other DNA
atgacccccatcctgaccgtgctgatctgcctgggcctgagcctggggcccagaacacatgtgcaggccggacacttaccgaagcctaccttatgggctgagcctgggagtgtgatcatccagggctccccagttaccttacgctgccagggctctctgcaggcagaggagtaccatctctacagagagaataagtctgcctcttgggtgagacggatccaagaaccaggaaaaaacgggcagttccctattccatctatcacttgggaacatgcaggccgctatcactgccaatactattcacacaatcactcaagtgaatatagtgatccactggaattagtcgtgaccggtgcgtacagcaaaccaacattgtcagccctgccaagtcccgtagtgactttgggtgggaatgtcactcttcagtgcgtgagccaggtggccttcgacggttttatcttatgtaaagaaggcgaggatgaacatcctcagagattgaattctcattcccacgcccgagggtggtcatgggccattttctcagtcggtcctgtcagcccatcccggaggtggtcctacaggtgctatgcatacgatagcaactcaccttatgtttggtccctccccagcgacctcctggagctgttggtcccaggggtttctaagaagccaagcctgtcagtccaaccagggcctatggttgcccctggcgagtcactgactctccagtgcgtgtccgatgtgggctatgataggttcgtgctctacaaggagggagagcgggattttttgcagcgcccgggttggcagccccaggccgggctatcccaagccaacttcacactggggcccgtctcaccatcacatggggggcagtacagatgctattcagctcataacctatcttccgaatggtctgcaccttccgatccactagacatcttgattacagggcagttctacgacagaccatctttatctgtccagccagtccctactgtggctccgggcaagaacgttaccctgctctgccagagccggggtcagttccatacatttctcctgacgaaggagggagctggacatccacctctgcaccttaggtccgagcaccaggcccagcaaaatcaggctgagtttagaatgggcccagtgacaagcgcccacgtgggaacctatcgctgctattcgtcgctgagctcaaacccataccttctgtccttgccgagcgatccccttgagttagtggtgtctgaagctgccgagaccctgtctccctctcagaataaaactgactccaccacaacgagtctgggccagcaccctcaggattacactgtggaaaacttgataaggatgggagtcgctggcttggtgctggtggtgctgggtatactcttgttcgaagcacagcattcacagcgaagcttgcaggacgctgccggccggtag

SEQ ID NO: 193032 - DNA, 984 bp, synthetic construct
  misc_feature 1..984: note = Description of Artificial Sequence: Synthetic coding sequence
  source 1..984: mol_type = other DNA
atgacccccatcctgaccgtgctgatctgcctgggcctgagcctgggcccccggacccacgtgcaggccggacacttgcccaagccaacactgtgggccgagcccgggtcagtgatcatccagggttctccggttaccctgcgatgtcagggtagtctgcaggctgaagagtaccacctctacagagagaacaagtcggcttcctgggtgcgcaggatccaggagccaggaaaaaacggacaattcccgataccaagcatcacatgggagcacgctgggcggtatcactgccagtattatagccacaaccacagctcagagtactctgatccccttgagctggttgtgaccggggcttactcaaagcctacgttgtccgcgctgccttccccagttgtcaccctaggagggaatgttaccctccaatgcgtcagccaagtagccttcgatggctttatattatgcaaggagggcgaagacgaacaccctcagcggcttaattcacatagtcacgcccgcggctggagctgggctattttttccgtaggtcccgtaagcccgtcccggcgctggtcttatagatgttacgcatatgatagcaatagtccctatgtctggtcactgcctagcgatctgctcgagctgttagtccctggcgtcagcaaaaaaccaagcttgagtgtgcaaccagggcccatggtggcccctggtgagagcctgacactgcaatgtgtctcagacgtgggttatgatagattcgttctctacaaggagggggaacgcgattttctgcagagacctggctggcaaccacaagcaggcctatcacaggctaacttcacactggggcctgtctccccctcacatgggggccaatataggtgttattccgctcacaacctatcatcggaatggtccgcaccatccgatcccctagacatcctcatcaccggacaattttatgacaggcccagtctcagttag

SEQ ID NO: 193033 - DNA, 1320 bp, synthetic construct
  misc_feature 1..1320: note = Description of Artificial Sequence: Synthetic coding sequence
  source 1..1320: mol_type = other DNA
atgacccccatcctgaccgtgctgatctgcctgggcctgagcctggatccacgaacacacgttcaagcaggtccactgcctaagcccaccctgtgggccgaaccgggttcagttatcactcaggggagcccagtgacactccgatgtcaggggtcactcgaaacccaggaataccatctgtatcgggagaaaaagaccgccctctggatcacccgaataccccaagaactcgtgaagaaggggcaattccccatcctcagcattacttgggaacatgctggcagatattgctgtatttatggatcccatacggcaggtctttcagaaagtagcgatcctttggaactcgtcgtcaccggcgcctactctaagccaaccctgagcgccctcccctcccccgtggtgacaagcggcgggaatgtaacaattcagtgcgattcccaggttgctttcgatggattcatactgtgcaaagaaggtgaggacgaacaccctcagtgcctgaattcccactcacacgcacggggcagctcccgagccattttttctgtgggtccggttagccctagcagaagatggtcctatcggtgttacggctatgacagccgggccccttacgtgtggtccctgccctccgacttgctgggcctgcttgtgcccggggtctcaaagaagccttcactgtcagtgcagcccggaccagtggtggccccaggagaaaagctcacattccagtgtggctccgatgctggatacgaccggttcgtactctataaggagtggggccgggattttttacaaaggccgggcaggcagcctcaggctggtttgtctcaggccaacttcacgttggggccagttagtcgaagctacggcgggcagtacacgtgctctggtgcctataacctgagctctgagtggtccgctccgtcagatcctctcgatatactaattacagggcaaattcgcgctagacccttcctgtctgttcggccgggacctactgtggcctcgggtgagaatgtcacactgctctgccaatcccaaggaggcatgcatacgttcctgttaaccaaagagggtgccgccgattcaccactgcgcttgaaatcgaagcggcagagccataagtatcaggctgagttccctatgagccctgtcacttcggctcacgcagggacataccggtgctacggatcactgtcctccaacccctatctgctgacgcatccgagcgaccctctcgagctcgtcgtgtcaggggcagccgaaacactgagcccaccccaaaacaagtccgactccaaagccggcgaatag

SEQ ID NO: 193034 - DNA, 1371 bp, synthetic construct
  misc_feature 1..1371: note = Description of Artificial Sequence: Synthetic coding sequence
  source 1..1371: mol_type = other DNA
atgcaccggggcctgatccacccccagagcagcgccgtgggcggcgacgccatgaccccaatcttaacagtattgatttgcctcgggttatcactggaccctcggacccacgtgcaggcagggccattgcccaaaccaacactgtgggcagagcctgggtcagttatcacccaggggagccctgtgacactgcgatgtcaggggagcctcgagacacaggagtatcacttgtatcgggagaaaaaaacagcactctggattactagaatcccccaggagctggtaaaaaaaggtcagttcccaattctgagtatcacctgggagcatgccggccggtattgttgcatatatgggtcacacaccgccggtctgtcggagagttcagacccactggaactcgtggtgacaggtgcctattccaaacctacactgagcgccctgccaagtccagtggtgacgtctggcggcaatgtcaccatacaatgtgactcacaagtggcattcgatggctttatactatgcaaagagggcgaggacgagcacccacagtgtcttaattcccatagccacgccaggggaagttcaagggctattttcagtgttggtccagtgagcccgtcccggcgttggtcatatagatgctacgggtacgattcccgtgcaccatacgtgtggtccctgcccagtgaccttttgggattgctggtaccaggagtttccaaaaagcctagtttaagcgtccaaccaggacccgtcgttgcacccggagaaaaactgacatttcaatgtgggtccgatgccggctatgacaggtttgtactgtacaaggaatggggcagggacttcttgcagagacctggccgccaaccccaggctgggttatcacaggcaaactttaccctgggccccgtgtcgcggtcatatggcggtcaatacacctgctccggcgcctataatctgagctctgaatggagcgcaccttcggaccctctggatatactgatcactgggcagatacgtgcccgcccgttcctgtccgtacgaccaggcccgacggtagccagtggggagaatgttactcttttgtgtcagtctcaagggggtatgcatacgttccttctcactaaggaaggagccgccgacagtccgttgcgcctgaaaagtaaaaggcaatctcacaaatatcaggcggagtttccaatgtcacctgtgacatccgcccatgccggtacatatcgttgttacgggtcgctttctagcaatccctatctcctcactcacccctcggatccactggagcttgtcgtctctggcgctgccgagacgctgtcaccaccgcagaataaaagcgattctaaggccggagagtag

SEQ ID NO: 193035 - DNA, 1959 bp, synthetic construct
  misc_feature 1..1959: note = Description of Artificial Sequence: Synthetic coding sequence
  source 1..1959: mol_type = other DNA
atgacccccatcctgaccgtgctgatctgcctgggcctgagcctgggaccccgtacgcatgtccaggctggccacctgcccaaacctacgctatgggctgagccgggctctgttattactcaggggtctcccgtcaccctgagatgtcagggcggtcaggaaacacaagagtatcgtctgtatcgggagaaaaagaccgccttatggatcactaggattccccaggaactggttaagaagggccaattcccgattccttcaatcacctgggaacacgcaggccgttaccgctgttactacggcagcgacacagccggccgaagcgaatcttctgacccactggagctggtggtaaccggcgcgtacatcaaacctacgctgagcgcacaacctagccccgttgtgaattcaggcggcaatgtcatcctgcaatgcgattcccaggtggcctttgatggcttcagcttatgcaaagaaggcgaagatgagcatccccagtgtctgaattcgcaacctcacgctagagggtctagtagagccatcttctcagtgggacccgtgtcgccgtcgcggaggtggtggtaccggtgttatgcatacgattcaaactcgccctatgagtggtcgctaccctccgatttgctggaactcctggtgctgggggtgagcaagaaaccctcactgtcagtgcaacctggccctatcgtcgcccctgaagagactctgactctgcagtgcggtagcgatgcgggctataaccggtttgtgctgtacaaagacggcgaaagagactttctccagctcgccggcgctcaaccacaagccggactctcccaggcaaacttcacactcggccctgtgtctaggtcgtatggtggacagtacagatgctacggtgcacacaacttaagtagcgaatggtctgccccctcagaccccttggacatcttaatagcgggacagttttacgatcgtgtttctctctccgttcagccagggccaacagtcgcatctggagaaaacgtcaccctgttgtgccagtctcaagggtggatgcaaacatttctgttaaccaaggaaggggctgccgacgatccctggaggctgagatccacctaccagtctcagaaataccaggccgagttcccaatgggacctgtgaccagcgcccacgctggaacgtatcggtgttatggttctcagtcctccaaaccgtacctccttacccacccaagtgaccctctcgaattagtggtctcgggcccatctggcggacctagcagtcccaccactgggcctacatcaacctctgcaggtccagaagaccagcctctcacccccacgggatccgacccccagagcggtctgggtagacatttgggggtggttatcggcatcctggtagcggttattttgctgctgctgctgctgctccttctgtttttaattctgaggcacagacgtcagggcaaacattggaccagcacgcagcgtaaggcagacttccagcatcctgcaggcgctgttggcccagaacccacggaccggggacttcagtggaggtcctccccagcagccgacgctcaggaggagaatctctacgcagccgtcaaacacacccagcccgaggatggggtggaaatggatacgcgtcagagcccacacgacgaggacccccaagcggtcacctatgccgaagtcaagcacagccgacccagaagagagatggcttcacctccctccccgttatccggagaattcctcgacacaaaggatcggcaggcagaagaggatcgccagatggacaccgaggctgccgcaagcgaggctccacaggatgtgacctatgctcagctccactccttgactctcagacgcgaggccactgaacctcctccttctcaggaaggcccctctccggccgtgccgtcaatatacgcgacactagccatacactag

SEQ ID NO: 193036 - DNA, 1953 bp, synthetic construct
  misc_feature 1..1953: note = Description of Artificial Sequence: Synthetic coding sequence
  source 1..1953: mol_type = other DNA
atgacccccatcctgaccgtgctgatctgcctgggcctgagcctgggccctaggacacacgttcaggctggccacctgcccaaaccgacactgtgggccgagccaggatcggtcatcacacaggggagccctgtcacgttgcgatgccaaggtggtcaggagacacaggagtatagactgtatcgtgagaaaaagaccgctctgtggattacgaggatccctcaggagctagtaaagaaaggacagttccccattccaagcatcacttgggaacatgcagggcgctaccgctgttactatggatccgacacagccggccgaagtgagagcagcgaccccttggagctcgtcgtcacaggagcttacattaaacccaccttaagtgcgcagccttccccagtggtcaactcaggagggaacgttatcctccaatgcgattcacaggttgcattcgatgggttctccctatgtaaggaaggtgaggatgagcatccgcagtgtctcaattctcagccacacgcaagaggcagctcaagagccattttttctgtaggccctgtcagtcctagccgtcggtggtggtaccgttgctatgcctatgattctaattccccttatgagtggtctctccccagtgacctgctggagttgctggtcctgggggtgagtaagaagccttctctgagtgtccagcctggacccatcgtcgccccagaagagaccctgacccttcaatgtggatccgacgctggctataatcggttcgtgctttataaagacggagagagagatttcctccagctcgcgggcgcccagccacaggctggcctgtcacaggctaattttacattggggcccgtttcccggtcttacggaggccaatatagatgctatggtgctcacaatctatcaagtgagtggagcgcccctagtgacccactggatatcttgatcgcgggtcaattttacgacagggtgagtctcagcgtgcaaccaggtcctacggtggcttccggggaaaacgtaactctgctgtgtcagtcccagggctggatgcaaactttcctcctgacgaaggaaggcgccgccgacgatccatggaggcttaggtctacttaccagagccagaagtatcaggccgagtttccaatgggcccagtgacgagcgcccatgccgggacctaccgctgctacggaagtcagtcctctaaaccttatttgctgacacatccctccgatccgctggagttggtggtcagcggtcctagcgggggcccttctagtcccactacaggacccacttccacatcggggcccgaagatcaaccccttacaccaactggcagtgatccgcagtctggactgggtcgccacttgggtgtcgtgattggcatcctggtggcagtcatcctgctgctgctgttattacttctcttgttcctgatcttgaggcacagaagacagggtaagcactggacaagcacccagagaaaagcagactttcagcaccctgcaggcgcagtggggccggagcccaccgacagggggttgcagtggagaagttcacccgcagctgatgcgcaagaggagaatctatatgctgcagtgaagcacactcagcccgaagatggggttgagatggatacaaggagcccccacgatgaggacccccaggccgtaacctacgctgaggtcaagcactctaggccccgaagagagatggcctctcccccgtctccacttagcggcgagttcctggataccaaagatcgccaggctgaagaagaccgtcaaatggataccgaagctgctgcatcagaggccccccaagacgtcacctatgctcagctccactccctgactctgaggagggaggccacagagcctccccccagtcaggaaggacccagccccgctgttccttccatctatgctactctcgccatccactag

SEQ ID NO: 193037 - DNA, 1953 bp, synthetic construct
  misc_feature 1..1953: note = Description of Artificial Sequence: Synthetic coding sequence
  source 1..1953: mol_type = other DNA
atgacccccatcctgaccgtgctgatctgcctgggcctgagcctgggcccacgaacgcacgtgcaggctgggcacctgcccaaaccgaccctctgggccgaaccagggtctgtaatcacccaggggtctcctgtcacattacgatgccagggggggcaagagacccaggaatatcgtctttatcgagaaaagaagactgctctttggatcaccaggattccgcaagagctggtgaagaagggccaatttcccattccctctataacatgggagcacgcagggcgctaccgttgctactatgggtccgataccgccggaaggtccgaatcctccgacccactggagctcgtggtgaccggagcatacattaagccaacgctgagtgcgcagccttcaccagtagttaatagcggaggaaatgtcatcctccaatgtgatagccaggtggcctttgacggcttttccctgtgcaaagaaggcgaagatgagcatccccaatgtctgaatagtcagccacacgcaagagggtcaagcagggcaatcttttctgtgggacccgtgtcccctagcaggaggtggtggtaccggtgttatgcctacgactcaaattccccttacgaatggtccctgccttccgatctgcttgagttgctcgtgctaggggtgagcaaaaaaccaagtctttctgtgcagccaggtcctattgtcgcccctgaggaaaccctcacccttcaatgcggctctgatgctgggtacaataggtttgttttgtacaaggatggggagcgggactttttacagttggctggagctcagccccaggctggcctgagtcaggctaatttcacactggggccggtgtccagatcatacggaggccagtaccggtgctatggggcccataatctttcaagcgaatggagcgcgccctcggacccgcttgacattctgattgcaggccagttttacgatagggtcagcctttccgttcagcccggccccaccgtagccagtggagaaaatgttaccctgttatgtcagtctcagggctggatgcagacctttttgttgactaaggagggcgctgcagatgatccctggcgcctgcgtagcacttaccagtcgcagaagtaccaggcggaattccctatgggccccgttacgtctgcgcacgccggtacttataggtgctatgggagccaatctagcaagccctacctcttaacacacccctctgacccgttggaattggtggtttcaggtcctagcggcggcccgtcctccccgaccacaggaccaacatctaccagtggcccagaagaccagcccctgactccaaccgggagcgatccccagagtggtcttggcagacacttaggagtagtgattggaatcttggtggctgtgattcttctgcttttgctcctgcttttactctttttgattctgaggcacagacgccagggcaaacactggacaagtacacagcgaaaggcagacttccagcatcctgccggagccgtgggaccggaaccgactgatcgtggactccagtggagaagttctccagcagctgatgcgcaggaagaaaacctctacgccgctgttaagcatacccagcctgaggatggagttgaaatggatacgaggtcaccgcacgacgaggacccccaggccgttacttacgccgaagtgaaacactcacggcccagacgcgaaatggccagccccccatcccccctgtctggtgagttcctggacactaaggacaggcaggctgaggaggataggcagatggataccgaggcggctgcatcggaagcccctcaggatgtcacctatgcccagctccattcactcacactgcgcagggaggctaccgagccccccccctcccaagaaggcccaagcccagcggtgccttctatttacgcaacactcgcaattcattag

SEQ ID NO: 193038 - DNA, 1905 bp, synthetic construct
  misc_feature 1..1905: note = Description of Artificial Sequence: Synthetic coding sequence
  source 1..1905: mol_type = other DNA
atgacccccatcctgaccgtgctgatctgcctgggcctgagcctggggccccggacacatgtgcaggcaggccacctacctaaacctacattgtgggctgaacctggctcagttatcacccaggggtcaccagtcactttaagatgtcagggaggacaggagactcaggaataccgcttatatcgagaaaaaaagaccgcgctttggattactcgcattccgcaggagctggtcaagaaagggcaattcccaataccaagcattacttgggagcatgccgggcgctacaggtgttactacggaagtgacacggctggtagatcagagtccagcgatccactggagctagtggtcacgggggcctatatcaagcccaccctgagcgcccagccttcacctgtagtgaactcaggaggaaatgtcattctgcagtgtgactctcaggtggcctttgatggtttcagtttgtgtaaggagggagaggacgagcatccgcagtgcctgaatagtcaaccgcacgccagagggtcgagccgggccatcttctctgttggaccagtgagtcctagtaggcgttggtggtatagatgctacgcctatgattccaactccccttacgagtggtcattacccagtgacttactggagttgttagtgctgggggtgagcaagaaaccttctctgagcgtgcagcctggcccgattgtggcacccgaggaaaccctcaccctacaatgtggatcagacgccgggtacaaccgtttcgtgctgtataaagatggcgagcgagatttcctacagctggcaggggcgcaaccgcaggccggtctctcccaggctaattttactcttggcccagtctctcgtagctatggagggcagtataggtgttatggtgcacataatctgagtagtgaatggtccgcacccagcgacccgctggatatcctaattgcaggacagttctatgaccgcgtgagcctgagtgtgcaacccgggccgaccgttgcttctggggaaaacgtgacactactctgccagagtcaggggtggatgcagactttcctcctgaccaaggagggagccgcagatgacccctggcggctgagatcaacatatcagtctcaaaaataccaggccgagttccccatgggccccgtgacatccgcccacgcaggtacatatcgctgctacggctcacagtcgagcaagccctacctgctcacccacccctctgatccgctggaactggttgtgagtgctgggcccgaagaccagccacttacaccaacaggctctgatccccagtcggggttaggccgccatcttggtgtagtgattgggatcctggtagccgtcattcttctgctgctcctgttattgctgcttttcctgattctgaggcacaggagacagggcaagcactggaccagcacccagaggaaagccgattttcaacaccctgccggggctgtcggacccgagcccacggaccggggattgcaatggagatcatcccctgccgcggatgcccaggaagagaacctctacgctgcagtaaaacacactcagccggaagacggtgtcgaaatggacacgcggagtccccatgacgaggatcctcaggccgttacctacgcagaagtgaaacattccaggccgcgaagggagatggcgtctccaccaagcccactatctggcgaatttttggacaccaaggaccgacaggccgaagaagaccgtcagatggacaccgaagctgctgcaagtgaggccccgcaggatgtgacctatgcccagctgcactctttgaccctgagacgggaagcaaccgagcctcccccatctcaagagggaccctctcccgctgtgccgagtatttacgcaacgttagctattcactag

SEQ ID NO: 193039 - DNA, 1953 bp, synthetic construct
  misc_feature 1..1953: note = Description of Artificial Sequence: Synthetic coding sequence
  source 1..1953: mol_type = other DNA
atgacccccatcctgaccgtgctgatctgcctgggcctgagcctgggtcctcgaacccatgtgcaagcagggcatctcccaaaacctacactctgggcagagccagggtccgtgattactcaaggctcccctgtgacattaagatgtcaaggtgggcaagagactcaggagtaccgtctttaccgtgagaagaagaccgccctgtggataacgaggattccccaagagcttgtcaaaaaggggcagttccctatcccgtcaattacttgggagcacgccgggagatatcggtgttactatggctctgatactgccgggcgctctgagtcctccgatccactggagctggtggtgacaggagcttacatcaagcctaccctgagtgctcagccttcacccgtggtcaactctggtggcaacgtcatactacagtgcgactcccaggttgccttcgacggattttccctgtgtaaggagggagaggacgagcaccctcaatgtttgaatagccaaccacacgctcgcggttccagccgcgccattttctcagtgggcccagtcagtccatcccgcaggtggtggtacagatgttacgcctacgacagtaattcgccttatgaatggagcctgccttccgacctacttgagcttctcgttctgggcgtgtctaagaaacccagcttatcggtgcagccagggccaatagtagctccagaagaaaccctgaccctgcagtgcggtagtgatgctggatataataggttcgtactatacaaggacggggagcgagattttctccagcttgcaggggcccagccccaggccggccttagtcaggctaacttcaccctcgggcctgtatccaggtcctacgggggtcaatacaggtgctatggggcacataacctgagctctgagtggtcggccccttctgatcccctcgacatccttatcgcaggccagttctatgatagagtctccctgtccgtacaaccgggccccactgtggcatcgggtgaaaatgtgaccttgctgtgtcagtctcagggttggatgcagacttttctgttgaccaaagagggagccgccgacgacccctggcggctgcgatcaacctaccagagtcagaagtatcaggcagagttccctatggggccggttacctcggcacatgcgggtacttaccggtgctacggtagtcagtcctccaaaccctacttgctgacccacccgagtgaccctctggagttggtcgtgtccggcccctccggggggccaagctccccgacgaccgggccaacatctacatcaggcccggaggaccaaccactgaccccaaccgggtcggacccccagtccggcctgggtcgccatctgggcgtggtcattgggatactagttgccgtcatcctgcttctgctgttgttgctgctgctgttccttattcttcgccatcgcagacaaggaaagcactggaccagcactcagcgaaaggccgacttccagcatcctgctggcgccgtcggcccagagccaacagatagagggttacagtggcgtagctcccccgcggcagatgcccaagaagagaacctgtatgctgctgttaaacatacacagcccgaggacggggtcgagatggacaccagaagccctcacgacgaagatcctcaagccgttacatatgccgaggtcaaacactcccgtcctcggcgtgagatggccagccctccctctccactatcaggtgaattcctggacacaaaggatagacaggccgaagaagaccggcaaatggacacagaggctgccgcatctgaggccccccaggacgtcacgtacgctcagctgcactccctcactttacggcgggaggctaccgagcccccccccagccaggaaggtccttccccagctgtgccctcaatttacgcgaccttggctattcactag

SEQ ID NO: 193040 - DNA, 1533 bp, synthetic construct
  misc_feature 1..1533: note = Description of Artificial Sequence: Synthetic coding sequence
  source 1..1533: mol_type = other DNA
atgacccccatcctgaccgtgctgatctgcctgggcctgagcctggggccacgaacacatgtgcaggcgggacatctccccaaacccacactgtgggcagagccgggctctgtaatcacacagggcagcccagtgaccctgagatgccaggggggccaggaaacgcaggagtaccgactgtatagggaaaaaaaaactgccctctggatcacgaggataccccaagaacttgtgaagaagggccagtttccaatcccttctataacctgggagcacgctggtagatatagatgttattatggttcagataccgccggccggtctgagtcgagcgacccattagagctcgtggtaactggagcttatataaaacctaccctctcggcccagcctagtcccgtagtgaattccgggggtaacgtcatcctgcaatgcgactctcaggttgcgtttgacggattctcgctctgtaaagaaggagaagatgagcacccacaatgcctgaattcacagcctcatgcaagaggatccagtagggctatcttctcagttgggcctgtgtcacctagcagaaggtggtggtaccggtgctacgcatacgatagcaatagtccttatgaatggagtctaccctccgacctactggagctccttgtgctaggagtgagcaaaaagccttcccttagcgtccagccaggccctatcgtggcccctgaagaaacactcacacttcaatgcggttccgacgcaggatacaaccgcttcgttctgtataaggacggggagagagactttcttcaattggcgggcgcacagccacaagccggcctctcccaggcaaacttcacgctaggcccagtgtctcgctcatatgggggacaataccggtgctacggggcgcacaatctctccagcgaatggagcgctccctctgatccattggacatcctgatagccggccagttttatgaccgggtatcacttagcgtacagcccgggcctaccgtcgccagcggggagaatgttacactgctgtgccagtcccagggatggatgcaaaccttcttgttgacaaaagagggagcagcggatgatccctggcggttgcgctcgacctaccaatcgcagaaatatcaagccgagttccccatgggcccagtgacgagcgctcacgccggcacctaccgctgctacggctcccagagttccaagccttatctcttgacccacccctctgatccgctggagctcgtcgtcagtgggccatcaggaggcccatctagccctactaccgggcctacaagcacttctggacctgaggaccaacctctcacccctacaggatccgatccgcagtctggattgggaagacatctgggcgttgtcattgggatcctcgtcgccgtcatacttctgctgctcctgctgctcctcctttttttgatcctgcgccaccgccgccagggcaagcattggacctcttctccagcacagctgccaatgcctagaaagaaaacctccatgctcccatag

SEQ ID NO: 193041 - DNA, 1797 bp, synthetic construct
  misc_feature 1..1797: note = Description of Artificial Sequence: Synthetic coding sequence
  source 1..1797: mol_type = other DNA
atgacccccatcgtgaccgtgctgatctgcctgggcctgagcctgggcccccggacccatgtgcagacaggtacaattcccaagcctaccctctgggcggagcccgacagcgtgattacacaaggtagccctgtcacactgtcctgtcagggcagtttagaggctcaggagtatcggctttacagagagaaaaagagcgctagttggataacccggatcaggcctgagctggtgaaaaatggtcagttccacatccccagtatcacatgggaacacacagggaggtatgggtgccaatattacagtcgcgcgcgctggtctgagcttagcgaccccctcgtgctggttatgacaggggcttaccctaagcccacgttatctgctcagccctctcctgtagtgacgtcaggaggtcgggtgaccctgcaatgcgagtcccaggtggcatttggcggtttcatcttgtgcaaggagggagaggaagagcatcctcagtgcctcaactcacaaccccatgcacgggggtcttctagggcaatcttctcagtgggacctgtcagtccaaatcggcgctggtcccaccgctgttacggctatgatttgaactcaccctatgtgtggagctccccttcagacctgttagagctccttgtgccaggcgtcagcaaaaagccatcactgtcggttcagccgggtccagttgtagctccgggggagtcattgacactacagtgcgtgtccgacgtgggttacgaccggttcgtattgtacaaagaaggcgagcgcgacctgcgacagctacccggaaggcagccccaagctggcttgagtcaagccaatttcacactgggtccggtatccaggtcctacggagggcagtataggtgttacggcgcacataacctgagctctgaatgcagtgctccctctgaccccctggacattctgataacaggccaaatccgcggcacgccgttcattagtgtgcagcctggccctaccgttgccagcggcgagaatgttacccttctctgtcagagctggaggcagtttcatacatttctccttacaaaagcgggcgcagctgatgcgccactgagattgaggtccatccacgaataccctaaatatcaggcggaatttccaatgagtcctgtgactagtgcacatgctggcacataccggtgctatggctctctcaacagcgacccttatctcctatctcatccatccgagccactggaacttgtagtgtccggccccagcatgggctccagcccccctcctacaggacccataagtacgccggcagggcccgaggatcagccccttactcctacaggttcggacccacaatcggggttgggcagacatctgggagtggtgatcggcatcctagttgccgtggtactcctcctgctgttgttattgttattattcttgattcttcgacaccgccggcaggggaaacactggacctcaacacagagaaaggcagactttcaacaccctgcgggcgcagtcggaccagagcccacggaccgaggcctccagtggcgttctagccccgccgctgacgcgcaagaggagaatctctatgccgctgtcaaggacacccagcctgaggatggtgtcgaaatggataccagagctgctgccagcgaagccccccaggacgtcacctacgcccagttacactcattaaccttgagacgcaaggccaccgagcccccgccaagtcaagagagggaaccccccgctgaaccgtccatctacgccacactggccatccactag

SEQ ID NO: 193042 - DNA, 1449 bp, synthetic construct
  misc_feature 1..1449: note = Description of Artificial Sequence: Synthetic coding sequence
  source 1..1449: mol_type = other DNA
atgaccggcgcctaccccaagcccaccctgagcgcccagcccagcccagtcgtgacttctggtggcagggtcacactgcagtgtgaatctcaggtggccttcggaggatttatcttatgtaaggagggggaagaagaacatccccaatgtctcaattctcagccccacgcaaggggaagtagccgcgcaatattttctgtgggacctgtgtctcccaatagaagatggtctcaccggtgttatggatatgatctgaactctccatacgtctggtcctcacctagcgatctgctggaattgttggtacctggagtgagtaagaaaccatcactgtcagtgcagccgggtcctgtggtggctccaggtgaatccctgactctgcagtgtgtatcggacgtcggttacgatcgcttcgttctgtacaaagagggtgagcgggacctccggcagctgcccggccgacaaccacaggcaggcctgtctcaggccaacttcactttaggacctgtctctcgaagctacggaggccagtaccgctgttatggtgcccacaatctctcaagcgaatgtagcgctccatccgatcccttagatatcttgattacgggacagatcagagggactccatttattagtgtacaaccaggcccaaccgttgcaagtggcgaaaacgttacacttctgtgccaatcttggagacaattccatacattcctacttacaaaggcgggagctgctgatgctcccctgcggttaagaagcatccatgagtacccaaaatatcaggctgaattccccatgtctcccgtgaccagtgcacacgccggcacttaccgttgctacggatctctgaactctgacccttatctgttgtcacacccctcagagccactcgaacttgtcgtgtctgggccttccatgggaagctctcctccaccgactggcccaattagtactcctgcaggtccagaggaccagccgcttacccctacaggatctgaccctcagagtggtctgggtcgtcacttgggcgttgtgatcggcatccttgtggcggtcgtgctgctcctgctcctgctgcttctactcttcctgattctgagacatcgaagacaaggcaaacattggacaagcacccagcgtaaggccgactttcagcaccctgcaggcgccgtggggccagaacccacagatcggggactccaatggcgatcctctccagccgccgacgcgcaagaggagaatctttatgccgccgtaaaagacacacagccagaggatggcgttgaaatggatacaagggctgccgcttccgaagcccctcaggatgtaacgtatgcccaactgcatagcctgaccctgcggcgaaaggctactgagcccccgccctcacaggagcgagaaccaccagcggaaccctcgatttacgcaacattagccattcactag

SEQ ID NO: 193043 - DNA, 1932 bp, synthetic construct
  misc_feature 1..1932: note = Description of Artificial Sequence: Synthetic coding sequence
  source 1..1932: mol_type = other DNA
atgacccccgccctgaccgccctgctgtgcctgggcctgagcctggggccgagaactagagtgcaggccggcccctttcctaagccgacactgtgggcggaaccgggttcagtgatctcctggggctcccccgtgacgatatggtgccagggcagtcaggaggcacaggagtaccgtctgcacaaggaggggtctccagagcctctagacaggaataacccccttgaacccaagaataaggcacgcttcagtattccgagtatgaccgaacaccatgccggccgctacagatgccactattattcttctgcaggttggagcgagcccagtgacccgctcgagatggtcatgaccggagcctattccaagcccaccttgagcgccctgcctagcccagtggtggcctcaggaggcaatatgaccttacgatgtgggtcccaaaagggctatcatcacttcgtgttaatgaaggaaggggagcatcagctcccccgcacgctggattcacagcagttacacagccgcgggttccaggctttgtttccagtcggccctgtgactccctctcacagatggagattcacttgctattattactatacgaacactccgtgggtctggtctcatccttccgaccctcttgaaatattaccttcaggtgtgtctcgaaagcctagcctgctgacgctgcagggaccggttctggccccagggcagagtctgacactccagtgcggaagcgacgtgggatacaatcggttcgtgctgtataaggaaggggagagggatttcctccagcgtcctgggcagcagccacaggcaggtctgtcacaggctaattttactctgggcccagtttccccttctaatggaggccagtatcgatgctatggtgctcacaatctatccagtgaatggagtgcccctagcgatcccctgaatattcttatggcaggacaaatttatgacacggtcagcttgtcggcccagcctggacctacagtcgcttccggagaaaacgttactctcctgtgtcagtcctggtggcaattcgatacttttctgcttaccaaggaaggtgcggcccacccccctctgaggctcaggtcgatgtatggggcacacaagtatcaagcagagttcccaatgagtccagtgacctccgctcacgcggggacctacaggtgttacggctcttacagctcaaatccccacttgctaagccatccatcggagcccctggagttagttgtgagcgggccagaagatcagcctcttaaccctccgggctccgggcctcaaaatccgccagggttaggttctggcgccggaacgcgggccgccggcctcggccgctacctcgaggtgctgataggggttagcgtggcattcgtcctgctactcttccttctgctgtttttactgcttcggaggcaaaggcactccaaacaccgtacttctgaccaaagaaagactgattttcaacgtcccgctggagcagctgagacggagccaaaggatagggggctgctacgaaggtcctcacccgcagccgacgtgcaggaagagaatctgtatgcagctgtgaaagatacgcagtccgaagaccgggtggaactcgattcccagtccccacacgacgaggatcctcaggccgtgacctatgccccggttaagcacagctcacccaggcgcgaaatggccagtcccccttcttccctgagtggtgagttcttggacacaaaggatcgtcaggtggaagaggacaggcagatggatacggaagccgccgcatcagaagcaagccaggacgtgacatacgctcagctgcactcactcaccctcagacgcaaggccactgagcctccaccatcacaggagggcgaacccccggccgagcctagcatttatgccacccttgcaattcactag

SEQ ID NO: 193044 - DNA, 1896 bp, synthetic construct
  misc_feature 1..1896: note = Description of Artificial Sequence: Synthetic coding sequence
  source 1..1896: mol_type = other DNA
atgacccccgccctgaccgccctgctgtgcctgggcctgagcctgggtccaaggacccgtgtgcaagcagggccatttccaaaaccaaccctctgggccgaacccggatcggtgatttcctggggcagtcccgtcacgatctggtgccaaggctcccaggaagcccaggaataccggctccacaaggaagggagtccggaacctcttgataggaataatccgcttgaacccaagaataaagcgcggttttcgataccctcgatgactgagcatcatgctggccgttaccgctgtcactactactctagtgccggatggagcgagcccagtgaccctctggaaatggtcatgaccggagcctattctaagccgaccctgagtgcattgcccagtcctgttgttgcctcaggaggtaacatgaccctgcgctgcggttcccagaagggataccatcacttcgtccttatgaaagagggggagcatcagctgccccggacccttgacagtcagcagctgcactcccggggctttcaagctttatttccagtcgggcccgtgaccccttcacacaggtggcggtttacatgctattattactatacaaataccccttgggtttggagccacccatctgatcccctcgagatcctgcctagcggggtgtctcggaaaccatcactcctgacactgcagggccccgttttggcccctggccagagtctgacactgcagtgtggctccgacgtgggttacaacagattcgtcctgtataaagaaggtgaacgggactttctgcagcgacccggccagcagccccaagccgggctgtcgcaggctaatttcaccctcgggcccgtctccccgtccaatgggggccagtaccggtgttatggggcccacaacttgagttctgaatggtctgccccaagtgacccgcttaacatcctgatggcaggtcagatttacgataccgtgagtctatcagcgcagcccgggccgacagtggccagcggtgaaaatgtaaccctcctgtgtcaaagctggtggcagtttgacactttcctgttaaccaaagagggcgcggcccatccccctttacgtttgcgcagcatgtacggcgcccataaataccaggcagaattccccatgtccccagtaacttccgcccatgccgggacataccgatgctacggcagctactcttcgaatccgcacttactttcacacccctctgaaccgctggaactggtggtgtctggccatagtggaggaagctcattgccgcctaccgggcctcctagcacacctggcttaggccgatacctggaggtgctgatcggagtgagtgtcgctttcgttctcctgcttttcttgttgctcttcctgcttctgcgcaggcagcgccactcaaagcatcggacttcggaccagaggaagactgacttccagcgccccgccggggctgctgaaaccgaacctaaggaccgcggattacttagacggagttcacctgccgctgacgtacaggaagagaatctgtacgcagcagtgaaggatacacagagtgaagaccgcgtggaattagattctcagagtccccacgacgaggaccctcaggcagtgacgtatgctccggtgaaacatagcagccctcgtcgagaaatggcatcgccaccttcctctctctcaggagagttcctggacacaaaagacagacaggtggaggaggatcggcagatggacactgaggccgcggcaagtgaagcctcccaggatgtgacctacgcccaattacatagcttgacactgcggagaaaagcgactgaacctccccctagccaggaaggagagccaccggccgagccatccatatacgctaccctggcaatccactag

SEQ ID NO: 193045 - DNA, 1947 bp, synthetic construct
  misc_feature 1..1947: note = Description of Artificial Sequence: Synthetic coding sequence
  source 1..1947: mol_type = other DNA
atgacccccgccctgaccgccctgctgtgcctgggcctgagcctgggtcctcgtacacgggttcaggctgggccgtttccaaaaccgaccctgtgggcggagcccggttctgttatctcctggggtagtcccgtcacgatctggtgtcagggatcacttgaagcccaggagtatcagctggacaaggagggatcccccgagccacttgatcgtaataaccccctggaacctaagaataaggcaagattctccattcccagtatgacacaacaccacgctggaagatacaggtgccattactactcctctgcaggctggagcgagccctctgatcccctagaattggtgatgacgggggcatactccaaaccaaccctcagcgcattaccctcccccgtcgtggcttctggaggcaacatgaccctacggtgcgggagccaaaaggggtaccaccacttcgtgctgatgaaggagggagaacaccaattgccaaggaccctagacagtcaacaactgcatagcagagggttccaggccctgttccctgtgggcccggttactccttctcatcgctggcgctttacctgttactactattatactaataccccttgggtctggtctcacccatctgatcccctagagatcttgccgagcggtgtgagccggaagccctcattgctgaccctgcagggccctgtcctcgcgcctggccaaagcctcactctgcagtgcgggagcgacgtcggatacaacaggtttgtgctgtacaaagagggtgaacgggactttctccagcgccccggacagcaaccccaagccggtttaagccaagccaactttactctgggtccagtcagtcccagcaatgggggccaataccggtgttatggggcacacaacctgtcttcagagtggtcagctcccagcgaccctttgaatattctgatggctggacagatctacgataccgtttcgctctctgcccaacccgggcccactgtggcatccggtgaaaatgtgaccctcctttgccaaagctggtggcagttcgatactttcctacttacaaaggaaggagccgcccacccaccattaaggttgcgcagcatgtacggagcccataagtatcaggccgagttccccatgagcccggtgacatctgctcatgcaggcacgtaccgatgctacggatcttacagcagcaatccccatttgcttagtcacccctcagagccattagaactcgtggtctcagggcatagcggcgggtccagtcttccaccgacgggaccaccgagcacccccggaggcccggaggatcagcccctcaaccccccaggcagcggtcctcaaaaccggctcggcaggtacctggaagttctcataggagtcagcgtggcgtttgtattgttgttgttcctcttgctattcttgcttcttcggcgacagcggcatagcaaacacaggacctcagatcagaggaagacagatttccagaggccagctggcgctgccgagacagaaccgaaagaccgcggcctgcttcgccgcagttctcccgccgcagacgtgcaagaggagaatctgtacgctgctgtgaaagatacgcagagtgaggatagggtggagctggactcgcagagcccccatgatgaagaccctcaagccgtcacttacgccccggtgaagcattcctccccacgccgagagatggcttccccaccttcctccctttctggagagttcctggacacaaaagacagacaagtggaagaggacaggcagatggatacggaggcagccgcctccgaagcttctcaggatgtaacatacgcacaacttcattctctcaccctccgccgcaaggccaccgaacctccaccatctcaggaaggtgagccaccagctgaaccatctatttacgccactctagctatccactag

SEQ ID NO: 193046 - DNA, 1896 bp, synthetic construct
  misc_feature 1..1896: note = Description of Artificial Sequence: Synthetic coding sequence
  source 1..1896: mol_type = other DNA
atgacccccgccctgaccgccctgctgtgcctgggcctgagcctgggaccccggactcgcgttcaggcgggaccattcccgaaacccaccctgtgggccgaacccggctcggtgatctcctgggggtcacccgtgacgatttggtgccaggggagccaggaggctcaggaatatagactgcataaagagggaagcccggagcctctggatcggaacaatccacttgaaccaaaaaataaagcccggttctccatcccttccatgaccgagcaccatgcaggccggtaccggtgtcactactatagctctgcagggtggtcagagccgagcgaccctttagagatggttatgacaggggcctacagcaagccgactctgtcagcgcttcccagtcccgttgttgccagtggagggaacatgaccctgcgctgtgggagccagaaggggtaccatcattttgtgcttatgaaagaaggggagcatcagctaccgaggactctagactcccagcagctgcactcccggggctttcaggccttattccccgtgggccccgtcaccccgtcacaccggtggcgctttacttgttattattattacacaaatacaccctgggtatggagtcacccctcggatccactcgagatcctgccctccggagttagccgcaaacccagtcttcttacattgcagggacccgtacttgccccaggccagagtttgactctgcagtgcgggtcagatgtgggctacaatcgcttcgtgctgtataaggagggcgagcgggattttctgcagcgtcccggccagcaaccccaagcaggtctgagccaggccaatttcaccctcggtcccgtgtcccctagcaacggcggccagtacaggtgctacggggcgcacaatctcagcagcgaatggagcgctccatctgaccctctcaatattcttatggcaggacagatatacgatacggtgtctctcagtgcccagccagggcccaccgtagcatccggggagaacgttactttgttatgtcagtcatggtggcagtttgatacattcctgttgaccaaagagggggcagcccaccccccgctgcgactcaggagcatgtacggtgcccataagtaccaagccgagtttcccatgtcgcccgtgacatctgctcacgcagggacatataggtgttacggttcttatagcagtaatccccatctgctctctcacccgagcgagcctcttgaactcgtggtttccgggcattctggaggcagctctctccccccgaccggcccgccttctactcctggcctcggaagatacttggaggtgctaatcggggtctccgtcgcattcgtgctcctattgtttctgttactctttttgctgctgcgcaggcagagacactccaaacacaggactagtgaccagcgcaagaccgatttccaacgacccgctggggccgctgaaaccgaaccaaaagaccgaggcctgctccgccgctcctcaccagctgcagacgtgcaggaggaaaacctgtatgctgcagtgaaggacacccagagtgaggaccgcgtggaactggacagtcagtccccccacgatgaagacccacaggctgtcacctatgcgcccgtgaaacactcttctcccaggagggagatggcttcccccccttcgtccctgagcggcgaatttctagatactaaagataggcaggtcgaggaggatagacagatggataccgaggcggcagcgagcgaggctagccaggacgtgacgtatgctcagcttcatagccttacgctgagacgcaaggcgacagagccacccccatctcaagagggcgaacctcctgccgaaccctccatttatgctactttggccatacactag

SEQ ID NO: 193047 - DNA, 477 bp, synthetic construct
  misc_feature 1..477: note = Description of Artificial Sequence: Synthetic coding sequence
  source 1..477: mol_type = other DNA
atgacccccgccctgaccgccctgctgtgcctgggcctgagcctgggccctaggacgcgggtacaagccgggcccttccccaagcccactctatgggcggagccaggtagtgttatctcctggggaagccccgtcacaatctggtgccagggaagtcaggaggcccaggaatatcgacttcacaaggagggctcccctgaacccttggatcggaataaccccctggagcctaaaaataaagcccggtttagcattccttcgatgaccgaacatcacgctgggaggtatcgatgtcattactatagcagtgcgggatggtcggaaccttctgacccccttgaaatggttatgactggcgcgtactccaagcctactttgagtgccctgccctccccagtggtagcgtccggcggcaatatgactctgagatgtggaagccagaaggggtaccaccatttcgttttgatgaaggagtag

SEQ ID NO: 193048 - DNA, 1347 bp, synthetic construct
  misc_feature 1..1347: note = Description of Artificial Sequence: Synthetic coding sequence
  source 1..1347: mol_type = other DNA
atgatccccaccttcaccgccctgctgtgcctgggcctgagcctgggcccaaggacccacatgcaggctgggcccctgcctaagccaacactctgggccgaacccggctccgtgatctcttggggcaatagcgttaccatctggtgtcagggtacactggaagctcgcgagtatagacttgacaaagaagagtcgccggccccatgggacagacagaatcctcttgaacccaaaaacaaagcacgcttttctatccctagtatgacggaggattacgccgggagatataggtgttactatcggagtcctgtgggctggtcccagcctagtgatcccttagagctcgtaatgacgggcgcctactctaaacctacattatcagcactgcccagccctctggtcactagtggcaaatccgtgactctactatgccagtctcgctcccctatggacacgttcttgcttatcaaggagagagctgctcacccactgctgcatctccgaagtgagcacggcgcacagcaacatcaggccgaattccccatgtcccctgtgactagtgtgcatggcggcacctaccggtgtttttcttcccatggcttctctcattatctgttatcccaccctagcgatcctctcgaactgattgtctctggctcactggaggacccccggccctcaccaacacgtagtgtcagtacggccgctgggcccgaagatcaacctctgatgccgaccggctctgtgccgcatagtggacttagacgacactgggaggttctgatcggagtgctggtcgtgtcgatcctgctgctttcactgttactattcctgcttctgcagcactggaggcagggaaagcaccggaccctggctcagcggcaagcagactttcaacgccctccaggggctgccgagcccgaacccaaggatggggggttgcaaaggcgctcaagcccagctgctgacgtgcagggtgaaaacttctgtgctgcggtcaagaatacacagccagaagacggtgttgaaatggatacccgacagagtccccacgatgaggacccccaggcagtcacttatgcaaaggtgaagcactcgaggcccagacgggaaatggcctcgcctccctccccattgtctggcgaatttctggatactaaagacagacaagctgaagaggaccggcagatggataccgaagccgctgcgtcagaggcacctcaagacgtgacatatgcgcagctccattccttcaccttaagacagaaagcaacagagcctccgccctcccaggagggcgcatcgccggccgaacctagtgtttatgcaacgctggccatccactag

SEQ ID NO: 193049 - DNA, 1347 bp, synthetic construct
  misc_feature 1..1347: note = Description of Artificial Sequence: Synthetic coding sequence
  source 1..1347: mol_type = other DNA
atgatccccaccttcaccgccctgctgtgcctgggcctgagcctgggacctaggacacatatgcaggcaggcccgctcccaaaaccaactctttgggctgagccagggtccgtcatttcatggggcaattctgtcacaatctggtgtcagggcacactagaggcgcgcgagtaccggttagacaaggaggaatcgccagccccctgggacaggcagaatccacttgagccgaaaaataaagcgagattctcaatcccttccatgaccgaagattatgccggaagatatagatgttattatagaagccctgtaggatggtctcagccatctgatcccctggagttggtgatgacaggcgcctactccaagcccacactgtccgccctccctagccctctggtcacgagcggcaaatccgttaccctcctgtgccagagtaggtcccccatggacacatttctgttaataaaagagcgggccgcgcaccccttgcttcacctgcggagcgaacatggagcacaacagcatcaggctgaatttcccatgtcgcctgtgacctcagtgcacggtgggacttaccgctgtttctcctcccatgggttctctcattacctgttgtcccaccccagcgatcctctggaactcattgtttccggatccctggaggatcctcggcccagccctacgaggtctgtgtcaacggccgccgggcccgaagaccagcccctgatgcccactggctctgtgccccattccggcctgcggcggcactgggaggtacttatcggggtgctggtcgtaagcatcctgctcttaagcctgctcttgtttctcctgctgcagcactggagacagggcaaacacagaaccctggctcagagacaagcagatttccagagaccacccggtgccgccgagccagagcccaaggacggcggactgcaacggaggagcagcccagccgctgatgtccagggggagaatttctgtgccgccgttaagaatacccagcctgaggatggtgtggaaatggatacccgacagtcaccccacgacgaggaccctcaggctgtgacctatgcaaaggtaaagcacagccgtcccagaagagagatggcctctccacccagtccgttgagcggagaatttctggacactaaagacaggcaggccgaagaagacagacagatggataccgaagctgccgcaagcgaagctcctcaagatgtcacatatgcccagttgcactcgttcactcttagacagaaagccacagagccccctccttcacaggagggagcaagccccgcggagccttcagtctatgccacgctggctatccattag

SEQ ID NO: 193050 - DNA, 1773 bp, synthetic construct
  misc_feature 1..1773: note = Description of Artificial Sequence: Synthetic coding sequence
  source 1..1773: mol_type = other DNA
atgaccctgaccctgagcgtgctgatctgcctgggcctgagcgtgggccctcgaacttgcgtccaggctggcaccttgccaaaaccaactctctgggccgaacccgcctcagtgattgcgagagggaaacctgtgaccctgtggtgccaggggcctctggagacagaggagtataggctcgacaaggagggcttaccatgggcgagaaagcggcaaaaccccctggaacccggcgcaaaggctaaatttcatataccatccaccgtgtacgatagcgctgggagataccgttgttactatgaaacgccagcgggatggtcagagccctccgacccgttggagctggtggcaacagggttttacgcggaacccacattgctggccctgccctctccagtggtagcttccggtggcaacgtgactttgcagtgcgataccctggacggcttattgacgttcgtcctcgtggaggaggaacagaagctcccccgaaccctgtattcacagaagttgcccaaaggaccctcccaagccctgtttcctgtcggcccagtaaccccatcctgtcggtggcgcttccgatgctactattactatcgcaagaatcctcaggtatggtcaaacccatccgacttgctagaaattctagtccctggagtgagccgcaagcccagcctgcttatcccacagggatccgttgtagcaaggggaggtagtctgacgctccaatgcaggtcagatgtggggtacgatatcttcgttttatacaaagagggcgagcacgatctggtccaaggatctggccagcaacctcaggctggtttgagccaggcgaatttcacacttgggccggtgtctcgaagtcatgggggtcagtatcgatgctacggcgcccacaacctttctccacgatggagcgctccatctgaccctttggacatcctaatagcggggctgattccggacattcccgccctgagcgtgcagcctggccctaaggtcgcaagcggtgagaacgtgaccttactgtgtcagtcatggcatcaaatagatacattttttctgaccaaggagggtgccgcacatcccccactctgcctgaagtctaagtatcaatcataccgacatcaggcagaattttcaatgtccccggtgactagtgcacaggggggcacttacagatgctatagtgcaattcgctcatatccttacctgctgagcagtccgtcttatcctcaggagcttgtcgtttcaggcccaagcggagatccaagcctcagcccaaccgggagcacccctactcccggtcctgaggatcagcctctcactccaaccggcttagatccccagagcggactcggccgccatctaggtgtcgtgactggggtctcagtggccttcgtgctgctgctgttcctcctgcttttcttgctattacgacaccggcaccagtcaaagcaccgcaccagcgctcacttctatcgccccgccggcgcagcaggccccgagccaaaggatcagggtctgcagaaacgggcttctccagtagcggatatccaagaggagatccttaatgccgcagtcaaggatactcagcctaaagacggagtagaaatggatgctagggccgctgccagtgaagccccacaggacgttacctacgcccaattgcattccctgaccctgaggagagaggccaccgaacctcctccatcacaggagcgcgagccgccagctgagccgtccatttacgccccgctggccatacattag

SEQ ID NO: 193051 - DNA, 1776 bp, synthetic construct
  misc_feature 1..1776: note = Description of Artificial Sequence: Synthetic coding sequence
  source 1..1776: mol_type = other DNA
atgaccctgaccctgagcgtgctgatctgcctgggcctgagcgtggggcctaggacatgtgtccaagccggcaccctgcctaaacccaccctttgggctgaacctgccagcgtgatcgctcggggcaaaccagttaccctgtggtgccagggaccattggaaacggaggaataccggttggataaagaggggctgccttgggccaggaagcgtcagaatcccctggaaccaggggctaaagccaagttccacataccgtctaccgtgtacgactctgcaggccgctacaggtgctactatgagacacctgcaggttggtccgaaccatcagaccctcttgaacttgtggctaccggtttttatgccgaaccgaccttgcttgcgctgcccagtccagtggttgcctctggcggaaatgtcacgctgcagtgtgacacattagacggcttgctaacctttgttcttgtcgaggaggagcaaaaactgcctcgaacgctgtatagccagaaactgcctaaggggccatcgcaggccctatttcccgtgggacccgtgactccttcctgcaggtggcggtttcgctgttactactattataggaaaaatccacaagtgtggtccaaccctagtgatctcttagagatcctagtgccaggcgtatcccgaaaaccctccttgcttatccctcagggatcagttgtggctcgaggaggatctttgaccctgcagtgtcggagcgacgtcggttatgacattttcgtgctctacaaggagggggaacatgatctcgtgcagggtagtggacagcagccacaagccgggctttctcaggccaactttaccctgggccctgtcagccgctcacacggaggccagtatagatgttacggcgcacataatctgtccccgcgctggagcgccccctcagacccactcgacattctaattgccggcctaattccggacattccagccttgtccgtccagccaggcccaaaagtagcttctggagagaacgttaccttgctgtgccagagctggcatcagatcgacacgttctttttaaccaaggaaggcgctgcccaccccccactgtgcctgaagagcaaataccagtcctaccggcaccaggcagagtttagtatgagtccggtaacaagcgcccaaggcggcacctatcggtgttactcagctatcaggtcctacccctatctgttgtctagcccaagttacccccaggagttggtcgttagcggaccatcaggcgacccaagcttgagcccaaccggatcaacacccaccccggccggcccggaggatcagccgctgaccccgacaggtctcgaccctcagagcggcctgggcaggcatctgggcgtggtcacaggcgtgtccgttgccttcgtgctcctactgtttctgttgctgttcctgctcctccggcacagacatcagtcaaaacatagaacaagtgctcatttttatcgccccgccggcgcagccgggccagagcctaaggatcaggggctgcaaaaaagagcctcccctgtagcagatatccaggaggagattctcaacgccgcagtgaaggatacacagcccaaagacggggtcgaaatggatgccagggcagctgcgtccgaggccccccaggacgtaacatacgctcagctgcacagtctgacactccgcagagaggccactgagccgcctccatcacaggagagggagcctcctgccgagccgagtatctatgcccccctagctatccactag

SEQ ID NO: 193052 - DNA, 1869 bp, synthetic construct
  misc_feature 1..1869: note = Description of Artificial Sequence: Synthetic coding sequence
  source 1..1869: mol_type = other DNA
atgaccctgaccctgagcgtgctgatctgcctgggcctgagcgtggggccccggacatgtgtgcaggcgggcacactgcccaaaccaaccctgtgggctgagcctgcgtccgtcatcgcgagaggaaagcccgtgactttgtggtgtcagggtcccttggagacagaagaatatcggctggataaagagggcctgccttgggccagaaaaaggcaaaacccacttgagcccggtgcaaaggctaagttccacatcccctcaacggtgtatgacagcgccgggaggtaccgctgctattatgagaccccagccggctggtcagaaccatctgacccgctcgagctcgtggctacggccctccctagccctgttgtcgcctccgggggtaatgtcacattgcaatgtgacaccctggatgggctgcttacttttgtactcgtggaggaagagcagaagttgccacggactctatacagccagaagctgcctaagggaccgtcacaggccttgtttcccgtggggccagttacacccagttgccggtggcgctttaggtgttactactattataggaagaatccccaggtgtggtcaaatcctagtgatctgctcgagatcctggtccccggagtttccaggaaaccctccttgcttataccgcagggctccgttgtggcgcgcggagggtctctaactcttcaatgccggtcggatgtcgggtacgatattttcgtgctatacaaggagggtgagcatgatctggtgcaggggtcagggcagcagcctcaggcaggcttgtcccaggctaatttcactttgggacctgtttctcgttcccacgggggacaatatcgctgctacggtgcgcataaccttagtcctaggtggtccgcaccctctgaccccctagacatcctgatagctgggctgatccccgacatccctgctctgtccgtgcaaccgggtcccaaggtcgctagtggagagaatgtcactctgctttgccagagttggcaccagatcgataccttttttctgaccaaggaaggagcggcacatcccccactgtgtctgaaatccaaataccagagctatcgccatcaggccgagttcagcatgtctccagtgactagtgctcagggcggaacgtaccgttgctattccgcaatcagatcttacccctacctactgtcctcgccaagttatcctcaagagctggtggtctccggcccctcaggggaccctagcttgagtccaacgggcagtacccccacacctgccggaccggaggaccagccgcttactcccacaggtctcgacccccagtctggtcttggacggcatctcggcgtggttactggagtcagcgtagctttcgttctactattgttccttttactgttcctgttgctgagacatcgccaccagagcaaacaccgtacatcagcacacttttaccgcccggcaggtgctgctggaccagagcccaaggaccaggggctccagaagcgggcttctccagtggcagacatacaggaggagatactgaatgctgctgtcaaggacacacagcccaaggacggcgtggagatggatgcgcgtcagtcaccccacgacgaggaccctcaggccgtcacgtacgcggaagttaagcacagccgccccagaagggagatggctagccctcctagtccattatccggcgagttcctagataccaaagaccgccaggcagaggaggacagacagatggacaccgagcgggtcctctccagccctggtccgcaggcatcaccccccccacctcgctcactacctttgactcttccaagatgtcggcttctgcatctgaagccccccaggatgtag

SEQ ID NO: 193053 - DNA, 2595 bp, synthetic construct
  misc_feature 1..2595: note = Description of Artificial Sequence: Synthetic coding sequence
  source 1..2595: mol_type = other DNA
atgggctgctggggccagctgctggtgtggttcggcgccgccggcgcgatattgtgcagcagtcctggctcccaggaaactttcctgcgtagcagccctcttcccctcgctagcccaagtcctcgtgatcccaaggtgtccgccccaccttccattctggagcctgcctccccccttaattcccccggcacagagggaagctggctcttctccacgtgtggcgccagtggccgccacggtcctacccagacacaatgtgatggggcatacgccgggacaagcgtcgtagttacagtcggggctgcaggccagctacgcggagttcagctctggcgagtccccggtccaggtcagtacctgatatcagcatatggcgctgctgggggtaagggggcaaagaatcatctatccagggcacacggggtgttcgtttctgccatctttagtcttggtcttggtgagtctctgtatatactggtgggccagcaaggcgaagatgcttgcccaggtggatcccctgaaagtcaattagtttgcctgggcgagagccgtgcagtggaagagcacgccgcaatggacggttcagagggcgtgcccggatcccgtcggtgggcagggggcggtggggggggaggaggagctacgtacgtgtttagagtcagagcaggggaactcgagcctctgttggtagccgccggagggggcggacgtgcatacctgagaccgagagaccgcggcagaactcaggcatctcccgagaagttggagaacaggagcgaagctcctggcagcggtggccgaggaggcgccgctggaggtggtggagggtggacttcaagagctccatcccctcaggcaggccgctcactccaggagggagcggaaggtgggcaggggtgcagcgaggcatgggccacgttgggatgggccgctgccggaggattcggcggtggagggggggcttgtacagcagggggcggcggtggaggttatagaggtggggacgctagtgaaacggacaacctgtgggccgatggagaggatggcgtctcctttattcatccttcctctgagctgttcctccagccattagccgtgacggaaaatcatggcgaggtcgaaatcaggaggcacttgaattgcagccactgccccctgcgagattgccagtggcaagctgaactgcagcttgccgaatgtctgtgcccagaaggaatggaactcgcagtggacaacgtgacctgtatggatctccataagccccccggacctcttgtcctgatggtagcggtcgtggcgacctccacattgagtctgcttatggtgtgtggtgtgctgatactggtaaagcagaagaagtggcaagggctgcaggaaatgcggctgccaagccccgaactcgaactgagcaaattacggacgtctgcaatccgtactgcccccaacccttactactgccaagtcggtctgggccctgctcaaagttggcctctgccgcccggggtaacagaagtgagtccggccaacgtgactcttctccgtgcattgggacacggggctttcggggaggtgtacgaaggattggtgatcggactgccaggggatagtagtccccttcaagtggccatcaaaactcttccggaactttgtagcccacaggacgagctcgactttctcatggaagccctcattatatccaaattccggcaccagaatattgtccggtgtgttggcctgagcttgagggccacccctagattaatactgctggagctcatgtctggaggagacatgaaatccttcttgcgccactctaggccccacttaggacagccttctccactggtgatgcgggacctgctgcaactggcccaggatatcgctcaaggttgtcactatttggaagaaaaccacttcatacatcgcgatattgccgcccgaaattgtctactctcttgcgcgggcccttctagggtggccaaaatcggggacttcggcatggcacgtgacatctatcgagccagttactaccgtcgaggggatagggccctccttcctgtcaagtggatgccacctgaggcgtttctcgagggaatcttcacgtctaaaaccgactcttggagctttggggtgctgttgtgggaaatcttttccctgggctatatgccctacccgggccgcaccaatcaggaagttttagacttcgttgtgggtgggggcagaatggacccacccagaggatgccccggccctgtgtacaggataatgacccagtgctggcagcatgaacctgaacttcggcccagcttcgccagtatcctggagcgcttgcaatattgtactcaggatcccgatgtgctcaactctctcctgcctatggagctgggccccaccccagaggaggaaggcacctccgggttggggaatcggtccttggagtgccttcgcccaccacagccccaggagctctcccctgaaaaactcaaatcttggggaggctctccacttgggccctggctgtcatccggcttaaaacccctgaaatcgcgcggattgcagccgcagaacctctggaatccgacatatcgctcttag

SEQ ID NO: 193054 - DNA, 2412 bp, synthetic construct
  misc_feature 1..2412: note = Description of Artificial Sequence: Synthetic coding sequence
  source 1..2412: mol_type = other DNA
atgggctgctggggccagctgctggtgtggttcggcgccgccggcgcaatcttgtgctcctcaccaggaagccaggagacttttctgaggtctagccccctcccacttgcctcaccatcccctcgggatcccaaggtgagtgcccccccttctatcctggaacccgcctcaccgttaaattcccccgggactgaggggtcatggctttttagtacatgcggagcctctggtaggcatggcccaactcagactcagtgcgatggggcgtacgctgggacatctgtagtcgttactgtaggagctgcgggacagctgcggggcgtgcagttgtggagggttccggggcccggccaatacctgatcagtgcttacggagcagctgggggaaagggagcgaaaaatcatctctcgcgagcccatggggtgttcgtgtctgccatattcagtttgggtctaggagagtccttgtacattctggtcggacaacagggagaggatgcttgtccaggcgggtctcctgagagtcagctggtctgcctgggggagtcaagagccgtggaggaacatgctgccatggatggttcggaaggcgtgccagggtcccggcggtgggccggcggtgggggcggtggcgggggcgcaacctatgtgttcagagtccgcgcaggcgagcttgagcccctgctggtggccgctggcggcggtggccgggcctacctgagacctcgggaccgcggacgcactcaggcatcacccgagaagctggaaaataggagtgaggcgcccggctccggcgggcggggtggagccgccggcggtgacgctagcgaaaccgataatttgtgggcagatggggaagatggagtaagcttcattcacccgtcctccgaactgttcctccaaccactggctgtaacggagaatcacggcgaggtcgaaataaggaggcacttgaactgctcacactgccctctacgggattgccagtggcaggctgaactgcagctggcagaatgtctgtgcccagaagggatggaattggccgtagacaacgtgacgtgcatggatctgcacaaaccccctggtccgcttgtgcttatggtcgccgtagtagctaccagcacacttagcctactcatggtgtgcggggtcctgattctagtcaagcagaagaagtggcagggcctacaagagatgcggctcccaagcccagaactcgagctttcaaaattgcgcacaagtgccattcgcactgccccgaacccatattattgccaagtcgggctgggaccagcgcagagctggcccctgccaccaggcgtaacagaggtgtcacctgctaacgtgacattattgagagcattgggccatggggcctttggtgaagtgtatgaaggactggtgattggcttgccaggcgattctagccctcttcaggtcgccatcaaaaccctcccggagctgtgctcaccccaggatgagctggacttcctgatggaggcactgataatctcaaagtttcgtcaccaaaacatcgtgcggtgtgtcggacttagcctccgagcgactcctcgccttattcttctcgaactgatgagcggtggggacatgaaatcgtttttgaggcattctcgccctcatctcggacagcctagccctttggtgatgagggacctcctgcagctggctcaggacatcgcccagggatgccattacctcgaagaaaaccatttcattcaccgggacatcgccgccaggaactgcttgctgtcatgtgcagggcccagccgtgtggcgaaaatcggtgactttgggatggcaagggacatctatagggcctcttactaccggcggggtgatagggcgcttctgcctgtcaagtggatgccgcccgaagccttcttggaagggatcttcaccagtaaaactgactcatggagctttggggtcttattatgggaaatcttttcccttggttatatgccctatccgggcagaacgaatcaagaggtactggatttcgtagtgggtggagggcgcatggacccacccagaggatgtcccgggcctgtataccggatcatgacccagtgctggcaacatgaacccgaactgagaccttcgttcgcaagcattcttgaaaggctccagtactgtacacaagatcctgacgtactgaattctctcctgcccatggagctgggcccaacacccgaggaagaaggcacaagtggcttagggaaccggtcgctggaatgtctaaggccacctcaaccccaggagcttagtcctgaaaagttgaaatcttggggagggtcaccgctgggcccatggctctcttccgggctgaagcctctgaagagcaggggtctgcagccccaaaatctctggaatccgacctataggtcctag

SEQ ID NO: 193055 - DNA, 1437 bp, synthetic construct
  misc_feature 1..1437: note = Description of Artificial Sequence: Synthetic coding sequence
  source 1..1437: mol_type = other DNA
atgggctgctggggccagctgctggtgtggttcggcgccgccggcgctattttgtgcagctccccaggctcacaggagacctttctccggagtagccctctcccactcgctagtccctctccccgagatcctaaggtgtctgcccccccgtctatcctggagccggcatctcccctgaattccccagggacggaaggatcatggcttttttcaacgtgcggggcgagcggccgacacggaccaacacagacacaatgcgatggggcctatgcgggcactagcgtagtggttaccgtgggagctgcaggccagttacggggggtccagctgtggcgggtcccaggcccgggacagtacttaatttccgcgtacggtgccgccggcgggaaaggagcaaagaaccatctatcccgcgcacatggagtctttgtgtctgcaatattctctctaggactgggtgagagcttgtacatattggtgggccagcagggcgaggacgcctgccccggggggagcccggagagccagctcgtgtgcctgggagaaagtagggcagtggaggagcatgcagcaatggacggatcagagggagttccggggagtagacggtgggctggtggcggcggaggcggcggaggggctacatatgtttttagggttcgcgctggtgagctagagccgctgctggttgccgctgggggggggggacgggcctatctgaggcccagagacaggggccggacgcaggcctctccagagaagttagaaaatcgaagtgaagcccctggttcgggaggcaggggaggagccgccggtggggggggaggctggacatctcgagctccaagtcctcaggcaggcagaagtctgcaggagggtgcggaaggtggtcaaggatgctcagaggcttgggccacactcgggtgggccgccgctggagggtttggaggcggtggcggcgcatgtactgctggaggtggtggtgggggttacagggggggggatgcaagcgagactgacaacctctgggctgacggcgaagacggtgtttcctttattcacccctcttctgagctcttcctccagcccctcgccgtcacagagaatcacggggaagtcgagatccgaaggcatctgaattgctctcattgtccactgagagactgccagtggcaggcagaattgcagctggctgaatgtctatgcccagagggcatggaactcgccgtggacaacgtgacatgtatggaccttcacaaaccaccagggcctctggtgctcatggttgctgtggtcgcgacctccacactgtctctgctgatggtatgcggcgtcttgattctgggaacaaaacggctggcaggtaccgtcgatagtcggctcctgctatctagtgagctggggtgggtctccgccggtgggggacgccgccggtag

SEQ ID NO: 193056 - DNA, 2205 bp, synthetic construct
  misc_feature 1..2205: note = Description of Artificial Sequence: Synthetic coding sequence
  source 1..2205: mol_type = other DNA
atgggctgctggggccagctgctggtgtggttcggcgccgccggcgccatcctgtgcagttctcctggcagtcaagaaaccttcttgagatcgtcacctctcccacttgcgtctcccagccctagggacccaaaagtgtccgcaccaccatcgatactggaacccgccagccccctgaatagtcccggcactgaggggtcatggttattttcgacctgtggagcctccgggaggcacgggcctacccagacccagtgcgacggcgcctacgcagggacttctgtcgttgtgaccgtgggcgctgctgggcaactgagaggggtgcagttgtggagggtccctgggccgggacagtatttgatttcagcctacggagctgctggcggaaagggcgctaaaaaccatttgagccgtgcccacggggtgtttgtctcagccattttttccttgggactgggggagtccctctacattctagtgggtcagcaaggagaggatgcctgccctggaggttctcccgaatcacagttggtgtgcctcggagaaagccgagctgtggaggaacacgcagcaatggacggttccgagggcgtgcctggtagccgtcgatgggccgggggtggcggaggtggcgggggagcgacctacgtgttcagagtacgtgcaggcgagcttgagcctctcttagtggcagcgggaggtggcgggcgagcgtacctgcgcccgcgtgatagagggaggacacaggctagcccagaaaaactggaaaacagatcagaggctccaggctctggcggacggggcggagccgctggaggcgatgcatcagagactgataatttgtgggcagacggcgaggacggcgtttctttcatccatccatcttctgagctattcctgcagcccctcgcggtgacggaaaatcacggagaagtcgagattcgaaggcatttaaactgttcacattgcccactccgggactgccaatggcaggcggagctgcagcttgcagagtgtctgtgcccagaagggatggagctcgcagttgataacgtcacctgcatggacctgcacaagcctcccggcccattggtgctgatggtcgccgtggtggcgacctccacattatccctgctcatggtatgcggcgtattgatcttggggggcgcttggcctggtccagtcctcgcgtctgctacccggtgtcaccggggcttcccaagccaatgctactccgcccaaacacttcctgagctatgtagcccccaggatgaactggactttctcatggaggctctcatcatttccaaattcaggcatcagaatatagtacgatgcgtcggactcagtctgcgtgcgaccccccggctcatcctcctggagcttatgtcagggggcgatatgaagtccttccttaggcactcaagaccacatttaggccagccgtccccgctcgtaatgagggatcttctgcagttggctcaggatatcgcccaggggtgtcattatcttgaggagaatcacttcatccatcgcgacattgcggctagaaactgtctcctgtcatgtgctgggccatctcgcgtcgctaagattggcgactttggaatggccagggacatctatagagcttcctattaccgcaggggcgaccgggctctgctccccgtcaaatggatgcctccagaggcattcttagaggggatcttcacttcgaagaccgatagttggagtttcggcgtgctgctatgggagattttctccttggggtacatgccatacccaggtaggaccaatcaagaagtgttggacttcgtggtgggggggggacgcatggaccctccccggggatgcccaggcccagtgtaccgtatcatgactcaatgttggcaacacgaacccgagctgcgcccctcctttgcaagtatcctggaaagactccagtattgcactcaggacccagacgtgctgaatagcttgctaccaatggaactggggcccacaccggaggaagaaggcacctccgggttgggtaatcggtctttagagtgtcttcgcccaccccagccccaggagctcagccccgagaagttgaagtcctggggcgggtctccattgggcccctggctcagctcagggctgaagcccctgaagtcccggggactgcaaccccagaatctgtggaacccaacttatcggagctag

SEQ ID NO: 193057 - DNA, 180 bp, synthetic construct
  misc_feature 1..180: note = Description of Artificial Sequence: Synthetic coding sequence
  source 1..180: mol_type = other DNA
atgctgagccggaacgacgacatctgcatctacggcggcctgggcctggggggactgctgctcctcgcagttgttctgttgtccgcctgtctctgttggttgcaccggcgaggcccagggttactgcgcgccggcacacctctgtgtatctccgcggaagctgcttctgctcagcaatag

SEQ ID NO: 193058 - DNA, 201 bp, synthetic construct
  misc_feature 1..201: note = Description of Artificial Sequence: Synthetic coding sequence
  source 1..201: mol_type = other DNA
atgctgagccggaacgacgacatctgcatctacggcggcctgggcctcggaggtttgctcctactcgcagttgtgctgttgagcgcctgcctgtgctggctccatagaagagcccccagcgtgctggttcctggccccggcttgttgcgtgcaggcaccccattgtgtatttcggccgaggcagcaagcgcccagcaatag

SEQ ID NO: 193059 - DNA, 222 bp, synthetic construct
  misc_feature 1..222: note = Description of Artificial Sequence: Synthetic coding sequence
  source 1..222: mol_type = other DNA
atgctgagccggaacgacgtgaagcggctggagcggagctggcacctcttaagttggtcccaagctcagggcagcagcgaacaggaactccactacgcctctctgcagcgcctgcctgtcccttcctcagaaggtcctgatctgagaggacgggataaacggggaactaaggaggatccacgagccgattacgcatgcatcgccgagaacaaacccacgtag

SEQ ID NO: 193060 - DNA, 201 bp, synthetic construct
  misc_feature 1..201: note = Description of Artificial Sequence: Synthetic coding sequence
  source 1..201: mol_type = other DNA
atgctgagccggaacgacgtgaagcggctggagcggagctgggcccagggcagctcagaacaggagttgcactacgcctcactgcagagattacccgtgccttcctctgaggggcctgatctgaggggccgagataaacggggaaccaaagaggatcccagagctgactatgcttgcatcgcagagaacaaaccaacttag

SEQ ID NO: 193061 - DNA, 108 bp, synthetic construct
  misc_feature 1..108: note = Description of Artificial Sequence: Synthetic coding sequence
  source 1..108: mol_type = other DNA
atgctgagccggaacgacgcccccagcgtgctggtgcccggccccggactgctgagagctggcaccccgctctgtattagcgcggaggctgcgagcgcgcagcaatag

SEQ ID NO: 193062 - DNA, 315 bp, synthetic construct
  misc_feature 1..315: note = Description of Artificial Sequence: Synthetic coding sequence
  source 1..315: mol_type = other DNA
atgctgagccggaacgacgacatctgcatctacggcggcctgggccttggtgggctcctgctgctagctgtggtacttctaagtgcctgcttgtgttggctccatcggcgtgttaagagattggaaagaagctggcatctcctgagctggagtcaggcccagggcagttccgagcaggagctgcattacgctagcctccaaagactgcctgtcccttcaagcgaaggtcctgatctgaggggccgcgataaaagaggcaccaaagaggatccaagggctgattatgcttgtatagctgagaataagcctacgtag

SEQ ID NO: 193063 - DNA, 42 bp, synthetic construct
  misc_feature 1..42: note = Description of Artificial Sequence: Synthetic coding sequence
  source 1..42: mol_type = other DNA
atgctgagccggaacgacgaggccgccagcgcccagcagtag

SEQ ID NO: 193064 - DNA, 108 bp, synthetic construct
  misc_feature 1..108: note = Description of Artificial Sequence: Synthetic coding sequence
  source 1..108: mol_type = other DNA
atgctgagccggaacgacgcccccagcgtgctggtgcccggccccggactattaagagcgggtacaccattgtgcatctcagcagaggcagcatccgctcagcaatag

SEQ ID NO: 193065 - DNA, 276 bp, synthetic construct
  misc_feature 1..276: note = Description of Artificial Sequence: Synthetic coding sequence
  source 1..276: mol_type = other DNA
atgatctacgtgagcaccggcgcctggggctgggccggcagctgcttttggcagtggtccttttgtccgcctgcctgtgtgggatgcattgaggaacatctgctctcttggagccaagcccaagggtcctccgagcaggagctgcactatgcctccctccagagactccccgttcctagtagcgaaggacctgacctccgtggccgagacaaaaggggcactaaggaggacccaagagctgattacgcatgcatcgccgaaaacaaacctacgtag

SEQ ID NO: 193066 - DNA, 156 bp, synthetic construct
  misc_feature 1..156: note = Description of Artificial Sequence: Synthetic coding sequence
  source 1..156: mol_type = other DNA
atgctgagccggaacgacgtgaagcggctggagcggagctggcggctgcctgtcccttcttcagaaggacctgacttaagaggtcgtgataaaagagggaccaaggaggatccacgtgcagactatgcctgtattgccgagaacaaacccacgtag

SEQ ID NO: 193067 - DNA, 192 bp, synthetic construct
  misc_feature 1..192: note = Description of Artificial Sequence: Synthetic coding sequence
  source 1..192: mol_type = other DNA
atgcacctgtgccggggctgccagtgccccgccgtgcgggacctgacttctggggcggaaacccgcgaagcgcctcgtagaattcaggagttaaccatgcctgccctccttcgcacaaatcctcccgaacatcctaggcacctgcctcagccgaggcgtgtagaccgagtgcctctctggagctcacagtag

SEQ ID NO: 193068 - DNA, 222 bp, synthetic construct
  misc_feature 1..222: note = Description of Artificial Sequence: Synthetic coding sequence
  source 1..222: mol_type = other DNA
atgctgagccggaacgacgtgaagcggctggagcggagctggcacctgctgagctggtcacaagcgcagggatcaagtgaacaggaactgcattatgcctctttgcagcgtttgccagtaccttctagcgaaggacctgatcttcgaggaagggacaaacgcgggaccaaggaggacccaagagctgattatgcctgtatcgcggaaaacaagccaacctag

SEQ ID NO: 193069 - DNA, 108 bp, synthetic construct
  misc_feature 1..108: note = Description of Artificial Sequence: Synthetic coding sequence
  source 1..108: mol_type = other DNA
atgctgagccggaacgacgcccccagcgtgctggtgcccggccccggcctgttgcgtgctggcactcccctctgtatctctgccgaagctgccagtgcccagcagtag

SEQ ID NO: 193070 - DNA, 201 bp, synthetic construct
  misc_feature 1..201: note = Description of Artificial Sequence: Synthetic coding sequence
  source 1..201: mol_type = other DNA
atgctgagccggaacgacgacatctgcatctacggcggcctgggcctcggcggattactgctgttggctgtggtgctcttgagcgcgtgtctttgctggctacaccgccgtgccccgagtgtgctggtcccaggccctggcctcttgagagcagggactccattgtgtatttctgccgaggcagcctctgctcaacagtag

SEQ ID NO: 193071 - DNA, 315 bp, synthetic construct
  misc_feature 1..315: note = Description of Artificial Sequence: Synthetic coding sequence
  source 1..315: mol_type = other DNA
atgctgagccggaacgacgacatctgcatctacggcggcctgggcctgggcggcctgctcctgttggccgtggtcctgctttcagcttgcctgtgctggctgcatcgccgggttaagcggctggagagatcctggcaccttctgtcttggtcccaggcccaggggagcagtgagcaagagctgcactacgcatccctccaacggctacctgtgccttcctcagaaggcccagatctgcgcggccgagacaaacgaggtaccaaggaggaccctcgagccgattacgcatgcatcgccgaaaacaaacctacctag

SEQ ID NO: 193072 - DNA, 135 bp, synthetic construct
  misc_feature 1..135: note = Description of Artificial Sequence: Synthetic coding sequence
  source 1..135: mol_type = other DNA
atgctgagccggaacgacgacatctgcatctacggcggcctgggcctaggcggcctgctcctcctcgcggtcgtgctgttgtctgcctgcttgtgctggctacacagaagagaggccgcatcagctcagcagtag

SEQ ID NO: 193073 - DNA, 201 bp, synthetic construct
  misc_feature 1..201: note = Description of Artificial Sequence: Synthetic coding sequence
  source 1..201: mol_type = other DNA
atgctgagccggaacgacgacatctgcatctacggcggcctgggcctgggtggattactactccttgctgttgttttgctctccgcttgtctatgttggttacacagaagagtgaagcgcctggaaagatcctggagactgccagtcccctcaagtgaagggccggacctgagaggcagagacaagcgcggtactaaatag

SEQ ID NO: 193074 - DNA, 201 bp, synthetic construct
  misc_feature 1..201: note = Description of Artificial Sequence: Synthetic coding sequence
  source 1..201: mol_type = other DNA
atgctgagccggaacgacgtgaagcggctggagcggagctgggcccaggggagcagcgaacaggagctgcactatgcatctctgcagaggctgcccgttccatccagcgaaggtccagacctgagaggcagagacaaacgcggcacaaaagaggacccacgggccgattacgcttgtattgccgagaacaaacccacgtag

SEQ ID NO: 193075 - DNA, 294 bp, synthetic construct
  misc_feature 1..294: note = Description of Artificial Sequence: Synthetic coding sequence
  source 1..294: mol_type = other DNA
atgctgagccggaacgacgacatctgcatctacggcggcctgggcctgggaggtctactgctgctagctgtggttctgctatccgcgtgtctgtgttggctacatcgacgagtcaaaagattggaaaggagctgggcccaaggaagttcagagcaggaattacattacgcaagtctccagcgcttacctgtgcctagctctgagggcccagatctgaggggcagggacaaaaggggaactaaagaagacccccgagctgattacgcctgcatcgctgagaataagccgacctag

SEQ ID NO: 193076 - DNA, 180 bp, synthetic construct
  misc_feature 1..180: note = Description of Artificial Sequence: Synthetic coding sequence
  source 1..180: mol_type = other DNA
atgctgagccggaacgacgacatctgcatctacggcggcctgggcctgggaggcttattgctgttggcagtggtgcttctatcagcatgtttatgctggctgcatcgtcgcggtcccggcctgttgcgtgcaggcacacctctctgcatcagcgccgaggccgcaagtgctcagcagtag

SEQ ID NO: 193077 - DNA, 87 bp, synthetic construct
  misc_feature 1..87: note = Description of Artificial Sequence: Synthetic coding sequence
  source 1..87: mol_type = other DNA
atgctgagccggaacgacggccccggcctgctgcgggccggcaccccactttgcatctctgcggaagcggcctctgcccagcaatag

SEQ ID NO: 193078 - DNA, 87 bp, synthetic construct
  misc_feature 1..87: note = Description of Artificial Sequence: Synthetic coding sequence
  source 1..87: mol_type = other DNA
atgctgagccggaacgacggccccggcctgctgcgggccggcacccccctgtgtatttccgccgaagcagcttcggctcagcaatag

SEQ ID NO: 193079 - DNA, 87 bp, synthetic construct
  misc_feature 1..87: note = Description of Artificial Sequence: Synthetic coding sequence
  source 1..87: mol_type = other DNA
atgctgagccggaacgacggccccggcctgctgcgggccggcacccctctttgtatcagcgctgaggctgccagcgcgcaacagtag

SEQ ID NO: 193080 - DNA, 87 bp, synthetic construct
  misc_feature 1..87: note = Description of Artificial Sequence: Synthetic coding sequence
  source 1..87: mol_type = other DNA
atgctgagccggaacgacggccccggcctgctgcgggccggcaccccgctgtgcatctccgccgaagccgccagcgctcagcagtag

SEQ ID NO: 193081 - DNA, 42 bp, synthetic construct; identical to SEQ ID NO: 193063
  misc_feature 1..42: note = Description of Artificial Sequence: Synthetic coding sequence
  source 1..42: mol_type = other DNA

SEQ ID NO: 193082 - DNA, 249 bp, synthetic construct
  misc_feature 1..249: note = Description of Artificial Sequence: Synthetic coding sequence
  source 1..249: mol_type = other DNA
atgctgagccggaacgacgacatctgcatctacggcggcctgggcctgggcggacttctactgctggccgtggtgttgctatccgcatgcctttgttggctgcaccgaagggtaaagcggctcgagagatcttggaggttacctgttccatcatccgagggtcccgatctgagggggcgagataagcgggggacaaaagaggatccacgcgccgattacgcatgcatagcggagaacaaacccacgtag

SEQ ID NO: 193083 - DNA, 201 bp, synthetic construct
  misc_feature 1..201: note = Description of Artificial Sequence: Synthetic coding sequence
  source 1..201: mol_type = other DNA
atgctgagccggaacgacgtgaagcggctggagcggagctgggcccaggggtctagcgagcaagagctgcactacgcgtccctccagaggctgcccgtaccttccagtgaagggccagatctgcgcggacgagataaaagggggacgaaggaggatccaagagcagactatgcgtgcatagccgagaacaaaccaacctag

SEQ ID NO: 193084 - DNA, 201 bp, synthetic construct
  misc_feature 1..201: note = Description of Artificial Sequence: Synthetic coding sequence
  source 1..201: mol_type = other DNA
atgctgagccggaacgacgtgaagcggctggagcggagctgggcccaaggttcgagtgagcaagagctgcactacgcaagccttcagagactgcctgtgccctcttccgaaggacctgatctgcggggaagggacaagcgaggaacaaaggaggatcccagagccgactacgcctgtattgctgaaaataagcctacttag

SEQ ID NO: 193085 - DNA, 294 bp, synthetic construct
  misc_feature 1..294: note = Description of Artificial Sequence: Synthetic coding sequence
  source 1..294: mol_type = other DNA
atgctgagccggaacgacgacatctgcatctacggcggcctgggcctgggtggcctgctacttctcgcagtcgtgcttctgtccgcttgcctttgctggctgcacaggcgggtgaaaaggctggagcgttcatgggctcagggttcatcagagcaggaactgcactacgctagcttgcaaaggctgcccgtcccaagctccgaggggcccgacttgcgtggcagagataagagaggaacaaaggaggaccccagggccgactacgcgtgcatcgcagaaaacaagcccacctag

SEQ ID NO: 193086 - DNA, 156 bp, synthetic construct
  misc_feature 1..156: note = Description of Artificial Sequence: Synthetic coding sequence
  source 1..156: mol_type = other DNA
atgctgagccggaacgacgtgaagcggctggagcggagctggcggttgcccgtcccatccagtgaggggccggatcttcggggcagggacaaaagaggaaccaaggaggatcccagggccgactacgcctgcatcgccgaaaataagcccacatag

SEQ ID NO: 193087 - DNA, 294 bp, synthetic construct
  misc_feature 1..294: note = Description of Artificial Sequence: Synthetic coding sequence
  source 1..294: mol_type = other DNA
atgctgagccggaacgacgacatctgcatctacggcggcctgggcttaggtggcctgctattgcttgcagtggtgctgctgtccgcgtgtctgtgttggctccacaggagagtgaagcggctcgagcggtcatgggcccaaggcagttcagagcaggaactccactacgcaagcctccaacggctccctgttccatccagtgagggtccggacctccgcggaagagataagcgggggacaaaagaggaccctcgtgcagattacgcttgcatcgcagaaaacaagcccacctag

SEQ ID NO: 193088 - DNA, 315 bp, synthetic construct
  misc_feature 1..315: note = Description of Artificial Sequence: Synthetic coding sequence
  source 1..315: mol_type = other DNA
atgctgagccggaacgacgacatctgcatctacggcggcctgggcctcgggggccttttactgctcgcagtggtccttctttctgcatgtctgtgctggttgcaccgtcgggttaagcggctcgagaggtcctggcacctgttgagctggtcacaagcccagggaagttcggaacaggaactgcactacgcaagcttacagaggttgcccgtcccctccagcgaggggccggatctgcgagggagagataaaagaggaacaaaagaggaccctagagcagactacgcctgtatagccgagaataaaccaacgtag

SEQ ID NO: 193089 - DNA, 132 bp, synthetic construct
  misc_feature 1..132: note = Description of Artificial Sequence: Synthetic coding sequence
  source 1..132: mol_type = other DNA
taccggggcatgatgatctacgtgagcaccggcgcctggggctgggccggctcttgcttctggcagtggagcttctgcccgcctgcttgtgtaggctgtattgaggagaggttgcctgtccctagcagctag

SEQ ID NO: 193090 - DNA, 111 bp, synthetic construct
  misc_feature 1..111: note = Description of Artificial Sequence: Synthetic coding sequence
  source 1..111: mol_type = other DNA
atgctgagccggaacgacgacatctgcatctacggcggcctgggcttgggagggttacttttgctcgctgtggtcctgctgtcagcctgcttgtgctggctacacagatag

SEQ ID NO: 193091 - DNA, 315 bp, synthetic construct
  misc_feature 1..315: note = Description of Artificial Sequence: Synthetic coding sequence
  source 1..315: mol_type = other DNA
atgctgagccggaacgacgacatctgcatctacggcggcctgggcctgggcggcctcctgctactcgcagtggtcctcctaagcgcttgcctgtgttggctgcatagaagagtgaagcggttggaaaggtcttggcacctcctctcctggtcccaggcccagggttcttccgaacaggagctgcattatgccagcctccaacggctgcctgtgcccagcagcgagggtcccgatttgcgaggcagagataaaagggggacaaaggaggaccccagggcagattacgcttgtatcgccgaaaataagcctacgtag

SEQ ID NO: 193092 - DNA, 141 bp, synthetic construct
  misc_feature 1..141: note = Description of Artificial Sequence: Synthetic coding sequence
  source 1..141: mol_type = other DNA
atgctgagccggaacgacgacatctgcatctacggcggcctgggcctcgggggcctgctcttgcttgccgttgtcctcctgtcggcgtgtctctgttggctgcacaggcgtgagcactgtcttgcccttgagccactctag

SEQ ID NO: 193093 - DNA, 42 bp, synthetic construct; identical to SEQ ID NO: 193063
  misc_feature 1..42: note = Description of Artificial Sequence: Synthetic coding sequence
  source 1..42: mol_type = other DNA

SEQ ID NO: 193094 - DNA, 87 bp, synthetic construct
  misc_feature 1..87: note = Description of Artificial Sequence: Synthetic coding sequence
  source 1..87: mol_type = other DNA
atgctgagccggaacgacggccccggcctgctgcgggccggcaccccgctgtgcatctccgcagaggctgccagcgctcagcagtag

SEQ ID NO: 193095 - DNA, 201 bp, synthetic construct
  misc_feature 1..201: note = Description of Artificial Sequence: Synthetic coding sequence
  source 1..201: mol_type = other DNA
atgctgagccggaacgacgtgaagcggctggagcggagctgggcccaaggcagcagtgaacaggagctgcactatgcatctttacaaagactgccagtgccatcttcggagggcccagacttaagaggacgggacaagcgcggcacaaaggaggatccacgcgctgactacgcatgcatcgcggaaaacaagcccacttag

SEQ ID NO: 193096 - DNA, 87 bp, synthetic construct
  misc_feature 1..87: note = Description of Artificial Sequence: Synthetic coding sequence
  source 1..87: mol_type = other DNA
atgctgagccggaacgacggccccggcctgctgcgggccggcacccccctctgcatctccgccgaagctgccagcgcacagcaatag

SEQ ID NO: 193097 - DNA, 87 bp, synthetic construct
  misc_feature 1..87: note = Description of Artificial Sequence: Synthetic coding sequence
  source 1..87: mol_type = other DNA
atgctgagccggaacgacggccccggcctgctgcgggccggcacccctctgtgcatttcagcggaagccgccagtgcacagcagtag

SEQ ID NO: 193098 - DNA, 132 bp, synthetic construct
  misc_feature 1..132: note = Description of Artificial Sequence: Synthetic coding sequence
  source 1..132: mol_type = other DNA
tgaagccggaacgacgacatctgcatctacggcggcctgggcctgggcggcttgctgctcctggccgtggtcttactgtccgcctgcctgtgttggctgcacagacgtgaggccgcttccgcccagcagtag

SEQ ID NO: 193099 - DNA, 156 bp, synthetic construct
  misc_feature 1..156: note = Description of Artificial Sequence: Synthetic coding sequence
  source 1..156: mol_type = other DNA
atgctgagccggaacgacgtgaagcggctggagcggagctggcggcttccagtaccttcgtccgagggccccgacctgcggggccgggataaacgagggactaaggaagacccgcgcgcagactatgcttgtattgccgaaaacaaaccaacatag

SEQ ID NO: 193100 - DNA, 108 bp, synthetic construct
  misc_feature 1..108: note = Description of Artificial Sequence: Synthetic coding sequence
  source 1..108: mol_type = other DNA
atgctgagccggaacgacgcccccagcgtgctggtgcccggccccggactgttacgggctggcacccccctctgcatctcggctgaggctgccagcgcccagcagtag

SEQ ID NO: 193101 - DNA, 42 bp, synthetic construct; identical to SEQ ID NO: 193063
  misc_feature 1..42: note = Description of Artificial Sequence: Synthetic coding sequence
  source 1..42: mol_type = other DNA

SEQ ID NO: 193102 - DNA, 294 bp, synthetic construct
  misc_feature 1..294: note = Description of Artificial Sequence: Synthetic coding sequence
  source 1..294: mol_type = other DNA
atgctgagccggaacgacgacatctgcatctacggcggcctgggcctcggaggactgctgctacttgccgtagtgctcctgtccgcatgcctgtgctggttacaccgtcgtgtcaaaaggctcgagaggtcatgggctcaggggagttctgaacaggagctgcactacgcctctctccaaaggctgcctgtgccctctagtgaggggcctgacctgagaggacgggataaacgcggaaccaaagaggaccccagggcagactatgcatgtattgcagaaaacaagccaacgtag

SEQ ID NO: 193103 - DNA, 201 bp, synthetic construct
  misc_feature 1..201: note = Description of Artificial Sequence: Synthetic coding sequence
  source 1..201: mol_type = other DNA
atgctgagccggaacgacgtgaagcggctggagcggagctgggcccagggttcctctgagcaggagctgcactacgcctcactgcagaggttacccgttccatcctccgagggacctgacctgcggggcagagacaaacgggggacaaaagaagatcccagagccgactacgcctgcatagccgaaaataagcctacctag

SEQ ID NO: 193104 - DNA, 141 bp, synthetic construct
  misc_feature 1..141: note = Description of Artificial Sequence: Synthetic coding sequence
  source 1..141: mol_type = other DNA
atgctgagccggaacgacgacatctgcatctacggcggcctgggcttgggcggtctcctccttctagctgtggtcctcttatcggcttgcctttgttggctgcacagacgcgaacattgtctggcactcgaacccctttag

SEQ ID NO: 193105 - DNA, 132 bp, synthetic construct
  misc_feature 1..132: note = Description of Artificial Sequence: Synthetic coding sequence
  source 1..132: mol_type = other DNA
tgaagccggaacgacgacatctgcatctacggcggcctgggcctgggcggactgctgctgctcgcagtggtgctgcttagcgcttgtctgtgttggctgcatagacgagaagccgccagcgctcaacagtag

SEQ ID NO: 193106 - DNA, 141 bp, synthetic construct
  misc_feature 1..141: note = Description of Artificial Sequence: Synthetic coding sequence
  source 1..141: mol_type = other DNA
atgctgagccggaacgacgacatctgcatctacggcggcctgggccttgggggactattgctcttggctgtggtgcttcttagcgcatgcctgtgttggctgcacagaagggaacattgccttgcactggagcccctctag

SEQ ID NO: 193107 - DNA, 87 bp, synthetic construct
  misc_feature 1..87: note = Description of Artificial Sequence: Synthetic coding sequence
  source 1..87: mol_type = other DNA
atgctgagccggaacgacggccccggcctgctgcgggccggcaccccattgtgcatctctgcagaggcagcgtcggcacagcagtag

SEQ ID NO: 193108 - DNA, 132 bp, synthetic construct
  misc_feature 1..132: note = Description of Artificial Sequence: Synthetic coding sequence
  source 1..132: mol_type = other DNA
tgaagccggaacgacgacatctgcatctacggcggcctgggcctgggagggctcctccttctcgccgtcgtgctcctgagtgcgtgcctgtgctggctccatcgtcgggaggccgcttctgcgcagcaatag

SEQ ID NO: 193109 - DNA, 201 bp, synthetic construct
  misc_feature 1..201: note = Description of Artificial Sequence: Synthetic coding sequence
  source 1..201: mol_type = other DNA
atgctgagccggaacgacgtgaagcggctggagcggagctgggcccagggctctagcgagcaggagcttcattatgccagcctgcagagactgccagtgccatccagcgagggtccagacctccgaggacgcgacaaaagagggaccaaagaggacccccgggcggactacgcgtgcatcgccgagaataagccaacctag

SEQ ID NO: 193110 - DNA, 180 bp, synthetic construct
  misc_feature 1..180: note = Description of Artificial Sequence: Synthetic coding sequence
  source 1..180: mol_type = other DNA
atgctgagccggaacgacgacatctgcatctacggcggcctgggccttggcgggttgctcctgttggccgtggtactgctttcagcttgtctgtgctggctgcatcgtagaggccctggcctcctgagggccggtacccccctttgtatttctgccgaagcagcgagtgcccaacagtag

SEQ ID NO: 193111 - DNA, 222 bp, synthetic construct
  misc_feature 1..222: note = Description of Artificial Sequence: Synthetic coding sequence
  source 1..222: mol_type = other DNA
atgctgagccggaacgacgtgaagcggctggagcggagctggcacctcctgtcatggtcacaggcccaaggctcctcagaacaggagctgcactatgcatccctccagagactgcccgtcccctcatcggagggacctgatttacgcggccgcgataagagagggaccaaggaggacccgcgggctgattacgcttgtatcgcagagaacaagcccacttag

SEQ ID NO: 193112 - DNA, 201 bp, synthetic construct
  misc_feature 1..201: note = Description of Artificial Sequence: Synthetic coding sequence
  source 1..201: mol_type = other DNA
atgctgagccggaacgacgacatctgcatctacggcggcctgggcctcggaggtttattgcttctggcggtcgtccttctgagcgcttgtctttgctggttacaccgaagagcaccctccgtgctggtgccaggtcccggtctcctccgggctggtactcccctctgtatttccgcagaggctgcatctgcccaacaatag

SEQ ID NO: 193113 - DNA, 201 bp, synthetic construct
  misc_feature 1..201: note = Description of Artificial Sequence: Synthetic coding sequence
  source 1..201: mol_type = other DNA
atgctgagccggaacgacgtgaagcggctggagcggagctgggcccaagggtctagcgaacaggaactgcactatgcaagtctgcaacgcttgcccgttccttcatcggaggggcctgatctgaggggtagagacaaacgagggactaaggaggacccccgggccgattacgcctgcattgctgagaacaaaccgacctag

SEQ ID NO: 193114 - DNA, 87 bp, synthetic construct
  misc_feature 1..87: note = Description of Artificial Sequence: Synthetic coding sequence
  source 1..87: mol_type = other DNA
atgctgagccggaacgacggccccggcctgctgcgggccggcacccccctctgtatttctgctgaggctgcatcagcccagcagtag

SEQ ID NO: 193115 - DNA, 249 bp, synthetic construct
  misc_feature 1..249: note = Description of Artificial Sequence: Synthetic coding sequence
  source 1..249: mol_type = other DNA
atgctgagccggaacgacgacatctgcatctacggcggcctgggccttggcgggctcctgttgctggctgtcgtgctcctgtccgcatgcctctgttggctgcataggcgagtcaaacgactcgagaggtcatggaggcttcctgtgccttccagtgagggccctgacttgcggggaagggacaaacggggaaccaaggaggatccccgagccgactacgcttgcatcgcagaaaataagcccacctag

SEQ ID NO: 193116 - DNA, 156 bp, synthetic construct
  misc_feature 1..156: note = Description of Artificial Sequence: Synthetic coding sequence
  source 1..156: mol_type = other DNA
atgctgagccggaacgacgtgaagcggctggagcggagctggcggctgcctgtcccttccagcgagggccctgatctccgcggtagggacaagcggggcacaaaggaggatccaagagctgattacgcctgcattgccgagaacaagccaacctag

SEQ ID NO: 193117 - DNA, 180 bp, synthetic construct
  misc_feature 1..180: note = Description of Artificial Sequence: Synthetic coding sequence
  source 1..180: mol_type = other DNA
atgctgagccggaacgacgacatctgcatctacggcggcctgggcctcggcggattgttactgttggccgtggttctgttgtccgcctgcctgtgttggctacataggcggggacctgggttactgagggcgggcactcctttgtgtattagtgctgaggctgcctccgcgcagcaatag

SEQ ID NO: 193118 - DNA, 201 bp, synthetic construct
  misc_feature 1..201: note = Description of Artificial Sequence: Synthetic coding sequence
  source 1..201: mol_type = other DNA
atgctgagccggaacgacgtgaagcggctggagcggagctgggcccaaggcagttccgaacaggaactgcattacgcatccctacagagactccctgtgccttcctccgagggcccagatcttcgtggtagagacaagagaggtactaaagaggaccctagagcggactatgcttgtatagccgagaataaacctacatag

SEQ ID NO: 193119 - DNA, 156 bp, synthetic construct
  misc_feature 1..156: note = Description of Artificial Sequence: Synthetic coding sequence
  source 1..156: mol_type = other DNA
atgctgagccggaacgacgtgaagcggctggagcggagctggcggctgcccgtgccatcctccgagggtccagatctgcggggacgcgataaaaggggcacgaaagaagacccacgcgctgactacgcctgtatcgccgagaataaacccacttag

SEQ ID NO: 193120 - DNA, 249 bp, synthetic construct
  misc_feature 1..249: note = Description of Artificial Sequence: Synthetic coding sequence
  source 1..249: mol_type = other DNA
atgctgagccggaacgacgacatctgcatctacggcggcctgggcctgggcggactcctcctgttggctgtcgtgctcctgtcagcttgtctctgttggcttcatagacgcgttaagagacttgagcgatcctggaggcttccggtcccctcctcagagggccctgacttacgaggccgtgataaaagaggcactaaggaagatccccgggccgactatgcatgcatcgccgagaacaagcctacctag

SEQ ID NO: 193121 - DNA, 141 bp, synthetic construct
  misc_feature 1..141: note = Description of Artificial Sequence: Synthetic coding sequence
  source 1..141: mol_type = other DNA
atgctgagccggaacgacgacatctgcatctacggcggcctgggcctaggcggactgttgctgttagctgtggttctcctgtccgcttgcctttgttggcttcaccgtagagagcattgcttagccctcgaacctttgtag

SEQ ID NO: 193122 - DNA, 108 bp, synthetic construct
  misc_feature 1..108: note = Description of Artificial Sequence: Synthetic coding sequence
  source 1..108: mol_type = other DNA
atgctgagccggaacgacgcccccagcgtgctggtgcccggccccgggctgctcagagctggcacacccctgtgcatctcagctgaagcagcgtccgcccagcagtag

SEQ ID NO: 193123 - DNA, 249 bp, synthetic construct
  misc_feature 1..249: note = Description of Artificial Sequence: Synthetic coding sequence
  source 1..249: mol_type = other DNA
atgctgagccggaacgacgacatctgcatctacggcggcctgggccttggaggattgcttctcctcgccgttgttctgctgtcggcgtgtctttgttggctgcaccgcagagtcaagcgactggagcgctcctggcgcctgcccgtcccctcatcggaaggtcccgatctcagggggcgagataaacgcggtacaaaggaggacccccgcgcagactacgcatgtattgccgaaaacaaaccgacctag

SEQ ID NO: 193124 - DNA, 87 bp, synthetic construct
  misc_feature 1..87: note = Description of Artificial Sequence: Synthetic coding sequence
  source 1..87: mol_type = other DNA
atgctgagccggaacgacggccccggcctgctgcgggccggcacccccttgtgtatttccgctgaggccgcatcagcccagcagtag

SEQ ID NO: 193125 - DNA, 294 bp, synthetic construct
  misc_feature 1..294: note = Description of Artificial Sequence: Synthetic coding sequence
  source 1..294: mol_type = other DNA
atgctgagccggaacgacgacatctgcatctacggcggcctgggcctgggaggtctgctgcttcttgccgtggtgctactatccgcatgcctctgttggctccacagaagggtgaagcggctggagcgatcttgggctcaggggtcctcagagcaggagctgcattacgcttcactccagagactgccagtgccgagctcggaagggccagacctgagaggcagggacaagcgaggtaccaaggaggaccctagggccgattatgcctgcatcgctgagaataaacccacctag

SEQ ID NO: 193126 - DNA, 87 bp, synthetic construct
  misc_feature 1..87: note = Description of Artificial Sequence: Synthetic coding sequence
  source 1..87: mol_type = other DNA
atgctgagccggaacgacggccccggcctgctgcgggccggcaccccgttatgcattagcgccgaagccgcatccgctcaacagtag

SEQ ID NO: 193127 - DNA, 108 bp, synthetic construct
  misc_feature 1..108: note = Description of Artificial Sequence: Synthetic coding sequence
  source 1..108: mol_type = other DNA
atgctgagccggaacgacgcccccagcgtgctggtgcccggccccggtctcttgcgcgccggcaccccactgtgcatctctgcagaggctgcctccgcacagcagtag

SEQ ID NO: 193128 - DNA, 294 bp, synthetic construct
  misc_feature 1..294: note = Description of Artificial Sequence: Synthetic coding sequence
  source 1..294: mol_type = other DNA
atgctgagccggaacgacgacatctgcatctacggcggcctgggcttaggggggctccttctccttgctgttgtgctgctgagcgcctgtttgtgctggctgcaccggagagtgaaaagactggagcgctcctgggctcagggtagctctgagcaagagctgcactatgcgtccctgcagaggctcccagtcccttcttctgagggcccagacctgcggggtagggacaaaaggggtacaaaggaagaccccagagccgattacgcctgcatcgcagaaaataagccgacgtag

SEQ ID NO: 193129 - DNA, 201 bp, synthetic construct
  misc_feature 1..201: note = Description of Artificial Sequence: Synthetic coding sequence
  source 1..201: mol_type = other DNA
atgctgagccggaacgacgtgaagcggctggagcggagctgggcccagggctcaagcgaacaggagctgcattatgccagtctgcagcggctaccggtgcctagttccgagggccctgacctgcggggccgcgacaagcgaggcacaaaggaagatccccgggcagactacgcatgcattgccgaaaacaaacctacatag

SEQ ID NO: 193130 - DNA, 201 bp, synthetic construct
  misc_feature 1..201: note = Description of Artificial Sequence: Synthetic coding sequence
  source 1..201: mol_type = other DNA
atgctgagccggaacgacgtgaagcggctggagcggagctgggcccagggatctagtgaacaggaactccattacgcgagtctgcagaggttacccgtcccaagctctgaaggcccagatcttcgtggacgcgacaaaaggggtacgaaggaggatcctcgcgccgactacgcttgcattgctgaaaataagccgacatag

SEQ ID NO: 193131 - DNA, 42 bp, synthetic construct; identical to SEQ ID NO: 193063
  misc_feature 1..42: note = Description of Artificial Sequence: Synthetic coding sequence
  source 1..42: mol_type = other DNA

SEQ ID NO: 193132 - DNA, 87 bp, synthetic construct
  misc_feature 1..87: note = Description of Artificial Sequence: Synthetic coding sequence
  source 1..87: mol_type = other DNA
atgctgagccggaacgacggccccggcctgctgcgggccggcacccccctctgtatatccgcagaagctgcttccgctcagcaatag

SEQ ID NO: 193133 - DNA, 111 bp, synthetic construct
  misc_feature 1..111: note = Description of Artificial Sequence: Synthetic coding sequence
  source 1..111: mol_type = other DNA
atgctgagccggaacgacgacatctgcatctacggcggcctgggcctcggcggcctgctccttctggcagtcgtgctgctcagcgcctgcctctgttggctccacagatag

SEQ ID NO: 193134 - DNA, 294 bp, synthetic construct
  misc_feature 1..294: note = Description of Artificial Sequence: Synthetic coding sequence
  source 1..294: mol_type = other DNA
atgctgagccggaacgacgacatctgcatctacggcggcctgggcctgggcggcctcctgcttctggctgttgtgctcctgagcgcctgtctgtgttggttgcaccgacgagtaaagagactggaaaggagctgggctcagggcagcagcgagcaggagcttcattatgcatccctgcagagactgccagtcccatctagtgaggggcctgacctgcgcggaagggataagcgaggcactaaagaggacccaagggctgactacgcctgcatcgctgagaataaacctacatag

SEQ ID NO: 193135 - DNA, 180 bp, synthetic construct
  misc_feature 1..180: note = Description of Artificial Sequence: Synthetic coding sequence
  source 1..180: mol_type = other DNA
atgctgagccggaacgacgacatctgcatctacggcggcctgggcctgggaggactgctcttattggctgttgtcctgttaagcgcatgcctatgttggcttcatagacgcggaccaggtctgcttcgcgcagggaccccactgtgcataagcgccgaggctgcatctgcccagcagtag

SEQ ID NO: 193136 - DNA, 294 bp, synthetic construct
  misc_feature 1..294: note = Description of Artificial Sequence: Synthetic coding sequence
  source 1..294: mol_type = other DNA
atgctgagccggaacgacgacatctgcatctacggcggcctgggcctggggggcctcctgctgttggcagtggtgttgctttctgcgtgtctctgttggctacatagacgggtgaaacgcctcgagagaagctgggcccagggcagctcagaacaggaattgcattacgctagtctgcagaggctgcccgtgccttccagcgaaggccctgacttgcgtggtagagacaagagaggcactaaggaggatccaagggcggactatgcctgtattgctgaaaacaaacccacctag

SEQ ID NO: 193137 - DNA, 201 bp, synthetic construct
  misc_feature 1..201: note = Description of Artificial Sequence: Synthetic coding sequence
  source 1..201: mol_type = other DNA
atgctgagccggaacgacgacatctgcatctacggcggcctgggcctggggggtcttctgctgctcgctgtcgtgcttttatccgcatgtctgtgctggttgcatcggcgtgctccctctgttcttgtgcctggccctggcctcctgagagctgggacccctttgtgcatctccgcggaagccgcttctgcccaacagtag

SEQ ID NO: 193138 - DNA, 87 bp, synthetic construct
  misc_feature 1..87: note = Description of Artificial Sequence: Synthetic coding sequence
  source 1..87: mol_type = other DNA
atgctgagccggaacgacggccccggcctgctgcgggccggcacccccctctgcattagcgctgaggccgcatctgcacagcagtag

SEQ ID NO: 193139 - DNA, 180 bp, synthetic construct
  misc_feature 1..180: note = Description of Artificial Sequence: Synthetic coding sequence
  source 1..180: mol_type = other DNA
atgctgagccggaacgacgacatctgcatctacggcggcctgggcctgggagggcttctcctgctagcagtcgttctgctctcagcctgcctgtgttggctgcataggcggggtcctggattacttcgagccggaacccccctgtgtatttcagccgaagctgcctccgctcagcagtag

SEQ ID NO: 193140 - DNA, 201 bp, synthetic construct
  misc_feature 1..201: note = Description of Artificial Sequence: Synthetic coding sequence
  source 1..201: mol_type = other DNA
atgctgagccggaacgacgtgaagcggctggagcggagctgggcccaggggtcgtccgaacaggaactgcactatgcaagtctgcagcgacttccggtcccctcaagcgaaggccccgatcttcgcggccgggacaagagaggtacaaaagaagacccaagagccgactacgcatgcattgccgaaaacaaaccaacatag

SEQ ID NO: 193141 - DNA, 108 bp, synthetic construct
  misc_feature 1..108: note = Description of Artificial Sequence: Synthetic coding sequence
  source 1..108: mol_type = other DNA
atgctgagccggaacgacgcccccagcgtgctggtgcccggccccggactactgcgcgccggcactcccttgtgcatctctgctgaagcagcttccgctcagcagtag

SEQ ID NO: 193142 - DNA, 201 bp, synthetic construct
  misc_feature 1..201: note = Description of Artificial Sequence: Synthetic coding sequence
  source 1..201: mol_type = other DNA
atgctgagccggaacgacgtgaagcggctggagcggagctgggcccagggctcttccgagcaagagctgcactatgcttctttacagagactgcctgtcccgagtagtgaggggcctgatctgaggggccgggacaaaaggggaaccaaggaggaccccagagcggactatgcctgtattgctgaaaacaaaccaacatag

SEQ ID NO: 193143 - DNA, 87 bp, synthetic construct
  misc_feature 1..87: note = Description of Artificial Sequence: Synthetic coding sequence
  source 1..87: mol_type = other DNA
atgctgagccggaacgacggccccggcctgctgcgggccggcacccccctgtgcatctctgccgaggccgcatctgcccagcagtag

SEQ ID NO: 193144 - DNA, 108 bp, synthetic construct
  misc_feature 1..108: note = Description of Artificial Sequence: Synthetic coding sequence
  source 1..108: mol_type = other DNA
atgctgagccggaacgacgcccccagcgtgctggtgcccggccccggcttgttacgcgccggtacacccctgtgcatctccgctgaagcagcatcggcacagcagtag

SEQ ID NO: 193145 - DNA, 132 bp, synthetic construct
  misc_feature 1..132: note = Description of Artificial Sequence: Synthetic coding sequence
  source 1..132: mol_type = other DNA
tgaagccggaacgacgacatctgcatctacggcggcctgggcctgggcggactactcctgctggcggtagtgctgttatctgcttgcctctgctggctgcaccgcagggaggctgcgagcgcacaacaatag

SEQ ID NO: 193146 - DNA, 111 bp, synthetic construct
  misc_feature 1..111: note = Description of Artificial Sequence: Synthetic coding sequence
  source 1..111: mol_type = other DNA
atgctgagccggaacgacgacatctgcatctacggcggcctgggcctggggggtcttctcctcctggcggttgtcctgctctcagcgtgtttgtgctggctacataggtag

SEQ ID NO: 193147 - DNA, 111 bp, synthetic construct
  misc_feature 1..111: note = Description of Artificial Sequence: Synthetic coding sequence
  source 1..111: mol_type = other DNA
atgctgagccggaacgacgacatctgcatctacggcggcctgggcctcggcggattgctgctcctggccgttgtattgctctctgcctgtctctgctggttgcaccggtag

SEQ ID NO: 193148 - DNA, 201 bp, synthetic construct
  misc_feature 1..201: note = Description of Artificial Sequence: Synthetic coding sequence
  source 1..201: mol_type = other DNA
atgctgagccggaacgacgtgaagcggctggagcggagctgggcccaaggaagctccgaacaggaactgcattatgctagtctccagcggcttcccgtaccttccagtgagggccctgaccttaggggtcgcgacaagcggggaacgaaggaggatcctcgagccgattatgcatgcatcgccgagaataaaccgacttag

SEQ ID NO: 193149 - DNA, 294 bp, synthetic construct
  misc_feature 1..294: note = Description of Artificial Sequence: Synthetic coding sequence
  source 1..294: mol_type = other DNA
atgctgagccggaacgacgacatctgcatctacggcggcctgggcttgggtgggctgctcttgttggcggtggtgctgctgagcgcttgcctctgctggctacatcggagggtaaaacgtctcgagcggtcctgggcccaggggagctcggaacaggagctgcactacgcaagcctgcaaaggctgcccgtcccatcgtctgagggacctgatttgaggggtagagacaagcgaggcacgaaagaagatccacgggccgactatgcctgtatcgcggagaataaacccacctag

SEQ ID NO: 193150 - DNA, 87 bp, synthetic construct
  misc_feature 1..87: note = Description of Artificial Sequence: Synthetic coding sequence
  source 1..87: mol_type = other DNA
atgctgagccggaacgacggccccggcctgctgcgggccggcacccctctctgcattagcgctgaagcagccagcgcccagcagtag

SEQ ID NO: 193151 - DNA, 315 bp, synthetic construct
  misc_feature 1..315: note = Description of Artificial Sequence: Synthetic coding sequence
  source 1..315: mol_type = other DNA
atgctgagccggaacgacgacatctgcatctacggcggcctgggcctgggcggactgttgctgctcgctgtcgtgctgctttcggcctgcttatgttggcttcatcgcagggtgaaaagactggagcgctcctggcatcttctgtcttggagtcaggctcagggttcctccgagcaggaattgcactatgcgagcctgcagcgcctcccagttccctcatctgagggcccagacctacggggcagggacaaacgcgggacgaaggaggacccccgcgccgactatgcatgcatagccgaaaataaaccgacatag

SEQ ID NO: 193152 - DNA, 201 bp, synthetic construct
  misc_feature 1..201: note = Description of Artificial Sequence: Synthetic coding sequence
  source 1..201: mol_type = other DNA
atgctgagccggaacgacgtgaagcggctggagcggagctgggcccagggatctagcgagcaggaactccattacgcaagcctgcagcgcctgccagtgccatccagcgaggggccggacctccgaggcagggataagagggggaccaaagaagatccaagagctgattacgcctgcatcgctgagaacaagccgacatag

SEQ ID NO: 193153 - DNA, 111 bp, synthetic construct
  misc_feature 1..111: note = Description of Artificial Sequence: Synthetic coding sequence
  source 1..111: mol_type = other DNA
atgctgagccggaacgacgacatctgcatctacggcggcctgggcttagggggcctgctcctgctggcagtggtcctgctaagcgcctgcctgtgctggctgcacaggtag

SEQ ID NO: 193154 - DNA, 294 bp, synthetic construct
  misc_feature 1..294: note = Description of Artificial Sequence: Synthetic coding sequence
  source 1..294: mol_type = other DNA
atgctgagccggaacgacgacatctgcatctacggcggcctgggcttaggaggtctcttgctgttagccgttgttttactgtcggcctgtctctgctggctccacagacgggttaagcgattagaaagatcctgggcccagggttcctccgaacaggaattgcactacgcaagcttacagcgcctgcctgtcccctcatccgaggggcctgacctccgaggacgggataagcggggaaccaaagaggacccaagagcagattatgcctgtattgctgagaacaagcctacgtag

SEQ ID NO: 193155 - DNA, 156 bp, synthetic construct
  misc_feature 1..156: note = Description of Artificial Sequence: Synthetic coding sequence
  source 1..156: mol_type = other DNA
atgctgagccggaacgacgtgaagcggctggagcggagctggcggcttccggtgccatcatctgagggccccgatctgaggggccgtgataagcgtggaactaaagaagaccccagggccgactatgcctgcattgctgaaaataagcctacatag

SEQ ID NO: 193156 - DNA, 315 bp, synthetic construct
  misc_feature 1..315: note = Description of Artificial Sequence: Synthetic coding sequence
  source 1..315: mol_type = other DNA
atgctgagccggaacgacgacatctgcatctacggcggcctgggcctggggggtctgctgctgctggccgtggttttgctttcggcttgcctgtgctggctacatagacgcgttaagcgccttgagcggtcatggcacctcctatcatggtcccaagcccagggcagctctgagcaggagttgcattatgccagcctgcaaaggctgcccgtgccatcctcagagggccctgatttgagagggcgcgacaaacggggaacaaaagaggaccctcgcgctgactatgcctgcatcgctgaaaacaagccgacatag

SEQ ID NO: 193157 - DNA, 294 bp, synthetic construct
  misc_feature 1..294: note = Description of Artificial Sequence: Synthetic coding sequence
  source 1..294: mol_type = other DNA
atgctgagccggaacgacgacatctgcatctacggcggcctgggcttggggggcctactcctgctggccgttgttctattgtcggcctgcctttgttggttacacagacgcgtaaaacgattagagcgcagctgggctcaggggagctctgaacaggaattgcactacgctagtctccaacggctcccggttccttccagcgaaggacccgatctgaggggacgagataaaagggggaccaaggaagatccaagggccgactacgcgtgtatagccgaaaataaacctacctag

SEQ ID NO: 193158 - DNA, 315 bp, synthetic construct
  misc_feature 1..315: note = Description of Artificial Sequence: Synthetic coding sequence
  source 1..315: mol_type = other DNA
atgctgagccggaacgacgacatctgcatctacggcggcctgggcttaggaggacttttacttcttgccgtggtgctgctgtcggcttgcctttgctggcttcatcgtagagtgaagcggttggaacgttcatggcaccttctgtcgtggtctcaagctcagggttcttctgagcaggagcttcactacgcaagtctgcaacgcctgccggtgcccagctcagagggacctgatcttcgtgggagggacaagaggggaactaaagaagacccccgggccgattacgcttgtatcgccgagaacaagccgacctag

SEQ ID NO: 193159 - DNA, 156 bp, synthetic construct
  misc_feature 1..156: note = Description of Artificial Sequence: Synthetic coding sequence
  source 1..156: mol_type = other DNA
atgctgagccggaacgacgtgaagcggctggagcggagctggcggcttcctgtcccctcctcagagggccccgatctgcggggtagggacaaaagaggcactaaggaggacccccgcgccgactatgcatgcattgcggaaaacaagcctacatag

SEQ ID NO: 193160 - DNA, 201 bp, synthetic construct
  misc_feature 1..201: note = Description of Artificial Sequence: Synthetic coding sequence
  source 1..201: mol_type = other DNA
atgctgagccggaacgacgacatctgcatctacggcggcctgggcctgggaggactcctactgttggcagtggttcttctgtccgcctgtctttgttggctccacagaagggcgccttctgtgctggtgcccggtccaggtctactccgagctggtaccccactctgcatcagtgccgaggctgctagcgctcagcagtag

SEQ ID NO: 193161 - DNA, 111 bp, synthetic construct
  misc_feature 1..111: note = Description of Artificial Sequence: Synthetic coding sequence
  source 1..111: mol_type = other DNA
atgctgagccggaacgacgacatctgcatctacggcggcctgggcctgggcgggttgctcctgctcgcggtcgttctcctcagtgcttgcttatgctggttgcatcgctag

SEQ ID NO: 193162 - DNA, 222 bp, synthetic construct
  misc_feature 1..222: note = Description of Artificial Sequence: Synthetic coding sequence
  source 1..222: mol_type = other DNA
atgctgagccggaacgacgtgaagcggctggagcggagctggcacctcctgagctggtcacaggcccaaggcagtagtgagcaggagctgcattatgcctccctgcagagactgccagtgccgagcagcgagggcccggatttaagggggcgcgacaaacggggaacaaaggaggacccaagggccgattacgcttgcatcgctgaaaacaagcccacttag

SEQ ID NO: 193163 - DNA, 201 bp, synthetic construct
  misc_feature 1..201: note = Description of Artificial Sequence: Synthetic coding sequence
  source 1..201: mol_type = other DNA
atgctgagccggaacgacgtgaagcggctggagcggagctgggcccagggaagttctgaacaggagctgcattatgctagcctccaaaggctccccgtgccatctagcgagggtcctgacttacgagggagggataagcggggcacaaaagaggaccctcgagctgattatgcttgtattgccgagaataagccgacctag

SEQ ID NO: 193164 - DNA, 201 bp, synthetic construct
  misc_feature 1..201: note = Description of Artificial Sequence: Synthetic coding sequence
  source 1..201: mol_type = other DNA
atgctgagccggaacgacgtgaagcggctggagcggagctgggcccaggggtcctcggagcaagagctacattacgcttcactgcagaggctgcctgtacccagcagcgaaggccccgatttaagagggcgcgacaagaggggcacaaaggaggacccccgggccgactacgcatgcattgctgagaataagcctacttag

SEQ ID NO: 193165 - DNA, 108 bp, synthetic construct
  misc_feature 1..108: note = Description of Artificial Sequence: Synthetic coding sequence
  source 1..108: mol_type = other DNA
atgctgagccggaacgacgcccccagcgtgctggtgcccggccccggtctgctgcgagccggaaccccactgtgtatttctgccgaggcggcatcagcccagcagtag

SEQ ID NO: 193166 - DNA, 87 bp, synthetic construct
  misc_feature 1..87: note = Description of Artificial Sequence: Synthetic coding sequence
  source 1..87: mol_type = other DNA
atgctgagccggaacgacggccccggcctgctgcgggccggcaccccactgtgtattagcgctgaggccgcatcggcacaacagtag

SEQ ID NO: 193167 - DNA, 141 bp, synthetic construct
  misc_feature 1..141: note = Description of Artificial Sequence: Synthetic coding sequence
  source 1..141: mol_type = other DNA
atgctgagccggaacgacgacatctgcatctacggcggcctgggcttaggcgggctgttactgttagcagtcgtactacttagcgcctgcctgtgctggctgcaccgcagggaacactgcctggctcttgagcccctgtag

SEQ ID NO: 193168 - DNA, 141 bp, synthetic construct
  misc_feature 1..141: note = Description of Artificial Sequence: Synthetic coding sequence
  source 1..141: mol_type = other DNA
atgctgagccggaacgacgacatctgcatctacggcggcctgggccttggaggtctcctcctcctggccgtcgtgctgcttagtgcctgcttatgctggctgcatcgccgggaacactgtctcgccctcgagccgctgtag

SEQ ID NO: 193169 - DNA, 201 bp, synthetic construct
  misc_feature 1..201: note = Description of Artificial Sequence: Synthetic coding sequence
  source 1..201: mol_type = other DNA
atgctgagccggaacgacgacatctgcatctacggcggcctgggcctgggaggactcctgctactagctgtagtattgctatctgcttgtctgtgttggttacatcgaagagcaccttccgtgctcgtccccggtccgggactgctgcgggccggcactcctctatgcataagtgccgaggccgccagcgcacagcagtag

SEQ ID NO: 193170 - DNA, 141 bp, synthetic construct
  misc_feature 1..141: note = Description of Artificial Sequence: Synthetic coding sequence
  source 1..141: mol_type = other DNA
atgctgagccggaacgacgacatctgcatctacggcggcctgggcctaggtggtctcctgctgttagccgtggtgctgctctctgcttgtttatgctggctccacaggcgggagcactgcttggctctggagcccttgtag

SEQ ID NO: 193171 - DNA, 87 bp, synthetic construct
  misc_feature 1..87: note = Description of Artificial Sequence: Synthetic coding sequence
  source 1..87: mol_type = other DNA
atgctgagccggaacgacggccccggcctgctgcgggccggcacccctttgtgcatcagcgcagaggccgcaagcgcccagcagtag

SEQ ID NO: 193172 - DNA, 294 bp, synthetic construct
  misc_feature 1..294: note = Description of Artificial Sequence: Synthetic coding sequence
  source 1..294: mol_type = other DNA
atgctgagccggaacgacgacatctgcatctacggcggcctgggcctgggcggcctccttctacttgctgtggtgttgctgtcggcatgcctatgttggcttcacagaagggttaagcggctcgagcggtcatgggcccaggggtcgtctgaacaggaactgcactatgcaagtttgcagagactcccggtcccatcttccgaagggcctgacctccgcggtagagataaaaggggcactaaggaggatcctagggctgattacgcctgcattgccgagaataaacccacctag

SEQ ID NO: 193173 - DNA, 180 bp, synthetic construct
  misc_feature 1..180: note = Description of Artificial Sequence: Synthetic coding sequence
  source 1..180: mol_type = other DNA
atgctgagccggaacgacgacatctgcatctacggcggcctgggcctggggggtttactcctgcttgccgttgtgctactttctgcctgcctttgttggctccaccgacggggcccggggctactgcgggcgggcaccccactgtgcatatcagcggaagctgcctcggcgcaacaatag

SEQ ID NO: 193174 - DNA, 294 bp, synthetic construct
  misc_feature 1..294: note = Description of Artificial Sequence: Synthetic coding sequence
  source 1..294: mol_type = other DNA
atgctgagccggaacgacgacatctgcatctacggcggcctgggcctgggcgggctcctcctgcttgccgtcgtgttactctcagcctgcctctgttggctacatcgaagagtgaaacggttggagcgctcatgggcccaaggcagcagcgagcaagaactgcactacgcctctctgcagcgtttaccagttccctccagcgagggaccggatctacgcggacgggacaaaaggggcactaaagaggacccgcgcgctgattacgcatgcatcgccgaaaacaaaccgacatag

SEQ ID NO: 193175 - DNA, 87 bp, synthetic construct
  misc_feature 1..87: note = Description of Artificial Sequence: Synthetic coding sequence
  source 1..87: mol_type = other DNA
atgctgagccggaacgacggccccggcctgctgcgggccggcacccctctgtgtatttctgctgaagcagctagcgcacaacagtag

SEQ ID NO: 193176 - DNA, 111 bp, synthetic construct
  misc_feature 1..111: note = Description of Artificial Sequence: Synthetic coding sequence
  source 1..111: mol_type = other DNA
atgctgagccggaacgacgacatctgcatctacggcggcctgggcctgggaggtctgctgttgcttgccgtggtgttactgagtgcatgtctctgttggctgcaccgatag

SEQ ID NO: 193177 - DNA, 156 bp, synthetic construct
  misc_feature 1..156: note = Description of Artificial Sequence: Synthetic coding sequence
  source 1..156: mol_type = other DNA
atgctgagccggaacgacgtgaagcggctggagcggagctggcggctccctgtgccatcatcagagggcccagacctccgggggagggataagcgagggacaaaagaggaccccagggctgactacgcgtgcatcgcagagaataaacctacatag

SEQ ID NO: 193178 - DNA, 42 bp, synthetic construct; identical to SEQ ID NO: 193063
  misc_feature 1..42: note = Description of Artificial Sequence: Synthetic coding sequence
  source 1..42: mol_type = other DNA

SEQ ID NO: 193179 - DNA, 201 bp, synthetic construct
  misc_feature 1..201: note = Description of Artificial Sequence: Synthetic coding sequence
  source 1..201: mol_type = other DNA
atgctgagccggaacgacgtgaagcggctggagcggagctgggcccagggatcttccgaacaggaactccattacgcaagtttgcagcgtcttccagtacctagttctgaaggtccggatctcaggggccgtgacaaaaggggaacgaaggaggacccaagggctgattacgcctgtatcgccgaaaacaaacccacctag

SEQ ID NO: 193180 - DNA, 87 bp, synthetic construct
  misc_feature 1..87: note = Description of Artificial Sequence: Synthetic coding sequence
  source 1..87: mol_type = other DNA
atgctgagccggaacgacggccccggcctgctgcgggccggcaccccgctgtgtattagcgccgaagctgcatccgcccagcagtag

SEQ ID NO: 193181 - DNA, 315 bp, synthetic construct
  misc_feature 1..315: note = Description of Artificial Sequence: Synthetic coding sequence
  source 1..315: mol_type = other DNA
atgctgagccggaacgacgacatctgcatctacggcggcctgggcctgggtggcctgctactgctggccgttgtcctgctgagcgcctgtctatgctggctccatcgccgggttaagcgcctggagcgctcatggcacctgctctcctggagccaggctcagggtagctctgaacaggagttgcattatgcatcattgcagcggttaccagtaccgtcctctgagggacccgacctacggggcagagacaaacgagggacaaaagaggatccccgtgccgattacgcctgtatcgctgaaaataaaccgacgtag

SEQ ID NO: 193182 - DNA, 249 bp, synthetic construct
  misc_feature 1..249: note = Description of Artificial Sequence: Synthetic coding sequence
  source 1..249: mol_type = other DNA
atgctgagccggaacgacgacatctgcatctacggcggcctgggcctggggggattgttgttgcttgccgtagtgctgctgtctgcgtgtctgtgttggctgcaccggcgagtgaagaggctcgaaaggtcctggaggctacctgtccctagttccgagggcccagatctccgcggccgggataagaggggaactaaggaggaccctagagccgattatgcctgcatcgcggaaaacaagcccacctag

SEQ ID NO: 193183 - DNA, 201 bp, synthetic construct
  misc_feature 1..201: note = Description of Artificial Sequence: Synthetic coding sequence
  source 1..201: mol_type = other DNA
atgctgagccggaacgacgtgaagcggctggagcggagctgggcccagggctccagtgagcaggagctgcattacgcaagcctgcagagactgcccgtgccttcatccgagggcccagacctgcgagggagagacaagcgaggaaccaaggaagatcctcgggcagattacgcgtgtattgcagaaaacaagccaacatag

SEQ ID NO: 193184 - DNA, 87 bp, synthetic construct
  misc_feature 1..87: note = Description of Artificial Sequence: Synthetic coding sequence
  source 1..87: mol_type = other DNA
atgctgagccggaacgacggccccggcctgctgcgggccggcacccctctctgtatttctgccgaggcagcatcggcacagcagtag

SEQ ID NO: 193185 - DNA, 132 bp, synthetic construct
  misc_feature 1..132: note = Description of Artificial Sequence: Synthetic coding sequence
  source 1..132: mol_type = other DNA
tgaagccggaacgacgacatctgcatctacggcggcctgggcctgggcgggctgctgttgcttgcagtcgtattattatccgcttgtctctgctggcttcacaggagagaggcggcctccgcccagcagtag

SEQ ID NO: 193186 - DNA, 249 bp, synthetic construct
  misc_feature 1..249: note = Description of Artificial Sequence: Synthetic coding sequence
  source 1..249: mol_type = other DNA
atgctgagccggaacgacgacatctgcatctacggcggcctgggccttggaggcctgctgctattggccgtggtcctgctatcagcttgtttgtgctggcttcacaggcgagttaagcgactggagcggtcatggagactccccgtgccctcttcagagggtcccgaccttcgtggacgcgacaagaggggcaccaaagaggatccccgcgctgattatgcatgtattgccgagaacaagcctacctag

SEQ ID NO: 193187 - DNA, 201 bp, synthetic construct
  misc_feature 1..201: note = Description of Artificial Sequence: Synthetic coding sequence
  source 1..201: mol_type = other DNA
atgctgagccggaacgacgtgaagcggctggagcggagctgggcccaaggcagcagtgagcaggaactccattatgcctctctgcagagattgccagttccaagttctgaaggaccggatttgcgcggaagagataagagggggactaaagaggatcccagggcagactacgcttgcatagcagagaacaaacccacctag

SEQ ID NO: 193188 - DNA, 180 bp, synthetic construct
  misc_feature 1..180: note = Description of Artificial Sequence: Synthetic coding sequence
  source 1..180: mol_type = other DNA
atgctgagccggaacgacgacatctgcatctacggcggcctgggccttggtggactgctcctgttagccgttgtgttgcttagcgcttgtttatgttggctgcatcgccgcggacctgggctgttacgagcagggacacccctgtgtataagtgctgaagcagcctctgcccaacaatag

SEQ ID NO: 193189 - DNA, 87 bp, synthetic construct
  misc_feature 1..87: note = Description of Artificial Sequence: Synthetic coding sequence
  source 1..87: mol_type = other DNA
atgctgagccggaacgacggccccggcctgctgcgggccggcacccctctttgcatttctgctgaagcagcctcagctcagcagtag

SEQ ID NO: 193190 - DNA, 249 bp, synthetic construct
  misc_feature 1..249: note = Description of Artificial Sequence: Synthetic coding sequence
  source 1..249: mol_type = other DNA
atgctgagccggaacgacgacatctgcatctacggcggcctgggccttgggggccttttgctgctggctgtggttttactatcggcctgtttatgttggttgcatcgcagggtcaaacgcctcgaaagatcgtggagactgcccgttcctagttcggagggccctgatctacgaggtcgcgacaagagagggactaaggaagaccctcgggcggactacgcatgtattgccgaaaacaagcccacctag

SEQ ID NO: 193191 - DNA, 111 bp, synthetic construct
  misc_feature 1..111: note = Description of Artificial Sequence: Synthetic coding sequence
  source 1..111: mol_type = other DNA
atgctgagccggaacgacgacatctgcatctacggcggcctgggccttggggggttactgcttctggctgtcgtcctcctaagcgcatgtctgtgctggttgcaccgatag

SEQ ID NO: 193192 - DNA, 222 bp, synthetic construct
  misc_feature 1..222: note = Description of Artificial Sequence: Synthetic coding sequence
  source 1..222: mol_type = other DNA
atgctgagccggaacgacgtgaagcggctggagcggagctggcaccttctaagttggagtcaggcccaagggtcatcggaacaagaactccattatgctagcctgcagagactgcctgtgcctagcagcgaaggtccagacttaagaggccgtgacaaacgcgggacgaaagaagatccaagggctgattatgcttgcattgcagaaaataagccaacatag

SEQ ID NO: 193193 - DNA, 201 bp, synthetic construct
  misc_feature 1..201: note = Description of Artificial Sequence: Synthetic coding sequence
  source 1..201: mol_type = other DNA
atgctgagccggaacgacgtgaagcggctggagcggagctgggcccaggggtcttctgagcaggagcttcactacgccagccttcagcgactgcctgtgccgtcctccgaaggccctgacttgagaggaagagataaaaggggtaccaaggaagacccgcgggctgattatgcttgcatagcagaaaacaagcccacatag

SEQ ID NO: 193194 - DNA, 87 bp, synthetic construct
  misc_feature 1..87: note = Description of Artificial Sequence: Synthetic coding sequence
  source 1..87: mol_type = other DNA
atgctgagccggaacgacggccccggcctgctgcgggccggcacccctctttgcattagcgcagaggcagcttccgcccaacagtag

SEQ ID NO: 193195 - DNA, 201 bp, synthetic construct
  misc_feature 1..201: note = Description of Artificial Sequence: Synthetic coding sequence
  source 1..201: mol_type = other DNA
atgctgagccggaacgacgacatctgcatctacggcggcctgggcctgggcggcctgctcctgcttgctgttgtgttattgtcggcctgcctctgttggttgcaccgtcgggccccctcagtattagtgcccggcccagggctgctccgtgctggcactcccttatgtatctctgccgaggccgccagtgcccagcagtag

SEQ ID NO: 193196 - DNA, 222 bp, synthetic construct
  misc_feature 1..222: note = Description of Artificial Sequence: Synthetic coding sequence
  source 1..222: mol_type = other DNA
atgctgagccggaacgacgtgaagcggctggagcggagctggcacctcctgagctggagtcaggcccagggatcctctgaacaggaactgcattacgcaagtctccagcgtctccccgtcccatcaagcgaaggccccgacctgcgggggagagataagagaggaaccaaagaagacccgcgcgctgattatgcttgcattgccgagaataagccgacatag

SEQ ID NO: 193197 - DNA, 201 bp, synthetic construct
  misc_feature 1..201: note = Description of Artificial Sequence: Synthetic coding sequence
  source 1..201: mol_type = other DNA
atgctgagccggaacgacgacatctgcatctacggcggcctgggcctgggtgggctcctcctgctagctgtcgtgctcctgtcagcttgcctgtgctggctccaccgccgcgcccctagtgttctcgttcccggacccggccttctgagagccggcactccactgtgtatatcggctgaagccgcttcggcacaacaatag

SEQ ID NO: 193198 - DNA, 87 bp, synthetic construct
  misc_feature 1..87: note = Description of Artificial Sequence: Synthetic coding sequence
  source 1..87: mol_type = other DNA
atgctgagccggaacgacggccccggcctgctgcgggccggcacccccctctgcatctctgcggaggctgccagcgctcaacagtag

SEQ ID NO: 193199 - DNA, 87 bp, synthetic construct
  misc_feature 1..87: note = Description of Artificial Sequence: Synthetic coding sequence
  source 1..87: mol_type = other DNA
atgctgagccggaacgacggccccggcctgctgcgggccggcacccccctgtgcatctctgctgaggccgccagtgcccagcagtag

SEQ ID NO: 193200 - DNA, 87 bp, synthetic construct
  misc_feature 1..87: note = Description of Artificial Sequence: Synthetic coding sequence
  source 1..87: mol_type = other DNA
atgctgagccggaacgacggccccggcctgctgcgggccggcaccccactgtgtattagcgctgaggctgcgtctgcccagcaatag

SEQ ID NO: 193201 - DNA, 87 bp, synthetic construct
  misc_feature 1..87: note = Description of Artificial Sequence: Synthetic coding sequence
  source 1..87: mol_type = other DNA
atgctgagccggaacgacggccccggcctgctgcgggccggcacccctctttgtatttccgcagaagccgcctcagcccagcagtag

SEQ ID NO: 193202 - DNA, 294 bp, synthetic construct
  misc_feature 1..294: note = Description of Artificial Sequence: Synthetic coding sequence
  source 1..294: mol_type = other DNA
atgctgagccggaacgacgacatctgcatctacggcggcctgggcctcggtggcctgctactgctagcggttgtcctgctgtccgcatgtctgtgctggctgcatcggagagtcaagcgcctggaaagaagttgggctcagggctcaagcgagcaggaactccactatgcaagtctgcagaggttacccgtgccatcctccgaagggcctgatctccggggacgcgataaacgaggtaccaaggaggacccacgggctgattacgcctgcattgcggagaataaaccaacatag

SEQ ID NO: 193203 - DNA, 222 bp, synthetic construct
  misc_feature 1..222: note = Description of Artificial Sequence: Synthetic coding sequence
  source 1..222: mol_type = other DNA
atgctgagccggaacgacgtgaagcggctggagcggagctggcacctcctcagctggagccaagcacaaggcagttcagaacaggagctccactatgcttcccttcagcgcttaccggtgccatcttccgaagggcctgatctaagaggtcgcgataagcggggaaccaaagaagatcctagagcagattatgcatgcatagccgagaataaaccaacgtag

SEQ ID NO: 193204 - DNA, 87 bp, synthetic construct
  misc_feature 1..87: note = Description of Artificial Sequence: Synthetic coding sequence
  source 1..87: mol_type = other DNA
atgctgagccggaacgacggccccggcctgctgcgggccggcacccctttgtgtatatccgccgaggctgcttccgctcagcaatag

SEQ ID NO: 193205 - DNA, 294 bp, synthetic construct
  misc_feature 1..294: note = Description of Artificial Sequence: Synthetic coding sequence
  source 1..294: mol_type = other DNA
atgctgagccggaacgacgacatctgcatctacggcggcctgggcttagggggcttattgttgctggcggtggtgctgctttcagcctgtttatgttggctgcatcgtcgggtgaagaggctcgaaagatcctgggcccagggatccagtgagcaggagttgcattatgcctccctgcagcggctgccggtgcccagctctgaggggccagatctgagggggagagataagcgtggcactaaagaagatcccagagcggactatgcgtgtatagctgaaaataaacctacctag

SEQ ID NO: 193206 - DNA, 201 bp, synthetic construct
  misc_feature 1..201: note = Description of Artificial Sequence: Synthetic coding sequence
  source 1..201: mol_type = other DNA
atgctgagccggaacgacgtgaagcggctggagcggagctgggcccagggctccagtgagcaggaactccattacgcgtccctgcagaggttgcctgtgcctagctccgagggccctgatctgagaggccgtgataaacggggcacaaaggaagatcccagagcagattacgcctgcatagctgagaataagcccacctag

SEQ ID NO: 193207 - DNA, 87 bp, synthetic construct
  misc_feature 1..87: note = Description of Artificial Sequence: Synthetic coding sequence
  source 1..87: mol_type = other DNA
atgctgagccggaacgacggccccggcctgctgcgggccggcacccccctgtgcatctctgccgaagctgcaagtgctcagcagtag

SEQ ID NO: 193208 - DNA, 201 bp, synthetic construct
  misc_feature 1..201: note = Description of Artificial Sequence: Synthetic coding sequence
  source 1..201: mol_type = other DNA
atgctgagccggaacgacgtgaagcggctggagcggagctgggcccaggggagcagcgagcaggagttgcattatgcttctctacagagactgcctgtacctagcagcgagggtcctgacctcagaggaagagataaacgcggcactaaggaagatccaagggctgactacgcatgcatagccgagaacaagccaacttag

SEQ ID NO: 193209 - DNA, 42 bp, synthetic construct; identical to SEQ ID NO: 193063
  misc_feature 1..42: note = Description of Artificial Sequence: Synthetic coding sequence
  source 1..42: mol_type = other DNA

SEQ ID NO: 193210 - DNA, 132 bp, synthetic construct
  misc_feature 1..132: note = Description of Artificial Sequence: Synthetic coding sequence
  source 1..132: mol_type = other DNA
taccggggcatgatgatctacgtgagcaccggcgcctggggctgggccgggagttgtttttggcagtggtccttctgccccccagcatgcgtcggatgtatcgaggagcggctcccagttccatctagctag

SEQ ID NO: 193211 - DNA, 201 bp, synthetic construct
  misc_feature 1..201: note = Description of Artificial Sequence: Synthetic coding sequence
  source 1..201: mol_type = other DNA
atgctgagccggaacgacgtgaagcggctggagcggagctgggcccagggctcctctgagcaggagctgcactatgcctccctccagcgtctcccagtgccatcatctgaaggacctgatttgagagggagggacaaaaggggaaccaaagaagaccccagggcagactacgcgtgtatcgccgagaataagccaacttag

SEQ ID NO: 193212 - DNA, 294 bp, synthetic construct
  misc_feature 1..294: note = Description of Artificial Sequence: Synthetic coding sequence
  source 1..294: mol_type = other DNA
atgctgagccggaacgacgacatctgcatctacggcggcctgggccttggcggcttgctgctgctcgcagtggtgctgctctcggcctgtctgtgttggctgcacagacgtgtgaagaggttggagaggtcttgggctcaaggaagttcagaacaggaactccactatgcttcactgcagcggctgccagtgcctagcagtgagggccccgatttgcgcggacgggataagcgagggaccaaggaagatccccgcgccgattacgcctgtatcgccgagaacaaaccaacctag

SEQ ID NO: 193213 - DNA, 222 bp, synthetic construct
  misc_feature 1..222: note = Description of Artificial Sequence: Synthetic coding sequence
  source 1..222: mol_type = other DNA
atgctgagccggaacgacgtgaagcggctggagcggagctggcacctgttgagctggtcgcaggcgcagggaagttcagagcaggagctgcactacgccagcctgcagcgcctgcctgtcccaagtagtgaaggcccggatctgcgaggcagagacaaacgtggaaccaaagaggacccacgcgcagattatgcctgtattgcagagaacaagcccacatag

SEQ ID NO: 193214 - DNA, 42 bp, synthetic construct; identical to SEQ ID NO: 193063
  misc_feature 1..42: note = Description of Artificial Sequence: Synthetic coding sequence
  source 1..42: mol_type = other DNA

SEQ ID NO: 193215 - DNA, 276 bp, synthetic construct
  misc_feature 1..276: note = Description of Artificial Sequence: Synthetic coding sequence
  source 1..276: mol_type = other DNA
atgatctacgtgagcaccggcgcctggggctgggccggcagctgcttctggcagtggtctttttgccctcccgcatgtgtgggctgcattgaagagcacctgctaagctggtctcaggcccagggatcaagtgagcaggaactgcattacgcctccctccagcgattaccggtcccctcatccgagggaccggacttgcgaggcagagataaaagagggactaaggaggaccccagggcagactacgcatgtattgccgaaaataaacctacatag

SEQ ID NO: 193216 - DNA, 276 bp, synthetic construct
  misc_feature 1..276: note = Description of Artificial Sequence: Synthetic coding sequence
  source 1..276: mol_type = other DNA
atgatctacgtgagcaccggcgcctggggctgggccggcagctgcttttggcaatggtcattctgtcctccagcctgcgtgggatgtatcgaagaacacctgctgagctggagtcaggcacaaggttcgagtgaacaagagctacattatgcctctctccagcgcttgcctgtcccttcctccgaggggcccgacctgcgcggtcgggacaagcgtggaacaaaagaggacccacgggctgattacgcttgtatcgctgaaaacaagccgacctag

SEQ ID NO: 193217 - DNA, 276 bp, synthetic construct
  misc_feature 1..276: note = Description of Artificial Sequence: Synthetic coding sequence
  source 1..276: mol_type = other DNA
atgatctacgtgagcaccggcgcctggggctgggccggcagctgcttttggcagtggtctttctgtcccccggcatgcgtgggctgcattgaggaacaccttttgagctggagtcaggcccaggggagttcggagcaagaactccattacgccagcttgcaacggcttccagtgccctcaagtgagggcccagatctgaggggacgcgataagcgcggcacgaaagaggatcctcgcgctgattacgcttgcatagccgagaataaacctacttag

SEQ ID NO: 193218 - DNA, 108 bp, synthetic construct
  misc_feature 1..108: note = Description of Artificial Sequence: Synthetic coding sequence
  source 1..108: mol_type = other DNA
atgctgagccggaacgacgcccccagcgtgctggtgcccggccccgggctcctaagggcaggcacccccttatgtatcagcgcagaggctgctagtgcacaacaatag

SEQ ID NO: 193219 - DNA, 276 bp, synthetic construct
  misc_feature 1..276: note = Description of Artificial Sequence: Synthetic coding sequence
  source 1..276: mol_type = other DNA
atgatctacgtgagcaccggcgcctggggctgggccggcagctgcttctggcagtggtctttctgtccgcccgcatgcgtgggctgcattgaagaacacctcctgtcttggagtcaagcccaagggtcatctgagcaggaactgcactatgcaagtttgcaaaggcttcctgtgccctcctcagaggggcccgatctgagaggccgagataaaagggggacgaaggaagacccgagggccgattatgcatgtatcgccgagaacaaacccacctag

SEQ ID NO: 193220 - DNA, 108 bp, synthetic construct
  misc_feature 1..108: note = Description of Artificial Sequence: Synthetic coding sequence
  source 1..108: mol_type = other DNA
atgctgagccggaacgacgcccccagcgtgctggtgcccggccccggacttctccgagccggcaccccgttatgcatcagcgcagaggctgcttcagcacaacaatag

SEQ ID NO: 193221 - DNA, 108 bp, synthetic construct
  misc_feature 1..108: note = Description of Artificial Sequence: Synthetic coding sequence
  source 1..108: mol_type = other DNA
atgctgagccggaacgacgcccccagcgtgctggtgcccggccccggcctgctgcgtgcaggcactcctctgtgcattagcgccgaggcggcctccgcccagcagtag

SEQ ID NO: 193222 - DNA, 276 bp, synthetic construct
  misc_feature 1..276: note = Description of Artificial Sequence: Synthetic coding sequence
  source 1..276: mol_type = other DNA
atgatctacgtgagcaccggcgcctggggctgggccggcagctgcttttggcaatggtccttctgccctcccgcttgtgtggggtgcattgaggagcacctcctgtcctggtcacaagcacagggcagctctgagcaggaacttcactatgcgtcactgcagagattgcccgttcctagctcagagggcccggatctccgcgggagagataagcgagggaccaaagaggatcccagagccgactatgcctgcatcgctgaaaacaaacctacctag

SEQ ID NO: 193223 - DNA, 276 bp, synthetic construct
  misc_feature 1..276: note = Description of Artificial Sequence: Synthetic coding sequence
  source 1..276: mol_type = other DNA
atgatctacgtgagcaccggcgcctggggctgggccggcagctgcttctggcaatggagtttctgtccgcctgcctgtgtcgggtgcatcgaggaacacctgctgagttggtcacaggcccaaggaagcagtgaacaggaattacactatgccagtctccagagattaccagtcccaagctctgaagggcccgatttgcgcggccgggacaaacgcggaacgaaggaagaccccagggccgattacgcctgtatagccgaaaataagccgacctag

SEQ ID NO: 193224 - DNA, 108 bp, synthetic construct
  misc_feature 1..108: note = Description of Artificial Sequence: Synthetic coding sequence
  source 1..108: mol_type = other DNA
atgctgagccggaacgacgcccccagcgtgctggtgcccggccccggtctgctgcgggcggggactccattgtgtatttccgccgaggcagcctctgcccagcaatag

SEQ ID NO: 193225 - DNA, 108 bp, synthetic construct
  misc_feature 1..108: note = Description of Artificial Sequence: Synthetic coding sequence
  source 1..108: mol_type = other DNA
atgctgagccggaacgacgcccccagcgtgctggtgcccggccccggactgcttcgggcaggcactcctctgtgtatctccgctgaagccgctagtgcccagcagtag

SEQ ID NO: 193226 - DNA, 108 bp, synthetic construct
  misc_feature 1..108: note = Description of Artificial Sequence: Synthetic coding sequence
  source 1..108: mol_type = other DNA
atgctgagccggaacgacgcccccagcgtgctggtgcccggccccgggctgcttcgcgctgggacccccctatgcatcagcgccgaggctgccagcgcccagcagtag

SEQ ID NO: 193227 - DNA, 108 bp, synthetic construct
  misc_feature 1..108: note = Description of Artificial Sequence: Synthetic coding sequence
  source 1..108: mol_type = other DNA
atgctgagccggaacgacgcccccagcgtgctggtgcccggccccgggttactaagagctgggacccctctgtgcatttccgccgaggccgcaagcgcgcagcagtag

SEQ ID NO: 193228 - DNA, 276 bp, synthetic construct
  misc_feature 1..276: note = Description of Artificial Sequence: Synthetic coding sequence
  source 1..276: mol_type = other DNA
atgatctacgtgagcaccggcgcctggggctgggccggcagctgcttttggcagtggagtttttgtccgcctgcctgcgtcggatgcattgaggagcacttgttaagctggtcccaggcacaggggtcttctgaacaggaactgcattacgcctcattgcaacgactgcccgtcccttcgagtgagggacctgacctgagaggcagggacaagagagggactaaagaggaccctcgggctgactatgcatgtatcgccgagaataagccgacttag

SEQ ID NO: 193229 - DNA, 843 bp, synthetic construct
  misc_feature 1..843: note = Description of Artificial Sequence: Synthetic coding sequence
  source 1..843: mol_type = other DNA
atggagcgggagatggtgctgtgcctggcccagaccatccacacccaggaagatttgccccggccttctattagtgctgagcccgggacagttattcccttaggaagccatgtgactttcgtgtgtcgcggacctgtaggggttcagacctttcgcctggagagggaaagccgcagtacctacaatgacactgaagatgtgtcccaggcaagcccatccgagagcgaagctaggtttaggatcgacagtgtgagtgagggcaatgccgggccttatagatgtatctattataagccgcctaagtggagtgagcaatccgattatctggagctcctggtcaaggagacgtcaggcggtccagatagcccggatactgaaccagggagttctgctggcccaactcagaggccgtctgataactcacacaacgagcacgctccggcttcccaagggctgaaagctgagcacctatacatcctgattggcgtttctgtcgtttttctgttttgcctcctgctcctcgtgctgttttgtcttcatcgccagaatcagataaaacagggaccaccgcggagcaaagatgaagagcaaaaaccacagcagagacctgatctggcagttgatgtgcttgagcggactgccgacaaagcgaccgttaacggattacctgagaaagaccgagagacagacacctctgctctagctgctggatcctctcaagaggttacctatgcccagctggatcattgggccctgacacaaaggacggcccgcgccgtatcaccacaaagcacaaagcccatggccgagtccatcacttatgctgcggtcgctcgccactag

SEQ ID NO: 193230 - DNA, 813 bp, synthetic construct
  misc_feature 1..813: note = Description of Artificial Sequence: Synthetic coding sequence
  source 1..813: mol_type = other DNA
atgagcccccaccccaccgccctgctgggcctggtgctgtgcctggctcagaccatccacactcaggaagaggatctgccacgccctagcatttcagcggagccaggtactgtcattccactgggttctcacgtgacatttgtctgtaggggacccgtgggcgtccagacattcaggctggagcgagagtctcggagtacatacaatgatacagaggacgtttctcaggcatctccctccgaatctgaagctaggttccggatcgactcggtgagcgaggggaatgccggaccctataggtgcatatactacaaaccacctaagtggtctgagcagtctgattacttagaactgttggtgaaggggcctacgcagcggccaagtgacaactctcacaacgagcacgcccctgcaagccaaggactaaaggccgaacatctttatatactgattggggtgtcggttgtttttttgttctgccttctcttgctcgtgcttttctgcctacatagacagaaccagatcaagcaggggcctccccggagcaaggacgaagaacaaaagccccaacagcgccctgatttggccgtagacgtgctcgagagaacagccgataaggcgaccgtcaacggcttaccagaaaaggaccgagagaccgacacctccgcccttgctgctggcagtagtcaagaagtgacctacgcccagctcgatcactgggccctcacgcagcgcactgcccgcgctgtgtccccgcaatctactaaacccatggccgagagcatcacatatgccgcagttgccaggcattag

SEQ ID NO: 193231 - DNA, 864 bp, synthetic construct
  misc_feature 1..864: note = Description of Artificial Sequence: Synthetic coding sequence
  source 1..864: mol_type = other DNA
atgagcccccaccccaccgccctgctgggcctggtgctgtgcctggcacagaccatacacacccaagaagaagacctgcctcggcctagtatatctgccgaacctggaaccgtcatcccattgggatcccacgtgacctttgtctgcaggggtccagtgggggtacagacctttcgcctggaacgggaatcccgttccacctataatgacactgaggacgtatcacaggcttcaccctccgaaagtgaagctagattccggatcgactctgtgtcagaaggcaatgccggaccgtatcgctgcatctactacaagccgccaaagtggtcggaacagagcgactacttagagctcctggttaaggagacctccggtgggcccgactcccctgacaccgaaccgggatcatccgcaggccctacccagcgacctagcgacaacagtcacaatgagcacgctcccgccagccaaggtctcaaggccgagcatctgtacattctgattggggtctctgtggtcttcctattctgcttgctgctgctggtgctcttctgcctccaccggcagaatcagattaaacagggtccccctagaagcaaagatgaggaacaaaaaccacagcaacggcccgacctggcagttgacgtcttagaaagaacggccgacaaagccaccgtcaatggcctgcctgaaaaagatcgggagacagacactagtgctctggccgctggaagttcacaagaagttacctacgcccagttagaccactgggctctcacccaaagaacagcccgcgcagtctctccacagtcaactaagcctatggctgagagcatcacatacgcggccgtcgcaagacactag

SEQ ID NO: 193232 - DNA, 1545 bp, synthetic construct
  misc_feature 1..1545: note = Description of Artificial Sequence: Synthetic coding sequence
  source 1..1545: mol_type = other DNA
atgctgacccgggtgaagagcgccgtggccaacttcatgggcggcatcatggccggctcctccgggagtgagcacggtggtggtagctgtggcggttcagatctgccgcttcggtttccatatggtagaccagagtttttgggtctttctcaagacgaggtggaatgtagcgccgatcacatcgcccgcccaatactgatccttaaagaaacccgtcgattgccttgggctaccggatatgctgaggtgattaatgcaggcaagtcaactcataatgaggatcaggcatcttgcgaagtcctgacagttaaaaagaaggccggtgcagtgacctccacaccaaaccggaactcaagcaaacgacgaagcagcctgcctaatggagaaggattgcaactgaaagagaattccgagtccgagggggtgagctgccactactggtcgttgttcgacggacatgccggctccggcgccgccgtcgtggcgagtagattacttcagcatcacatcactgaacaactacaggacattgtagatatcctgaaaaattccgcagtgctgccccctacctgcctgggtgaagaacccgaaaatactcccgccaactcaaggacccttacacgcgccgccagccttagggggggcgtcggggccccaggctccccatctactccccccacgcggttcttcaccgaaaaaaaaattccacacgagtgtctggtgatcggcgcccttgagtccgcatttaaggagatggacctccagattgagcgagaaagatctagttacaatatctctgggggctgcaccgctctcatagttatttgcctactggggaagctttacgtagccaatgcaggagatagcagagctatcatcatacgtaatggagaaatcatccccatgtcatctgagttcacacctgaaacagaaagacagcgcctgcagtatctggccttcatgcagccccatctcctggggaatgaatttacccacctggaattcccgcgccgggttcagaggaaagaactgggaaagaagatgctgtatagggatttcaacatgacagggtgggcctacaagacgatcgaagacgaagacctgaaattccccctcatttacggggaaggtaagaaagcccgtgtgatggcaacgatcggggtgacaagaggtctgggcgaccatgacctgaaagtgcatgacagcaacatctacattaaaccttttctgagttccgccccggaagtacggatctatgatctttcaaagtacgaccatggctccgatgatgtcctaattctcgcgacggatggcctctgggatgtcctgagcaacgaggaggtagccgaagccatcactcagttcctcccaaactgcgatcccgacgacccgcaccgatacacgcttgcagcgcaggatttggtgatgcgcgcacgaggtgtgttgaaagaccgaggctggcggattagtaacgataggcttggttccggagacgatatctcagtgtacgttattcccctgattcacggcaataaactgagctag

SEQ ID NO: 193233 - DNA, 1527 bp, synthetic construct
  misc_feature 1..1527: note = Description of Artificial Sequence: Synthetic coding sequence
  source 1..1527: mol_type = other DNA
atgctgccccagcggaacctgagcaagcggcaggtgcccaccatgcatattcctgtcaaaacgagacgactgttggctgctctgaaagtgttagacaccaaagacttaactattgagaaagtcgtcatcaacggacaggaggtcaaatatgcccttggggagcgtcagtcctataaaggctcacctatggagatttcgctccctatcgcgttgtccaagaatcaggagatagtgatcgagatctctttcgagaccagccccaaatcatcggctctgcaatggctgacacccgagcagacatctggaaaggagcacccatacctcttctcacagtgccaggctatccactgccgcgctatcctcccttgccaggatactcccagcgttaagttgacgtataccgccgaggtaagcgttccaaaggagctggtggccctgatgagcgcaatccgagatggagagactcctgaccctgaggatccatctcgcaagatttacaaattcatccagaaagtgcccatcccgtgttacttaatcgcgttagtggttggcgctttagagtctcggcaaataggaccccggactcttgtttggtctgaaaaagaacaagtcgaaaagtctgcctacgagttcagtgagaccgaatcgatgctgaaaatcgctgaggatttgggcggcccttatgtgtggggccaatacgatctgcttgttttgcccccaagcttcccatatggggggatggagaatccatgtttgaccttcgttacgcccacactgctggctggtgacaagagcctctccaatgtaattgcccatgaaatcagtcactcatggaccggcaatctggtcacaaacaagacttgggatcatttttggttgaacgaaggtcacaccgtatacttagagcggcacatctgtggacggctgtttggggagaagttccgccacttcaacgcattaggcggatggggagagttacagaactccgttaaaacattcggagagacccacccgtttacaaagctcgtcgttgacctgactgacattgacccagacgtggcctactctagtgtcccttatgagaagggctttgccttgctgttctacctcgagcaactgctcggcggacctgaaatctttcttggatttcttaaggcctacgtggagaagtttagctacaagtcaataaccacggacgattggaaagattttctttatagttactttaaagacaaggtagacgtgctgaaccaggtagactggaacgcttggctctatagccctggattgccacccattaaacccaattacgatatgacgctgactaacgcttgtatcgcattgtctcagcgctggattactgcgaaggaggacgatctcaactccttcaatgctaccgacttaaaggacctttcgtcacaccagctgaacgaattcctggcccagactcttcagaggatggcggctgcacttcactcgatacaggtcggtggacgaaactcctttggggccaaggacggaaactag

SEQ ID NO: 193234 - DNA, 1764 bp, synthetic construct
  misc_feature 1..1764: note = Description of Artificial Sequence: Synthetic coding sequence
  source 1..1764: mol_type = other DNA
atgctgccccagcggaacctgagcaagcggcaggtgcccaccatgcacatcccagttaagacccgccgtctcttggcggcgctcaaggtcttggacacaaaagatctcactatagagaaggtggtgatcaatggccaggaagtcaaatatgccctgggagagcgtcagtcttacaagggatcacccatggagatcagcctccctatcgccctctcaaaaaaccaggaaattgtgattgaaatatcttttgagacatcaccaaaatccagcgccctgcagtggttaactccggagcagactagtggcaaagaacatccctacttattcagccagtgccaggccattcactgccgggccattctcccatgtcaagatacgcctagcgtgaagctgacctatacagccgaagtgagcgttcccaaggaactcgtagccctaatgagtgctattagagatggcgagacacccgatcccgaagaccccagtaggaagatctataaatttatccagaaggtccctatcccatgctatctgatcgccctagtcgtgggcgcactggaatctcggcagatcggccccaggacactagtgtggagcgaaaaagagcaggttgaaaagtcggcctacgagttcagcgagactgagtccatgttgaagatcgcggaagatctgggaggcccttatgtgtggggtcagtacgacctcttggttcttccacccagttttccctacggcggcatggaaaacccatgtctgactttcgtcacccctacattgctggcgggggataagtccctgtcaaatgttatagcccatgagatctctcactcctggacagggaacctcgtgactaacaagacttgggatcacttttggctgaacgaaggccacaccgtgtacctcgagcggcatatctgcggccggctgttcggagagaagttcagacactttaatgccttaggagggtggggcgaactccagaactctgttaagaccttcggtgagacccacccgttcactaaattggtggtcgatctgactgatattgatccggacgtggcttactccagcgtgccatacgagaaaggttttgccctcctgttttacctggagcagctgctggggggcccagaaatctttttgggatttcttaaagcttatgtggaaaagttcagctacaaatccattacgacagatgactggaaggacttcctttacagctattttaaagataaggtcgacgtcctgaatcaggtggactggaacgcatggctgtactccccaggactccctccaatcaaacccaattacgatatgactcttactaacgcctgcatcgccctctcccagagatggatcacggccaaggaagacgatctgaatagtttcaacgccactgacctgaaagacctgagtagccaccagctcaacgagtttctggcacaaacacttcaacgcgcccctcttccactggggcacattaaacgaatgcaggaggtctacaatttcaacgctattaataacagcgagattcggtttcggtggctgaggttatgtattcagagcaaatgggaagatgccattcccctcgcgctcaaaatggcaactgaacaagggcgcatgaaattcaccagaccccttttcaaggacctagctgcattcgacaagtcacacgaccaggccgttagaacctaccaggaacataaggcctccatgcaccccgtcactgcgatgctggtgggcaaagatttaaaggtggattag

SEQ ID NO: 193235 - DNA, 1059 bp, synthetic construct
  misc_feature 1..1059: note = Description of Artificial Sequence: Synthetic coding sequence
  source 1..1059: mol_type = other DNA
atgaacaccaccagcagcgccgccccccccagcctgggcgtggagttcatcagcttgctagctattatcttgctatctgtagcccttgccgtcgggctcccaggcaatagtttcgtcgtgtggtcgatcctcaagagaatgcagaaacgctctgtgacggccctgatggttctcaatttagctctggccgatctggcggttctgctgactgcgcccttctttctgcacttcctcgcacaggggacttggagcttcggccttgccggttgtcgcctctgccactacgtttgcggagtctccatgtatgcatcagttctgttgatcacagcaatgtccctggatcgctcactagcagtcgccaggcccttcgtctcccagaaacttcggaccaaggctatggctagaagagtcctggccggaatatgggtactttcctttctccttgcaacacctgttctggcgtaccggacagtggttccctggaagacaaacatgtcattgtgttttcccagatacccctctgagggtcatagagcctttcacttgatttttgaggctgttaccggttttctgttacccttcctagccgttgtggccagctactctgacatcggtaggcgcctccaggctaggcggttccggcggagccgacggactgggcgcctcgtcgtgcttatcatcctcacattcgcggctttctggctgccgtatcacgtggtgaacctggctgaagctggccgggcattggcgggccaggcagccggtctgggccttgtgggtaaacggctgagcctggcccggaacgtgctgatcgctttggcttttctgtcctctagcgtcaatcccgtgctgtatgcctgcgctggggggggactgttgcgtagtgccggcgtcggctttgtcgctaagctgttagagggcacgggcagtgaggcttcgtcgacgcgccggggtggctctctggggcagaccgctcgttcaggacccgcggcactcgagcctgggccctcggaatcccttactgcctctagtcccctgaagctcaacgagctgaattag

SEQ ID NO: 193236 - DNA, 1059 bp, synthetic construct
  misc_feature 1..1059: note = Description of Artificial Sequence: Synthetic coding sequence
  source 1..1059: mol_type = other DNA
atgaacaccaccagcagcgccgccccccccagcctgggcgtggagtttatatctctcctggctataatcttactgtccgttgccctggccgttggccttccaggcaattcctttgttgtgtggtccatccttaagaggatgcagaagcggtctgttactgccttaatggtactgaacctcgccctagctgacctggccgtgctgctgactgccccattcttcctgcacttcctggcacagggtacatggtcttttggtttggcaggatgcaggctgtgtcactacgtatgcggggtctctatgtacgcctctgtattgttgattacagctatgagcctcgacagaagtctcgctgttgctcgccctttcgttagtcagaagctccggaccaaagccatggctagaagggtgctggctggaatctgggtgctgtccttcttattggcgacccctgtgttggcctatagaactgtggtgccatggaagaccaacatgagtctgtgctttccacggtacccatccgagggccacagggcgttccacttaatttttgaggccgtcactggatttctcttgccgttccttgcagttgtggccagttatagtgacatcgggcgaagactgcaggcgaggaggtttcggcggagcaggcgaacgggaaggttggtcgttttaattatcctcacatttgcagccttctggctgccctatcacgtggtcaatttggccgaggctggacgggcgcttgccggacaggcagccggactcggactggtgggcaagcggctctcccttgctaggaatgtgttgattgccctggctttcctgtccagtagcgtgaatccagttctctacgcttgtgccggaggcggactgttgagatcagctggagtcgggttcgttgcaaaattgctggagggcaccgggtccgaagcctcaagtacgaggcggggaggttcattgggacagactgcccggtccgggccagcagcattagaacctgggccttccgagtcattgaccgcaagtagcccgctaaagctgaatgaactgaactag

SEQ ID NO: 193237 - DNA, 1059 bp, synthetic construct
  misc_feature 1..1059: note = Description of Artificial Sequence: Synthetic coding sequence
  source 1..1059: mol_type = other DNA
atgaacaccaccagcagcgccgccccccccagcctgggcgtggagtttatctcactgctcgcaatcatcctcctgtccgtagccctagctgttggactgcctgggaacagcttcgtcgtgtggtctattctgaagcgcatgcagaagcgaagtgtaactgcactcatggtccttaacctggcgttggccgacctggccgttttactgaccgcaccctttttcttacacttcctggcacaagggacctggtcttttggcttggccggatgcagactctgtcactatgtctgcggagtgtctatgtacgcatctgtgctgctcattacagccatgagcctggaccgtagcctcgccgtggccagaccctttgtgtctcagaaactgcggaccaaagcgatggcccggcgcgtgctggctggcatatgggttctgtcctttctgctcgcaacaccggtgctcgcctaccggacagtggtaccatggaagacgaatatgagcctttgcttcccacgctacccttcagagggccatagggcattccacctcatcttcgaagctgtaactggattcttgctcccattcctcgcagtggtggcctcttacagcgatatcgggcgccgtcttcaggcccgcagatttcgacgaagccgacgaactggccgactggtagtgttaattatcctgactttcgccgccttttggcttccttatcatgtggtaaacctcgctgaagctgggagggccctggctgggcaggcagccggactggggttagtgggcaagaggctatcactggccagaaatgtgttaattgcgttagcattcctctcaagttcagtcaatccagtgctgtacgcgtgtgccggcgggggccttctgcgcagcgcaggagtcggattcgtcgcaaagctgctcgagggaactggtagtgaggcatcaagcacccgtagaggtgggtcgctgggtcagacagctcgctcagggcctgccgcactggagcccgggccatctgaaagcttgaccgcttcttcccctctcaagctcaatgaactgaattag

SEQ ID NO: 193238 - DNA, 309 bp, synthetic construct
  misc_feature 1..309: note = Description of Artificial Sequence: Synthetic coding sequence
  source 1..309: mol_type = other DNA
atgaacaccaccagcagcgccgccccccccagcctgggcgtggagttcatcagtcttctggccataatcctgttatctgtggcactcgccgtgggcctcccaggtaactcctttgtagtctggtccattctcaaacgcatgcagaaaaggtctgtaacagcgctgatggtccttaatttggcattagccgatctcgctgtcctactgacagcacctttttttctgcatttcctcgcgcaggggacttggtcatttgggctggccgggtgcaggctctgccactacgtctgtggtgtctctatgtactag

SEQ ID NO: 193239 - DNA, 483 bp, synthetic construct
  misc_feature 1..483: note = Description of Artificial Sequence: Synthetic coding sequence
  source 1..483: mol_type = other DNA
atgagcgtgtgctaccggccccccggcaacgagaccctgctgagctggaagacaagcagagccactggcaccgcctttttgttactggcagcccttctgggactccccggaaatggatttgtggtctggtctctggccgggtggcggcccgcccgaggtagacccttagcagccaccctggtgctccaccttgctctggcagacggtgccgtactgttgcttacccccttattcgtggctttcctgacaaggcaagcatggcctctgggacaggctggctgtaaggcagtgtactatgtgtgtgcactgtccatgtatgcgagcgtgctccttacagggttgctgagtctgcagcgctgtctggctgtgacgagacccttcctagcccctaggttacgatctcccgccctggcccgccggttactccttgctgtgtggttggcagccctgctcttagcggtgcctgccgccgtctacagatag

SEQ ID NO: 193240 - DNA, 1170 bp, synthetic construct
  misc_feature 1..1170: note = Description of Artificial Sequence: Synthetic coding sequence
  source 1..1170: mol_type = other DNA
atggcccccagccaccgggccagccaggtgggcttctgccccacccccgaacgcccactgtggagactacctcctacgtgtaggccccggagaatgtctgtgtgctacaggccccccggtaacgaaacactgctgtcgtggaaaacgtcacgcgctaccgggactgcttttctgcttctggcggcgctattggggctacccggcaatggctttgtggtctggtcactggcaggttggagacccgcaagaggcaggcccctggccgctaccctcgtcctgcacctggctttggcagacggtgccgtcttgctgcttacccccttattcgtggcatttctcactcgacaagcctggcctctcgggcaggcgggatgcaaggccgtgtactacgtctgcgcactgtccatgtatgccagcgtgttgttgactggacttctgagtttacagcgctgcctggccgtgacgagacccttcctggctcctcgcctgcgcagccccgcgttggccagacgcctgctcctggcagtgtggctggcggctctgctgctggcagttcctgccgctgtgtaccgccacctctggcgagaccgtgtctgtcagttgtgccatccatcacccgttcatgcagccgcgcatctgtcccttgagactctgacagctttcgtgctcccttttggactgatgctcggatgttactctgtaaccctcgccaggctccgaggagcaaggtgggggagcggacgccatggcgcccgggttggcagattagtgtctgctatcgtcctggccttcggcctactgtgggctccgtaccacgctgtgaatctactccaggccgttgcagctctcgcaccacccgagggagcactggctaagctcggtggcgccgggcaagctgctcgcgccggcacaacggccttggcattcttctcctcctcagtcaacccggtgctgtacgtgtttactgcgggagatctacttccaagagcagggccccgctttctgacccggctgttcgagggatccggggaagctaggggtggcggcagatcacgcgaaggcacaatggagctgcgtaccaccccacagctaaaagtggttggtcaagggagaggcaatggagaccctgggggcggaatggagaaggacggtcccgagtgggacctgtag

SEQ ID NO: 193241 - DNA, 960 bp, synthetic construct
  misc_feature 1..960: note = Description of Artificial Sequence: Synthetic coding sequence
  source 1..960: mol_type = other DNA
atgagcgtgtgctaccggccccccggcaacgagaccctgctgagctggaaaacatctagagctaccggcaccgctttcttactgctggccgctcttctggggctgccgggcaatggcttcgtggtctggagtcttgctggatggcgacccgctagggggagacctctggcggctactctcgttctgcatctggccttagctgatggtgctgtgcttctgttgaccccgctgtttgtagcattcttaacgaggcaggcctggccactgggccaagcggggtgtaaagcagtgtattatgtctgcgccctatccatgtatgcgtccgtgctgctgacaggccttctctctttgcagcgttgcttggcggtgactaggcctttcctcgcaccacggctgagaagccctgcacttgctcgacgcctgctccttgccgtgtggctggccgccctgttactggccgtgcctgctgcagtgtacaggcacctctggcgcgaccgcgtttgtcaactgtgccaccccagccctgtgcacgccgccgcacacctgtctctagagacactgaccgccttcgtcctgccattcggactgatgctcgggtgttattccgtcaccctggcacgactccgcggcgcaaggtggggttctggcagacatggtgcgcgagtgggccgcttagtatctgctattgtgctggctttcgggctgctgtgggctccatatcacgctgtgaatcttttacaggcagtggccgctctggcccctccagaaggggccctcgccaagcttggcggcgccggccaggcagctagggcaggtactacagctctggcattcttttcctccagtgtaaaccccgtgttgtacgttttcaccgcaggagacttacttcccagagccgggcctaggttcctcacccggctcttcgaggggagcggggaggcaagagggggaggccggtag

SEQ ID NO: 193242 - DNA, 1077 bp, synthetic construct
  misc_feature 1..1077: note = Description of Artificial Sequence: Synthetic coding sequence
  source 1..1077: mol_type = other DNA
atgagcgtgtgctaccggccccccggcaacgagaccctgctgagctggaagacgtcgagggcaacaggtaccgcgtttctgttgctcgcggctctgctcggcctgccgggtaacggatttgtggtatggtctctcgcgggatggcgccccgctcggggccgacctctggcggcgacattggtgttacacctggcattggcggatggggccgtgctacttctgacccctcttttcgtggcattcctcaccagacaggcttggcctctgggacaggccggctgcaaagctgtgtactatgtgtgtgccctgtcaatgtacgctagcgtgctgcttacaggtcttctgagcctccagagatgtctggccgtcacgcgaccatttcttgccccacgcctcaggagtccagcactggcaaggcgcttgctgttggcagtttggctagcggcactcctcctggccgtacctgcagctgtgtacaggcatctctggcgcgaccgcgtgtgtcaactctgccaccctagccctgtgcatgctgcagcccatctgagcctcgagacacttacagcctttgttttgccgttcgggttgatgttgggatgctactccgtaaccttggcccggttgaggggcgcccgatgggggtccgggaggcatggcgctcgcgtcggccgtctggtgtccgcgattgtgttggcctttggcctcctgtgggccccctaccacgcagtcaatttactgcaggcagttgcagctctcgcccccccagaaggcgcccttgccaagctgggcggagctggacaggcggctcgggccggaaccactgccctagcatttttttcttcctccgtaaaccccgtgctatacgtttttaccgccggggatctcttacctagggctggaccacgctttctgactaggctgtttgagggttctggagaagcccgaggcggaggcagatcacgggagggaacaatggagttgagaactaccccacagctgaaagtagttgggcaagggagaggaaatggagatcccggagggggcatggaaaaggatggtcccgagtgggatctgtag

SEQ ID NO: 193243 - DNA, 1077 bp, synthetic construct
  misc_feature 1..1077: note = Description of Artificial Sequence: Synthetic coding sequence
  source 1..1077: mol_type = other DNA
atgagcgtgtgctaccggccccccggcaacgagaccctgctgagctggaagacttctcgtgccacagggacagcgtttctattattggccgccctgctgggccttcccggcaacggcttcgttgtgtggtccttagctggatggagacctgctcgggggaggccactggccgccacattagtgctccacctggccttagcggacggcgccgtccttctgctgacaccgttgttcgtggcttttctgactaggcaggcttggcctctcggccaggccggatgcaaagccgtgtattatgtatgtgcactgtctatgtatgcctcagttcttctgaccggactgctttctttgcagaggtgtctggctgtgactaggccttttctcgccccccgcctccgtagcccagcgttggctcgccgcctccttctggccgtatggctggccgccctactgctcgcagtgcccgcggcggtctatcggcacctctggcgcgaccgggtatgccagctctgccaccccagccccgttcatgcagccgcacatctatcactggagactcttaccgccttcgtccttcctttcggcctcatgcttgggtgttattccgtcacgctggcgaggctcaggggagcgcggtggggttcaggcagacacggggcccgagtcggcagactggttagtgccattgtgctcgcattcgggcttctatgggctccttatcacgccgtgaatctcctccaggccgtggcagccttggcccctcccgagggggctttggcgaaactcgggggggccgggcaggcagctcgggcaggtacaaccgctcttgctttctttagcagttccgtgaatccggtgctgtacgtgttcaccgccggcgatctcctacccagggctggccccaggttcctaacacgcttattcgagggttcaggtgaggctcggggtggaggtcgcagcagagaaggaaccatggaactacgcacgactcctcagttgaaggtggtgggtcagggacgcggcaatggggatccaggaggcgggatggaaaaagatggcccagaatgggacctctag

SEQ ID NO: 193244 - DNA, 453 bp, synthetic construct
  misc_feature 1..453: note = Description of Artificial Sequence: Synthetic coding sequence
  source 1..453: mol_type = other DNA
atgaaggacgaggtggccctgctggccgccgtgaccctgctgggcgtgctgctgcaggcttacttttcacttcaagtgatttccgctagaagggcttttagagtgtctcccccgttgactaccggccccccggaattcgaacgagtgtatagagctcaagtgaattgttccgagtacttcccgttgttcctggctactctgtgggtggccggcatcttttttcatgaaggagctgccgcgttgtgtggtctagtgtaccttttcgcacgcctacgctattttcaggggtatgccagatcagctcagctgcgtctggccccgctgtatgccagtgccagggccttgtggttgctggtagccctggccgcccttgggctgttggcacatttcctgcccgccgcacttagagctgcactgttgggccgactacgcacgctgctcccatgggcttag

SEQ ID NO: 193245 - DNA, 1161 bp, synthetic construct
  misc_feature 1..1161: note = Description of Artificial Sequence: Synthetic coding sequence
  source 1..1161: mol_type = other DNA
atggaggagctggacgccctgctggaggagctggagcggagcaccttgcaagattcagacgagtactccaatcccgcccccctccctctggaccagcattcccgaaaggagacgaacctggacgaaacctccgagatattgagcatccaagataatacatcccctctgcctgctcagctggtctatactacaaatatccaggagcttaatgtctactccgaagcacaagaaccaaaggagagccctccaccgagtaagacttctgcagctgcccagcttgacgaactgatggctcacctaacagagatgcaggctaaagtggctgtgcgtgcagacgcgggaaagaagcaccttccagataaacaggatcacaaggcttctttggattctatgctgggaggcctggagcaagagcttcaagacctagggatagccactgtgcctaagggccactgtgctagctgtcaaaaacccatcgctggcaaggtcatacacgccctcggccagtcctggcatcccgagcattttgtgtgcacccactgtaaagaggaaattgggagctccccctttttcgaacggtctggactcgcttattgtcccaacgattatcaccagttgttttctcctcgatgtgcatactgcgcggccccgatcctcgacaaagtgctgactgccatgaatcagacatggcaccctgagcacttcttctgttctcattgcggcgaggtgttcggggccgagggcttccacgagaaggacaagaagccgtattgcaggaaagatttcctggcaatgttctcacctaagtgcggcggctgtaaccgaccagtcctggagaattatctgtcggcaatggacacagtgtggcatccagaatgttttgtctgcggtgactgtttcacaagttttagcactggaagcttctttgagctggacggacgtccgttttgtgagctgcattaccaccacaggagagggacattgtgtcacgggtgtggccagccaattacaggtaggtgtatttccgctatgggctacaagtttcacccagagcacttcgtgtgtgctttctgcttaacacagttaagtaagggcattttccgtgaacaaaacgacaaaacatactgccagccctgctttaacaaattgtttcccctgtag

SEQ ID NO: 193246 - DNA, 1176 bp, synthetic construct
  misc_feature 1..1176: note = Description of Artificial Sequence: Synthetic coding sequence
  source 1..1176: mol_type = other DNA
atgagcaccctgctgatcagcagcagcgacgccctgctggaggagctcgaaagaagcactctgcaggactctgatgagtatagcaatcctgctcccctgcccctagaccagcatagccgcaaagaaaccaacctcgacgagactagtgaaatactgtccattcaagataacacctctcccctccctgcacagctggtctacactacaaatattcaagaactcaacgtttatagtgaagctcaggagcccaaggaatctcctcctccatctaaaacaagtgcggccgcccagctggacgagttaatggcacacctcactgagatgcaggctaaggtggccgtccgggcggatgccggcaaaaagcacctacccgataagcaggaccataaggcttcacttgactccatgcttggcggactggaacaggagctgcaggatttgggaattgcaacggtgcctaaaggacactgtgcttcttgccagaaacctattgctggcaaagtcattcatgcacttggccagtcctggcatcccgaacacttcgtatgtacccattgcaaggaagagataggctcttccccttttttcgagagatcgggactggcttactgccctaatgactatcatcagctattctccccacgctgcgcatattgcgctgcaccaatactggataaggtcctgactgcaatgaatcaaacttggcaccccgagcacttcttttgttcgcactgtggagaggtctttggcgccgaggggttccacgagaaggataagaagccctactgccggaaagatttcctcgccatgtttagtcccaagtgtggtggttgcaatcgacctgttctcgagaactatttgtccgccatggataccgtgtggcatcctgagtgcttcgtctgcggggactgctttacttcattttccacgggtagtttttttgaactggatggacgtccattttgtgagctgcattaccatcacagaagaggaaccttgtgccatggttgtggacagccaatcactggtcggtgtatttcagcgatgggctataaatttcaccccgagcattttgtgtgtgctttctgtctcacgcagcttagcaaggggatatttcgcgaacagaacgacaagacatattgccagccgtgctttaacaagctgttcccactgtag

SEQ ID NO: 193247 - DNA, 1131 bp, synthetic construct
  misc_feature 1..1131: note = Description of Artificial Sequence: Synthetic coding sequence
  source 1..1131: mol_type = other DNA
atgaactacgagttcgagcgggagatcggcttcatcaacagccagcccagtctggccgagtgtctgacatccttcccacccgtagctgacacattccaatctagctctatcaaaacctctacgctcagtcattcgacgctgatccctccaccattcgaacagaccatcccttcactaaaccccggaagccatcccaggcacggtgctgggggcagacccaaaccctcgcctgccggcagccggggaagcccggttcctgcaggcgccttacagccgccggagtacccttggatgaaagaaaaaaaagccgcgaagaaaacagctctactcccagccgccgctgctgcagccaccgccgccgccacagggcccgcctgcctaagtcacaaggaaagccttgaaatcgcagacggctcaggcggcgggtcccgcagactccgcaccgcgtatactaatactcagttgttggagttagaaaaggagttccattttaacaagtacttatgtcggccacggcgggtggagattgccgctctcctggatctgaccgagcgacaagtgaaggtctggtttcagaacaggcgtatgaagcataagaggcaaactcaatgcaaggaaaaccagaattctgaggggaaatgtaaaagcctggaagactcagaaaaggtggaagaagatgaagaggagaagactttattcgaacaggccctgagtgtcagtggtgccctgctggagagggaaggatacacattccagcagaacgccctgagtcaacagcaagctccaaacgggcacaacggggactcccaaagttttcccgtgagtcccctgacctccaatgaaaaaaatttaaagcatttccaacatcagtcaccaacggtcccgaactgcctttctactatgggccaaaactgtggtgccggcctgaacaatgatagtcctgaggccctcgaggtgcctagcctccaggatttctctgtgttctcaacagactcttgtctgcaactgagtgacgccgtcagtcccagcctacccgggtcactggattctccggtggacataagcgccgattcactggacttctttacggatacgctgacgactatcgacctccaacacctgaattattag

SEQ ID NO: 193248 - DNA, 753 bp, synthetic construct
  misc_feature 1..753: note = Description of Artificial Sequence: Synthetic coding sequence
  source 1..753: mol_type = other DNA
atgacccccggccggtgctgcctggccgccgacatccaggtggagacctttatcttcactgacggtgaagacgaagctttagcgcgtcacacagggaacgtagtcatcacaaattgcagcgcggcgcacagccggcaagcgctcagctgtaagatggccgtcgagtacgacagatttattgaatcagggaggaagtggttttgtcacgtagatgatgacaattatgtgaacttaagggctttactgcgcctcctcgcctcgtaccctcacacaagggatgtgtatgtaggtaagccttctcttgacagaccgatccaggccatggaacgggtgagcgagaataaggtgcgccccgtacatttctggtttgccaccggtggtgctggattctgtatcagtcgcggcctggcgttgaaaatgtccccttgggcaagtgggggacacttcatgaacacagcggagcgcatcagactgccagatgactgcacaattggctatattgtagaggcgcttctcggcgttcccctaatcaggagcggtctgttccacagtcatttagaaaacctgcagcaggtacctaccagcgagttgcacgaacaagttacactgtcctacgggatgttcgaaaataagcgaaacgcagtgcatgttaagggcccattttctgtggaagcagatccttctcggttccgctctattcactgccacctgtacccggataccccctggtgtccacgaactgctattttctag

SEQ ID NO: 193249 - DNA, 1086 bp, synthetic construct
  misc_feature 1..1086: note = Description of Artificial Sequence: Synthetic coding sequence
  source 1..1086: mol_type = other DNA
atgctgaagcggtgcggccggcggctgctgctggccctggccggcgcacttcttgcctgtcttttggtgctgactgccgacccgccaccaccccccctgcctgccgagagaggtaggagagcactccggagtctggcaggacccgctggggccgctcctgcccccggtttgggcgcggcggcagcagctcccggagcgctggttagagacgtccactctctaagtgagtattttagtctgctcaccagagctaggagagatgcgggccccccgcctggtgcagcccccaggcccgcagatggccaccctaggcctctagctgaaccccttgctccgagagacgttttcatcgccgtgaagacaaccaagaagtttcatagggccagattggatttgctccttgaaacttggatttcacgccataaggagatgaccttcatctttactgatggggaagacgaagccctggctcgacacacagggaacgttgttatcaccaactgcagcgcagcacacagtcgacaggcactgagttgtaaaatggcggttgagtatgaccgatttattgagagtggacggaagtggttttgtcacgttgacgacgataattatgtcaatctccgcgccttgctgcgtctcctggcttcttatccccatactagggatgtgtatgtaggcaagccctccttagaccgccccatacaagcgatggaacgcgtttctgaaaataaggtgcgaccagttcacttttggttcgctaccgggggagcgggtttttgcatcagtcgcggtcttgcgttaaagatgtcaccttgggcaagcgggggacatttcatgaacaccgccgaacgcattcgcctgcccgatgattgcacaatcggatatatcgtggaagcgcttctaggagtgcctctcattcgctccggcctgttccatagccatttagaaaatctgcagcaggttccgacttcggaactccatgagcaggttacgttatcctatggtatgtttgagaataagcgcaacgccgtccacgtcaaggggcctttttctgtggaagccgacccttcccggtggggaaactag

SEQ ID NO: 193250 - DNA, 753 bp, synthetic construct
  misc_feature 1..753: note = Description of Artificial Sequence: Synthetic coding sequence
  source 1..753: mol_type = other DNA
atgacccccggccggtgctgcctggccgccgacatccaggtggagacatttatattcaccgacggggaagatgaagccctcgcccgacacaccggcaacgttgttattacaaattgtagtgcagctcatagccgacaagccctgtcatgtaagatggctgtagaatacgaccgtttcattgaaagtggaaggaagtggttctgtcacgtggacgatgataactacgttaacttacgtgcactcctgagactcttggccagctaccctcataccagggacgtgtatgttggcaagccttcccttgatcgaccgatacaagcaatggagcgggttagcgagaataaggtcaggcctgtccatttctggtttgcgacaggcggtgccgggttttgcatctcccgcggcttggcactcaaaatgtcgccctgggcttccgggggccacttcatgaacactgctgagcgcattcgtttgcctgatgattgtacgataggatacatcgtcgaggctctgttaggcgttccactgatccgcagtggcctattccattcacatctcgaaaacttgcagcaagttccaactagcgagctccacgagcaggtaacacttagctacggtatgttcgagaacaagcgaaacgcagtccacgttaaggggcccttctcagttgaggctgacccaagccgatttaggtccattcattgtcacctttacccagatactccttggtgcccgaggacggctattttttag

SEQ ID NO: 193251 - DNA, 927 bp, synthetic construct
  misc_feature 1..927: note = Description of Artificial Sequence: Synthetic coding sequence
  source 1..927: mol_type = other DNA
atggacgagcagaccggccggctgcggctggacacctactgcatgagcgccaagcagatatgggcgtggagcaaatgtagcggccggctctgggatgagcatatgaagtggatggaaggatggaccgatcgatggacagacggttggatggatggctggatggatgaatggtccccaactcccgctttacggtcgtacggagggggcctgagccagcagactttcattttcactgacggagaagacgaagctttggcccggcacacggggaatgtggtcattacaaactgcagcgcagcccacagccgccaagctttatcgtgtaagatggcggtggagtatgatcgttttatcgagtcaggccgcaagtggttctgccacgtcgatgacgacaattacgtgaacttgcgcgctctgctgcgcctcctagcaagttatcctcacaccagggatgtctacgttggaaagccaagcttagaccggcccattcaggctatggaaagggtcagcgagaacaaagtgagacccgtgcatttttggttcgccactggaggggcaggcttctgcatatcccggggccttgcattgaagatgtccccttgggctagtggaggtcatttcatgaatacagctgaaaggatcagactgccagacgattgcactattgggtacatcgtagaggccctccttggcgtccctctaatccggtcagggctgttccattcacatctggagaacctgcagcaggtgccaacctcagagctgcacgagcaggtcaccctgagctacggcatgttcgagaacaaacgcaacgccgttcacgtcaaggggccatttagtgttgaagcggacccctcaaggttcaggtctatacactgccacctttatccggatacaccatggtgcccccgtaccgccatcttctag

SEQ ID NO: 193252 - DNA, 1302 bp, synthetic construct
  misc_feature 1..1302: note = Description of Artificial Sequence: Synthetic coding sequence
  source 1..1302: mol_type = other DNA
atgcagcggatgatccagcagttcgccgccgagtacaccagcaagaacagcagcactcaggatcctagtcagcccaatagcacaaagaaccaatcgctgccgaaggcttcccccgtcacaaccagcccgacagcagctacaacacagaatccggtgctgtcgaaactgctaatggcagatcaggacagccccctcgatctgaccgtacgaaaatcccagagcgaaccctctgagcaggacggcgtgttggacctttccaccaagaagagcccttgtgctggaagtacttcgttaagtcacagccctggttgctctagcactcagggtaacggacggcccggccggccatctcagtaccgaccagacggtctgcggagtggggacggcgtacctccacgctcccttcaggacggcacccgtgaggggttcgggcatagcacatcactaaaggtgcccctcgcaaggtctctgcagatttctgaggagttactgagccgtaatcagctctcaaccgctgcaagcctcgggccttcgggactgcagaaccacggacagcatcttatcctcagccgggaagcttcttgggcaaagcctcactacgagtttaacctgtcacgcatgaaatttaggggaaacggtgctttgtcaaacataagtgatctgccgtttctcgctgagaatagtgccttcccaaagatggctttgcaggcaaagcaagacggaaagaaagatgtatcccactccagccccgtggacctgaagatcccccaagttagggggatggatctcagttgggaatctaggacaggcgaccagtattcttacagttcgcttgtcatgggctctcagaccgaaagtgcacttagtaagaaactaagggccattctgcccaaacagtcccgtaagtctatgttggacgcaggccccgactcctgggggtccgatgccgagcagagcactagtggccagccctatcccacaagcgatcaagaaggcgatccaggaagtaaacagcctaggaaaaagagagggagataccggcagtataactctgagattctggaagaggcaatcagcgtggtaatgtctggaaagatgtctgtgtcaaaagcacagagcatctatggcataccccatagcaccttggagtacaaggtcaaagaacgcctaggaacgctcaagaacccacctaagaagaaaatgaagctcatgcgaagcgagggccccgatgtaagtgttaagatcgaactcgacccccagggggaagccgcgcaatccgcaaatgagagcaagaatgagtag

SEQ ID NO: 193253 - DNA, 1302 bp, synthetic construct
  misc_feature 1..1302: note = Description of Artificial Sequence: Synthetic coding sequence
  source 1..1302: mol_type = other DNA
atgcagcggatgatccagcagttcgccgccgagtacaccagcaagaattcatctactcaagatccgtcacagcccaactccacgaagaatcagtccttaccgaaggcatcccccgtgactacaagccctaccgctgctaccacacagaacccagtcctcagtaaactcctgatggctgaccaggattcccccttggatttgactgtccgaaaaagtcagtctgaaccttccgagcaggatggtgtactggatctgtctacaaagaaatcgccctgcgctggcagtaccagcctatcccatagtccaggctgtagttctacacaaggtaacgggcgacccgggcgaccttctcagtataggcccgacggactgaggtcaggcgatggcgtgccacccaggagtttgcaggatgggacccgtgaaggtttcggccactctacttctctgaaagtacctctggcccgcagcttgcagatctccgaggagctgctctccaggaatcagctgagcacagccgcctccctgggaccgagtggtttgcaaaatcacggacaacatctgattctgtcccgggaggcctcatgggctaagccgcattacgagttcaatctcagccgcatgaaattccggggcaacggcgctctctcgaatatctcagatctgccctttctggccgagaatagcgcttttccaaagatggccttgcaggcaaagcaggacgggaaaaaggatgttagccactcatctcctgtggatctgaagataccacaagtccgggggatggacctgagctgggaatcccggacaggggatcaatactcctatagcagcctcgtaatgggttcccagacagaaagtgccctcagtaagaagcttcgcgccattctgcccaagcagtcccgtaagtccatgctggatgctggccctgatagttggggttccgatgcggaacaatcgactagcggtcaaccttatcctacgtcagaccaggaaggagaccccggcagcaaacagcctcgcaagaagagggggcggtatagacagtacaactccgaaatccttgaggaggccatttcagtcgtcatgtccggcaagatgagtgtcagcaaggctcaaagcatatatggtatcccgcattccaccttagaatacaaagtcaaggaaaggctcggaacacttaagaacccaccaaaaaaaaagatgaagctcatgaggtcagaaggccctgacgtctcagtcaagatcgagcttgacccccaaggggaggcggcccagagcgcaaacgaatcaaaaaatgagtag

SEQ ID NO: 193254 - DNA, 1302 bp, synthetic construct
  misc_feature 1..1302: note = Description of Artificial Sequence: Synthetic coding sequence
  source 1..1302: mol_type = other DNA
atgcagcggatgatccagcagttcgccgccgagtacaccagcaagaattcctcaacgcaggacccgagccagcctaactctacaaagaatcagtcgctgccaaaagcctcgcctgtaaccacatcacctactgccgctactacccaaaaccccgttctcagtaagcttctgatggccgaccaggattccccattagacttaactgttcggaaatcacagtccgagcccagcgagcaggatggggtactcgacctgtcaaccaaaaaatcaccatgcgcagggtccacaagtctttcccattcccctggctgtagttccacccagggtaatgggagaccaggacggccttctcagtaccggccggacggactacgaagcggggacggcgtcccgccacgctcacttcaagacggcacaagagaaggcttcggacatagcacatctttaaaggttccacttgcacgctcactgcaaatttcagaggagctgctctcccggaaccagctctcaactgctgccagcctaggtccaagcggcctgcagaatcatggtcagcaccttattctgtctagggaagcttcctgggcaaagcctcattatgagttcaatctctcccgcatgaaattcaggggcaatggcgccctatccaatatttctgacctgcctttcttggccgagaatagcgcctttccaaagatggcactccaggcaaagcaggatggtaagaaagacgtctcccactccagccctgtcgatctcaagatacctcaagtgaggggaatggatctgtcctgggaatccagaaccggggatcagtacagttatagcagtctggtgatgggaagccagacggagagcgcgctcagtaagaagctgagagcaattcttcccaaacagtctcgcaagagcatgctcgacgcagggcccgactcctggggtagtgatgcagagcagtctacctctggacaaccataccccacttcagaccaggagggagacccaggcagcaaacagcccagaaaaaagcgtggaagatatcggcaatataatagcgaaatcctagaagaggcaatttccgtggtgatgtccgggaagatgtcagtgtccaaggctcagagcatctatggcataccccactccacactcgaatacaaggttaaggaacgcctcggcactctcaaaaatccccctaagaagaagatgaagctgatgagatcagagggtccagacgtgtccgtaaagattgaactcgacccacagggcgaagcagcacagtctgctaacgagagcaagaatgagtag

SEQ ID NO: 193255 - DNA, 1221 bp, synthetic construct
  misc_feature 1..1221: note = Description of Artificial Sequence: Synthetic coding sequence
  source 1..1221: mol_type = other DNA
atgcagcggatgatccagcagttcgccgccgagtacaccagcaagaactcaagcacacaggaccctagccagcctaattccacaaagaatcagagtctgccaaaggcatcacccgtgaccacgagccctaccgccgctacaacacagaatccagtcttgtctaaactgctgatggctgatcaggactcacctctggacctcacagtgagaaaaagccagtctgaaccttcagaacaggacggagtgctcgatctttctaccaaaaagtccccctgcgctgggagcacgtcattgtctcacagcccaggctgcagttcaactcagggcaatggccgcccaggccgcccttctcaataccggccagacggcttaagatcgggggatggggtgcctccaagatctctgcaggatggtaccagggaaggctttggacacagtacctccctgaaagtccccttagcccgttcactccagataagcgaggagctgctcagccgaaaccagttgtccacagcagcctccttaggtccttctggactgcagaatcacggccagcacctgattctttcccgggaagcttcctgggccaaacctcactacgagttcaatctcagccgcatgaagtttagggggaacggagctctgagtaacatctccgatctgcctttcctcgctgaaaactccgcattccccaagatggccctccaggctaaacaggacggcaagaaagatgtgtcccactcttcacccgtcgatctgaagatccctcaagtcaggggtatggatctgtcttgggagagccggaccggggaccagtattcctatagctccttggtgatgggctcccagacagagagcgctttatcaaaaaagctcagagctatcttgccaaagcagtctaggaagtcaatgctggacgccggcccagacagctggggatcagacgccgaacagtctacatccggccagccttacccgacgtcagaccaggaaggcgatccaggatctaaacagccccggaagaaaagaggcagataccggcagtacaacagcgaaattctcgaggaggccatctcagttgtaatgagcggtaagatgtctgtgtcaaaagcacaaagcatctatgggattcctcattcaaccctggagtataaggttaaggagagattgggtaccttgaagaacccccctaaaaaaaaaatgaagctgatgtcagggtag

SEQ ID NO: 193256 - DNA, 957 bp, synthetic construct
  misc_feature 1..957: note = Description of Artificial Sequence: Synthetic coding sequence
  source 1..957: mol_type = other DNA
atggacaagggccgggagcggatggccgccgccgccgccgccgccgccgccgcagccgccgccgcacaatgtcgaagtccaaggtgtgctgccgagagacgcggtttcagacgcgagctggactcctggcggcataggcttatgcactgcgtgggcttcgaatccatactcgagggactgtatggccctcgcctgcgaagagacctcagcctgttcgaagactgcgaacctgaagagttgaccgactggagcatggacgagaagtgttccttttgcaacctgcagagggaagccgtgagcgactgcatcccaagcttagactcaagtcaaagcacccctaccgaggaactttcttcccagggccagagcaacaccgacaaaatcgagtgccaggccgaaaactacctgaacgccctgttccgcaagaaggacctccctcagaactgcgatcctaacattccgctcgtagctcaggagctcatgaaaaagatgatacgccaatttgccattgagtacatctccaaaagcgggaaaacacaagaaaatcgaaacgggtcaatcggcccgagcattgtgtgcaagtccatccaaatgaatcaggcggagaattctctacaggaggaacaagaaggccccctggatctgacagttaaccgaatgcaggagcaaaacacccagcagggagatggtgtgctagacctgagcacaaagaagaccagcataaagtccgaggagtctagcatctgtgacccttcctctgagaactctgtagcaggcatgcttcaggttaagactgacgagaagctgaacgtctctgacgagaacaccgcgtcgtgtccgttgagtccgataaagatgtgtctcaatcggcccatcgagtggaatcttaaccttactacggcgtccctaacatcatgtaccgtccataaccagaatctgaagtcggaagagaagtag

SEQ ID NO: 193257 - DNA, 1557 bp, synthetic construct
  misc_feature 1..1557: note = Description of Artificial Sequence: Synthetic coding sequence
  source 1..1557: mol_type = other DNA
atggacgagaagtgcagcttctgcaacctgcagcgggaggccgtgtctgactgtattccctccctagattcaagccagtcaacccctaccgaggagctgtcatctcaggggcagtctaacacagataagattgagtgccaggccgaaaactatctgaatgctcttttccgaaagaaagacttgcctcagaattgcgaccctaacatcccactcgtggcccaggagctgatgaagaagatgattagacagttcgccattgaatatatctctaagtctgggaaaacccaggagaacagaaacggctctatcggtccctccattgtctgcaagtccatccagatgaatcaagccgaaaatagtttgcaagaagagcaggagggacccctggacctgaccgtcaatagaatgcaggagcaaaacacgcagcagggtgacggtgtcctcgatcttagtacaaaaaagacttccataaaaagcgaggaatcctccatttgtgatccctcctccgagaacagtgtcgccggtagattacacagaaaccgcgaggattatgttgagcggagcgcagagttcgctgacggccttctgagtaaagctctgaaggacatccagtctggagcccttgatattaacaaagccgggatcctgtatgggatcccccagaagactttgctcttgcacctggaagcattgcccgccggcaagcctgcaagttttaaaaataagacacgcgactttcacgatagctactcttacaaggattcaaaggaaacgtgtgccgtacttcaaaaggtagccctttgggcacgcgcacaggcagagcggaccgagaaaagtaagttgaatttgctggagacctccgaaattaagttccccactgcgagcacctacctgcatcaactgactcttcagaaaatggttacccaatttaaagaaaagaatgaatctctccagtacgagaccagcaacccaactgtccaactgaaaatcccccagctccgggtctcctccgtaagcaagtcccagcccgatggttcaggtttgttggacgtgatgtatcaggttagcaagacttcttccgttctggaaggtagcgccctgcagaaactgaagaacatcctgcctaaacaaaataaaattgaatgtagcgggcccgtgacccacagcagtgtggactcctacttccttcacggagacttatctcccctgtgtttgaactccaagaatgggacggttgacggaacatccgaaaatacagaggacgggctggatcgcaaagactcaaaacagccgcggaaaaagcgaggccgctaccggcagtatgatcacgagataatggaagaggccatagccatggtgatgtcgggaaagatgtctgtcagtaaggcccagggcatctatggcgtaccccactctacgcttgagtacaaagtgaaagagcgcagcgggaccctgaagacacctcccaagaagaagctacggctgccagataccggcctgtacaatatgacagatagtggaaccggatcttgcaagaattcaagtaaacctgtgtag

SEQ ID NO: 193258 - DNA, 1809 bp, synthetic construct
  misc_feature 1..1809: note = Description of Artificial Sequence: Synthetic coding sequence
  source 1..1809: mol_type = other DNA
atggacaagggccgggagcggatggccgccgccgccgccgccgccgcagcagccgcagcagccgctcagtgcaggtcaccccggtgtgcagctgaacgccggggtttccggcgagagctggactcgtggaggcaccgactcatgcactgcgttggtttcgagagcattctggaaggactctacggcccccgtctgcgcagagatctgtcactctttgaggactgcgagcccgaggagcttacggattggtcaatggacgaaaagtgctctttctgtaacctgcagcgtgaggccgtgtccgactgcatacccagcctcgatagttcacagtccacaccaacggaagagttgtcgagccagggccaatcgaacactgataaaatagagtgtcaagccgagaattacctgaatgcccttttccgcaaaaaggacctgccgcagaactgcgatccaaatatcccgctggtggctcaggaactcatgaagaaaatgatcagacaatttgcaattgagtatattagcaagtctggcaaaacacaggaaaacagaaacggaagtattggtccatccattgtttgtaagagcatccaaatgaaccaggctgaaaatagcttacaggaagaacaagaagggccacttgatctgacagtcaataggatgcaggaacagaatacacagcagggagacggtgtactcgatctgtccacaaagaaaacctcaatcaagtctgaggagtcctcgatctgtgacccgtcatcagagaattcggtagccgggcgtctacatcggaatcgcgaggattacgtcgagcgctctgcggaattcgcagacgggctcctgagcaaagcgcttaaagacatccagtctggcgcactggacatcaacaaggcagggattctctatggaatcccccagaaaacactgttactacacctcgaagccttacccgccggcaaaccagccagcttcaaaaataaaactagagattttcacgattcttattcctacaaggattctaaagagacctgtgccgtgctgcagaaggtcgcactgtgggccagggcgcaggccgaacgcacagaaaagtccaagttaaaccttctggagacgagtgagatcaagtttccgaccgcctcaacttatctgcatcagctgactctgcaaaagatggttacccagttcaaggagaagaatgaatccctccagtacgaaacctccaatccgaccgtacaactgaaaatcccacaactgcgtgtatcctctgtttccaagagccagcctgacggtagcgggctactggatgtgatgtaccaggtttcgaagaccagttccgtcctcgagggcagcgccctgcagaagcttaaaaacatcctgcctaagcaaaacaagattgaatgttctggaccagtaacccattccagcgttgatagctatttcctgcacggtgacttaagccccctatgtttgaactcaaaaaatgggacggtggatggcaccagcgagaatacggaagacggactcgaccggaaggatagtaaacaaccccgtaagaagcgaggacggtacagacagtatgatcatgagatcatggaggaagccatcgccatggtgatgtccggaaaaatgtccgtttcgaaggcgcaaggcatctatggagtgcctcatagcacactcgagtacaaggtgaaagaaagatctgggacattaaagacgccccccaagaagaagctgcgtctccccgatacggggctgtataatatgaccgatagcggaacaggctcttgcaagaatagctccaagccagtctag

SEQ ID NO: 193259 - DNA, 435 bp, synthetic construct
  misc_feature 1..435: note = Description of Artificial Sequence: Synthetic coding sequence
  source 1..435: mol_type = other DNA
atggaccacggctacgaggagaccagcgtgtacctgaaggactgcatccccagtctggacagttcacagtcaaccccgacagaggagctgtcctcacaggggcaaagcaacacagacaaaattgagtgccaggcagagaattacctgaacgctctcttccgaaaaaaggatctgccccagaattgtgatcccaacatcccactggtcgctcaggagctgatgaagaagatgattagacagtttgccatcgaatacatctccaaatccggaaagacccaagagaaccgtaatgggtctatcggcccctctatagtgtgtaagtccatccagatgaatcaggccgagaactccctgcaagaggaacaagaggggcccctggacctgactgtgaatcggatgcaggagcagaatacacagcaggcgtgctacaaatag

SEQ ID NO: 193260 - DNA, 2187 bp, synthetic construct
  misc_feature 1..2187: note = Description of Artificial Sequence: Synthetic coding sequence
  source 1..2187: mol_type = other DNA
atgaaccagcccgagagcgccaacgaccccgagcccctgtgcgccgtgtgcggccaggcacacagtctagaagagaatcatttctacagttaccccgaagaggttgatgatgaccttatttgccacatttgcctgcaggcactcctggaccctttagacacgccttgcggtcacacctactgcactctctgtctcaccaatttccttgtggaaaaggacttctgccctatggataggaagccactggtgctgcagcactgtaaaaaaagttctattctggtaaacaagttactcaataaactgctcgtcacatgtccgttccgggaacactgcacccaagtgctgcagagatgcgacttggaacaccactttcagacaagttgtaagggtgcctcccattatggcctgactaaggaccgtaagcgcaggtctcaggacggttgtcctgacggatgcgcctctcttactgcaacagcaccatccccagaagtctctgctgctgcgaccatctcattaatgacagatgagccagggctcgacaacccggcctatgtcagcagcgccgaggacggccaacccgctatctcacccgtcgacagcgggcgcagtaatcgaactcgggcccgtccttttgaaaggtccactattcgctctcggagcttcaaaaagatcaatagagccttaagcgtgctgcggcgcaccaaaagcggttccgcggttgccaatcacgccgaccagggaagggaaaattccgagaatacaactgctccggaagtcttcccacgactgtatcacctcatcccagacggcgaaattaccagcataaagatcaaccgggtggatccttcagagagcctgtctataaggctggtgggtggcagtgaaacgccgctggtccacatcataattcaacacatatatcgggatggagtaatcgcgcgcgacggtagactccttccaggggatatcatattgaaagtaaacggaatggatatttctaatgtcccgcacaattatgctgtacggttattgagacaaccatgccaggtcctctggctcaccgtgatgcgcgagcagaaattccgctcaagaaataacgggcaggccccagacgcttaccggcctagggacgatagctttcacgtaatcttgaataagagctcacctgaagagcaactgggaattaagctggttaggaaggttgatgaacctggcgttttcatctttaacgtcttggatgggggcgtagcctaccgacatgggcagctggaggaaaatgatcgtgtcctggccattaatggacacgatctccggtacggctcaccagagagtgccgcacatctgattcaggcgtctgagagacgcgtgcatctcgtcgtgagtcgccaggtccgccaacgatccccagatatatttcaggaagcgggctggaattccaacggtagctggtctcccggtccaggcgaaagatccaatacacctaaacccctccatccaaccatcacttgtcacgaaaaggtcgttaacattcaaaaagacccgggtgagtcactgggaatgaccgtcgctggcggcgctagtcacagggagtgggatcttcccatctacgtaatcagtgtcgagcccggaggtgtaatatcccgcgacggacgcataaagacgggagatatcctgctcaacgttgacggggtggagctgactgaggtgtctaggtcagaggctgtggctttgttgaagcggacaagctcgtccattgtgcttaaagcactcgaggtaaaagaatacgaacctcaggaagactgtagctcaccagccgccctcgattccaatcataacatggccccgcccagtgattggagcccaagttgggtcatgtggctcgagctacctcgttgcctatataattgtaaggacatcgttcttcgaagaaacaccgcaggttcactgggtttctgtatcgttggcgggtatgaggaatataatggaaataaaccattttttattaaatccattgtggaaggtacccctgcgtacaacgatggcagaatcagatgtggcgacattctcctcgccgtgaacggacgcagcacttcaggtatgatccatgcatgtttagcacggctccttaaagaactgaagggacgtatcacactcacgattgtctcttggcctggcaccttcctctag

SEQ ID NO: 193261 - DNA, 1899 bp, synthetic construct
  misc_feature 1..1899: note = Description of Artificial Sequence: Synthetic coding sequence
  source 1..1899: mol_type = other DNA
atgaaggccctgctgctgctggtgctgccctggctgagccccgccaactacattgacaatgttgggaatcttcacttcctctattccgagctctgcaaaggtgctagccattatggattaaccaaagatcggaagcggagatcccaggacgggtgccccgatggatgtgcctccctcactgcgactgccccaagtcctgaggtttcagccgccgctacaataagtctcatgaccgatgagccagggctggataaccctgcctacgtgtcatcagcagaggacggccagccggcaatctctccggtggattctggtcggtctaaccgaactcgggcgcgtccatttgagaggtccaccatacgctcacgctcattcaagaagataaaccgagcactcagtgtacttagacgcactaaatctggctccgctgtggcgaaccacgccgatcagggccgtgaaaactccgagaatactactgcacctgaggtgtttcctcggctttatcatttaatccccgatggcgaaatcacctcaataaagattaaccgtgtagatccatccgagagtctcagcatccggctggtgggcggttctgagactccattagtgcacatcattattcagcacatttatcgggatggtgtgatcgcccgcgacgggcggctgcttcccggggatatcatactgaaagtaaacggcatggatatctccaacgttccccacaattatgccgtaagactgttgcgccagccctgccaagtgctttggttaacggtaatgcgggaacaaaagttcagatccaggaataacgggcaggccccagacgcctaccggccgagagatgacagctttcacgtcattctgaacaaatctagtcctgaagagcagttgggaataaagctggtgaggaaggtagacgaaccgggtgtgttcatatttaacgtccttgacggtggcgtcgcgtatcgccacgggcaactggaagagaatgatcgcgtactcgccatcaacgggcacgaccttcgatacgggtcccctgagagcgccgcccacctaatccaagctagcgagaggcgggtccatctggtcgtgagccggcaggttcgccagaggtcacctgatatttttcaggaggcaggctggaacagcaacggctcttggtcccccggcccgggcgagcgaagcaatacaccgaaaccactccaccccaccattacttgtcacgaaaaggtggtgaacatccagaaggatccaggcgagtccctgggaatgactgttgctggcggagcaagccatcgagaatgggacctgcctatatatgtaatctcagtcgagcccggcggggtaatctctcgcgatggacgtattaagaccggggatatcctgctgaacgtcgacggagtggagttaacggaggtgagtcgatccgaagctgtggcactgctcaagagaacatcgtctagtatcgtgctgaaggcgcttgaggtgaaggaatacgaaccccaggaggactgcagcagcccggcagccctggattccaaccacaacatggctcctccgtccgactggtctccatcctgggttatgtggctcgaactccctcgctgtttatacaactgtaaagatatagtgctgcgccgcaacacagcagggtcactgggcttttgcattgtgggaggttacgaagagtataatggaaacaaacctttttttatcaagtctatcgtcgagggcacaccagcatacaatgacggccgtatccgatgtggagacattctcctggccgtcaatggacgcagtacatctggaatgattcacgcctgcctggcccggctgcttaaagagctgaagggccgcatcacgcttacaatagtttcttggcctgggacattcctgtag

SEQ ID NO: 193262 - DNA, 21 bp, synthetic construct
  misc_feature 1..21: note = Description of Artificial Sequence: Synthetic coding sequence
  source 1..21: mol_type = other DNA
atgaaccagcccgagagctag

SEQ ID NO: 193263 - DNA, 51 bp, synthetic construct
  misc_feature 1..51: note = Description of Artificial Sequence: Synthetic coding sequence
  source 1..51: mol_type = other DNA
atgaaccagcccgagagcgccaacgaccccgagcccctgtgcgccgtctag

SEQ ID NO: 193264 - DNA, 300 bp, synthetic construct
  misc_feature 1..300: note = Description of Artificial Sequence: Synthetic coding sequence
  source 1..300: mol_type = other DNA
atgaaccagcccgagagcgccaacgaccccgagcccctgtgcgccgtatgcggtcaggcacacagcctagaagagaaccacttctactcttaccccgaggaggttgacgatgacctgatctgccacatctgcctacaagcactgctcgacccactggacactccatgcggacacacatattgcactctgtgccttactaactttctagtcgagaaggatttctgtcctatggatcggaagcccctggttctgcagcattgtaaaaagtcatcgatcctggtgaataaactactgaattag

SEQ ID NO: 193265 - DNA, 273 bp, synthetic construct
  misc_feature 1..273: note = Description of Artificial Sequence: Synthetic coding sequence
  source 1..273: mol_type = other DNA
atgaaccagcccgagagcgccaacgaccccgagcccctgtgcgccgtgtgcggacaggcgcattctctggaagagaaccacttctactcttacccagaggaagtcgacgatgatcttatctgtcacatctgtctgcaagcacttctggaccccctcgatactccgtgcgggcatacctactgtacactctgccttaccaactttttggttgaaaaagatttctgtcccatggacagaaaaccgctggtgcttcagcactgtaagaaatcctag

SEQ ID NO: 193266 - DNA, 381 bp, synthetic construct
  misc_feature 1..381: note = Description of Artificial Sequence: Synthetic coding sequence
  source 1..381: mol_type = other DNA
atgaaccagcccgagagcgccaacgaccccgagcccctgtgcgccgtatgtgggcaggcccattccctggaagaaaaccacttttacagttaccccgaggaggtggatgacgatctgatctgccacatctgtcttcaggccctgttggaccctctggacacgccatgcggacacacatattgcactctgtgtcttaccaatttcctcgtagagaaagacttctgccccatggacagaaaacccttagtcctgcagcattgcaaaaaatcttccatactagtcaacaagctgttaaacaaactgctggtgacttgccctttcagggagcactgtacgcaggtactccagaggtgcgatctggagcaccacttccaaacttag

SEQ ID NO: 193267 - DNA, 1701 bp, synthetic construct
  misc_feature 1..1701: note = Description of Artificial Sequence: Synthetic coding sequence
  source 1..1701: mol_type = other DNA
atggccgtgcagaccgccgtgcgggccagccagccccggctgccccccctggataacccagcttatgtgtcatccgccgaagatggccagccagctatttctcctgtggattcgggccgttctaaccgcacacgggcccgcccctttgaacggagtaccatcagaagccggtcgtttaagaagatcaatcgagccttgtccgtgttgagacgtaccaagtctggatccgccgtggctaaccatgctgatcaaggcagagaaaattcagagaataccactgctcctgaggtcttcccgcggctctaccacttaatacctgatggagagataacgagtatcaaaattaacagggtcgacccgagtgagtctctctccatcagactcgtggggggtagtgaaacgccgttagtccacatcattattcaacacatatatcgtgacggtgtcattgctagggatggccgcttacttccgggggatattatattaaaagtgaacggaatggacatcagcaacgtgccccacaactatgctgtgcgtctacttagacaaccgtgccaagttttgtggctgactgtcatgcgggaacaaaaattcagaagccgaaataacggtcaggccccggatgcgtatagacctagggatgatagttttcacgtgattcttaacaagtcttccccagaagagcagctgggaattaagctggtgcgaaaggtggatgagccaggcgtcttcattttcaacgtgctggatgggggtgtcgcttacagacacgggcaactggaagaaaatgaccgggtgcttgccatcaacggccatgatctgaggtacggaagccctgaatctgccgcacatcttatccaagcatctgagcgccgagtgcatctagtggtgagtcggcaggttcggcagcgtagccccgacatctttcaagaagccggatggaattctaatggttcatggagtcccgggccaggtgaaaggtccaatacccctaaaccattacaccccactatcacatgccatgaaaaggtagtgaacatccagaaagaccccggggagtccctgggcatgaccgtggccggcggggcgagtcaccgcgagtgggaccttcctatatacgtaatctctgtagagccggggggcgtgattagtcgggatggacgaatcaaaacgggcgacatcttgcttaacgtagatggcgtcgagctgacagaagtgtctaggagcgaggccgttgcgctcctgaagcgcacaagttcaagtattgtcctaaaagcgctcgaggtcaaggaatatgaacctcaggaggactgcagtagtccagccgcgctcgacagtaaccacaacatggctcccccttcagactggtcacctagttgggtaatgtggctggagctgcccagatgcctgtataattgcaaggacatcgtgctgagaagaaatactgctggctctcttggtttctgcatcgtaggagggtacgaggagtacaacggtaacaagccatttttcattaaaagtatcgttgagggaactccggcatacaacgatggtcgtattagatgcggcgacattcttctcgcagtgaacgggcggtcaacaagcggtatgatacacgcatgcctggcgagactcctcaaggagctgaaggggcgcattaccctgaccatcgtgagctggccagggaccttcctgtag

SEQ ID NO: 193268 - DNA, 2073 bp, synthetic construct
  misc_feature 1..2073: note = Description of Artificial Sequence: Synthetic coding sequence
  source 1..2073: mol_type = other DNA
atgggcaccaccagcgacgagatggtgagcgtggagcagaccagcagttcttccttaaacccactgtgttttgagtgcgggcaacagcactggactagggagaaccacctctataattaccaaaacgaagttgatgatgacctggtctgtcatatctgtctacagcctctattgcaacccttggacacaccgtgcggacataccttttgttataaatgccttcgtaattttctacaggagaaggatttctgtcctctggacagaaaacggctgcacttcaagctctgtaagaagagttccatcctcgtgcataagcttcttgacaaactgctggtgctctgtcctttcagctcagtgtgtaaggatgtgatgcaacgctgtgatctcgaggcccacctcaagaataggtgtccaggcgcttcccatcggagagtggcactggaacgtaggaagaccagtaggactcaagccgagatcgagaacgagaatgggccaacactcctggacccagctggaaccctgagtcctgaagccgactgcttgggcaccggcgctgtgcccgtggaacggcacctgacatctgcatccctctcaacctggtccgaggaacctgggctagataatccagcattcgaggaatcagctggcgcagacactacacagcaacccctctcactgccagagggcgaaattacaacaatcgaaatacacaggagcaatccttacattcagctcggcatctccatcgtaggcggtaatgaaacacccctaattaacatcgtaattcaggaggtgtaccgggacggtgtcatagcaagagatggacgcctgctggccggagatcagatcctccaggtaaacaattacaatatcagcaacgtgtcccataattatgcccgcgctgtcctctcacaaccatgcaatactctgcatctaactgtcctgcgagagagacgctttggcaacagagcccataatcatagcgactcgaatagtcctagggaggagatcttccaagtcgccttacacaagagggactctggggagcagctggggattaagctcgtcagacgcaccgatgaacccggggtgttcatcctcgatctcctggagggcggactagccgcccaggacggccgtctgagcagcaacgatagggtgttagcaattaacggtcatgatttgaagtacggcacaccggaactagcagcgcagataatccaggcatccggcgagcgggtgaatttgaccatcgcccgaccaggaaagcctcagcctgggaataccattcgggaagctgggaaccattcaagttccagccaacatcatacaccacccccatactattcaaggccatcctctcacaaagacctgacccagtgtgtgacatgccaagagaagcacattacagtgaaaaaagagccacatgagagcctcggtatgacggtggcgggtggacggggtagcaagagtggagagctgcctatctttgtgacatccgtgccgcctcacgggtgtcttgccagggacggtaggatcaagaggggtgacgtcctgctaaatataaacggaatagacctgactaacctcagccatagcgaagcggtggccatgcttaaggccagcgccgcctcacccgctgttgctttgaaggctctcgaggtgcagatagtggaggaagcgacacagaatgcagaggagcaaccctctacattctcggaaaatgaatacgacgcaagctggagccccagttgggtgatgtggctaggcctcccttccaccctccatagttgccatgacatcgtgctcagacgctcatacttgggcagttgggggtttagcatagtgggcgggtatgaggaaaaccacacaaaccagcctttcttcatcaagactatcgtcctcgggaccccagcatattatgacggacgtctgaagtgtggcgatatgattgtggctgttaacgggctgtcaaccgtaggaatgagccattccgctctagtaccgatgctgaaggagcagcgcaataaggttactcttacagtcatctgctggcccggcagcctcgtgtag

SEQ ID NO: 193269 - DNA, 2115 bp, synthetic construct
  misc_feature 1..2115: note = Description of Artificial Sequence: Synthetic coding sequence
  source 1..2115: mol_type = other DNA
atgctgggcatctgccggggccggcggaagttcctggccgccagcttgtctttgttatgcattccagccatcacttggatctatctgttcagcgggagctttgaggatggtaagcctgtttcccttagccctttggagtcacaggcccatagcccgagatacaccgcctcttcgcaaagagagcgtgagagtttagaagtccgcatgagagaggtggaggaagaaaatagagccctccggcgccagctttccctagctcaaggccgtgcgccctcccaccggcgtggaaaccactcaaagacctattccatggaagagggcactggcgattccgagaatctcagagctggtattgtagccggtaattcaagtgagtgcggccagcagcccgtggtggaaaagtgcgaaaccatacacgtagctatcgtgtgcgccgggtacaacgctagtcgggacgttgtaactctcgtgaagagcgttctgtttcacaggcggaatcccctccattttcacctcatcgccgattccatcgccgaacaaatcctcgccacgctgtttcagacatggatggttcctgccgttagagtcgacttctacaatgccgatgagttgaagtccgaagtatcctggatcccaaacaagcactatagcggaatctacgggttgatgaagctggtcttgaccaagacgctgccggccaatctggaacgagtgatagtactcgataccgacatcacgttcgctactgatattgcagaactctgggctgtgttccacaagtttaaaggacagcaggttttgggcctagttgaaaaccagagtgactggtatctaggcaatttatggaaaaatcataggccttggccagccctgggccgaggttataacacgggagtaattctgctactcctcgacaaactccggaagatgaagtgggaacagatgtggcgcctgaccgcagagcgagagctcatgggtatgctgtctacatctctggctgaccaagacatctttaacgccgtcattaagcaaaatccttttttggtgtatcaactgccgtgtttttggaatgtacagctctccgaccacacccgctctgagcagtgctaccgtgacgtaagtgatctgaagctccagaagcaacttagtgagctggacgaagatgacctctgctacgaattccgacgggagcggtttaccgtgcacaggacccacctgtacttccttcactacgaatatgaacccgctgcagacagtaccgacgttacgctggtcgcccaactctcgatggatagactgcagatgctggaggccatctgcaagcactgggaaggccctattagcctcgccctgtacctgagtgacgcagaagcccagcagtttttgcggtacgcacagggctcagaggtcctcatgagccgccacaatgtggggtatcacatcgtatataaagagggccaattttacccggtcaacctgctgcgcaacgtagcaatgaagcatatttccaccccgtatatgtttctgtccgacatagattttctacccatgtacggcctttatgagtacctgcggaaatccgttatccagttggacttagcgaacaccaagaaagccatgattgtgcccgcatttgagaccctccgatataggctgtcttttcccaagtcaaaggctgagcttctgtcaatgttggatatgggcaccctcttcaccttcagataccatgtttggacgaagggccacgctccaacaaactttgccaaatggcggacagccaccactccatatcgcgttgagtgggaagccgacttcgagccgtatgtagtcgtgaggagagactgtccagagtacgatcgaaggttcgtgggctttggatggaataaggtcgcacatatcatggagctcgatgtgcaggagtacgagtttatcgtcttacccaatgcctacatgatccatatgccacatgcaccatcatttgacattacaaaattccgctctaacaagcagtatcgcatttgtctcaagaccctgaaggaagagttccaacaggacatgtcccggcgctacgggtttgcagccctcaagtatcttactgctgagaataacagctag

SEQ ID NO: 193270 - DNA, 2271 bp, synthetic construct
  misc_feature 1..2271: note = Description of Artificial Sequence: Synthetic coding sequence
  source 1..2271: mol_type = other DNA
atgctgggcatctgccggggccggcggaagttcctggccgccagcttgtccctactatgcattcccgcgatcacctggatctatctcttcagcgggtcctttgaggacgggaagcctgtctcactctcacccctagagagtcaggctcactcccctcgctataccgcctcgtctcaacgcgagagggaatcccttgaagtgaggatgagggaggtcgaagaagagaacagagctctaagacggcaattgtccttggcacaggggcgggcaccttctcataggcgcgggaaccatagcaaaacgtatagcatggaggaaggtaccggagacagcgaaaacctgcgggccgggattgtcgctggcaattctagtgaatgtgggcagcagcctgtagtggagaaatgtgaaactatccacgtggccatagtctgcgccggttacaatgcatccagggatgttgtgacactggttaaatctgtattgtttcatcgtcgtaaccctctgcactttcacttaatcgctgattcaatagccgagcagatcctggctaccctgttccagacttggatggtcccggccgtcagagttgacttctacaatgctgacgaactgaagagtgaggtgtcttggattccaaataagcattattcaggcatctacggcctcatgaagctggtgctaactaaaacactgcccgccaatctggaaagagtcatcgtgctcgatacagatattaccttcgccaccgacattgctgagctctgggccgtgttccacaagttcaagggccagcaagtactgggcctcgtggaaaatcagtctgattggtacctgggaaacctatggaaaaatcacagaccctggcccgccctgggccgagggtacaataccggcgtgatcctgctcctgctggataagttgaggaagatgaaatgggagcagatgtggcgtctcacagccgagcgcgagcttatgggcatgctctcgacctccctggcagaccaggatatcttcaatgctgtcatcaagcaaaacccctttctggtgtatcagctgccatgtttctggaatgtgcagctgtccgaccatactcggtccgagcagtgttatagagatgtgtcggacctgaaagtcatccattggaattccccaaagaaattaagggttaaaaacaagcatgttgagtttttcagaaatttatacctaacgtttcttgagtatgacggtaatctactgagacgggagcttttcgggtgccccagcgaagcggacgtgaacagcgaaaacctgcagaagcagctctctgagctcgatgaagatgatctgtgctacgaattcagacgagagcgtttcacagtgcatcgcacccatctatatttcctgcactacgagtacgagcctgcagcagactctaccgacgtcactctcgtagcacaactgagcatggacagacttcaaatgctagaggctatctgcaagcattgggaagggcctatatcccttgcattgtacctcagtgacgccgaagctcagcagtttttgcggtatgcccaggggagtgaggtgttgatgtcacgccataatgttgggtaccacattgtatacaaggagggacagttctatcctgtcaacctactgcgtaacgtggctatgaaacacatctcaaccccttacatgtttttgagtgacattgattttttacctatgtacggcctttacgaatacttgaggaagtccgtaatccagctcgacctggcaaacaccaaaaaagccatgattgtgcctgcctttgaaacactgcgataccgactgagcttcccgaaaagcaaagccgagttgctcagtatgctggatatgggaaccctgtttactttcaggtatcacgtgtggactaaaggccacgctcctaccaactttgccaaatggcggacggccacgacaccctatcgggtggagtgggaagccgacttcgaaccctatgtcgtcgtcaggagagactgcccagaatatgacaggagatttgtcggattcggatggaacaaggtggcccacataatggagctggacgtacaggagtatgagttcatcgtgttgccgaacgcctatatgatccacatgccacacgctcccagcttcgatatcacaaaattcaggagtaataaacagtaccggatttgcctcaagacccttaaagaggagttccagcaggacatgtcccgccgatatgggtttgctgctctgaaatatttaactgcggaaaataatagctag

SEQ ID NO: 193271 - DNA, 2271 bp, synthetic construct
  misc_feature 1..2271: note = Description of Artificial Sequence: Synthetic coding sequence
  source 1..2271: mol_type = other DNA
atgctgggcatctgccggggccggcggaagttcctggccgccagcctgtcattactgtgtatccccgccatcacatggatctacttgttctctgggtccttcgaggacggaaagcccgtgtctttgagccccttagagagccaagctcactcgccccggtatacggcatctagtcaaagagagcgagagagtttagaggtgcgaatgcgggaggtggaggaggagaacagggcgctcagacggcagctgagcttggcccaaggcagggcacctagccacagacgtggtaaccactccaagacgtattcaatggaagaaggtaccggagatagcgagaacctcagggctggcatagtggctgggaacagttccgaatgtgggcagcagcctgtggtagagaaatgtgaaacaatccacgtggctatcgtatgtgcgggctacaatgcctcccgtgatgtggttacactggtaaaatctgttctttttcacagaagaaatcccctacacttccatctgatcgccgactcaatcgctgagcagatcctcgctacgctgtttcagacctggatggtccccgccgtcagagtcgatttttataacgcagatgaactcaagagcgaagtgagttggatcccgaataaacattattccggaatatacggccttatgaagctagtcctgactaagacactccctgcaaaccttgagcgggtcattgtactggacacagatatcacgtttgccaccgatattgcagagctgtgggccgtgttccacaaattcaaaggtcagcaggtgctgggtcttgtggagaatcagagcgactggtacctggggaacctgtggaaaaaccacaggccatggcctgcactcggccgtgggtataacaccggtgtcatcctgctgctgctggataagctgaggaaaatgaagtgggaacagatgtggcgtctgaccgccgagagagaactgatgggaatgctgtccactagtctggccgatcaggatattttcaatgccgtcatcaagcaaaacccttttctggtataccagctaccttgtttctggaacgtgcaactgtcagaccatacccgtagtgagcagtgttaccgcgacgtctccgatctcaaggtcatacattggaattctcccaaaaaacttagagttaagaataaacacgttgaattcttccggaacctgtatttaacattcctggaatatgatggcaacctgttaagacgggaactgttcggctgtccctctgaggccgacgtgaacagtgaaaacctgcagaaacagctttccgagctcgatgaggatgatttgtgttatgaattccggagggagaggttcaccgtgcacaggacgcatctgtatttcctccattatgagtacgaacccgcagcagacagtacagacgtgacattggtggcgcaactcagcatggatcgactgcagatgctggaggccatctgtaaacattgggagggtcccattagtctcgctctttatttaagtgatgccgaggcgcagcagtttctgcgttacgcacaagggtccgaagtgcttatgtccagacataacgtgggataccatatcgtgtacaaggagggccaattttaccccgtcaatctgctgagaaatgtggctatgaagcacatttccaccccctacatgttcctgtctgatatagatttcttaccgatgtatgggctctatgagtatttgagaaagagcgtaatacaactcgatctggccaacactaaaaaagccatgatcgtccctgcattcgaaaccctgcggtaccggctgtcatttccaaagtcaaaggctgagctgcttagcatgctggacatgggcaccttattcaccttcaggtatcatgtttggacaaaaggtcacgcgcctaccaatttcgcaaaatggcgtactgccacaacaccctacagagtggagtgggaggcggatttcgagccatacgtggttgtgaggagagactgtccagagtacgataggaggtttgtaggatttggatggaataaagttgcccacattatggagctcgatgtccaagaatatgaatttattgtgttgcctaatgcttacatgattcatatgccccacgcgccatctttcgacatcactaaatttagaagtaacaagcagtacaggatatgtcttaaaaccctaaaggaggagttccagcaggacatgtcacggagatatggatttgctgctctgaaatatctaacagccgaaaataacagctag

SEQ ID NO: 193272 - DNA, 2115 bp, synthetic construct
  misc_feature 1..2115: note = Description of Artificial Sequence: Synthetic coding sequence
  source 1..2115: mol_type = other DNA
atgctgggcatctgccggggccggcggaagttcctggccgccagcctctccttgctgtgtatccccgctattacttggatctatcttttctctgggtctttcgaggatgggaaaccggtaagcctctctcctctggagtctcaggcccatagtcctcggtacacggcttcttcccagagagaacgtgagtcattggaggtcaggatgcgcgaggtcgaggaggagaaccgcgcgctcaggcgacagctgtcacttgcccagggacgggcccctagccaccgcagggggaatcacagcaagacctattctatggaagagggtacgggcgacagcgagaacttgcgagccggcatcgttgctggaaattccagtgaatgcggccaacagcccgtcgtggaaaaatgtgagacaattcacgtggcaattgtatgtgcagggtataacgctagccgcgatgtggtgactttagtaaaaagtgtactattccatcggcggaacccgctccattttcacctcatcgcagattctattgctgaacagatactcgcaactttgtttcagacatggatggtgcctgccgtgcgcgtggacttctataatgcagacgagctaaaatccgaggtatcctggatacccaataagcactacagtgggatttatggactcatgaagctcgtattaactaagacgctccccgccaatttggagcgagttatcgtactagatactgacatcactttcgccacagacatcgcggaactgtgggctgtcttccacaagtttaaggggcagcaggtcctggggctcgtcgagaatcaatcagactggtatctaggcaacctgtggaagaatcaccgaccttggccagctctcggtcgtggatataacaccggcgtgattttgctcctcctggataagctgagaaaaatgaagtgggaacagatgtggagactcacagctgaaagggaacttatgggcatgcttagcaccagcctcgctgatcaggatatcttcaacgccgtgatcaagcagaacccatttctggtgtaccagttaccgtgcttctggaacgttcagctcagtgatcacaccaggagtgagcagtgctacagagatgtgagcgacttgaagttacagaagcagctgtctgagctggatgaagatgatttatgttatgagttccgacgggagagattcaccgtgcaccgtacccatctctacttcctccactacgagtatgagccagctgcagattcgacagacgtgaccctggtggcccagcttagtatggaccgactgcagatgctggaagcgatatgcaagcactgggagggacccataagtctggctctctaccttagcgacgcggaggcccagcagtttctgcggtatgcccagggctccgaggttctgatgtcgaggcacaacgttgggtatcatatagtgtataaggagggtcaattctacccggtcaacctgctgcgcaatgtggcaatgaaacacatcagtacgccttacatgtttttgagcgatattgattttctcccgatgtatggcctgtatgaatacctgcgaaagagcgtgatccaacttgacctggcaaatactaaaaaggctatgattgtcccggcctttgagacactgcgatatcggctgagtttcccaaagagtaaagccgagctgctgtctatgctcgatatgggaactctatttacattccgctatcacgtttggactaaaggacacgctcccactaacttcgcaaagtggagaactgcgaccacgccttaccgggtcgagtgggaggctgatttcgagccctacgttgttgtacggcgcgattgtccggagtatgacaggaggttcgtgggatttggctggaacaaggtggcgcacataatggagctcgacgtccaagagtacgaatttatcgtgctccccaacgcctacatgatccatatgccccacgcccccagtttcgatattacgaaatttcgcagcaacaagcaataccgaatctgcctaaagactctgaaggaggaattccagcaggatatgtcaagacgctatggtttcgccgccctgaagtatctaacagccgagaataattcttag

SEQ ID NO: 193273 - DNA, 408 bp, synthetic construct
  misc_feature 1..408: note = Description of Artificial Sequence: Synthetic coding sequence
  source 1..408: mol_type = other DNA
atgctgggcatctgccggggccggcggaagttcctggccgccagcctcagcctactgtgtataccggctataacttggatctacctcttttctggctcattcgaggacggaaagccggtgtccttatcccctctggagtcccaagctcacagcccccgctacacggctagttcccagcgcgagcgcgaatccctggaggttagaatgagagaagtggaggaggagaaccgggccctccgccgccagctgagtttagctcaggggagggccccctcccatcgccgggggaaccatagcaaaacttatagtatggaggaaggtactggagacagtgaaaacctcagagccgggatagttgcaggcaacagctccgaatgtgggcagcagccagtggtggaaaagtgctag

SEQ ID NO: 193274 - DNA, 144 bp, synthetic construct
  misc_feature 1..144: note = Description of Artificial Sequence: Synthetic coding sequence
  source 1..144: mol_type = other DNA
atgctgggcatctgccggggccggcggaagttcctggccgccagcctgtctctattatgtattccagcaatcacctggatatacctgtttagcgggtccttcgaggacggcaagcctgtgtccctgtcacctttggaaagttag

SEQ ID NO: 193275 - DNA, 411 bp, synthetic construct
  misc_feature 1..411: note = Description of Artificial Sequence: Synthetic coding sequence
  source 1..411: mol_type = other DNA
atgctgggcatctgccggggccggcggaagttcctggccgccagcctctctcttctgtgcattcccgcgatcacttggatctatcttttctccggcagcttcgaggatgggaaaccagtcagcctgtcccctctggagagtcaagcacactctccccgatacacagcctcttcacagagggaacgggaatccctcgaggtgcggatgagagaagtggaagaggaaaatagagcgctccgccgccagctttcgttagctcagggccgagcaccatcccataggagaggcaatcactccaaaacttattctatggaggagggtaccggtgacagcgagaatctgagggctggcatcgtcgcggggaattctagcgaatgcgggcagcaacctgtcgtggaaaagtgcgaatag

SEQ ID NO: 193276 - DNA, 183 bp, synthetic construct
  misc_feature 1..183: note = Description of Artificial Sequence: Synthetic coding sequence
  source 1..183: mol_type = other DNA
atgctgggcatctgccggggccggcggaagttcctggccgccagcctatcgctgctgtgcattcccgcgatcacttggatatacctctttagtggatctttcgaggacggaaaaccggtcagtctttccccgctcgagagccaagctcatagcccaagatacaccgcaagctcccaacgatag

SEQ ID NO: 193277 - DNA, 330 bp, synthetic construct
  misc_feature 1..330: note = Description of Artificial Sequence: Synthetic coding sequence
  source 1..330: mol_type = other DNA
atgctgggcatctgccggggccggcggaagttcctggccgccagcttgtcactgctctgcatacctgctatcacatggatttaccttttttccggctcctttgaagatggcaagccagtgtccttgtcccccttagaaagtcaggcgcatagcccacgctatacggcctcctctcagcgtgagcgcgaatctctggaggtgaggatgagagaggtcgaggaagagaaccgtgccctgaggcgtcaactctctctcgctcagggacgcgctccaagccaccgacggggaaatcattcgaagacctattcaatggaagaggggacagggtag

SEQ ID NO: 193278 - DNA, 2124 bp, synthetic construct
  misc_feature 1..2124: note = Description of Artificial Sequence: Synthetic coding sequence
  source 1..2124: mol_type = other DNA
atgctgggcatctgccggggccggcggaagttcctggccgccagcctctctctcttgtgcataccggccataacttggatatacctcttctccgggagcttcgaggatggtaagcctgtttccttatcaccactcgaaagtcaggctcatagccctaggtacacagctagtagtcaacgggagcgcgagtcacttgaggttaggatgagggaggtcgaggaggaaaatcgcgcactccgcaggcaactgagcctggcgcaggggagggctccaagtcatcggaggggaaaccatagcaagacttactcaatggaggagggcaccggtgactccgaaaatttaagagccggaatagttgccggcaactcctctgaatgtgggcaacaacctgttgtcgaaaaatgtgagaccatccacgtggccatcgtttgcgctggatacaacgcgagcagagacgtcgtgactcttgtgaaatcagtgctgtttcatagaaggaacccactccacttccatctaatcgctgactcaattgcggagcaaatcctcgctacactctttcaaacatggatggtgcctgccgtgcgagttgatttttacaatgccgacgagctcaagtctgaagttagttggattccgaataagcattactctgggatctacggcctcatgaagctcgtgctgacaaagacactgccagctaacctggaaagggttatcgttctggatactgacattactttcgctacagacatcgcggaactgtgggcagtgttccataagtttaaaggtcagcaggtgctgggtcttgtcgagaaccagagtgattggtacctcggaaacttatggaaaaatcatagaccatggccagcattaggcaggggctacaatactggggtgatcctgttgctgttggacaagctcagaaagatgaagtgggagcagatgtggcggttgacggccgagcgggagcttatgggtatgctctccacgtcattagccgatcaggatatattcaatgcggtgataaagcagaatccattcctagtttaccagctgccctgcttttggaatgtgcagctgtccgatcacactaggagcgagcagtgttatagagacgtcagtgatttaaaggtgatacactggaattcccctaaaaaactgcgcgtgaagaataaacatgtagagttctttcgtaatttatatctgacattcctggaatatgatggtaatctcttaagaagggaactgtttggctgcccctccgaagctgatgtaaattcagaaaacctgcagaaacagctgtcagagcttgacgaggacgatctttgttacgaatttcgccgcgagaggtttaccgttcaccgcactcacttgtatttcttgcactacgagtacgagcccgcggccgatagcacagatgtcacccttgtcgctcaactgagcatggacagacttcagatgctcgaagccatttgcaaacattgggaagggcccatatccttggctctctatctgtccgatgcggaagcacagcagttcctgcggtatgcacaagggagtgaggtgctcatgtcgaggcataacgtcggctatcatattgtgtataaagagggtcaattttatccggtcaatctgctacggaacgtggcaatgaaacatataagcactccatacatgttcttgagtgacatagacttccttcctatgtacggcttgtacgaatacctgcggtaccatgtctggactaagggtcacgcgcccaccaacttcgccaaatggaggaccgctactacaccgtacagggtagaatgggaggcagatttcgagccctacgtcgtcgttcgacgggactgccccgagtatgaccggagatttgtggggtttggatggaacaaggtggctcatattatggaactcgatgtgcaggagtacgaatttatagtgttgcccaacgcttacatgatccatatgccccacgctccatcttttgacatcaccaagtttcggtccaataaacagtatagaatctgcctcaaaaccttaaaggaagagttccaacaggatatgtcacgacgctacgggtttgcggccctgaaatatctcaccgctgagaataacagctag

SEQ ID NO: 193279 - DNA, 1668 bp, synthetic construct
  misc_feature 1..1668: note = Description of Artificial Sequence: Synthetic coding sequence
  source 1..1668: mol_type = other DNA
atgctgatctggagcgaggtgagctggatccccaacaagcactacagtggcatctatggtctgatgaaactggttcttaccaaaaccctccccgctaacctagaacgtgtaatcgtactcgatacggacataaccttcgccacggatatagcagagttgtgggccgtgttccataagttcaagggtcagcaagtactgggacttgtggaaaatcagtccgactggtatctcggaaacctgtggaaaaatcatcgcccctggccagctctaggtagaggatataataccggtgtaattctgttactgctggacaagcttagaaagatgaagtgggaacagatgtggcgtctcaccgcagagcgagagctgatgggaatgctttctacctcactggctgaccaggatatcttcaatgcagtgataaaacagaatccattcctggtttatcagttaccgtgtttctggaacgtccaactgtcagaccatacccgcagcgagcagtgttatagagatgtttcggatctgaaagtcatccactggaactcaccgaagaaattacgggtaaagaacaagcacgttgaattcttcaggaatctctatctcacttttctggaatatgacgggaacttactgcgccgggaactcttcgggtgtccttctgaagccgacgtgaactcagagaacttgcagaagcagctctccgagcttgatgaagacgacctctgttacgagttcaggagggagagattcactgtacatcggacccacctctattttctccactacgagtacgagccagctgccgactccaccgacgtaacactggtcgcccaacttagtatggaccgcctccagatgctggaggctatatgcaagcattgggaaggcccaatcagcctggccctttacctgtccgacgccgaggcccagcagtttctgagatacgcacaggggagcgaggtcctcatgtcacggcacaatgtgggataccatattgtgtacaaggaaggacagttttatccagtcaacctgctgcgtaatgtcgcaatgaaacacatcagcaccccctatatgttcctgtcagacatcgactttttgccaatgtacgggctctatgagtatctccggaaaagcgtgattcaattggatctggctaacaccaagaaggcgatgatagtccctgcttttgagaccttacgttatcgtttgtcctttccaaagagcaaagctgaactgctctcaatgcttgacatgggaactctgttcacctttaggtatcacgtgtggacaaagggacacgccccaacgaattttgccaaatggagaactgctacaacgccttatcgcgtggaatgggaagcggacttcgagccttatgttgtggtgagacgggactgtcctgaatatgaccggcggttcgtcggattcgggtggaacaaagtggcacacatcatggaactcgacgtgcaagaatacgaattcattgtgctccctaacgcatatatgatccacatgccacatgctcctagcttcgatatcactaagttccgaagcaacaagcagtatcggatctgcctgaaaacgctgaaggaggagttccagcaggacatgagtaggcgctatggcttcgccgctttgaagtacctaactgcggagaacaattcttag

SEQ ID NO: 193280 - DNA, 1098 bp, synthetic construct
  misc_feature 1..1098: note = Description of Artificial Sequence: Synthetic coding sequence
  source 1..1098: mol_type = other DNA
atggccaaggtggccaaggacctgaaccccggcgtgaagaagatgtccttgggacagttacagagtgcacggggcgtcgcctgtttagggtgcaaagggacttgttctgggttcgagccacatagctggcgcaagatctgtaagagttgtaaatgttcccaggaagaccactgccttacttctgatctcgaggacgatcggaagatcggcaggctcctgatggactccaagtattcgacactcactgccagggtcaaaggcggtgacggtattcggatatataaaaggaataggatgatcatgaccaacccgattgctaccggaaaagaccctactttcgatacaatcacctacgagtgggccccccctggagttacccaaaagctgggattgcaatacatggagctgatccctaaggaaaagcagccagtcaccggcacggagggtgcgttctaccggcggagacagcttatgcaccaactgcctatatatgaccaggacccctcccggtgcagaggcctccttgaaaatgagttaaaattgatggaggaattcgtcaaacaatacaaatctgaggccctgggagtgggcgaagttgcgttacctgggcagggaggtcttccaaaagaagaaggaaagcagcaggagaaacctgaaggcgcagagacgacggccgcaacaacaaacggatctttatcggatccctcaaaggaagtggagtacgtgtgcgagctttgtaagggtgccgcgccgcctgattccccagtagtctacagtgatcgagccggatacaacaagcagtggcacccaacatgcttcgtctgtgcaaaatgtagcgagcccctggtggatcttatctacttctggaaggacggagccccttggtgcggacgtcattactgtgagagtctgagaccgagatgtagcggttgtgacgagatcatatttgcagaggattatcagcgcgtcgaagacctagcttggcatcgcaagcacttcgtctgtgaggggtgtgaacagctgttaagcggccgggcttatatcgtgaccaaaggacagctcttgtgtccaacttgctccaagtccaaacgatcctag

SEQ ID NO: 193281 - DNA, 762 bp, synthetic construct
  misc_feature 1..762: note = Description of Artificial Sequence: Synthetic coding sequence
  source 1..762: mol_type = other DNA
atgttcggcatgcagggcgacgtgttcggcctgcgggccaccttcatggaggggcttcagtacatggagctcattcctaaggagaagcaacctgtaaccggaaccgaaggagccttctatcgtagacggcaattgatgcatcagctgccaatttacgaccaggatccctccaggtgccgtgggctgctggaaaacgaactgaaattaatggaggaatttgtgaagcaatataaaagtgaagccttgggcgtgggtgaggttgcactgcccggacaggggggtctgcccaaggaggaaggcaaacaacaggagaagcccgaaggggcagaaaccaccgccgcgacaactaatgggtcactgtctgacccttcgaaggaggtagagtacgtgtgcgagctctgcaagggtgccgccccccccgattcgccggtcgtgtactccgatcgtgctggttacaataaacagtggcaccccacctgttttgtctgtgcaaagtgcagcgaacccttggtagatctgatctatttttggaaagacggcgccccttggtgtggacggcactactgcgagagcctccgcccacggtgcagcggatgtgacgagattattttcgccgaggattaccagcgtgtggaagatctggcgtggcaccggaagcacttcgtgtgcgaagggtgtgagcagctgctatctggacgggcatatattgtcactaaggggcagctgctttgcccaacatgtagcaaatctaaacgtagctag

SEQ ID NO: 193282 - DNA, 879 bp, synthetic construct
  misc_feature 1..879: note = Description of Artificial Sequence: Synthetic coding sequence
  source 1..879: mol_type = other DNA
atggacagcaagtacagcaccctgaccgcccgggtgaagggcggcgatggtatcaggatttacaagagaaacaggatgattatgactaaccccattgccaccggaaaagatcccactttcgacaccataacctatgaatgggcaccccctggagtcacacagaagttagggctacagtacatggagttgatacccaaagagaagcagcccgtgaccggaactgagggagctttttacagaaggcgacaacttatgcaccagttgcccatatacgatcaagatccaagtagatgtcgaggcttgctagagaatgaactgaagctaatggaagaattcgtgaaacagtacaaaagtgaggctttgggcgtcggcgaagtggcccttccaggtcaaggtggcctccccaaggaagagggaaaacaacaggagaaaccagagggggccgagacaacagccgccacaacaaacgggtccttgagtgacccgagtaaagaagtagaatacgtgtgcgaattatgtaagggagctgctccaccagactcacctgtcgtgtacagcgatagggccggttacaataagcaatggcaccccacctgttttgtctgtgcaaagtgcagtgaacccctcgtggacctaatctacttctggaaggacggggcgccatggtgcggccggcattattgtgaatcgctgaggcctcgctgctcaggctgtgacgaaattatcttcgccgaggattaccagagagtggaggacctggcctggcatcggaagcacttcgtctgtgaagggtgcgagcagctcctgtctggcagagcgtacatcgttacgaaaggacagctattatgccctacctgcagcaaatcaaagcggagctag

SEQ ID NO: 193283 - DNA, 744 bp, synthetic construct
  misc_feature 1..744: note = Description of Artificial Sequence: Synthetic coding sequence
  source 1..744: mol_type = other DNA
atggccaaggtggccaaggacctgaaccccggcgtgaagaagatgagtctagggcagctacagtcagcacgaggcgtcgcatgtctggggtgcaagggcacttgttccggttttgagcctcactcatggcggaagatttgtaaaagttgtaaatgctcacaagaagaccactgccttactagcgatctcgaagatgatagaaagattggacggctcctgatggacagcaagtattctacgctaaccgccagagttaagggcggtgatggaatcagaatttacaaaaggaacaggatgataatgactaatcccatagcaacaggaaaggaccctaccttcgacacgattacctacgagtgggcccccccaggagtgacccagaagctgggacttcaatacatggagctgattccaaaggaaaaacagccagtgacgggcacggaaggcgccttctaccggcgtcgacagctgatgcaccagctccctatttatgaccaggacccctcccgatgcagaggactgttggagaatgagctcaagctgatggaagaattcgttaaacagtacaaatccgaagcgctcggtgtgggtgaagtcgccctcccaggccaaggcggactgcctaaggaggagggaaaacagcaggagaagcccgagggcgcggaaactaccgctgctaccacaaatggaagcctcagcgatccctccaaggaggttgagtacaagcccgttccactagtatag

SEQ ID NO: 193284 - DNA, 786 bp, synthetic construct
  misc_feature 1..786: note = Description of Artificial Sequence: Synthetic coding sequence
  source 1..786: mol_type = other DNA
atgaaccccaactgcgcccggtgcggcaagatcgtgtaccccaccgagaaggtgaattgcctggacaagttttggcacaaggcttgcttccactgcgagacttgcaagatgaccctaaacatgaaaaactacaaaggatatgagaaaaagccgtactgtaatgcgcactaccctaagcagagctttaccatggttgccgacactcccgaaaatctccggctcaaacagcagagtgagctgcagagtcaggtgcgatataaagaagagtttgagaaaaataagggcaaaggcttttcggtcgtggctgatacacccgagttgcagagaatcaaaaaaacacaagatcaaatatctaatataaagtatcacgaggaattcgaaaagtcaaggatgggaccgtctgggggcgagggcatggaacccgaaagacgcgactctcaggacggcagcagctataggaggcctttagaacagcaacagccacaccatatacctacatctgccccagtctatcagcaaccacagcagcagcccgtcgctcagtcatatggcggctataaggagcccgccgcgccagtgtcaatccagaggtccgcaccaggcgggggcggaaagagataccgggctgtctacgattatagcgccgcagacgaggatgaggtatctttccaggacggcgataccattgttaatgtccagcaaatcgatgacggctggatgtatggaactgtggagaggacaggcgatacaggtatgctgccggccaactatgtcgaggccatctag

SEQ ID NO: 193285 - DNA, 501 bp, synthetic construct
  misc_feature 1..501: note = Description of Artificial Sequence: Synthetic coding sequence
  source 1..501: mol_type = other DNA
atgaccctgaacatgaagaactacaagggctacgagaagaagccctattgcaacgctcactaccccaaacagagctttaccatggtggccgacaccccagaaaatcttcgactcaagcagcagagtgaactgcagagtcaggtgagatataaggaggaatttgaaaaaaacaagggtaagggcttctcagtggtcgccgatacgccagaactccagaggatcaagaaaacacaggatcagatttccaacattaagtaccacgaggagtttgagaagagtaggatgggtccctcaggtggggaaggcatggagccagagagacgcgactcccaagatggctcttcctatcggcgacccctggaacagcagcagccccatcacattccgacaagcgctcctgtgtaccagcaacctcagcaacaacccgtagcacagtcttacggtggctacaaggaaccggcagcgcctgtaagtattcagagaagcgcaccgggagggtag

SEQ ID NO: 193286 - DNA, 618 bp, synthetic construct
  misc_feature 1..618: note = Description of Artificial Sequence: Synthetic coding sequence
  source 1..618: mol_type = other DNA
atgctgcccctgcgggacctgcaggacgacaccgagcacgaggagttacaaggactgcgggaggaagccctcctccaacgggtgaggtacaaagaggaatttgaaaaaaacaaaggtaaggggtttagcgtcgtcgcggacacgcctgagctacagaggattaaaaaaacccaagaccagatctcaaacatcaagtatcacgaggaatttgagaaaagtagaatgggaccaagtggtggcgaaggtatggaaccagagaggcgcgactcgcaggacggatcaagctaccgtagacctctggagcaacagcagcctcaccacatccctacttccgctcctgtgtaccagcaaccccagcagcagcctgttgcccagtcatacggcggttacaaggaacccgccgccccagtcagcatccagagatcagcgcctggcggcgggggtaagcgctatcgcgccgtatacgactacagtgcggcggacgaagacgaagtaagctttcaggacggagatacgattgtcaacgtgcagcagattgacgatggctggatgtatggaacggtcgagcggactggcgacaccggcatgctgccagctaattatgtggaggctatctag

SEQ ID NO: 193287 - DNA, 786 bp, synthetic construct
  misc_feature 1..786: note = Description of Artificial Sequence: Synthetic coding sequence
  source 1..786: mol_type = other DNA
atgaaccccaactgcgcccggtgcggcaagatcgtgtaccccaccgaaaaagtgaattgccttgataagttctggcacaaagcttgcttccactgcgagacgtgtaagatgaccttgaacatgaaaaactataaaggttatgaaaaaaaaccatattgtaacgctcactatcccaagcagtcctttacaatggttgcggacacacccgagaacctgcggcttaagcagcaatccgaacttcagagccaggttcgttataaagaggagttcgagaagaacaagggaaaaggtttcagtgttgtcgccgacacccctgagttgcagcggattaaaaaaacccaggaccagatcagcaacataaaataccacgaggaatttgagaagtcccgaatggggcccagtggcggagaggggatggaacccgagcgccgcgacagtcaggacgggtctagctatagacgaccactggagcagcaacaacctcaccatatcccaacatcagcacccgtatatcagcaacctcaacagcagcctgttgctcagagttacggcgggtataaagaaccggccgcccccgtgagcatccaacgaagcgcgccagggggagggggtaaacgatatcgcgctgtgtacgactatagtgccgcggatgaggatgaggtttcatttcaggacggagacacgatcgttaatgtccagcagatagatgatggatggatgtatggcacagtcgaaagaaccggcgacacaggcatgctgcccgcaaactatgtcgaagcgatctag

SEQ ID NO: 193288 - DNA, 378 bp, synthetic construct
  misc_feature 1..378: note = Description of Artificial Sequence: Synthetic coding sequence
  source 1..378: mol_type = other DNA
atgaaccccaactgcgcccggtgcggcaagatcgtgtaccccaccgagaaagtgaattgtctggacaagttttggcacaaagcctgtttccactgtgagacatgcaagatgacactgaatatgaaaaattacaaaggctacgaaaaaaaaccttactgcaacgctcactacccgaagcaaagttttacaatggtcgcggatacgccggagaaccttcgactgaaacagcagagcgagttgcagagtcaggtgagatacaaagaggaatttgagaagaacaagggaaagggcttctccgtggtagctgacacacctgagttgcagagaagcagcctggggttcctctggaacgagatccccccatccccacacttatag

SEQ ID NO: 193289 - DNA, 4050 bp, synthetic construct
  misc_feature 1..4050: note = Description of Artificial Sequence: Synthetic coding sequence
  source 1..4050: mol_type = other DNA
atgaagaagatccggatctgccacatcttcaccttctacagctggatgtcctatgatgtcctgtttcagcggaccgagttgggggcactggagatctggagacaattgatatgtgcccatgtgtgcatctgcgtcggttggttgtatctaagggatcgcgtgtgttcaaagaaagacatcatcctacggaccgagcagaacagcggcaggaccatcttaataaaagccgtcaccgagaagaattttgaaactaaagatttccgagccagcctcgaaaatggggtcctgctatgtgatctgattaacaaactgaagccaggggtgattaaaaaaattaatagactgagtacccctatcgcaggactggataacatcaacgtgttcctgaaagcctgcgagcagataggcctcaaggaggcccagctgtttcatccaggtgatctccaggatctttccaatcgggtcaccgtgaaacaggaggagacagaccgcagagttaaaaacgtgctgattacgctgtattggttaggccgcaaggctcagtctaacccatactataacggccctcacctgaacctcaaggcttttgagaacctgctgggccaagccttgacaaaggccctggaggactcctcgttcttgaaacgctcgggacgtgattcaggttatggcgacatttggtgccccgaacgcggagagtttctggctcctcctcggcaccacaaacgcgaggatagcttcgagagcctcgatagccttggatccagatcactcacctcctgttcgtccgatattacactccgggggggacgcgagggcttcgagtccgacacggattctgaatttacttttaagatgcaggattataacaaggacgacatgtcttatcggcggatctcggccgttgagcccaagaccgcgctgccattcaaccggttcctcccaaacaagagtcggcagccttcctacgtgccggcccctctcaggaagaagaagcccgataaacatgaagataaccgtaggagctgggcgagccctgtctataccgaggccgacggcactttttcgcggctgttccagaaaatttacggagaaaatgggtctaagagcatgtccgacgtgtccgccgaagatgtgcagaacctgcgtcaactgcggtacgaagaaatgcagaagattaaatctcagctgaaggagcaggaccagaaatggcaggatgacctagcgaagtggaaagacagacggaaatcgtacacctcggacttgcaaaagaagaaggaggaacgcgaagagatcgaaaaacaggcgctggagaaatccaaaagatcctcaaagacgtttaaagagatgcttcaggacagagaatctcagaaccaaaagtccactgttcctagtcgacggcgaatgtactcttttgacgacgtgctcgaagaaggaaaaagacctccaactatgaccgtctctgaggcctcataccagtccgagagggtcgaggagaagggagccacttacccttccgaaattcctaaggaggacagcaccacgttcgccaagagagaggacagggtgactaccgagattcaacttccaagccagtcccccgtcgaagagcagagtcctgccagtctgagttctttgagatcacgatccactcagatggaaagcactagagtgagtgccagtctccctagaagctatcgaaagacagacactgtgcgtctgacaagcgtggttacacccagaccttttgggagccagacccgggggatcagttccttgccacggtcctatactatggacgacgcctggaagtataatggcgatgtggaagatatcaaacgcacgcccaataatgttgtctctacccctgcaccctcccctgatgctagccagttagcctctagcctatccagccaaaaggaggtagccgcaacagaggaggatgtcacgcgcttgccaagccccacctctcctttttctagcctgagccaagaccaggctgccaccagtaaagccacactttccagtaccagcggcctagatctgatgtccgaaagcggggaaggggaaatttcaccccagcgcgaggtctcgcgctcgcaggatcagttttcagacatgcggatatcgataaaccagacgcccggtaaatcgctcgacttcggctttacaattaagtgggatatccccggcattttcgtcgcctctgtcgaagctggttccccggctgagttttctcagttacaggtggacgacgagattattgcgattaataataccaagttcagctataacgacagcaaggagtgggaagaggcgatggccaaagcacaagagacaggacatcttgttatggacgtgagacgctatggtaaagcggggtcccccgagaccaaatggattgatgcaactagcggcatctataattcagaaaagtcttctaacttatcagtaaccaccgatttcagtgaaagcttgcagagcagcaatatcgagtcgaaggagatcaacggcatccacgatgagtccaacgccttcgaatctaaggcatcggaaagcatctccttgaagaatctgaagcggcgttcacagttcttcgaacaggggtccagcgatagtgttgtgcctgacctgccggttcccaccatcagcgccccaagtcggtgggtctgggaccaggaagaagaaaggaagcggcaggagagatggcaaaaggagcaagatcgcctgttgcaggagaaatatcagagagaacaggagaaactaagggaggagtggcagagagccaaacaggaagctgagcgggagaactcgaaataccttgatgaagagttgatggtactgtctagcaactcaatgagtctgaccacaagagagcccagcctggcaacttgggaggctacatggtctgagggatctaagtcttctgaccgggaaggaacgagggccggtgaagaggaacggagacagccccaggaggaggtagtgcatgaagatcaggggaagaagccccaggatcagctggtgatagagcgcgaacgaaaatgggagcagcaactgcaagaggagcaggaacaaaagcggctgcaggcggaggccgaggaacagaaacggccagcagaagagcagaaaagacaagccgaaatcgagcgagaaactagtgtgagaatctatcaataccgaagaccggtcgactcatacgacatccccaagacagaggaggccagctctggatttttgccgggcgatcgaaacaagtctcgttccactacggagctggatgactactccacaaataagaacggcaataataaataccttgatcagatagggaacatgacatcttctcagaggcggagcaagaaagagcaggtgccatccggcgccgagctagagcgacaacagatccttcaggaaatgcggaagagaacacccctgcataacgacaacagctggattaggcagaggagtgcaagcgtcaacaaagagcctgtgtcactccccgggatcatgcgcagaggcgaatcactcgacaacctggactccccacggtcaaatagttggcggcagcctccttggctgaatcagcctaccgggttttacgccagcagctccgtgcaggatttctcacggccgccgccccagctagttagcacctctaaccgggcttatatgcgcaatccttcttcctctgtgccaccaccatccgccggctcagtgaagacctccacaacaggggttgccacaacacaatctcccaccccccggtctcattctccgtctgcgtcgcagtccggctctcagctgcgtaaccgaagcgtgtctggcaaacggatctgctcatactgcaacaatatcctgggcaagggagcagcaatgattattgaaagcctaggattgtgttaccatctgcattgctttaagtgtgtcgcttgtgaatgtgatttaggcggttccagcagcggcgcggaggtaagaataaggaatcaccagctatattgtaatgactgctacttgcgatttaagtccggtcgcccaaccgcaatgtag

SEQ ID NO: 193290 - DNA, 5013 bp, synthetic construct
  misc_feature 1..5013: note = Description of Artificial Sequence: Synthetic coding sequence
  source 1..5013: mol_type = other DNA
atgaagaagatccggatctgccacatcttcaccttctacagctggatgagctacgatgtgctgttccagcggacagagctcggtgcactcgagatatggaggcagctgatttgcgctcacgtgtgcatttgtgtgggctggctgtacctgcgcgacagagtatgtagcaagaaagatattattctcaggactgagcagaactcaggtcgaacaatcctcatcaaggctgtgaccgaaaaaaactttgaaactaaagacttccgtgcctccttggagaatggcgtgctcctgtgcgacctcataaacaaacttaagccaggggtgataaagaaaatcaacagactctcaacaccaattgctgggctggacaacattaatgtattcctcaaagcctgcgaacagatagggttaaaggaggcgcagctctttcacccaggggatctccaggacctgagtaatagagtcacagtaaagcaggaggaaacagaccggagggtaaagaatgtgcttattactttgtattggctgggaagaaaggcccagtccaacccctactataatggcccacatctgaacctcaaggcctttgagaacctgctcggtcaagctttaaccaaagctttagaagatagtagtttccttaagcggtctgggcgggattccggttatggagacatttggtgtcccgagcggggagaattcttagcgccgccccgacaccacaagagggaggacagctttgaaagcctggactctctgggcagccgctccctgacctcctgctcatccgatattacactgcgcggtgggcgggagggatttgagagtgacacagactccgagtttactttcaagatgcaggattataataaggatgacatgtcctatcgaaggattagcgccgtggaacccaaaaccgcgctcccgttcaacaggttcctccctaacaagtcgagacagccctcatacgtacccgcccctctgcgtaaaaaaaagcccgataaacacgaagataatcgcagatcctgggcgtcccccgtttatacagaagcagatggtacatttagctcaaaccaacgccgcatttggggcacaaatgtggaaaattggcccaccgtgcagggaacctctaagtcctcttgctaccttgaggaggagaaagccaagacacgctcaataccgaacatagtgaaggacgatttgtacgttcgcaaacttagtccggtgatgcctaacccgggaaatgcgttcgaccaatttctgcccaagtgttggacccccgaggacgtaaactggaaacggattaaaagggagacctataagccctggtacaaggagttccagggttttagccaatttttactcctgcaggcacttcagacctactccgatgatatcttgtcgtcagaaactcatactaagatagaccctaccagtggcccccgcttgattacaaggaggaagaacctttcttacgctccaggctatcgccgcgacgacctggagatggccgcgctagatcctgacttagaaaacgacgactttttcgttcgtaagacaggagcattccatgccaacccatatgttctgcgggcctttgaagacttccgcaagttcagtgaacaggatgatagcgtggaacgagatattattctgcagtgtcgggagggcgaactggtgttgccagatctagaaaaggacgatatgatagtgcggcgcatccccgcccagaagaaggaggtgcccttgtccggcgcaccagaccggtaccaccccgtgcctttccccgagccttggacactgccgcctgagattcaagccaaatttttatgtgtcttggagagaacctgtccatctaaggaaaaatcgaacagctgtaggatcttagtgccatcataccggcaaaagaaggacgacatgctaaccagaaagatccagagttggaagctgggaaccaccgtacccccaattagcttcacacctggcccctgtagtgaagccgatttgaaacggtgggaggcaatccgagaggcctccagattgcggcacaaaaaaaggctaatggtggaacgcctatttcaaaagatctacggggagaatgggtctaagtccatgtccgacgtctccgcagaggacgtgcagaatctcaggcagctcaggtatgaggaaatgcagaagataaaaagtcaattgaaagaacaggatcagaaatggcaggatgacctggccaaatggaaggataggcgaaaatcatatacctctgacctgcagaaaaagaaggaggagcgtgaggaaattgagaagcaggcattggaaaaatccaagaggagctctaagacctttaaggaaatgctgcaggaccgggagtctcagaatcagaaaagcaccgtgccaagtcggaggcgtatgtactccttcgatgatgtcctggaggagggaaagcgaccgcccactatgacagtttcagaggcttcgtaccagtctgaacgagtggaagaaaagggcgcaacgtatcctagtgagattcccaaggaggattccacaaccttcgccaagagggaggatcgcgtgactaccgaaattcaactccctagccagagccctgtagaagagcagtcccctgcctctctttcaagtctgagatctaggagtactcagatggagtcgacgcgcgtatcagcctctctgcccagatcctaccggaaaaccgatactgttcggctgacatccgtggtaactccgaggccgtttgggagccagactcgggggatttcatccctgccaaggagctacactatggatgatgcttggaagtataacggcgacgtcgaagatattaaaagaactccgaacaacgtcgtatctactccggctccttcccctgacgcaagtcagttagcctcctctctgtcgagccagaaggaagtggccgctactgaggaggacgtcacccgcctcccttctcctacttcacctttctcgtctttgtcgcaggatcaggctgcaacaagcaaggccactctgagcagcacgtcgggcctagatctgatgagcgagagtggtgagggggaaattagccctcaacgagaggtatcgcgttcccaagaccagttcagcgacatgcggatctctattaatcaaactccgggcaagagcttggattttggttttacaatcaagtgggatattcctggtatctttgtggctagtgtggaggccggtagcccggccgaattttcccagttacaggtggacgacgaaattattgctattaacaacactaagttctcctacaacgacagcaaagagtgggaagaggctatggccaaggcccaggagactggacacttagtcatggacgtgaggaggtacggcaaggccggctctccagagacgaagtggatcgatgcgacatcaggtatttataacagcgaaaagtcttctaacctgagtgttacaacggacttttccgaatccctccagtcttctaacatcgagtcaaaggagattaatgggattcacgacgaatccaatgcctttgaatccaaggcgagcgagagcattagtctgaaaaatcttaagagaagaagccagttttttgaacaggggtcttccgacagtgtggtccccgatctgccggtgccaacaatttccgcccctagcaggtgggtgtgggatcaggaagaggaacggaagcgccaggaacgatggcaaaaggagcaggacaggctattgcaagagaagtatcagagagagcaggagaaactccgagaagaatggcagcgcgccaaacaagaagcagaaagggagaactccaagtacctggatgaggaattgatggtgctgtccagtaacagtatgagtttgacaacgagagaacccagtctggcaacatgggaagccacatggagcgagggctcaaagagctcagaccgtgagggaactcgggccggtgaggaagaaaggcgacagccccaagaagaagtggttcatgaagaccaggggaaaaagcctcaggaccagcttgtgatcgaaagggaaaggaagtgggagcagcagctgcaggaggaacaagagcagaagcggctgcaggccgaagccgaggaacaaaagcgaccggctgaagaacagaagcgtcaggcagagatcgagcgagagacgtccgttaggatttaccagtatcgacggcccgtggatagctacgacattcctaaaactgaagaggccagctctgggttcctgcctggggaccggaacaagtcacggtctaccacggagctggacgactactctaccaacaagaatggcaacaataagtacctcgaccagattggaaacatgacttcgagtcagcggcggtccaaaaaagagcaggtccccagcggcgcagagctcgagcggcaacaaatcttacaagaaatgagaaagagaaccccactccacaatgacaactcatggatacgtcaaaggtcagctagtgttaataaggaaccagtgtcattacctgggatcatgagacggggagaatccctggataacctggattcccctcggtctaattcgtggcgtcaacccccttggttaaaccagccgacaggcttctacgcctcttcctctgtccaggacttctcacggccacctcctcagttagtctcgactagtaacagagcatacatgcggaacccttcctcctcagtgcctccccccagtgctggatctgtgaaaactagcactactggcgtggccacaactcagtctcccactccaaggagtcactcgccaagcgcaagtcagtctggctcacagctgaggaacagtgtgttgccggtgagcgtgacttcagaagcattgccccaggaacttaagtcaggtagcgaaaccacaaactgtaccgctaccacggccatcagcgattctaacctggatggacagcctccttgcgatgtatccctccataccaaggccctcctgcagatcgaggaggaggtggtagccgctcatgtagacctctag

SEQ ID NO: 193291 - DNA, 4845 bp, synthetic construct
  misc_feature 1..4845: note = Description of Artificial Sequence: Synthetic coding sequence
  source 1..4845: mol_type = other DNA
atgaagaagatccggatctgccacatcttcaccttctacagctggatgtcctatgatgtactcttccaaaggaccgaactaggcgcactggagatttggcggcagttgatctgtgctcacgtttgtatctgcgtaggctggctttacttaagagaccgagtttgttctaaaaaagacatcatcctcaggactgagcaaaactctgggcgcacaatactgattaaggccgtgaccgagaaaaattttgagaccaaagactttcgggcctcgctggaaaacggagtgttgctttgtgacctgattaataagctgaaaccaggagtcattaaaaaaatcaatagattgagcacaccaattgctggcctcgacaacatcaacgtattcttgaaagcctgcgagcagattgggctgaaagaggcccaactctttcacccaggtgacctccaggatttgtccaacagagtgaccgtgaaacaagaggagaccgatcgccgcgtgaaaaatgttctgattacactgtactggctgggaagaaaagcccagagcaatccctactataacggcccccatcttaacctcaaggcgtttgaaaatcttcttggccaggctcttacaaaagccctggaggattcctctttcctgaagcgctcaggccgggactcaggctacggtgatatctggtgtccagagcgaggagagtttcttgccccacctcgtcaccacaaaagagaggattctttcgagagcctagactctctgggttctcgttctcttacaagctgctccagcgacattacactcagaggaggccgggagggatttgaaagcgataccgatagcgaattcaccttcaaaatgcaggattacaacaaggatgacatgtcatatcgaaggatcagtgccgttgaacctaagacagccttaccgttcaaccggttcctgcctaataagtcccggcagccatcctatgtgcctgccccgctgcgcaaaaaaaagcctgacaaacacgaggataaccggcggtcctgggcctctccagtgtacaccgaggccgatggcacgttctcctccaatcagagaagaatttgggggacaaacgttgaaaactggccaacggtccaggggacctccaagtcttcatgctatttggaggaagagaaggcaaagacaaggtccattcccaatattgtcaaagacgatctgtacgtgaggaagctgagcccagtgatgcctaatcccggaaatgccttcgaccaattcttaccgaaatgctggacaccagaggatgtgaattggaagagaatcaagagggagacgtataaaccttggtataaggagtttcagggcttttctcagttcctgctgttacaggccctccagacttacagcgatgacatcctgtcgtcagaaacgcacaccaaaatagaccccacctcaggtccccgcttgataacgaggagaaagaacctgagctatgccccgggttaccgccgggatgacctagagatggctgctcttgaccccgatctagagaatgatgacttttttgtccggaagacaggagctttccatgcaaacccgtatgtgttgcgggcttttgaggacttccgcaagtttagtgagcaggatgacagcgtcgagcgagacattatccttcagtgcagagagggtgagctggtcttacctgatttggaaaaggatgatatgattgtgagaaggatccccgctcagaaaaaggaggtgcccctatccggcgcaccggacagataccacccagtccccttccccgaaccgtggaccctccctcccgagattcaggccaaatttctatgtgtcctcgagcgaacttgtccatctaaagaaaaatccaactcctgcaggatactagtgccttcttaccggcaaaagaaggacgacatgttgactaggaaaatccagagttggaagctcggcacaacggtcccccccatctcctttactcctgggccatgcagtgaggctgacctcaaaaggtgggaagctatcagagaggcatcgagattgaggcacaaaaagagacttatggtcgaaaggttgttccagaagatatacggagagaacggatcaaaatccatgagcgacgtgtccgccgaagacgtacagaacttgcgacagctgcgctacgaggaaatgcagaaaattaaaagccagttgaaggagcaggaccagaagtggcaagacgacttagcaaagtggaaagaccgaaggaagtcttatacatcagatcttcagaagaagaaagaggagcgagaagaaattgaaaaacaagccctggagaagtcaaagcgaagtagtaaaacctttaaggaaatgctccaggatagggagtctcagaatcagaagtctactgttccctcaagacggcgaatgtactcattcgacgatgtgctggaggaaggcaaaaggccccctacaatgactgtaagtgaggcttcctaccagtctgaaagagtggaggagaaaggagctacataccccagcgagattcccaaagaggactctactacctttgccaagcgagaagatcgcgtcaccacagagattcagcttcctagccagagccccgtagaggaacagtcacctgccagtcttagctcacttcgctcccgatccacacagatggaatccaccagggtgtccgcttctcttccccgcagctatagaaagactgataccgtgcgcctgaccagtgtagtgactccaaggccctttggaagtcagacccgcggaatcagtagcctgcctcgaagttatacgatggatgacgcatggaaatacaatggtgatgtagaagatattaaacgaacaccaaataatgttgtgtcaacccccgccccttctccagacgcatcgcagttggcaagcagcctgtctagccaaaaagaagttgccgcaaccgaagaagacgtcacgcggttgccttctcctacatcaccgttctcatccttgtctcaagatcaagcagccacctctaaagctacactgagtagcacatccgggctggacttgatgagcgagtcaggggagggcgagatttccccacaacgagaagtatctcgcagccaggaccagttttccgacatgcgcatcagcatcaatcagacccctggcaagagtctagactttgggttcaccataaagtgggacattcccggtatattcgtggcaagtgttgaggccggttcaccagcagaattctcccagctccaggtagacgatgaaattattgccataaacaatactaaattttcgtacaacgatagcaaggagtgggaggaggcaatggccaaagcgcaagagaccgggcaccttgtgatggacgtacgacgctatgggaaggctggtagcccggagactaagtggatcgatgccactagtggaatttacaactccgaaaagtcgtctaacctctcagtcacaaccgacttctctgagagcttgcagtcatctaatatcgaaagtaaggaaatcaacgggatccatgacgagtccaatgccttcgagagtaaagcctcagagtccatttctctgaagaacctaaagcgtaggtcacagttctttgagcagggttccagtgactctgtggtcccagatctgccagttcccaccatctcggcccccagtaggtgggtgtgggatcaggaggaagaaaggaaacgccaggaaagatggcagaaggagcaggaccgactgctccaggaaaagtaccagagagagcaggagaagctgcgcgaagaatggcaaagggcgaaacaggaagcagagcgagagaactcaaaatatctggatgaggagctaatggtgctctcctccaacagcatgtcactgactactcgggaaccatccctcgcaacctgggaggctacgtggagtgagggttctaagagctctgatagagagggtacaagagctggcgaagaggagcggcgtcagccccaggaggaggtggttcacgaagatcagggcaagaagccacaggatcagttagtaatcgagcgagaaaggaaatgggagcaacagttgcaggaagaacaggagcaaaaacgcctgcaggctgaagcggaggaacagaaacggcccgctgaggaacagaaacggcaagcagaaatagagcgcgaaacctctgtgcggatctaccagtaccggagacccgtggactcatacgatatccccaagactgaagaagcatcctctgggttcctgcccggagaccgaaacaagtctaggtccaccacagagcttgacgactacagcactaacaagaatgggaacaacaaatacttggaccagatcgggaatatgacctcatcccaaaggcgcagtaagaaagaacaggttccctctggcgcggaactggaaagacagcagatcctacaagagatgcgcaaaagaactccgctgcacaacgacaattcatggattcgccagagaagcgcatctgtcaacaaggagccagtgagcctcccaggaatcatgaggcggggggaatctctagacaatctcgattctccaaggagtaactcctggaggcaacctccctggctgaatcagcctacgggattctacgcttcaagctcggtgcaggatttttccaggcccccacctcagctcgtgagcacatcgaatagggcgtacatgcgcaatccttcaagttccgtgcccccccccagtgcaggctcggtaaaaaccagtaccacgggcgtcgccacgacacagtctccaacgccacgcagtcactcaccgtctgcttcacagtccgggtctcaactgcgcaacagctggactgcgaaccgtcacgtcatgtag

SEQ ID NO: 193292 - DNA, 4158 bp, synthetic construct
  misc_feature 1..4158: note = Description of Artificial Sequence: Synthetic coding sequence
  source 1..4158: mol_type = other DNA
atgcaggactacaacaaggacgacatgagctaccggcggatcagcgccgtagaacctaaaacggccctccctttcaaccgttttctgcctaacaagtctcgccagccatcatatgttcccgccccactcagaaagaagaagcctgacaagcatgaggataaccgtaggtcttgggcctccccagtgtacacggaggctgacggcacattcagctctaatcaaaggagaatttgggggaccaacgtagagaattggccaacagtgcagggtacatccaaaagctcttgctacttagaggaggaaaaggcgaaaacgcggtcaatacctaacattgtgaaggatgacctgtatgtgagaaagcttagccctgtgatgcccaaccctggaaacgcctttgaccagttcctccccaagtgctggacacccgaggatgttaattggaaacggattaagagagagacctataagccatggtataaggagttccaaggcttctcacagttcctccttctacaggctctgcaaacctactccgacgacattctgagctctgagactcatacaaagatcgatcctacctcaggcccaaggttgatcacgcggaggaagaacctgtcatacgctcctggatacaggcgggatgacttggaaatggccgccttggatcctgatctcgagaacgatgatttctttgtgcggaagaccggggcttttcatgccaacccttacgtcttacgagcttttgaggactttaggaaattctctgaacaggatgatagcgtcgaacgagacataatcctgcagtgccgggagggagaactcgtcctgcccgacctcgagaaagatgatatgattgtgcggcgcattccagcacaaaaaaaagaggtgccattgtctggggcgccagacagataccaccctgtgcctttccccgagccatggacactgccgccggagatacaggccaagtttctgtgcgtgttggagcgaacgtgcccttcaaaagaaaagagcaatagctgcagaatcttggtaccctcttacagacagaaaaaggatgacatgctgaccaggaaaatccagagttggaaactggggacgacggtgccacctatctcatttaccccaggaccatgttcagaggccgacctgaagagatgggaagccatcagagaggcatccagactgagacataaaaaaaggttaatggtggagcgcctttttcagaagatctatggggaaaatggctcaaaatctatgtccgacgtgtccgccgaggatgtccagaacctgaggcagctgcgctacgaggaaatgcagaaaattaagagtcagctgaaggaacaggaccagaaatggcaagatgacctggcaaaatggaaggaccgccgcaaatcctacacctctgatctgcagaaaaagaaagaggaacgcgaggagattgaaaaacaggctctggagaaatccaagagaagctccaagacctttaaagaaatgttgcaggacagggagagccagaatcagaagagcaccgtgccgtccagacgcagaatgtacagctttgatgacgtgctggaggaggggaagaggccccctaccatgaccgtctctgaagctagttatcagagtgaacgagtagaagaaaagggagcgacatacccatccgagattcccaaggaggactctactacttttgctaagagagaggatcgagtgacgacagagatccaattacctagccagagtccagtcgaagaacaaagtcccgccagcctgtcttctctccgctctaggagtacacaaatggagagcactagagtgtcagcctccctaccccggtcttataggaaaacagacacagtgcgactgacatccgtagtaaccccacggccatttggctcacagactagagggatctcgagcctaccgcgatcatatacaatggatgacgcctggaagtataatggcgacgttgaagacataaaaaggacccctaacaatgtggttagcactcctgctccctctccagacgcgtctcagttagcctcatcgttatcgtctcagaaggaagtagccgctaccgaggaggatgtcacccgactgccatctccgactagcccgttttcttccctgagccaggaccaggctgctacatcaaaggcaacgttatccagtacttcaggcttagacctgatgtccgaaagtggcgagggcgagatcagcccccagcgggaggtgtcaaggtcacaggaccagttttccgatatgcggatctctattaaccagacccccggtaaatccctggattttggattcaccatcaaatgggacatcccgggaatttttgttgctagtgtggaggctggctctcccgccgagtttagtcagctgcaagtggatgatgagatcattgccattaataatacgaagtttagctacaacgattcaaaggagtgggaggaggcaatggctaaggcccaggagactggccatctggtcatggacgttcgtcggtacgggaaagcaggcagtccagagaccaaatggatagatgccacttccggcatctataattccgaaaaatcctctaacctcagtgtcacaacagatttttctgaatccctccagtcctcaaacatcgagagtaaagaaatcaatggaatccatgatgaatccaacgctttcgagagcaaggcctccgagtcaatttcgttgaaaaatcttaaacgtcgaagccagttctttgagcaaggctcaagcgactcagtggttccagatttgccagtccctacgatttcggcccccagtcgatgggtttgggaccaggaggaagaacgcaaaaggcaagagagatggcaaaaggagcaggatcgcttgttacaggagaagtaccaacgggaacaggaaaaattgagggaggagtggcagcgggctaagcaggaggcagagagagaaaatagcaagtatttggatgaggagctgatggtactgagttcaaattccatgtccctcacaactagggagccgtccctcgcaacctgggaggcaacctggtccgaaggcagcaaaagctctgatcgggaggggacccgggctggcgaggaggagcggcgccagcctcaggaggaggtggtccatgaagaccaagggaagaagccccaagatcagttggtcatcgaaagagagaggaagtgggaacagcaactgcaggaggagcaggagcaaaaacgcctgcaagcggaggctgaagaacaaaagagacccgctgaagaacaaaagagacaggccgagattgagagagagaccagtgtccgtatatatcagtatcggcgcccagtcgactcctatgatattccaaaaacagaagaggcttcgtcaggctttctgcctggcgatcgtaacaaaagcaggagtacaacagagctcgatgattattccacaaacaagaatggcaacaataaatatctagaccaaattggcaatatgacgagctctcagaggcgctctaagaaggaacaagtgcctagcggcgctgaacttgagagacagcagatactgcaggaaatgcgcaaacggacaccactgcacaacgacaattcttggatccgccaacgcagtgccagtgtgaataaggaacctgtttcgcttccgggaataatgagaagaggcgagagcctcgataatctggactctcctaggtcgaatagctggcgacagcccccatggcttaatcaacctaccggtttttatgcttctagttctgtgcaggacttctctcgccctccaccacagctggtgtctacctccaatagagcttacatgcggaatcctagcagcagcgtcccgcctccgagtgccgggagcgtgaaaaccagcacaacaggcgtagccacaactcaatcccccaccccccgcagccattccccctcagcgagtcaatctggctctcaactgagaaactcagtcttgcccgtgagcgttacgtccgaagctctcccccaggagctcaaatcggggtccgaaactacaaattgcaccgccacaacagcgatttcagattctaacctggacggacagccaccgtgcgacgtcagtcttcatacaaaggccttattgcagatcgaagaggaggtggtagccgcccacgtagatctgtag

SEQ ID NO: 193293 - DNA, 2280 bp, synthetic construct
  misc_feature 1..2280: note = Description of Artificial Sequence: Synthetic coding sequence
  source 1..2280: mol_type = other DNA
atggagagcagccccttcaaccggcggcagtggaccagcctgagcttgcgcgtgacagctaaagagctatctttggtcaataagaacaaatcctcagccatcgtagaaatcttttcgaaatatcagaaagctgccgaggagactaacatggaaaaaaaaagaagcaacaccgagaatctgtcccaacatttccgcaaaggcactttaacagttttgaagaaaaagtgggagaaccctggcctcggcgcagaatcacacactgactcgctgcgcaacagctcaacggaaatcaggcaccgagctgatcatccacctgccgaagtgacctctcatgctgcctcaggagccaaggccgatcaggaagaacagatacacccccgtagccggcttcggtcccctcccgaggcactggtgcagggccgctatccacatatcaaagacggtgaggacctgaaagatcactctacagagagcaaaaagatggaaaattgtttaggggagagccggcatgaagtggaaaagagtgaaatttccgagaacaccgacgcatctggcaaaatcgagaaatacaatgtgcccctgaatcggctaaagatgatgtttgagaaaggagagcctacccaaacaaagatactccgggcgcagagcaggtctgcttccggccgaaagatatcagaaaatagctattccttggacgacttggaaatcgggccgggacaactgtcctcctcaacgtttgactcagaaaagaacgaatccaggcggaacctagaacttccccggctgtctgagacatccatcaaggatcgtatggctaaatatcaggcagcggtcagtaagcagtcttctagtaccaattacacgaatgagctaaaagcctcgggaggcgaaattaaaattcataagatggaacagaaggagaacgtgcccccggggcctgaagtctgcattacccatcaggaaggggagaaaatatcagcaaacgagaattctctggccgtgagatctacgcccgccgaggacgactcccgggactcacaggttaagtctgaggtgcagcagccggtgcatcccaagcctctatcccccgactccagggcaagctcattatcagaaagctcacctcccaaggcaatgaagaagtttcaagcaccggccagggagacatgtgtcgagtgtcagaagaccgtgtaccccatggagaggctactcgctaatcaacaggtcttccacatcagctgttttcgatgctcatactgtaataataagctgtctctcgggacttatgcgtcactgcacggacgcatatactgcaaaccacacttcaatcaactctttaagagcaagggcaactacgatgagggctttggacataggccacacaaagacctgtgggcatctaaaaatgagaatgaggaaattcttgagcgccctgctcagctcgctaatgctcgggaaaccccccactcacctggggtcgaagacgcacccatagcaaaggtaggcgttctcgcagcatcaatggaggcaaaggcttcctcccaacaggagaaggaagacaaacccgccgagacaaaaaaactcagaatcgcttggcctcccccaacagaactgggttcaagcggttcagcactagaagagggcattaagatgtctaaaccgaaatggccacccgaggacgagatcagtaaacctgaagttccggaagatgtggacctcgatctgaaaaagctgcggcgctcctcatcactcaaggagcgatctcggccattcactgtggccgcgagtttccagagcacatccgtgaagtcccctaaaaccgtaagtccccctataagaaagggttggagtatgtcggagcaaagcgaggagagcgtggggggacgggtcgcggagaggaagcaggtcgagaacgcaaaagcctctaagaagaatggtaacgtggggaagaccacatggcaaaacaaggagtcaaagggtgaaactggtaagcgctccaaggaggggcatagcctcgaaatggagaatgaaaatctcgtggaaaatggtgccgacagtgatgaagatgacaatagttttctgaaacaacagtcaccgcaggaaccaaaaagtctgaattggtccagttttgtagacaatacctttgctgaagaattcaccacacagaatcaaaaaagccaggacgtcgagctttgggagggggaagtggtcaaagagttgtctgtggaggaacagatcaaacggaacaggtactatgacgaagatgaggacgaggagtag

SEQ ID NO: 193294 - DNA, 2283 bp, synthetic construct
  misc_feature 1..2283: note = Description of Artificial Sequence: Synthetic coding sequence
  source 1..2283: mol_type = other DNA
atggagagcagccccttcaaccggcggcagtggaccagcctgagcctgagggtcactgcaaaagaattgtccctcgtcaacaagaacaagtctagtgccatcgttgaaatcttttcaaagtatcagaaagcggcagaagagacaaatatggagaaaaagcggtctaataccgaaaacttgagccagcacttccgcaaaggaactttaaccgtgctaaaaaagaagtgggaaaaccccggactgggtgctgaaagccacaccgactcactgcgtaactcctcaactgaaatccgtcaccgtgcagatcaccctcccgcagaggtcacatcacatgctgcttctggggccaaagctgaccaagaggagcagattcatcctagaagtcggctcaggagccccccagaagctctggttcagggccgatacccccacatcaaggatggcgaagatcttaaagaccactctactgaatccaaaaagatggaaaattgtctgggcgagtcgagacatgaggtggaaaaatctgaaatcagcgaaaacactgatgccagtggcaaaatcgaaaagtacaacgtgccattgaaccgactgaaaatgatgtttgagaagggcgaacctacacagacaaaaatactgagggcccagtctcgttccgcctcaggtaggaagataagtgaaaactcctacagccttgatgaccttgaaattggaccaggccagctgtcttcatcaacattcgactccgagaagaacgaatccagacggaatctggaactgccgagactctccgagacgagtatcaaagataggatggctaaataccaagctgccgtctccaagcagagctcttctaccaattacaccaatgaactgaaggcttctggtggcgagattaagatccacaagatggaacaaaaggaaaacgtgccgccgggtccagaagtgtgtatcacccaccaagaaggtgagaaaatcagcgccaacgaaaactctctcgcagtccgatccacacctgccgaagacgactccccaggagatagtcaggttaagtctgaggttcagcagcctgtacatcccaaacctttgtcaccagactcaagggcctccagtctttcagagtcatcccctcctaaagccatgaagaagtttcaggcgcctgcccgagagacctgcgttgagtgtcagaagacagtctatcccatggagcggctgctggctaaccaacaggtttttcatatctcctgttttcgctgtagctactgcaataataaactctctctggggacatacgcttccctgcatggacgcatttactgcaagcctcactttaaccagctctttaagtcaaaggggaattatgacgagggatttggccaccggccccacaaggacctgtgggcctctaagaacgaaaatgaggagattttggagcgcccagcgcagctggctaatgcacgagaaacaccccattccccgggtgtggaggacgcgccgatcgccaaggttggcgtcctggccgcgagtatggaggcaaaagcctcatcccagcaggagaaggaagacaagcctgccgaaacgaagaaactacggatcgcctggccacccccaacggagctgggatcctcgggttcagcactggaagaaggcatcaagatgtcaaaaccaaaatggccccctgaggacgagatctccaagccggaggtacctgaagacgtcgacctggacctgaaaaagttgcggaggagctccagtcttaaggagcggtctaggcccttcaccgttgctgccagtttccagtctaccagcgttaagtcacctaagaccgttagtccccctatcagaaagggctggtctatgtccgagcagtccgaggaaagtgtaggtgggagggtagccgagagaaagcaggtggagaacgccaaggcttctaaaaaaaacgggaatgtggggaaaactacatggcagaataaggagtccaagggcgagactgggaaacggtctaaagaggggcacagcctggagatggagaacgagaacctggtcgagaacggagctgactccgatgaggatgataactctttcctcaagcaacaaagcccacaggaaccaaagagtctgaattggagtagtttcgtggacaatacttttgcagaagagtttacaacgcaaaatcagaagagtcaggacgtggagctttgggagggcgaagtggtgaaggaactgagtgttgaggagcaaataaagcgaaatcgctattatgatgaagacgaggacgaggagtag

SEQ ID NO: 193295 - DNA, 2037 bp, synthetic construct
  misc_feature 1..2037: note = Description of Artificial Sequence: Synthetic coding sequence
  source 1..2037: mol_type = other DNA
atgtggcagggctgcaactgcagccagctgagcgagaccgccgtggatcaggaacagctgggggtcctgactttcatccttcagagaaccacatgtctgaatgttagtgcagatcaggaagagcagatacacccccggtctagactgcggtctccccccgaggcgctggtccagggccggtatccacatattaaagacggggaagatttgaaagatcactctactgagtctaagaagatggaaaactgtttgggggaaagccggcatgaagtggagaaatcagagatatcagagaataccgatgccagcgggaagatcgaaaagtataatgttcccctaaacagactaaagatgatgtttgaaaaaggggagcctacgcaaaccaagattctccgcgcgcagtcaaggagtgcctccggtagaaagatttcggaaaacagttactctctggatgatttagagatcgggcccgggcagttgtcatccagtacctttgactctgagaaaaacgaatctcggagaaacctggagcttccccgcttatccgagacctcgattaaggacagaatggcaaagtaccaagcagcggtatctaaacaaagctcaagtacaaattataccaacgaactgaaagccagcggaggagaaatcaagatccacaaaatggagcagaaggaaaacgtaccaccggggcccgaagtgtgcatcacccaccaagagggggagaaaatcagtgccaacgaaaactcccttgccgtgagatctacacccgctgaagacgattctcgcgattcccaggtcaagagtgaggtgcaacaaccagttcatccaaagccactgtccccagacagtcgtgcatcatctttgagcgagagctccccacctaaggccatgaagaagttccaggcccctgccagggagacatgtgtggagtgtcagaaaacagtctatcctatggaacggctccttgctaaccaacaggtctttcatatctcttgcttcagatgctcatattgcaacaacaaattgtctcttggcacttacgctagcctgcacggcaggatttactgcaaaccccatttcaaccagctattcaagtcaaagggaaactatgacgagggattcggtcacaggcctcataaagacctctgggctagcaagaacgagaatgaggagatcttggagcggccggcccagctggctaacgcgagggagaccccccacagccctggcgttgaagacgccccaattgcaaaggtcggtgtgctcgccgcctccatggaagccaaagcctcgagccagcaggagaaggaggacaaacctgcagagaccaagaagttacgcatagcttggccgccccctacagagctgggaagctctggctccgccctggaggaagggattaagatgtccaagcccaagtggccaccggaagacgaaatttctaaacctgaggtgcccgaggacgttgatctcgacttaaaaaaactgcgtcgcagcagctcattgaaggaacgttcaaggcctttcacagtggctgcttcctttcagagcacgtccgtgaagagcccgaaaactgtgtctccccctatccgaaaaggttggagtatgagtgagcagtctgaggaaagcgtggggggacgcgtcgcagagaggaagcaggtggagaacgccaaggcctctaaaaagaacgggaatgtcggcaaaacaacttggcagaataaagaatccaagggagagactggaaagcgatccaaagaggggcattcactggaaatggagaacgagaacttggttgaaaacggagcagattcagatgaagatgataactcctttctgaagcaacagtcacctcaggagccgaagagtctgaactggagttctttcgtcgacaacactttcgctgaggagttcaccacccagaatcagaagtctcaagacgttgagttgtgggagggagaagtggtcaaagaactgtctgtcgaggaacagatcaagcgcaatcgatactacgacgaagacgaagatgaagagtag

SEQ ID NO: 193296 - DNA, 1374 bp, synthetic construct
  misc_feature 1..1374: note = Description of Artificial Sequence: Synthetic coding sequence
  source 1..1374: mol_type = other DNA
atggagcagaaggagaacgtgccccccggccccgaggtgtgcatcacgcatcaggagggcgaaaagatctcagccaatgagaattccctcgcagtgcgatcgacaccagccgaggatgatagccgggatagtcaggtcaaatctgaggtccagcagcctgtccaccccaagccactgtcccctgattcgcgggcgagctctctctctgaatcatccccccctaaggctatgaagaagtttcaagccccggccagggagacttgcgtggagtgccagaagacagtgtatcccatggagcgtttactagcgaatcagcaagtcttccatatttcatgttttagatgctcatattgcaataacaagttatcgctgggcacatatgcctcactgcacgggcggatttattgtaagccacacttcaaccagttgttcaaatccaagggcaactatgatgaaggcttcggccaccgccctcacaaggacctgtgggctagcaaaaacgaaaatgaagaaatcctggaacggcccgcccagttggccaatgctcgcgagacacctcattcacccggggtggaggacgcccctattgctaaggtcggagtgctggccgcctcaatggaggccaaagccagctcccagcaggaaaaggaggataagcccgccgaaacgaaaaagctccgcatcgcatggcctcctcctaccgaactgggaagttccggctctgcactggaggaggggattaagatgagcaaaccgaaatggccacctgaagatgaaatctcaaagcctgaagtacccgaagacgtggacttggaccttaaaaagctgcgcaggtcaagctcattgaaggaacgcagtagaccattcaccgtagcagcgtcattccaatccaccagtgttaagtcaccgaagacggtctcacctcctattaggaagggctggagcatgtcagaacagagtgaggagtccgtgggaggccgcgtcgctgagcggaaacaggtggagaatgctaaagccagcaaaaagaatgggaacgtgggcaaaaccacttggcagaacaaggaatcaaaaggggaaacaggcaagcggtccaaagagggccacagtctggaaatggagaatgagaacttagtagagaacggagcagactcagacgaagatgacaatagcttcctcaagcaacagtctcctcaggagccaaagtcactcaattggagcagttttgtggataacactttcgctgaagaatttactacacagaaccagaagagtcaggatgtggaactgtgggagggggaagtcgtgaaagaactctccgttgaagagcagatcaagagaaaccgttattatgatgaggacgaggacgaagagtag

SEQ ID NO: 193297 - DNA, 336 bp, synthetic construct
  misc_feature 1..336: note = Description of Artificial Sequence: Synthetic coding sequence
  source 1..336: mol_type = other DNA
atggagagcagccccttcaaccggcggcagtggaccagcctgagccttagggtaaccgcgaaggaactctcgctcgtcaacaagaacaaatcttccgcgatcgtcgagattttctctaaataccagaaggcagctgaggagactaacatggaaaaaaaacggtccaacaccgagaatctgagtcagcacttccgcaagggcactctgacggttcttaagaagaagtgggaaaacccggggctcggggccgaaagtcatacggactcattacgaaatagcagtacagagatccgccatcgcgccgaccaccctcccgccgaagtcacatcacattag

SEQ ID NO: 193298 - DNA, 393 bp, synthetic construct
  misc_feature 1..393: note = Description of Artificial Sequence: Synthetic coding sequence
  source 1..393: mol_type = other DNA
atggagagcagccccttcaaccggcggcagtggaccagcctgagccttcgggtgactgcaaaagagctgagcctagtaaacaaaaacaagtcgtcagctatcgtggaaatcttcagtaaatatcagaaagccgcagaagagacgaacatggagaagaaaagatcaaatacagagaacttgtcccaacattttcggaagggtacgctgaccgttctgaagaagaaatgggagaaccccggacttggcgccgaatcccatactgattcactgcgaaattcatcaaccgagattcggcaccgcgccgatcatccccctgcggaagttaccagccacgcagcatcgggcgccaaagcagatcaggaggaacaaattcacccccgttcccgcttgtag

SEQ ID NO: 193299 - DNA, 1371 bp, synthetic construct
  misc_feature 1..1371: note = Description of Artificial Sequence: Synthetic coding sequence
  source 1..1371: mol_type = other DNA
atggagcagaaggagaacgtgccccccggccccgaggtgtgcatcactcatcaggaaggggaaaaaataagcgccaacgagaacagtttagccgttcgctccacccctgcagaagacgatagtcgagactcgcaggtaaaaagtgaagtccagcaacctgtgcaccctaagcctcttagtccagattccagggcctcttcattgagcgagtcttctccgccgaaagcgatgaaatttcaggcccccgcaagagagacttgcgtggagtgtcagaagactgtgtatcccatggagcgactgctcgctaaccaacaggtctttcacatctcctgtttcaggtgttcctattgtaataacaagctctctctcggtacctacgcatctctccacggtcggatctactgcaagccacacttcaatcagttgtttaaatcaaaaggcaattacgatgaaggcttcggacacaggcctcataaggatctgtgggccagcaagaacgaaaacgaggaaattctggaacggcctgctcagttggctaacgccagggaaactcctcattccccaggcgtcgaggacgcaccaattgccaaggtcggggttttggctgcaagtatggaggcaaaggcctccagccaacaggaaaaggaggataaaccggccgaaacaaaaaagttacgaatcgcttggccccccccaaccgagcttgggagctctggctcagctcttgaagaggggattaagatgtctaagcccaaatggcccccagaggacgagattagtaagcctgaggttccggaagacgtggacctggatctgaagaaactaaggcgctcttcctccctgaaggagcggagtcgtcccttcaccgtggctgctagttttcaatccacaagtgtgaagtcacccaagaccgtttcccctcccattagaaagggttggagtatgtcagagcagtctgaggagagtgtgggcggccgagtagcagagcggaaacaggtggagaatgcaaaggcctctaagaagaacggcaacgtgggaaagactacctggcagaacaaagaaagcaaaggcgagacagggaagcggagcaaagagggtcacagtttggagatggaaaatgagaatctggtggaaaacggcgcagactccgacgaagatgacaatagctttttaaagcagcagagtccacaggaaccaaagtcactgaactggtccagctttgtcgataatacgtttgctgaggaatttaccacacaaaaccagaagagtcaggacgttgaactttgggaaggtgaagtcgtaaaagagctttctgtggaagaacaaatcaagcgtaaccgatactacgacgaggacgaggacgaagaatag

SEQ ID NO: 193300 - DNA, 1803 bp, synthetic construct
  misc_feature 1..1803: note = Description of Artificial Sequence: Synthetic coding sequence
  source 1..1803: mol_type = other DNA
atggagaactgcctgggcgagagccggcacgaggtggagaagagcgaaattagtgagaacaccgatgcatcagggaaaatagaaaaatataacgtgcccctaaacagactcaagatgatgtttgagaagggagagccaacccagacaaagatcctcagggcacagtcacgtagcgcatctggacgaaaaatcagtgaaaactcatactcactcgatgacctggagatcgggcccggccagctgtcctcatctactttcgacagcgaaaaaaacgagtcaaggaggaatctcgagctgccccggctcagcgaaacttctattaaagacagaatggctaaataccaggcggccgtatctaagcagagcagctccacaaactacaccaacgagctgaaggcctcaggcggggagataaaaatccacaagatggagcagaaggagaatgtgcctcccggcccggaagtgtgcatcacacaccaggaaggagaaaaaatatccgctaacgagaactccctggcagtcagatcaacaccagccgaggacgattcccctggggatagccaagttaagagtgaagtgcagcaaccagtccaccctaaaccactgtccccagacagcagagcatcttcactaagtgagtcaagtccaccaaaagctatgaaaaagttccaggcacctgctagagaaacctgtgttgagtgccagaaaacagtttatccaatggaaagactcctagcaaaccagcaggttttccacatctcttgttttagatgtagttactgcaacaataaattgtccctgggaacatatgcgtccttgcacgggcgaatctactgcaaaccccacttcaaccaactgttcaagtctaaaggtaattacgatgagggttttggtcaccgaccccataaggatctctgggcctcgaaaaatgagaacgaagaaatactagaaagaccagcccagctagctaacgcccgggaaacgccacacagccctggtgtcgaagacgctcctattgctaaagttggggtactggctgctagcatggaagcaaaggcttcatctcagcaggagaaggaagacaaacctgccgagacaaagaagctgcggatcgcttggcctccacccaccgagctcggctccagtggctcagcactcgaggagggaattaagatgtctaagcccaagtggccacctgaggacgaaatctccaaacctgaggtcccagaagacgtggacctggatctgaagaagctgcgccgctctagcagtctcaaagaaagaagccgaccttttacggtggcagcttcttttcaatccacctccgtgaagtcaccaaaaactgtcagtccccctatccgcaagggctggagcatgtccgagcagagcgaggagtccgtcggaggcagggtggctgagaggaagcaagtcgagaacgcaaaagcaagtaaaaaaaatgggaacgtggggaaaaccacctggcagaacaaggaaagcaagggggagactgggaaaaggtccaaggaaggacactcgctggaaatggagaatgagaatctggtcgagaatggggccgattcggacgaggacgacaatagcttcctgaagcaacagtctcctcaggagcccaagtcccttaactggtcctcgttcgtcgataacaccttcgccgaggagttcaccacccagaatcaaaagagtcaggacgttgaattgtgggagggagaggtcgtcaaagagttgtccgtcgaagagcagattaaacgaaatcgctactacgatgaagacgaagatgaagagtag

SEQ ID NO: 193301 - DNA, 1800 bp, synthetic construct
  misc_feature 1..1800: note = Description of Artificial Sequence: Synthetic coding sequence
  source 1..1800: mol_type = other DNA
atggagaactgcctgggcgagagccggcacgaggtggagaagagcgagatcagcgaaaacacagatgccagcggaaagatagaaaagtacaacgtgcccctgaacaggttgaaaatgatgtttgagaagggcgaaccaacccagactaagattctgcgcgcacagtctagatctgcctcaggccgtaaaatcagcgagaattcttactcactggacgatcttgaaatcggcccaggccagcttagttcttcaactttcgatagcgaaaaaaacgagtcccgccgaaatctagaactcccacggctaagtgagactagcattaaggaccggatggcaaaataccaggcagccgtttctaagcaatcaagcagcacaaactacaccaacgagctgaaagcctcaggcggcgagataaagattcacaagatggagcagaaggagaatgtgcctcccgggcccgaagtctgtatcacacatcaagagggagagaagatttccgccaacgaaaactcacttgctgtgagatcaaccccagctgaagacgacagtagggactcacaggtgaaatccgaagtacagcaaccagtgcaccctaagccgctgagtcctgacagcagagctagtagtctgtcagagtctagtccacccaaggctatgaagaagtttcaggcccctgcccgggagacatgcgtcgagtgccagaaaactgtgtatccaatggaacggcttctggcaaatcagcaggttttccacatctcttgtttccggtgctcttattgcaacaacaaactgtcactgggcacctatgctagcctgcatggccggatctattgcaagccccacttcaaccagctgttcaaaagcaaggggaattatgatgaggggtttggtcacagacctcacaaagatctctgggctagtaagaatgagaatgaagaaatactggaaaggcctgcccaacttgccaatgcgagggaaacccctcactcccctggtgtggaggacgcccccatagcgaaagtgggcgttcttgctgctagcatggaggctaaggcaagctctcagcaagagaaagaggacaaaccagcagaaacaaagaagctgcgcattgcttggcccccacctaccgagcttggcagttcaggaagcgccctggaggaaggcatcaaaatgtcgaagcccaagtggcctcctgaggacgagatcagtaagcctgaggtgcccgaggacgtcgacctggatctgaagaaactcagacgcagcagctctctgaaggagaggtcccggccctttaccgttgccgcatcctttcaatccacctcggtgaagtcacctaaaacagtttcaccgccaattcgaaaaggttggtccatgtccgagcagtctgaagagagtgtgggcgggcgggtggcggagagaaagcaagtggaaaatgctaaggcatccaagaagaatgggaatgtaggcaaaaccacctggcaaaataaggaaagcaagggggaaactgggaagagaagcaaggaggggcacagcctcgagatggaaaacgagaatttagtggagaatggagctgattccgacgaagatgataattcttttctgaaacagcaatctcctcaggaaccaaagtccctgaattggagtagctttgtggataataccttcgctgaagaatttactacccagaaccagaagagtcaagacgtcgagttatgggagggcgaggtcgtgaaagaactgtcggtggaagagcagataaaaagaaataggtattacgatgaggatgaggacgaggaatag

SEQ ID NO: 193302 - DNA, 1128 bp, synthetic construct
  misc_feature 1..1128: note = Description of Artificial Sequence: Synthetic coding sequence
  source 1..1128: mol_type = other DNA
atgctggaccgggacgtgggccccacccccatgtacccccccacctacctcgaaccaggcattggtaggcacaccccgtatggcaatcaaaccgattacagaattttcgagctgaataagaggctgcagaactggacagaggagtgtgataatctgtggtgggatgcttttacgacagaattctttgaggacgatgccatgctcacaataactttttgtctcgaagatggtcctaagcgctataccatcgggaggacattgatccctagatatttccgttccatcttcgaaggaggtgccaccgagctgtattacgtcctcaagcacccaaaagaagccttccactccaacttcgtttctctggactgtgaccagggctccatggtgacccagcatggtaagcccatgttcacccaggtgtgtgttgaaggccggttgtacctggagtttatgttcgacgatatgatgaggattaagacctggcacttttcgatacgtcagcatcgcgagctgattccacgctctattttagccatgcacgctcaagatccacagatgctggaccagctgagcaagaacatcacacgctgcgggctgagtaactctactctgaattatctgcgcctctgtgtgattctggaaccaatgcaggaactgatgtctcggcataagacatattcactatccccgcgggattgtctcaaaacttgcctgtttcagaagtggcagcgtatggtggccccacccgcagaacccacccgacaacaaccaagcaagcgtcgcaagaggaagatgagcggcgggtcaaccatgtctagtggaggaggtaataccaataattccaattcgaaaaaaaaatctccagcttccacctttgcattaagcagccaggtgcccgatgtcatggtcgtgggcgaaccaactttgatggggggcgagttcggggatgaggatgagcgtctgatcacccggcttgagaacacccagttcgacgcagccaatggaatcgatgacgaagactcattcaacaattctcctgccctgggggccaatagcccctggaattcaaagcccccctcttcgcaggagtctaaaagtgagaatcctactagccaggcctctcaatag

SEQ ID NO: 193303 - DNA, 1236 bp, synthetic construct
  misc_feature 1..1236: note = Description of Artificial Sequence: Synthetic coding sequence
  source 1..1236: mol_type = other DNA
atgagcgtgggctgcgcctgccccggctgcagcagcaagagcttcaaactatatagcccaaaagaacccccaaatggcaatgcctttccacctttccacccaggaacaatgttggacagagatgtcggtcccacccctatgtacccccccacatacctggagcccggcatcggcaggcatacgccttacggcaatcagaccgattaccgcatcttcgagctgaataagcggctgcaaaattggactgaagagtgtgacaatttgtggtgggatgcctttactaccgaattcttcgaggacgatgccatgctgactatcaccttctgtctggaggacggccccaaacggtataccattgggagaacacttatcccaagatatttcaggtcaatattcgaggggggagctactgaactgtactacgtcctcaaacatcccaaagaagcttttcactctaattttgtatcacttgactgtgaccaaggctctatggtcactcagcatggtaaaccgatgttcacccaagtctgtgtcgaaggacgcctgtatctggaattcatgtttgacgacatgatgaggatcaagacgtggcatttcagcatccgacagcaccgtgaactcataccaaggagtattttggccatgcacgcccaggatccacagatgctggaccagctgtccaagaacattacaaggtgtggcctgtcgaacagtactctaaattatctgcggctgtgcgtaattttagagccaatgcaggagcttatgagtaggcataaaacatatagtctgtccccgcgggactgcttaaagacctgcctcttccaaaagtggcaaaggatggtggcccctcccgccgagcctaccaggcagcagccatctaagcggaggaagcggaaaatgagcggtggctctacaatgtcgagcgggggaggaaatacaaataactcaaactccaagaaaaagtcaccagcctcgaccttcgcactttcgtctcaggtgccagacgtcatggtggttggagaacccactctcatgggcggggaattcggcgacgaggatgaaagactcatcacccggctggaaaacacccagttcgacgcagcaaatggtatcgacgatgaggacagttttaataatagccccgccttgggcgccaacagcccatggaatagtaagccaccatcttcccaggagagcaagtccgaaaaccctacatcccaggccagccagtag

SEQ ID NO: 193304 - DNA, 1122 bp, synthetic construct
  misc_feature 1..1122: note = Description of Artificial Sequence: Synthetic coding sequence
  source 1..1122: mol_type = other DNA
atgagcagcaccccccacgaccccttctacagcagccccttcggcccattttaccggcggcatacaccatacatggtacagcccgaataccgaatatatgagatgaataaaaggctgcagtcccggactgaggacagtgacaacttgtggtgggacgcctttgctactgagttctttgaggacgacgccacacttaccctgtcattctgcctcgaggacggacccaaacgatacacgataggacgaacattgattccccgatacttttcgactgtgttcgagggtggagtcacggacttatattacatccttaaacacagcaaggaatcatatcataattcaagcatcacagttgattgtgatcaatgcacgatggtgacccagcatggtaagcccatgtttacaaaagtatgtaccgagggaagattgatcctcgaattcacatttgatgacctgatgaggatcaaaacctggcactttaccatccggcaataccgtgagttggtaccgagatcgattctagccatgcacgcacaggaccctcaagtgctagatcagttgtcaaaaaacataacacgaatggggctgaccaattttaccctcaattaccttcgactctgcgttatcctggagccaatgcaggagctgatgtcacgtcataagacttacaatttatcccccagagactgccttaaaacctgcctctttcagaagtggcagaggatggtggccccacccgctgaacctaccaggcaaccgacaacaaaacgccgcaagagaaagaacagtaccagcagcacatctaattccagtgctgggaataacgcgaactccactggatccaagaaaaagaccaccgcagcaaatctgtccctgagttcacaagtgcccgatgtcatggtagtaggggagcccaccttaatggggggcgaattcggagacgaagatgagaggttgatcactcggctggaaaatactcaatatgatgccgcaaacggaatggatgatgaggaggactttaacaatagtccagctctggggaacaattccccctggaatagcaagcccccagctactcaagaaactaagagtgagaatccaccccctcaggctagtcagtag

SEQ ID NO: 193305 - DNA, 996 bp, synthetic construct
  misc_feature 1..996: note = Description of Artificial Sequence: Synthetic coding sequence
  source 1..996: mol_type = other DNA
atgagcagcaccccccacgaccccttctacagcagccccttcggcccattttaccgccgccacaccccctatatggtacagccagagtatcggatctacgaaatgaataaacgcctgcagtcccgcaccgaggactctgataatctctggtgggatgctttcgctacggagttctttgaggatgacgccactttgacattgagcttttgcctggaagatgggccgaaacgttacacgatcggtaggaccctgatccccagatacttctccactgtcttcgaaggtggagttaccgacctgtattatatcctgaagcactctaaagaaagttatcacaatagtagtataaccgtggattgtgatcaatgcacaatggttacccagcacggaaaacccatgttcacgaaagtgtgtacggagggtagacttatcctggagtttacgtttgatgacctgatgagaatcaagacgtggcacttcacgataagacagtatcgcgagctagtcccccggagcatcctagccatgcacgcccaggacccgcaggtgctggatcagctatctaaaaacatcacccggatgggtctgactaatttcactctgaattatctgcgattgtgtgttattctggagcctatgcaggagctgatgtcaaggcacaagacctacaacctgtctccccgcgattgccttaagacttgtttgttccagaagtggcagcgcatggtggctcccccggctgagcccacccgccagcctacaacaaaaaggagaaagaggaagaatagtacatctagcacgagcaattctagtgccggcaacaacgcaaacagcactgggtcaaaaaaaaaaactacagccgctaacctgtctctcagttcccaggtccctggcctgggggctatccccaactgctcgctgaatcccgggagagatggggacttgtgtcattccacagccgtgacacccagtggacagttcaaggaaaaacactag

SEQ ID NO: 193306 - DNA, 942 bp, synthetic construct
  misc_feature 1..942: note = Description of Artificial Sequence: Synthetic coding sequence
  source 1..942: mol_type = other DNA
atgagcagcaccccccacgaccccttctacagcagccccttcggccctttttaccgtagacatacaccctatatggtgcagcctgaatatagaatttacgagatgaacaagcgccttcagagtaggacagaggatagcgacaatttgtggtgggatgcattcgcaaccgaatttttcgaggacgacgcaacactcaccctgtccttttgtcttgaggatggacccaagcgctacacaatcggcagaacccttatccccaggtactttagtacggtcttcgagggcggggtcactgacctgtattatattctcaagcactctaaggaatcttatcataactcatctataacggtggactgtgaccagtgtacgatggtcacccagcatggaaagccaatgtttaccaaagtgtgtaccgaaggcagactaattttggagtttacatttgacgatcttatgaggatcaagacttggcacttcacgatcaggcagtaccgggaactggtgccccgttccatcctcgcgatgcatgcgcaggacccgcaagtgttggaccaactctctaaaaatatcacgaggatggggcttacaaacttcactcttaactatttacggctctgcgtaatcttggagccaatgcaagaactgatgagccgccataagacctataacctttccccacgagattgccttaagacttgtcttttccagaagtggcagaggatggtcgccccccccgctgaaccgacccggcagccaactaccaaaagacgtaaaaggaaaaactcaaccagcagcacctcgaattctagcgctggtaacaatgcaaatagcacaggatccaaaaagaagaccacagccgctaatctttccctgagtagccaggtccctatagccagtatcgcgcgctcccccgtgagcggctgcgctctcaggacttag

SEQ ID NO: 193307 - DNA, 570 bp, synthetic construct
  misc_feature 1..570: note = Description of Artificial Sequence: Synthetic coding sequence
  source 1..570: mol_type = other DNA
atggtgacccagcacggcaagcccatgttcaccaaggtgtgcaccgagggaagactgatcttggaatttacatttgatgatctaatgagaattaagacatggcactttaccatccgtcagtacagagagctcgtgcctcgatctatcctcgccatgcacgcccaggatcctcaggtcttggaccagctctctaagaacatcacacgaatggggctgactaacttcacactaaattacctgcgcctgtgcgtgatcttggagccaatgcaggagctgatgtctcggcacaagacatacaatctaagcccgagggactgtctgaagacatgtctttttcagaagtggcagcggatggtggcacctccagccgagcccacccggcagcctaccacaaagcgtcggaagcgcaagaattcaacttcttccacaagcaattcctccgcaggaaataacgctaattccacagggtcgaaaaaaaagactaccgccgctaatctgtccctgagttcccaggtgcctattgcctctatcgcaaggagccctgtctctgggtgcgccttgcgtacctag

SEQ ID NO: 193308 - DNA, 495 bp, synthetic construct
  misc_feature 1..495: note = Description of Artificial Sequence: Synthetic coding sequence
  source 1..495: mol_type = other DNA
atggtgcagcccgagtaccggatctacgagatgaacaagcggctgcagagccggaccgaggacagcgacaacctctggtgggatgcgtttgctacagaattctttgaagacgacgccacactgactctgagtttctgcctcgaggacgggcctaagcgatacaccattggccgaaccctcatccctcggtactttagcactgttttcgagggtggcgtcacagatctgtactatatcctcaagcatagcaaggaatcgtaccataacagtagcatcacagtggactgcgatcaatgtacaatggtaacacaacatggcaaacccatgttcaccaaggtgtgcaccgaagggcggctgattttggagttcacgtttgacgatctgatgcgtataaagacatggcactttacgatacgacagtacagagagctcgtgcccaggagcattctggcaatgcatgcccaggatccacaggtgctggaccagctcagctag

SEQ ID NO: 193309 - DNA, 333 bp, synthetic construct
  misc_feature 1..333: note = Description of Artificial Sequence: Synthetic coding sequence
  source 1..333: mol_type = other DNA
atgagcagcaccccccacgaccccttctacagcagccccttcggccctttctatcggcgtcacacaccctacatggtgcagcccgaatataggatttacgaaatgaacaaacggttacagagccgcaccgaagacagcgataacttgtggtgggacgcttttgccacagagttctttgaagacgacgccacactgactctatccttctgcctggaggatgggcctaaaaggtatattgttcacagtgccgcagacgctagagggaactgtaaccagttaggcgacagtgagccggacgcttgcgacggcctgttgcagtttccgattatgtag

SEQ ID NO: 193310 - DNA, 321 bp, synthetic construct
  misc_feature 1..321: note = Description of Artificial Sequence: Synthetic coding sequence
  source 1..321: mol_type = other DNA
atgagcagcaccccccacgaccccttctacagcagccccttcggccccttttataggagacacactccatatatggtccaacccgagtatagaatctacgaaatgaacaaaagacttcaatcgaggactgaggattccgataatttgtggtgggatgcttttgccaccgagtttttcgaagatgatgccactctgactctctctttttgcctggaggacggacctaagcgataccgcactaaaaatctgcgccccattggcgagaagatgaacatcaatgggaagtgctatagacaggaccctcacccccctcttctctag

SEQ ID NO: 193311 - DNA, 1116 bp, synthetic construct
  misc_feature 1..1116: note = Description of Artificial Sequence: Synthetic coding sequence
  source 1..1116: mol_type = other DNA
atgagcagcaccccccacgaccccttctacagcagccccttcggccccttctacagacgacacacgccgtacatggttcagcccgagtaccggatttacgagatgaacaagaggctccaatcgcgcaccgaggacagcgacaatttgtggtgggacgctttcgcaactgagttttttgaagacgacgccacattgaccctttctttctgtctcgaggatgggcctaaacggtacaccattggccgcaccctgattcctagatacttctccacagtctttgagggcggggtcaccgacctgtactacattcttaaacactctaaggaaagttatcataactcctctattaccgtcgactgcgaccaatgtactatggtaacccaacatggaaaacccatgttcactaaagtgtgtacggaggggaggctgattttagagtttacatttgacgatcttatgaggatcaagacctggcatttcaccattcgtcagtacagggagctggtgcccagatcaatcttggcaatgcacgctcaggacccgcaggtgctggaccagctgtccaaaaatattactagaatgggccttaccaattttaccctgaactacctcagactatgtgtgatcctcgagcccatgcaggagctcatgagcagacacaagacgtacaacctgtctccccgggactgtctaaagacttgcctgttccagaagtggcagcgtatggtggcccccccagctgaaccaaccagacagcccaccaccaaaaggagaaagcgcaagaatagcacatcttcaacttcaaattccagtgccggtaataacgcaaattcgacagggtcaaagaaaaagaccaccgcagcaaacctgagcctgagtagccaggatgtgatggtggtgggtgaacctacacttatgggcggggagtttggagacgaggatgagcggctgatcactcgactcgagaatactcagtatgacgctgcaaacggtatggatgacgaagaagactttaataattctccggctcttggaaataattcaccctggaatagtaaacctcctgccacacaggagactaagtcagaaaatcccccaccacaggcctcacaatag

SEQ ID NO: 193312 - DNA, 1854 bp, synthetic construct
  misc_feature 1..1854: note = Description of Artificial Sequence: Synthetic coding sequence
  source 1..1854: mol_type = other DNA
atgagctacagcgtgaccctgaccggccccggcccctggggcttccgcctccaaggcggaaaggacttcaatatgcctcttaccatttccagaatcacccctggatctaaggccgcacagagccagctgtcccagggagatctggtggtggctattgacggggtgaataccgataccatgacccacctagaggcccagaacaagattaaaagcgccagttataacttgtccttaactctgcaaaagagcaagagaccaatcccaatttccactactgctcctcccgtccagactcctttgcccgtgatcccccaccagaaggtggtcgtcaactcccctgccaacgctgattaccaggagaggtttaacccatctgccttgaaagacagtgcactgagtactcataagccgattgaagtcaaggggctcggaggaaaggccaccataatccatgcgcaatataatacccctatttccatgtactcccaggatgctataatggacgccatagccggccaggctcaggcccagggctccgacttctccgggtccctacccattaaggatcttgctgtggactccgcctcccctgtttatcaggctgtgatcaagagtcagaacaaacccgaagatgaggcagacgaatgggcacgacggtccagtaacctccagagccgcagcttccggattctcgcacagatgacaggcaccgaatttatgcaagaccccgacgaggaggccttgcggaggagtaggccccaggccagcagctacagccccgcggtggccgcctcaagtgccccagcgacacacacatcatactctgagggccccgccgctccagccccaaagccaagggtcgtgactacagcatctatcagaccttccgtctatcagcctgtgccagccagtacttacagtcccagccccggtgcaaactattcccctactccttacaccccttctcctgcccccgcgtatacccccagcccggcccccgcatacaccccatctcccgtacctacctatactccaagtccggcaccagcctatacaccttcccctgcacccaattataacccagcaccctccgtggcttacagcggtgggcccgccgaacccgcaagtcgccctccttgggtcaccgacgatagcttctcccagaaattcgcccccggaaaatctaccacttcaatcagtaagcaaaccctgcctcgcggcggccctgcttatactcctgcgggaccccaggtccctcctttggcccgaggtaccgtgcagcgcgccgaacgtttcccggcttcatcccgcactccactgtgtggccactgcaacaatgtcatccgcggaccttttctggttgccatggggcggagttggcatccagaggaatttacatgtgcctattgcaaaacttctctcgccgatgtgtgtttcgtggaggagcagaacaatgtgtattgcgagagatgctatgagcaatttttcgccccactgtgcgctaagtgcaatactaaaatcatgggagaagtgatgcacgccctgagacagacctggcataccacctgtttcgtttgcgctgcctgcaaaaaacctttcggcaattccctcttccacatggaggacggcgagccttactgcgagaaagattacatcaacctgttttcgactaagtgtcacggctgtgatttcccagtggaagctggtgataagttcatcgaagctttaggacatacgtggcacgacacatgcttcatttgtgcagtgtgccatgtgaatctggagggtcaacccttctattccaagaaggacaggcctttgtgcaaaaagcacgctcacacaatcaacctgtag

SEQ ID NO: 193313 - DNA, 993 bp, synthetic construct
  misc_feature 1..993: note = Description of Artificial Sequence: Synthetic coding sequence
  source 1..993: mol_type = other DNA
atgagctacagcgtgaccctgaccggccccggcccctggggcttcaggctgcaaggaggcaaggacttcaacatgcctctgacaatcagcaggattacccccgggtcaaaggctgcacagtcgcagctgtctcaaggagatctggtggtagctatcgacggagtaaataccgacacaatgacccatctggaggcccagaataaaatcaagtccgcctcctacaatttgagcctgaccctgcagaaatccaaacggcccatacccatctctacgacagccccccccgttcagactccactccccgtaattccccatcagaaagacccggccctagataccaatggctctcttgtagcccccagcccaagccccgaggcacgggcttcccccggcactccagggaccccggagctacgccctaccttctcccccgcgtttagtcgcccatccgcatttagctctttggccgaagcatctgaccctggtccaccccgagcctccctgcgtgctaaaacttccccagagggagcgcgagatcttttgggacccaaagctctgccaggaagctcgcagccccgccaatacaacaatccgatcgggctgtactccgccgaaacgctccgggaaatggcgcagatgtatcaaatgagcttgcgcggcaaagcctccggcgtgggtctccccgggggatcacttcctataaaggatttggccgttgattcggcatcacctgtgtatcaggccgtgatcaaaagtcagaataagcccgaagatgaagctgatgaatgggcaaggagatccagtaatctgcaaagcaggtcattcaggatcctggcccagatgacaggaaccgagtttatgcaagatcctgatgaagaggctcttaggcggtcaagagaacgatttgagaccgagagaaattctccacggttcgcgaaactaagaaactggcaccacggtctatctgcgcagattctgaacgtgaaaagctag

SEQ ID NO: 193314 - DNA, 1413 bp, synthetic construct
  misc_feature 1..1413: note = Description of Artificial Sequence: Synthetic coding sequence
  source 1..1413: mol_type = other DNA
atgagctacagcgtgaccctgaccggccccggcccctggggcttcagactgcagggaggtaaagacttcaacatgcccctgaccatttcgagaatcacccctggaagtaaggcagcccagagccagttgagtcagggggatctcgtcgttgccatcgacggcgtgaataccgataccatgacacacctggaggcacagaataagatcaaaagcgcttcctacaacctgtcccttacgctgcaaaagtcaaagagaccaattcccatttccacaacggctcctcctgtgcagaccccgctccccgtaattccacatcaaaaagccagctcttattccccagccgttgcagcttccagcgcgcccgctacccatacttcatattctgagggcccagccgcccctgcacctaagcccagagtggtgacgactgctagcattagacccagcgtctaccaacctgttccggcctcaacttactccccaagtcccggagccaactacagcccaaccccttacacaccgagtcctgcaccagcatatacccccagtcctgcccctgcttacaccccctcacctgtcccgacttacactccatcacctgctcccgcttacacgccctccccagcgcctaactacaacccagctcccagtgttgcttattcgggcggcccagcagagccggcttcaagaccaccatgggtaacggatgacagtttcagccaaaagttcgctcctgggaagtctacaactagcatcagtaagcagacactgcctcgagggggcccagcctatacacctgctggcccccaggtaccacctctggcacgaggcacagtgcaaagggccgagcgattcccagcgagttcaagaacccctctgtgcggtcactgcaacaatgtgattcggggtccctttttggttgccatggggaggtcatggcacccggaggagtttacgtgtgcgtattgcaaaacttctttggcagacgtctgttttgtggaggaacagaacaatgtctactgtgaacgctgctatgagcagttctttgcccccctctgtgctaagtgcaatactaagattatgggcgaagttatgcacgctctgagacagacgtggcacactacatgcttcgtgtgcgccgcttgcaagaaaccatttggaaatagcctttttcacatggaggacggcgagccctattgtgagaaggattacatcaatctgttcagcactaaatgtcacggatgcgacttccccgtcgaggctggagataagtttatcgaggccctggggcacacctggcacgacacatgcttcatctgcgccgtgtgccacgtcaacctggaaggacagccattctactctaagaaggatcgcccactttgcaaaaagcatgcccatacaattaatttgtag

SEQ ID NO: 193315 - DNA, 2184 bp, synthetic construct
  misc_feature 1..2184: note = Description of Artificial Sequence: Synthetic coding sequence
  source 1..2184: mol_type = other DNA
atgagctacagcgtgaccctgaccggccccggcccctggggcttccgccttcagggaggaaaagattttaacatgccactgacgatctcccggattacccccggctctaaagctgcccagtctcagctgagccaaggggatcttgttgtcgccattgatggagtgaataccgatactatgacacatctcgaggctcagaataagattaagagcgcaagctacaacctatcgctgactctccagaaatctaagcggccgatcccaataagtaccacagctcctcccgttcagactcctctccccgtaattccacaccagaaagacccggccctcgacaccaacggctctctcgtggccccatcgccatcgccagaagcacgggcctcccccggaacacccgggacgcccgagctccgcccgacgtttagtcctgccttcagccggccatctgcatttagttccctggcggaggccagtgatcccggaccccctagggccagtctgagagcgaagacgagcccagagggagcccgcgaccttttagggccgaaggcccttcccggctccagccagccacgccaatacaacaatcctataggtttatactctgctgaaactcttcgagaaatggcacaaatgtatcaaatgtcgcttcgggggaaagcgagcggggtgggcctgcccggcggatctctacccatcaaggatctggccgtggattcggctagtcctgtgtaccaggccgtgattaagagccagaataaacccgaggacgaggcagacgagtgggcacgccggagttcaaatcttcagtcacgcagctttcggatcttggcacagatgacaggaacagagttcatgcaggatccagacgaagaagccctgcgacggagctccacacctatcgagcatgcccccgtctgcacatctcaagccaccacaccgctgctaccggcatccgctcaacctcctgctgcagccagtccttccgctgcttcccccccgttggccaccgccgccgcccacacggctattgcatctgcctccactacggcacctgcgtcctcccccgccgattctccaaggcctcaggcttctagctacagccctgccgtagccgccagtagcgccccagcgactcacacctcctattctgaagggccagcagcgcccgcacccaagccccgggtagtgaccactgcatctattagaccctctgtataccagcccgtgccagcttccacatattcaccttcaccaggcgcaaattacagtccaaccccatacacaccttcccctgcccctgcctataccccctcccccgctcctgcttatacaccctccccagtgcctacatacactcccagcccagctccagcctacacaccttccccagcccctaattacaatccagctccttctgtagcatactccggaggtcctgcagagccggcctcccgtccaccttgggttactgacgacagcttttctcagaaattcgctcctgggaaatcaactacaagtatctccaaacagacccttccgcgcggaggacctgcctacacccctgccgggcctcaggtccctcccctggccagaggcacggtgcagcgagccgagaggttccctgcaagcagcaggacccccctgtgtggacattgcaataacgtgattcgaggtcctttcctagtggccatggggagaagctggcacccagaggaattcacctgtgcatactgtaagacctcattagccgatgtttgctttgtggaagagcagaataacgtgtattgtgagagatgctacgagcagtttttcgcccctctgtgtgcgaagtgcaatactaagattatgggggaggtcatgcatgcgctgcgccagacctggcacaccacgtgttttgtgtgtgcggcgtgcaagaaacccttcggcaattctctgtttcacatggaggacggagagccatactgcgagaaagactacattaacctattcagtacaaaatgccatgggtgtgactttcctgtggaggcaggagataagtttatcgaagcattgggtcacacatggcatgacacgtgcttcatctgtgctgtgtgtcatgtgaatctggagggacagccgttttacagcaagaaagatagaccgctgtgcaagaagcacgctcataccatcaatttgtag

SEQ ID NO: 193316 - DNA, 1197 bp, synthetic construct
  misc_feature 1..1197: note = Description of Artificial Sequence: Synthetic coding sequence
  source 1..1197: mol_type = other DNA
atgagctacagcgtgaccctgaccggccccggcccctggggcttcagactccaaggcggcaaagatttcaatatgcctctgacgatcagccggattacaccaggatctaaggctgctcaatcccagctgagccagggcgatcttgtggtggccatcgacggcgttaatacagacacaatgacacatctggaagcgcaaaacaaaatcaagtccgcaagctataaccttagtctgaccctgcaaaagtccaagcgaccaattccaatcagtaccactgccccccccgtacagacgcccttacctgttatcccgcaccaaaaggacccagctctggacactaatggctctttggtggctccaagcccgagcccggaggcaagagcatcgcccggcacacccggtacgccagaactgcgcccgacatttagccctgccttctctcggccttcagcattttcatccctcgcggaggcaagtgaccccggcccgcctagggcttccctgcgcgccaagacgtcacccgagggcgccagggaccttctcggacccaaagcgctacctggcagctcacagccccgccagtacaacaatcctatcgggctgtactcagccgagactcttcgggagatggcccagatgtaccagatgtcacttcgggggaaagccagtggcgtgggccttcctggcggagccgattatcaggaaagatttaacccaagtgccttaaaggattccgccctgtcaactcacaaacctatcgaagttaaaggtctcggtgggaaagctaccattattcacgcacaatacaatacaccaatcagtatgtatagccaggacgctatcatggacgccatcgcagggcaggcacaggctcaagggagcgatttctccgggagcctaccaataaaagatctagcggtggatagcgcctctccggtgtatcaggcagtcatcaagtcccagaataaaccagaagatgaggctgacgagtgggcgcggcgctccagcaatctccaatcccggagttttagaatcctggcccaaatgaccggtaccgagttcatgcaagaccccgacgaggaggccttgcgcaggtccagggagaggttcgaaaccgaacgcaacagcccaagattcgcaaaactaaggaactggcaccacggcttgtccgctcaaatcctgaatgtaaaatcctag

SEQ ID NO: 193317 - DNA, 852 bp, synthetic construct
  misc_feature 1..852: note = Description of Artificial Sequence: Synthetic coding sequence
  source 1..852: mol_type = other DNA
atgagctacagcgtgaccctgaccggccccggcccctggggcttccggctgcagggtggcaaggactttaacatgccactaactataagccggataacaccaggctccaaggccgctcaatctcaactgtctcagggcgacctggttgtggcgattgacggtgtgaacaccgatactatgactcacctcgaggcccagaataagatcaaatctgcgtcttacaatctctcccttactttgcagaagtcaaagagacctattcctatctccacgacagctccacccgtacagacaccactgccagtgattccacaccaaaaagtagtggtgaattcgccagctaatgctgattaccaggagcgtttcaatccctccgctctgaaagacagcgctctgagcacgcacaagcccatcgaagtgaaaggattgggcgggaaggccactattattcatgcccagtataacaccccgatcagtatgtacagtcaggatgccatcatggatgccatcgccggccaggctcaagcccagggctccgattttagcggctctctccctatcaaggaccttgccgtggattctgccagccccgtatatcaggctgtcattaaaagtcagaataagcccgaggatgaggccgatgagtgggcccgcaggagctcaaacctccagtctcgttcattccgcatcctggcccaaatgacggggaccgaattcatgcaggacccggatgaggaggcactacggcgcagcagagagcggttcgaaaccgaacggaacagtcccaggtttgccaagcttaggaactggcaccacggcctgtccgcacagattctcaatgtgaagtcttag

SEQ ID NO: 193318 - DNA, 2199 bp, synthetic construct
  misc_feature 1..2199: note = Description of Artificial Sequence: Synthetic coding sequence
  source 1..2199: mol_type = other DNA
atgagctacagcgtgaccctgaccggccccggcccctggggcttccgactacaagggggcaaggacttcaacatgcccttgacaataagcagaatcactccaggtagcaaggccgcccagagccaactttcccaaggcgatctggttgtggctatcgacggagtgaacacagatacaatgactcatctcgaggcacagaataagattaaaagcgcatcttataatctgagtctgacactgcaaaagtccaaaaggcctattccaattagtacaacagcacctcccgtccagacccctctcccggtgatcccacaccaaaaagaccctgctctggacaccaatgggtcactcgtagccccctcgccctcccctgaagccagggccagcccaggaacgcctggaactcccgaactgcggcctaccttcagtcctgccttttcccggccctctgccttttctagtctggccgaggcttccgatccgggtccgccaagagcaagcctgcgtgccaagacgtcccctgaaggcgcccgcgacctgctgggcccgaaggctctccctggatccagccagccccgccaatataacaacccaataggactgtattcagccgaaacactgcgagaaatggcccaaatgtaccaaatgtccctaaggggcaaggcaagtggcgtcggtcttcctgggggagcagactaccaagaacggtttaatccctctgccttgaaggatagtgccttgtccacacacaagccaatagaagttaaagggctgggcggcaaagccacaataattcacgcccagtataatacaccaatatccatgtattcccaggacgcaatcatggatgccattgctgggcaggcgcaggctcaaggaagtgacttttctggctccctgccaattaaagacctggctgtagacagcgctagtcctgtttaccaagccgtgatcaagtcacaaaacaaacctgaggatgaagctgatgagtgggccaggaggtcgtctaacctgcaatctaggtcgtttcgaatcctcgcccagatgactggcaccgaattcatgcaggaccctgatgaggaagctctcaggcgcagccggccgcaagcttcttcatacagtcccgctgtagccgcctccagcgcccctgccacccacaccagctactcagaaggccccgctgctcccgcccctaaaccaagagttgtgacaacagcctccattcggccgagtgtgtaccagcctgtgcctgcttccacttatagtccttcccctggtgcgaactattcccctactccgtatacaccatcgcccgcacccgcatataccccatccccggcccctgcctatactcctagtcctgtgccaacttacaccccttccccagctcccgcgtataccccctcgccggcccccaattataatcccgccccaagtgtcgcatattcagggggcccagctgagcccgcatccaggccaccttgggtgaccgatgacagcttctcccagaaattcgctcccggtaaaagcactactagcataagcaagcagaccctgcctcgcggcggacccgcttacactcccgctggccctcaggtcccccccctggcacgtggcacagtgcagcgagccgagcgtttcccagcctctagccgcactccactatgtggccattgcaacaacgtgatcagaggtccatttctcgtcgctatggggaggtcatggcacccagaggaattcacgtgtgcttattgtaagacctctcttgccgacgtgtgctttgtggaggagcagaataatgtgtactgtgagcgttgttatgagcagttctttgccccactgtgcgccaagtgtaatactaaaattatgggagaagtgatgcacgcattgcgccagacttggcacaccacatgctttgtgtgtgcagcctgtaaaaagccattcggaaattcactcttccacatggaagacggcgaaccatattgcgagaaggattatatcaatctgttctcaacgaagtgccacggctgtgactttcctgtggaagctggcgacaaatttatcgaggcattagggcatacatggcacgatacctgcttcatctgcgcggtgtgccacgtgaacctggaggggcagccattttattctaaaaaagatcggccgctgtgtaaaaagcatgcccacaccattaacctctag

SEQ ID NO: 193319 - DNA, 1854 bp, synthetic construct
  misc_feature 1..1854: note = Description of Artificial Sequence: Synthetic coding sequence
  source 1..1854: mol_type = other DNA
atgagctacagcgtgaccctgaccggccccggcccctggggcttcaggctgcagggcgggaaggacttcaatatgcctctcacgattagcagaatcacacccggaagtaaagctgcacagtcgcaattgagtcaaggggacctggttgtcgctattgacggcgtgaataccgacacaatgacccaccttgaagcacagaataagattaaatccgcttcttacaacttatctctgacattacagaagtccaaacgcccgatccccatcagtacgactgctcctccagtgcagactcccctccccgtgattccgcaccagaaagtggtcgtaaactctccagcgaacgccgactatcaggagcgcttcaacccaagcgcactgaaggactctgccttgagtacgcacaaacccattgaagtgaagggacttgggggaaaagcgactatcatccacgcccagtacaacactccgatatctatgtacagccaggacgcaatcatggatgctatagcaggtcaggcccaagctcaggggtctgacttttcaggaagcctgcccataaaagatctcgcagtggacagcgcgtctcccgtgtaccaggccgtgatcaagtcgcagaataaacccgaagacgaggcggacgaatgggcccggaggagctccaacctgcagagtagaagcttcaggatcttagcccagatgaccggcacagaatttatgcaggacccagatgaggaagccttgcgaaggtcccgcccacaagccagctcttacagccccgccgtagcggccagtagtgcaccagccacccacacttcctactccgaggggcctgccgctcctgctccaaaaccccgcgttgtgaccaccgccagcattagacccagcgtgtaccagcccgtgcctgcctccacttactcgccgtcacctggcgcaaattactctcctaccccatacaccccaagtcctgccccagcttacactccatcccctgcccctgcatacactcctagccccgtgccgacctacacccccagccccgcccccgcttacacaccttccccagcacccaactacaatcccgcaccgtcggtagcctacagcggcggtccagccgaacctgcaagtaggccaccatgggtaacggatgactctttttcccagaagtttgctcctggcaaatcaaccaccagcatcagcaaacagacactaccccggggcggtcccgcttacacgccagcaggcccacaggtgccacccctggcccgagggactgtgcagagagccgagaggtttccggcctcatcccggacccctctctgtggccactgcaataacgtcatccgaggccccttcctggtggcaatgggccgaagctggcatcccgaggagttcacatgtgcgtactgcaaaactagcctggccgatgtgtgcttcgttgaagaacaaaataacgtctactgtgaaaggtgctacgaacagttttttgccccactctgcgccaaatgcaacacaaagataatgggggaggtaatgcatgcactgcgacagacctggcatactacctgcttcgtctgcgccgcctgtaaaaagccattcgggaatagtctgtttcatatggaggatggcgaaccttactgtgagaaggactatatcaaccttttctccactaagtgccacggatgcgatttcccagttgaggcgggcgataagtttattgaagcgctaggtcacacctggcatgacacttgctttatctgcgccgtctgtcacgtgaacctggaagggcaacccttttactcgaagaaggacagacctctgtgtaagaaacacgcgcacaccattaacctatag

SEQ ID NO: 193320 - DNA, 1947 bp, synthetic construct
  misc_feature 1..1947: note = Description of Artificial Sequence: Synthetic coding sequence
  source 1..1947: mol_type = other DNA
atgagctacagcgtgaccctgaccggccccggcccctggggcttccggctgcaggggggcaaggactttaatatgcctttaaccatcagtcgcatcacacccggcagcaaagccgcccaaagccagctttctcagggcgaccttgttgttgcgattgacggtgttaacaccgatacgatgactcacctggaggcccagaacaaaattaagagtgccagctacaatctgtcccttactctccaaaaatccaaaaggcccatcccaatctctacaaccgcacccccagtgcagacacccttaccagtcatcccacatcagaaagaccctgcgctggatacaaatggcagcctcgtggcccctagcccttctcctgaagctcgggcgtcacctggtacacctggtacccccgaactgagacccaccttttcaccagccttctcacggccaagcgcattctcgtcactagctgaagcatcagaccctggcccccctcgagcatctcttagagcaaagacttcaccagaaggggcaagagatcttctgggacccaaggcactccctggttcctctcagcctcggcagtacaacaaccctattggcttgtactccgcagaaacgctgcgtgagatggctcagatgtatcagatgtctctgagagggaaggctagcggtgttgggcttcccggaggaagcctgcctatcaaagacttggcggtggactccgcctccccagtgtaccaagctgtgataaagtcacaaaacaaaccagaagatgaagcagacgagtgggcacgaagaagctccaatctgcagtcccggtcttttaggattttagcccagatgaccgggacagagttcatgcaggatcccgacgaagaagcccttcgtcggagccgccctcaagctagcagttactctccagccgtcgccgcctcctccgcccctgccactcacacttcttactccgaaggaccggccgctccagctccgaagccacgggtggtgaccacagctagcatcaggccttctgtctaccagcctgtccctgcgagtacctacagcccaagtccaggcgcgaattattccccaactccctacacacctagtcctgtgccaacatacacccctagcccagcccccgcgtataccccttcccctgccccaaattacaatcctgccccctccgtggcctactccggaggacctgctgagcctgccagcagacccccttgggtgacagacgacagttttagtcaaaaatttgctccagggaagtcaacgacgtcaattagcaagcaaactcttcccagaggcggacccgcctacactccagctgggcctcaggttccacccctcgctcgcggcaccgtgcaaagggcagagcggtttcctgcatcttcgagaacgccgctctgtggccactgcaataacgtgatccgcggaccatttctggtggcaatggggcgatcttggcacccggaagaattcacatgtgcgtattgcaaaacatccctcgccgatgtgtgcttcgttgaggaacagaacaacgtctattgcgaacggtgctacgaacagtttttcgctccactgtgtgctaagtgcaatacaaagatcatgggtgaggtgatgcatgccctgagacagacttggcacactacgtgtttcgtctgtgccgcctgcaaaaaacctttcgggaacagtctgttccatatggaggatggagaaccttactgcgagaaggactacatcaacctgttcagcaccaagtgccacggctgtgacttccccgtagaggcaggcgataagttcatcgaggcattgggtcacacctggcatgacacctgtttcatttgtgccgtctgccacgtcaatttggagggtcagcccttctatagtaaaaaggatagacctttgtgtaagaagcacgctcataccatcaacctgtag

SEQ ID NO: 193321 - DNA, 696 bp, synthetic construct
  misc_feature 1..696: note = Description of Artificial Sequence: Synthetic coding sequence
  source 1..696: mol_type = other DNA
atgagctacagcgtgaccctgaccggccccggcccctggggcttccgtttacagggcggcaaagactttaacatgcctctcacaatcagtcgcatcacccccggctcgaaagcggcgcagtcacagttaagccagggcgatctggtggtggctatagacggcgttaacacagacactatgacacacttagaggctcagaacaagatcaagagtgcgtcttacaacctgtcccttacactccagaagtccaaacggcctatccctatctccacaacagctccacctgtgcagaccccacttcctgtgatcccccaccagaaagaccctgcgcttgatactaacggctcccttgtcgccccgagcccaagtccagaggcgcgggcttcccccggcaccccagggacccccgagctcaggcctacatttagtcccgccttcagtcgaccctcagcttttagctctctggccgaagcttcagatcctggcccaccccgcgcgagtctccgcgctaaaaccagccccgaaggtgctcgcgacctcctcgggcctaaggcacttcctggatcgtctcagccacgacaatacaacaaccctattggtctctatagtgccgaaacactgagagagatggcccagatgtatcagatgagcctccgggggaaggcatccggcgtagggttgcctggtggatggtag

SEQ ID NO: 193322 - DNA, 1839 bp, synthetic construct
  misc_feature 1..1839: note = Description of Artificial Sequence: Synthetic coding sequence
  source 1..1839: mol_type = other DNA
atgagccaccccagctggctgccccccaagagcaccggcgagcccttgggtcatgttcccgcccgcatggagacaacacattccttcggcaacccttccatcagcgtcagcacccaacagccccccaaaaaattcgccccggtcgttgccccaaagccaaaatataatccgtataagcagcccgggggggagggcgacttcctccctccccctcctcctccactggacgactccagtgccttgccatctattagtggcaatttcccaccaccacctcccctcgacgaggaagcattcaaagtgcaaggtaaccctggtggcaaaactttggaggagagacggtcctcactggacgctgagatagactcgttaacctcaatactggccgatttggagtgctcgtctccttataagccgcgacctccacaatccagtacgggatccaccgcatctcctcccgtgtctactcctgttactggccacaagcggatggttatcccgaaccagcctcccctcaccgcaaccaagaagtctaccctgaagcctcagcctgccccacaagcaggcccaatccctgtcgcacctatagggacactgaagccacaaccccagccagtgccagccagttatacaaccgcctctacctcaagtcgcccaactttcaacgtacaggtaaagtcggcacaaccctcccctcactacatggccgctccctccagcgggcagatatacggctccggaccccagggttataatacacagcccgtccccgtatcaggccaatgcccccctccttcgacacgaggaggcatggattacgcatatatcccgcccccaggccttcaaccagagccaggatatggatatgcaccaaatcaggggcgttattacgagggatactacgctgctggacccgggtacggcggtcggaatgattccgatcctacgtatgggcaacagggccaccccaacacgtggaagcgtgaaccaggttatacccccccgggcgctgggaatcagaacccccccggcatgtaccctgtgacaggtccaaagaaaacctacattaccgaccccgtgtctgccccgtgtgccccaccactacagcctaaaggtggtcattccggccagttgggtccctccagcgtggcgccaagctttagaccagaagacgaactggaacacctcacgaagaaaatgctctatgacatggagaatccgccagccgacgaatactttggcaggtgtgctagatgtggtgagaacgtggtaggcgaagggacagggtgtaccgctatggaccaagtctttcacgtcgattgctttacttgtataatctgtaataataagctgcgcggtcagccgttttatgctgtggaaaaaaaggcttattgcgagccatgctacataaatacattagagcaatgtaacgtgtgctccaagccgattatggaacgcattctcagggccaccgggaaggcttaccaccctcactgcttcacctgcgttatgtgtcataggagcctagacggtattccatttaccgtagacgctgggggactgatccattgtatcgaagactttcacaaaaagttcgctcctcgatgttccgtgtgcaaggagcccatcatgccggccccagggcaggaagagacggtgagaatcgtggcactggaccgcgatttccacgtccactgctaccgttgtgaggattgcggcgggctcctttctgagggcgataatcagggttgctatcctttggacggtcatatactgtgtaaaacctgtaacagcgcgagaatccgagtcttgaccgccaaggcctcaacagatctgtag

SEQ ID NO: 193323 - DNA, 282 bp, synthetic construct
  misc_feature 1..282: note = Description of Artificial Sequence: Synthetic coding sequence
  source 1..282: mol_type = other DNA
atgagccaccccagctggctgccccccaagagcaccggcgagccccttgggcacgtccctgctcgtatggaaaccactcactcttttggcaatccgagtataagcgtcagcacacaacagccaccaaaaaagtttgctcccgtggttgcccctaagcctaagtataacccatacaaacaaccgggaggggaaggggatttcttacccccaccccccccaccgctggatgatagctcggccctgccaagtatctccggtaacttcccccccccaccaccttag

SEQ ID NO: 193324 - DNA, 456 bp, synthetic construct
  misc_feature 1..456: note = Description of Artificial Sequence: Synthetic coding sequence
  source 1..456: mol_type = other DNA
atgagccaccccagctggctgccccccaagagcaccggcgagccccttggacacgtgcccgccaggatggaaactactcacagctttggaaacccatcaatctctgtgtcaacacagcaaccccctaaaaaattcgcacccgttgtcgctcccaagcctaaatataatccgtacaagcagccgggcggagagggcgactttttaccccccccacccccccccctagacgattcctccgccctcccttccatttccgggaattttccccccccaccgcccctcgatgaggaggcattcaaggtacagggtaatcctgggggcaagacgttggaggagcggcggtcctctctggacgccgagattgactccctgaccagcattttggctgatctggagtgcagttctccatataaacctcggcccccgcaaagctccaccggatccactgcctcttag

SEQ ID NO: 193325 - DNA, 336 bp, synthetic construct
  misc_feature 1..336: note = Description of Artificial Sequence: Synthetic coding sequence
  source 1..336: mol_type = other DNA
atgagccaccccagctggctgccccccaagagcaccggcgagcccctcggacacgtgcccgcgcgaatggaaaccacgcacagtttcggcaacccctcgatttcggtgtctacacagcaaccacccaagaagttcgcacccgtggtagctccaaaacccaaatataatccctataaacagcccggcggagagggagacttcctgccaccaccaccccctccgttggatgatagctcagcacttccctctatcagcggcaactttcctccccctccccccttggatgaggaagcattcaaagtgcaaggaaaccctgggggaaagacactggagtag

SEQ ID NO: 193326 - DNA, 201 bp, synthetic construct
  misc_feature 1..201: note = Description of Artificial Sequence: Synthetic coding sequence
  source 1..201: mol_type = other DNA
atgagccaccccagctggctgccccccaagagcaccggcgagcccttgggccatgtccccgccaggatggagaccacacattcattcggaaatcccagcatcagcgtgtctacccaacagccgccgaaaaagtttgctcccgtcgttgcacccaaacccaaatataatccatataaacagcccgggggagagggcgactag

SEQ ID NO: 193327 - DNA, 162 bp, synthetic construct
  misc_feature 1..162: note = Description of Artificial Sequence: Synthetic coding sequence
  source 1..162: mol_type = other DNA
atgagccaccccagctggctgccccccaagagcaccggcgagccccttggtcatgtccctgctaggatggagacaacccatagctttggaaatcccagcattagcgtatcaacccagcaacccccaaaaaagttcgcgccagtggtagcccccaaaccttag

SEQ ID NO: 193328 - DNA, 144 bp, synthetic construct
  misc_feature 1..144: note = Description of Artificial Sequence: Synthetic coding sequence
  source 1..144: mol_type = other DNA
atgagccaccccagctggctgccccccaagagcaccggcgagcccttgggtcatgtacccgctagaatggaaaccactcacagtttcggcaatccctctatctccgtgagcacacagcagcctcccaaaaagttcgctccatag

SEQ ID NO: 193329 - DNA, 1287 bp, synthetic construct
  misc_feature 1..1287: note = Description of Artificial Sequence: Synthetic coding sequence
  source 1..1287: mol_type = other DNA
atgagccaccccagctggctgccccccaagagcaccggcgagcccctgggccacgtacctgcccggatggagaccacccatagttttggcaatccgtccatctctgtgagcacccaacaaccaccaaagaagtttgctccagtggtggcacccaagccaaaatacaacccctacaagcagccagggggggagggggacttcttgccgccgcctcccccacctctagacgactcaagtgcgttaccaagtatctccggaaatttccccccacccccccctctcgacgaagaggcttttaaagtccagggcaaccccggaggaaagaccctggaagagaggcgaagctctctggatgccgaaatagacagtctcacaagcatcttagctgatctagagtgtagcagtccatacaaacccaggccaccgcagtcaagcaccggaagtactgctagtccacctgttagtacccctgtgaccggccacaaacggatggttatacccaaccagccgcccctaacagccacaaagaaatctactctcaagccgcaacctgcccctcaagcaggaccaattcctgtggcacctatagggaccctaaaaccgcaacctcagcccgttcctgcttcctacacaactgctagcactagctctcgccccacctttaatgtgcaagtgaaatccgcccaaccgagtcctcactacatggctgcaccatcttctgggcagatatacggatctggtccacagggctataacacacagcccgtgcctgtgtcaggacaatgcccaccaccaagcacccgcggagggatggattatgcttacatcccacctccaggcttgcagccggagcccggatacggttacgccccaaatcagggtaggtactacgagggctattacgcagcagggccaggctacggcggacggaatgactccgaccctacttacgggcaacagggccatcctaatacctggaaaagagagcctggatacacccctccaggcgcaggcaaccagaacccaccagggatgtaccccgtgactgggccaaagaagacctatattaccgatcctgtgtccgccccttgcgctccccccttacagcccaaaggcggccactcaggtcaactggggccgtcatccgtagctccttccttccgtcccgaggatgagttagaacacctgactaaaaagatgttgtacgatatggaaaacccccccgcggacgaatacttcggagaatggggcctggagctgacaagtgaagtcactatactgctctag

SEQ ID NO: 193330 - DNA, 198 bp, synthetic construct
  misc_feature 1..198: note = Description of Artificial Sequence: Synthetic coding sequence
  source 1..198: mol_type = other DNA
atgagccaccccagctggctgccccccaagagcaccggcgagcccttgggtcacgtacctgctcggatggagaccacccatagctttgggaatccaagtatctcggtgtccactcagcagccgccgaagaaatttgcacctgtagtagctccaaaacctaagtataacccatacaagcagcccggaggcgaagggtag

SEQ ID NO: 193331 - DNA, 174 bp, synthetic construct
  misc_feature 1..174: note = Description of Artificial Sequence: Synthetic coding sequence
  source 1..174: mol_type = other DNA
atgagccaccccagctggctgccccccaagagcaccggcgagccccttgggcatgttccggcaaggatggagaccactcacagcttcgggaatccctctataagcgtcagtacacaacaaccacccaaaaaattcgcacctgtggttgctcctaaaccgaaatataacccttag

SEQ ID NO: 193332 - DNA, 1839 bp, synthetic construct
  misc_feature 1..1839: note = Description of Artificial Sequence: Synthetic coding sequence
  source 1..1839: mol_type = other DNA
atgagccaccccagctggctgccccccaagagcaccggcgagcccctggggcacgtcccggcaaggatggagactacacacagcttcgggaatccgtctatctctgtaagtacccagcagccgccgaaaaagttcgctcctgtggtcgcccctaagcccaagtataatccgtacaagcagcctggcggcgaaggggattttctcccccccccgcctccgcctttggatgactctagtgccttgccatctattagcggaaacttccccccccctcctccattagatgaggaggcatttaaagtacagggaaacccgggtggaaaaacactggaggaaaggcgctctagcctggatgctgagatcgattcgcttacatcaatcttggctgatctggagtgtagttcaccctacaaaccaagacctccccagagcagcactggcagcaccgcaagcccaccggttagtacccctgtcacgggccataagagaatggtcattccaaatcagcctccattaaccgcaactaagaaaagtacacttaagcctcagcccgcccctcaagctggtcccattcctgtagccccgattggcacactcaaaccccagccacaaccagttccagccagctataccaccgccagcacaagctccagacccacattcaacgtgcaggtaaagagtgcacagccctctcctcactacatggccgctcctagctcagggcagatatacggctccggaccccaggggtacaacacacagcctgtcccagtatccggccagtgccctcctcccagcacacgtggcggcatggattatgcttacataccccctcctggtctgcagccggaacctggttacggctacgcccccaatcagggccggtactacgagggatactatgcggcagggcccggatatggagggcgcaatgattccgaccccacatacgggcagcagggccacccgaacacttggaagagagagcctggctacactccacccggcgctggcaaccagaatccgccaggaatgtaccctgtcaccgggccaaagaagacatacatcactgacccggtgagcgccccatgcgcccctcccctacaacccaagggggggcactcgggccagctcggtccttcttccgttgcccctagcttccgccccgaggatgagctggaacacctgacaaagaagatgctatacgacatggaaaatcccccggcagatgagtacttcggtagatgcgcccggtgcggggagaacgtagtcggcgagggaaccggctgtaccgccatggatcaagtcttccacgttgactgtttcacttgcatcatctgcaacaacaagctgagagggcagccattttacgccgtggagaagaaagcgtactgtgagccgtgctacattaatactctggaacagtgtaacgtgtgctctaagccaattatggagagaatcctgcgagccaccggcaaagcttaccacccacattgtttcacttgcgtcatgtgtcaccggtcactggatggcatccccttcacggttgatgcaggcggcctgatccattgcatcgaagattttcacaaaaagttcgccccccgctgtagcgtgtgcaaagagccaattatgcctgccccgggccaagaggaaacggtccgtatcgttgcacttgaccgtgatttccatgtccattgttataggtgtgaggattgcggaggcctgctctccgagggggataaccagggttgctatccactcgacggtcatattctgtgtaagacctgcaacagcgccagaatccgggtgcttacagccaaggcttcaacagatctgtag

SEQ ID NO: 193333 - DNA, 471 bp, synthetic construct
  misc_feature 1..471: note = Description of Artificial Sequence: Synthetic coding sequence
  source 1..471: mol_type = other DNA
atgcagaagaaggagaagagcttcggcatccagatgctgagcgtgcagccagacacgaaacctaagggctgcgccgggtgcaataggaaaattaaggatcggtatctcctgaaagcgctggataagtactggcatgaggactgcctcaagtgtgcctgctgcgattgtagactcggtgaggtgggtagcaccctgtacacaaaagctaacctcatcttatgcaggagagattacctccgtctcttcggagtgacaggtaactgcgctgcctgttctaagcttataccagccttcgaaatggtaatgagagctaaggacaacgtgtaccacctggattgcttcgcttgccaactttgcaaccaaaggttttgtgttggcgataagtttttcctcaagaacaacatgattctgtgccaaacagactacgaggaaggactcatgaaagaggggtatgccccacaagtgagatag

SEQ ID NO: 193334 - DNA, 438 bp, synthetic construct
  misc_feature 1..438: note = Description of Artificial Sequence: Synthetic coding sequence
  source 1..438: mol_type = other DNA
atgctgagcgtgcagcccgacaccaagcccaagggctgcgccggctgcaaccgcaagataaaggacagatacctattaaaggccctcgacaaatactggcacgaggattgtttaaagtgcgcctgttgtgattgccgcctgggtgaagtgggcagcaccttgtatacaaaagctaacctgatcttgtgtagacgggattacctgcggctatttggagtcaccggtaactgcgctgcttgtagcaagctcattccggcctttgaaatggttatgagagccaaggacaatgtataccatctcgactgtttcgcatgtcaactgtgtaaccagaggttttgcgtgggcgacaagtttttcctgaaaaataacatgatcctgtgccagaccgactacgaggagggtctgatgaaggagggttatgccccacaggttagatag

SEQ ID NO: 193335 - DNA, 438 bp, synthetic construct
  misc_feature 1..438: note = Description of Artificial Sequence: Synthetic coding sequence
  source 1..438: mol_type = other DNA
atgctgagcgtgcagcccgacaccaagcccaagggctgcgccggctgtaaccgcaagattaaagatcggtatctgctgaaggctcttgataagtattggcacgaagactgtctgaagtgcgcgtgctgcgactgcagattgggtgaggtggggtccacgctgtacaccaaggctaacctaatattatgtcggcgtgattacttgcggctgttcggggtgacaggtaattgtgctgcctgttctaagttaatccccgcgttcgagatggtaatgagggctaaggataacgtgtaccatctggattgcttcgcttgccaattgtgcaatcaacgcttttgcgtcggagacaaattcttcctgaaaaataacatgattctgtgccagacagattatgaagagggcctgatgaaggagggatacgcacctcaggtgaggtag

SEQ ID NO: 193336 - DNA, 438 bp, synthetic construct
  misc_feature 1..438: note = Description of Artificial Sequence: Synthetic coding sequence
  source 1..438: mol_type = other DNA
atgctgagcgtgcagcccgacaccaagcccaagggctgcgccggctgcaaccgtaaaatcaaggatcgctatctcttgaaggccctggataaatactggcatgaggactgccttaagtgtgcatgctgtgactgccgactaggtgaagtgggctctacactgtatactaaggccaacctaatcctgtgtcgcagggattatctgcggctctttggcgtgacagggaattgcgccgcctgctctaagttgatccctgcatttgagatggtaatgagggccaaagacaacgtataccacctggattgtttcgcctgccagctgtgtaatcagcgcttctgtgtaggtgacaaattcttcctcaagaataacatgatactttgccagaccgattatgaagaaggtctcatgaaggaggggtatgctcctcaggtgcggtag

SEQ ID NO: 193337 - DNA, 438 bp, synthetic construct
  misc_feature 1..438: note = Description of Artificial Sequence: Synthetic coding sequence
  source 1..438: mol_type = other DNA
atgctgagcgtgcagcccgacaccaagcccaagggctgcgccggctgcaaccgcaagataaaagaccgctacctgcttaaggccctcgataagtactggcacgaagactgcctcaagtgcgcttgctgcgattgtaggcttggagaggtcggctctaccctgtataccaaggccaaccttatcctttgtcgccgcgactatcttaggttattcggcgtcaccgggaattgcgcagcctgctcaaaacttatccccgcttttgagatggtgatgagagccaaggataatgtgtatcaccttgactgcttcgcctgccagttgtgtaaccagcggttttgcgtgggggataaatttttcctcaagaacaatatgatcctgtgccagactgactacgaggagggccttatgaaagagggctacgcaccccaagtgcgttag

SEQ ID NO: 193338 - DNA, 438 bp, synthetic construct
  misc_feature 1..438: note = Description of Artificial Sequence: Synthetic coding sequence
  source 1..438: mol_type = other DNA
atgctgagcgtgcagcccgacaccaagcccaagggctgcgccggctgtaacaggaagattaaagatcggtatttactaaaagcattagataaatactggcatgaagattgtttgaagtgcgcctgctgtgattgtcgactaggcgaagtgggatcaacgttgtataccaaagcgaatctcatcctctgtaggcgcgattacttgcggctattcggagtaactgggaactgcgccgcatgcagtaaactgattccagcttttgaaatggtgatgcgggccaaggacaatgtataccacctggactgttttgcgtgtcaactctgtaaccagagattctgcgttggggataagtttttcctgaaaaataatatgatactctgccagaccgattatgaggaggggctcatgaaggagggttatgccccccaggtgcgctag

SEQ ID NO: 193339 - DNA, 438 bp, synthetic construct
  misc_feature 1..438: note = Description of Artificial Sequence: Synthetic coding sequence
  source 1..438: mol_type = other DNA
atgctgagcgtgcagcccgacaccaagcccaagggctgcgccggctgcaaccgcaagattaaggatcggtatctcctgaaagccctcgataagtattggcacgaagactgtttaaaatgtgcatgttgcgattgccggttgggggaggttggtagcaccctttataccaaggccaacttaattctctgccgcagggactacttaagactctttggggtaactggcaattgcgcagcctgtagtaagttgattccggcttttgaaatggtgatgagggccaaggataacgtttaccaccttgactgttttgcatgccagttgtgcaaccaacggttttgcgtgggtgacaagttcttcctcaagaataacatgatattgtgtcaaaccgactacgaggagggtcttatgaaggagggctacgcaccccaggtgcggtag

SEQ ID NO: 193340 - DNA, 438 bp, synthetic construct
  misc_feature 1..438: note = Description of Artificial Sequence: Synthetic coding sequence
  source 1..438: mol_type = other DNA
atgctgagcgtgcagcccgacaccaagcccaagggctgcgccggctgcaataggaagataaaagacaggtacttgctgaaggctctggataagtactggcacgaggactgtctgaaatgtgcctgttgtgattgtagactcggcgaggtaggcagtaccttgtacacaaaggccaacctgatcctctgccggagggattacctccgcttgtttggagtcacggggaattgtgccgcttgtagcaagctgataccggcatttgagatggtaatgagagctaaggacaacgtgtatcacctggattgcttcgcctgtcagctgtgtaatcagagattctgcgtcggcgacaagttctttcttaagaacaatatgatcctgtgccagacagattatgaggaaggtctcatgaaagagggttatgcaccgcaggtgagatag

SEQ ID NO: 193341 - DNA, 357 bp, synthetic construct
  misc_feature 1..357: note = Description of Artificial Sequence: Synthetic coding sequence
  source 1..357: mol_type = other DNA
atgctgagcgtgcagcccgacaccaagcccaagggctgcgccggctgtaatcgcaaaatcaaggacagatatctcctgaaggccctggataaatattggcacgaggattgtctcaaatgcgcttgctgcgattgtagattgggagaagtcggctccaccctgtatacgaaagctaatctgatcctatgtcgcagagattaccttcgcctattcggggtcaccggtaattgtgccgcttgctccaaactaattcccgcgtttgaaatggtgatgcgggccaaggacaacgtgtatcacttggactgtttcgcatgccagttgtgcaatcagcgcttttgtgtcggggataaattttag

SEQ ID NO: 193342 - DNA, 177 bp, synthetic construct
  misc_feature 1..177: note = Description of Artificial Sequence: Synthetic coding sequence
  source 1..177: mol_type = other DNA
atgctgagcgtgcagcccgacaccaagcccaagggctgcgccggctgtaatcgtaaaatcaaagatagatacttgctcaaagctctggataagtactggcacgaggactgccttaagtgcgcctgttgcgactgcagattaggggaggtcgggagcactctgtacactaaagcgtag

SEQ ID NO: 193343 - DNA, 294 bp, synthetic construct
  misc_feature 1..294: note = Description of Artificial Sequence: Synthetic coding sequence
  source 1..294: mol_type = other DNA
atgctgagcgtgcagcccgacaccaagcccaagggctgcgccggctgcaacaggaagatcaaggacagatatctgctgaaggccttagacaagtactggcacgaagattgtctgaagtgtgcctgctgcgactgtcgcttgggggaggttggcagcacattgtacaccaaggcaaaccttatcctttgtcgccgtgattacttgagactctttggggtgaccgggaactgtgccgcttgcagcaagctgataccagccttcgaaatggtgatgcgagctaaagacaatgtctag

SEQ ID NO: 193344 - DNA, 357 bp, synthetic construct
  misc_feature 1..357: note = Description of Artificial Sequence: Synthetic coding sequence
  source 1..357: mol_type = other DNA
atgctgagcgtgcagcccgacaccaagcccaagggctgcgccggctgcaaccgcaagattaaagacagatacctactgaaggccctggacaaatactggcacgaagattgcttgaagtgtgcttgttgcgactgccggctaggcgaagtggggagtacactctacaccaaagccaacctgatcctgtgcaggcgagactatctacgcttgttcggtgttaccggtaattgtgcggcctgttcaaagttaatccctgccttcgagatggtcatgagggctaaggataacgtataccacctagactgcttcgcctgtcagttgtgcaatcaaagattttgcgttggcgacaagttttag

SEQ ID NO: 193345 - DNA, 255 bp, synthetic construct
  misc_feature 1..255: note = Description of Artificial Sequence: Synthetic coding sequence
  source 1..255: mol_type = other DNA
atgctgagcgtgcagcccgacaccaagcccaagggctgcgccggctgtaaccgaaagattaaagacaggtatctattaaaggcattagataagtattggcacgaggactgcttaaaatgtgcttgctgtgactgcagactgggtgaagtcggctccacactctataccaaggccaacctgattttgtgccgccgcgactacttacgactattcggcgtaacagggaattgcgcggcctgttctaaactgatttag

SEQ ID NO: 193346 - DNA, 438 bp, synthetic construct
  misc_feature 1..438: note = Description of Artificial Sequence: Synthetic coding sequence
  source 1..438: mol_type = other DNA
atgctgagcgtgcagcccgacaccaagcccaagggctgcgccggctgtaatagaaaaattaaagatcgctatctgctaaaggcacttgacaagtactggcatgaagactgcctaaagtgtgcctgttgcgactgccggctcggcgaagttgggtctaccctgtataccaaagctaatctcatcttatgtagaagagactacctccggttattcggggtgaccgggaactgtgccgcctgctccaaactaattccggctttcgagatggtgatgcgtgcgaaagacaatgtctaccatctagactgtttcgcatgtcagctgtgcaatcagcgtttttgcgtgggagacaagttcttcctgaaaaataacatgatcctctgccaaactgactacgaggagggactgatgaaggagggttatgccccacaggtccgctag

SEQ ID NO: 193347 - DNA, 492 bp, synthetic construct
  misc_feature 1..492: note = Description of Artificial Sequence: Synthetic coding sequence
  source 1..492: mol_type = other DNA
atgctgatggagggcggccgggccgccgccgcccggaacgtgagcagtatccagatgctgtcagtgcagcccgatacaaaacccaagggatgtgctggttgcaatcggaaaataaaggaccgctacttacttaaggccttggataaatactggcatgaggactgtctgaagtgtgcctgttgtgactgcagattgggcgaggtaggctccaccctgtacactaaggcaaatcttattctctgcagaagagactatcttaggctattcggcgtgaccgggaattgtgctgcatgctcaaagctcatcccagcattcgaaatggtgatgagagccaaggacaacgtctatcacctggactgtttcgcttgtcagctgtgcaatcagaggttctgcgtgggggacaaatttttcctgaagaataacatgatcttatgtcagactgactatgaagaaggcttgatgaaggagggttatgctccacaggtcagatag

SEQ ID NO: 193348 - DNA, 438 bp, synthetic construct
  misc_feature 1..438: note = Description of Artificial Sequence: Synthetic coding sequence
  source 1..438: mol_type = other DNA
atgctgagcgtgcagcccgacaccaagcccaagggctgcgccggctgtaacagaaaaattaaggaccggtatctcctgaaggccctggacaagtattggcacgaggactgtctaaagtgtgcttgctgtgactgccgacttggggaagtcggaagcacactgtacaccaaggccaacctcattctttgtaggcgggattacctgcgcctgttcggcgtaaccggaaattgcgctgcttgttccaaattaattccagcttttgaaatggtgatgagagcaaaagacaatgtgtaccacttagactgcttcgcgtgtcagttatgtaaccaaaggttctgtgttggggacaaatttttcctcaaaaataacatgattttgtgtcagactgactatgaggaaggccttatgaaagagggctatgctccccaggtgcgttag

SEQ ID NO: 193349 - DNA, 378 bp, synthetic construct
  misc_feature 1..378: note = Description of Artificial Sequence: Synthetic coding sequence
  source 1..378: mol_type = other DNA
atgctgagcgtgcagcccgacaccaagcccaagggctgcgccggctgtaaccggaagattaaagaccggtacctgcttaaggcactggacaaatattggcacgaggattgtttaaagtgcgcttgttgtgattgccgctgggagcgcttgtttggcgtgacgggaaactgtgcagcgtgttccaagcttattcctgccttcgaaatggtgatgagagctaaagacaacgtgtaccacctcgattgttttgcttgccagctctgtaatcagcggttctgcgttggggacaagttctttctgaaaaataacatgattctgtgccagacagactacgaagaaggactgatgaaggaaggatatgcaccacaggtgcgatag

SEQ ID NO: 193350 - DNA, 267 bp, synthetic construct
  misc_feature 1..267: note = Description of Artificial Sequence: Synthetic coding sequence
  source 1..267: mol_type = other DNA
atgctgagcgtgcagcccgacaccaagcccaagggctgcgccggctgcaacagaaagatcaaggatagatacctgctgaaagcacttgacaagtattggcacgaggactgcctcaagtgtgcgtgctgtgattgtcgtttgggcgaggttgggtcaaccctgtacactaaagctaatctgattctgtgtaggagagactacctccgtctgttcggagtgactgggaattgcgctgcttgttctaagttaatcccggcgttcgaatag

SEQ ID NO: 193351 - DNA, 333 bp, synthetic construct
  misc_feature 1..333: note = Description of Artificial Sequence: Synthetic coding sequence
  source 1..333: mol_type = other DNA
atgctgagcgtgcagcccgacaccaagcccaagggctgcgccggctgtaaccgaaagataaaagatcgctatctgctaaaggccctggacaaatattggcacgaagattgcctgaagtgtgcttgctgtgactgtcggcttggagaggtgggttctactctatatacaaaagcaaacctcatcctgtgcagaagggactatctccgcttgttcggcgtgacaggcaattgcgccgcttgttcaaaacttattcccgcgttcgaaatggtgatgcgagccaaagataatgtctaccacttggattgttttgcatgccagctatgtaatcagtag

SEQ ID NO: 193352 - DNA, 357 bp, synthetic construct
  misc_feature 1..357: note = Description of Artificial Sequence: Synthetic coding sequence
  source 1..357: mol_type = other DNA
atgctgagcgtgcagcccgacaccaagcccaagggctgcgccggctgtaatcgaaaaatcaaagaccgatatctcctgaaagcattggataagtattggcacgaagattgcctgaagtgcgcctgttgcgactgccggctgggggaggttgggagcacattgtatactaaagccaatctgatcctgtgccggcgagactatctccggctgttcggggttactggcaattgcgctgcttgttctaagctcatccccgcgtttgagatggtgatgcgtgctaaggacaacgtataccacctggactgttttgcctgccagctttgtaatcagcgtttctgcgtcggtgacaagttctag

SEQ ID NO: 193353 - DNA, 498 bp, synthetic construct
  misc_feature 1..498: note = Description of Artificial Sequence: Synthetic coding sequence
  source 1..498: mol_type = other DNA
atggtgaaccccggcagcagcagccagcccccccccgtgaccgccgggagtctttcttggaagagatgcgctggctgcggaggcaagatagccgaccggttccttctatatgccatggattcatattggcactcgaggtgtctgaagtgctcttgctgccaggcacagctcggcgatattgggacctcttgttacactaagtccggcatgattctgtgtaggaacgactacatccgcctgtttggaaactctggggcttgtagcgcctgtggacagtctatccccgcctctgaactcgtgatgcgagcccaggggaacgtgtatcacctgaagtgctttacatgctcaacctgcaggaacagactggttcctggcgaccggttccactatatcaatggtagccttttctgcgaacatgatagacccaccgctctaatcaacggacacctgaactctctccagtcgaacccacttctaccagaccagaaagtctgctag

SEQ ID NO: 193354 - DNA, 498 bp, synthetic construct
  misc_feature 1..498: note = Description of Artificial Sequence: Synthetic coding sequence
  source 1..498: mol_type = other DNA
atggtgaaccccggcagcagcagccagcccccccccgtgaccgccggctccctgtcctggaagagatgtgcagggtgcggcggcaagatcgccgaccgattcctcctatatgccatggactcctattggcattctcgctgtcttaagtgctcttgctgccaggcccagctgggggacatcggtacgtcctgctacacaaagagtggtatgatcctgtgcagaaacgattatatccgactatttggcaattccggcgcatgctccgcttgcggccagtcaatccccgcctccgaactcgtgatgcgagctcagggtaatgtctaccacctgaagtgttttacttgtagcacttgccgaaatagactggtaccaggagataggtttcattacattaacggaagcttattctgcgaacacgaccgacccaccgcccttattaacggacacctgaacagcttgcagtccaacccactgctacccgatcagaaggtatgctag

SEQ ID NO: 193355 - DNA, 2031 bp, synthetic construct
  misc_feature 1..2031: note = Description of Artificial Sequence: Synthetic coding sequence
  source 1..2031: mol_type = other DNA
atggacaagtacgacgacctgggcctggaggccagcaagttcatcgaagatctgaatatgtatgaggccagcaaggatggcttgttccgggtagataagggagccgggaacaaccccgaatttgaggagaccaggcgggtctttgcaaccaaaatggctaaaatacacctgcaacagcagcagcaacagctgctccaggaggagacactaccccgcgggagccgcggcccggtcaacggcggtggaagattgggacctcaggcccgatgggaggttgtgggaagcaagctaacagtggacggagccgctaaacctccactcgctgcaagtactggcgcccctggtgccgtgaccacactggctgccggccagcccccatacccaccccaagaacagaggtcccgaccctatttgcacgggacaaggcacggcagtcaggattgcggttcccgggagtctctcgccacatccgaaatgtctgccttccaccagcctgggccctgtgaggacccctcatgcctgacacacggggattattatgataacctcagcctagcatccccaaagtggggagataagcccggagtcagccccagcatcggcctgtccgtagggagtggctggccatcctctcctggttccgatccccccctgccaaagccatgtggagatcaccctctgaaccacaggcagctgtccttgagctcctcccgcagcagtgagggatctctgggaggacagaactccggaatcggagggcgtagttcggagaagcctaccggcctatggtccacagctagctcgcagagagtctcaccaggactgcctagccccaatctggagaatggggccccagctgtgggccccgtgcagccccgtactcccagtgtctccgcgccattggctctgtcatgtccgcgacaaggaggattgccacgctcaaacagtggtcttggtggagaggtatcgggggtgatgtccaagccgaatgtagaccctcaaccgtggttccaggacggccctaagtcctacctcagttcaagcgcccctagcagcagtcccgcgggcctggatggctcccagcagggagctgtacctggcctgggccccaagccaggatgcaccgatctaggcacaggacccaagcttagccctacttccctggttcacccagtcatgagtacactgcctgagctgagctgcaaggagggaccactgggctggtcctccgacggtagcttaggctccgttcttcttgattccccttcctcgcctcgcgtccggttgccatgtcaacccctggtgccaggtccggagctacgacctagcgcagccgaactgaagctggaggcactgacccaacgactcgagcgtgaaatggatgctcatcctaaggcagattactttggagcatgcgtaaaatgctctaaaggtgttttcggagcaggccaggcatgtcaggccatggggaatctataccatgatacctgctttacctgtgctgcctgtagtcgaaaactcagaggaaaggctttctacttcgtcaacggcaaggtgttctgcgaagaagacttcttgtacagtggatttcagcagtccgcagatagatgcttcttgtgtgggcacctcattatggacatgattctacaggcccttggcaagagttaccatccagggtgctttcgctgcgtaatttgcaatgagtgtttagatggggtgccctttacggtggactctgaaaacaagatctactgtgtccgcgactatcacaaggtgctggcgcccaaatgcgccgcctgcgggctcccaatccttcctccagagggatccgatgaaactattcgagttgttagtatggacagggactatcatgtggagtgctatcattgtgaagattgtggcctggagctaaatgatgaagatggacatagatgttacccccttgaggaccacttgttttgccactcctgccatgtaaaacgacttgagaagcggccctcatcaaccgcgctccaccagcatcacttttag

SEQ ID NO: 193356 - DNA, 1221 bp, synthetic construct
  misc_feature 1..1221: note = Description of Artificial Sequence: Synthetic coding sequence
  source 1..1221: mol_type = other DNA
atggtgcactgcgccggctgcaagcggcccatcctggaccggttcctgctgaacgtcctggacagggcttggcacgtcaagtgtgtgcagtgctgtgaatgcaaatgtaacttgacagagaagtgcttctcacgggagggcaagctgtactgtaagaacgacttcttcagatgcttcggcaccaaatgcgcgggctgtgctcagggcataagcccatctgatctcgtcaggcgcgcgcgaagtaaagtgttccacctgaactgcttcacgtgcatgatgtgcaacaagcagctgagcactggggaagagctgtacatcatagatgaaaataaatttgtctgcaaggaggactatctgtccaattcctccgtggccaaggaaaatagtctgcattcagccacaacaggtagcgatcccagcctgagtcccgattctcaggatccttctcaggacgatgctaaggatagcgagagtgctaacgtctctgacaaggaagcaggttccaatgagaatgatgaccagaatctcggagccaaaagacgtgggccccgcactacaatcaaagcaaaacaactggaaacattgaaagctgccttcgctgccacccccaaacccacaaggcacataagggaacagctggcccaggagacagggttgaacatgagggttattcaggtgtggttccagaaccggcgatccaaggagcggaggatgaagcagctgtctgcattaggcgcgcggagacacgccttcttccggtctcccaggcgaatgcggcctctcgtggatcggcttgagccaggcgaacttatacctaatggccccttttccttctatggggattaccaaagcgagtactacgggccgggcggaaactatgatttttttccccagggtcccccctcctctcaagcccagaccccagtcgatctcccatttgtaccctcctctggaccttccggtactcctctgggtggtctggaacatcctcttccagggcatcacccatcttctgaagcacaaaggttcactgacatcttggctcacccccctggggactctcctagccctgaaccttccttacctggacccctgcattcaatgagcgctgaggttttcggaccctcccccccctttagctcactgtctgttaatgggggtgcttcatacgggaaccatctctctcatccaccagagatgaacgaggctgctgtctggtag

SEQ ID NO: 193357 - DNA, 1221 bp, synthetic construct
  misc_feature 1..1221: note = Description of Artificial Sequence: Synthetic coding sequence
  source 1..1221: mol_type = other DNA
atgctgttccacagcctgagcggccccgaggtgcacggcgtgatcgacgagatggatcggagggccaagtcagaggcacccgctatttcttcggccatagatcggggagataccgaaacaactatgccgtctattagctctgatcgcgctgctctttgcgcagggtgtggcggtaagatttcagacagatattatcttctggcggttgacaaacagtggcacatgaggtgcttgaagtgttgcgagtgcaagctcaatctcgagtccgaactaacctgcttttccaaggacggaagcatctactgcaaagaggactactaccggcggttctccgtgcagcggtgtgcccgctgtcatctgggtatctcagcctctgaaatggtgatgagggcgcgcgacctcgtctatcatctcaattgctttacctgtaccacctgtaataaaatgctgaccaccggcgaccatttcggtatgaaagacagccttgtgtactgccggctgcacttcgaagctctcttgcaaggagagtaccctgcgcattttaaccacgctgacgtcgccgcggcagccgctgctgccgctgccgcaaagtcggcgggtctgggggcagcgggagccaaccccctggggcttccctactacaatggcgtaggaacagtgcagaaaggacgccctcgaaagcgaaaatccccggggcctggggctgacctggcagcgtacaacgccgccctgagctgcaatgagaatgacgcagaacatctggaccgggatcagccatacccgagttcgcagaagactaaaaggatgagaacatcattcaagcatcatcagctcagaaccatgaagtcatatttcgcaatcaatcacaacccggacgccaaggacttgaaacagttggcacaaaaaacggggctgactaagcgcgtgttgcaggtctggttccagaatgccagggccaaatttagacggaacctactcagacaggagaataccggggtggacaaatctaccgatgccgctttacagaccggtaccccctcaggtcctgcttccgaactgagcaatgccagtctttccccaagcagcacaccgaccacactcactgacttgactagccctaccctcccaactgtaacatcagtgctcacaagcgtgcccggcaacctcgagggccatgagcctcactctccgtcacagaccacattaactaatctgttttag

SEQ ID NO: 193358 - DNA, 1194 bp, synthetic construct
  misc_feature 1..1194: note = Description of Artificial Sequence: Synthetic coding sequence
  source 1..1194: mol_type = other DNA
atggaggcccggggcgagctgggccccgcccgggagagcgccggcggcgacctactcctagcactcctggctaggagggccgatttgaggcgagagattcctttgtgcgctgggtgcgatcagcacatactggatagatttattctgaaggccactgccactgggactgcatctgtgagcagcgctgcgacggccacgcctctggccgagaggtgtttttcccggggagagtctgtgtactgtaaggacgatttcttcaagaggttcggcaccaaatgtgccgcatgtcaacttggaatcccacccacacaagttgtcagacgcgcgcaggacttcgtgtaccacctgcactgtttcgcctgtgtagtttgcaagcgccagttggctactggcgacgagttttacctcatggaggatagccgccttgtgtgcaaggcagattacgagaccgctaagcagcgtgaggctgaggcgactgcaaagaggccccggactaccattactgccaagcagctggagacccttaaaagcgcttacaacacctccccaaagccagctagacatgtgagggaacagttgagttcagaaaccggtctcgatatgcgagtggtgcaggtgtggttccagaatagacgggctaaagagaagcggttaaaaaaggacgctggaagacagagatgggggcagtacttccgtaacatgaaaagaagccgtggcggatcaaagtctgacaaggacagcgtacaagagggacaagattcagatgctgaagtcagctttcccgtctccttgccatggcgcaaatgggctagacccatggcctccacaggcgcatggggccatccaggccttggccctgcactgggctcccctggacagctgctgccaggcgcttggcgaccgggcagacccagagctgttccgagggccgcaagtcgacagccgctgaggtgcccgcctattccacgaaggccggcagaaccgccgtggcccccccttctctcatccctggtctaccctgacaccagtctgggtctcgtgccttcaggtgccccgggcggccccccccctatgagagtcctggccggaaacggcccttcctcagacctaagcactggaagctccggcggataccccgacttccctgctagtcctgccagctggctggatgaagtagatcacgcacagttctag

SEQ ID NO: 193359 - DNA, 1209 bp, synthetic construct
  misc_feature 1..1209: note = Description of Artificial Sequence: Synthetic coding sequence
  source 1..1209: mol_type = other DNA
atggaggcccggggcgagctgggccccgcccgggagagcgccggcggtgaccttttgctcgcactgttggctcgtcgtgctgatctaaggcgagaaattccactatgcgcgggctgtgaccagcacattctggacaggtttatcctgaaggctttggaccgccactggcactctaagtgtctcaagtgtagtgattgtcacacccctctagccgagcgctgctttagtaggggggagtccgtgtattgcaaggacgactttttcaagaggtttgggaccaaatgcgctgcgtgtcaactgggaatccctccaactcaggtagtcagacgagcccaggatttcgtctatcatttacattgctttgcttgcgttgtttgcaaacgccagctggctacaggcgatgaattttacctgatggaagacagcaggttggtgtgcaaggcagactacgaaactgctaaacagcgggaggccgaagcaactgccaagcgaccgcggacaaccatcaccgctaaacaactggaaacactcaagtctgcctacaatactagtccaaaacctgctagacatgtcagagaacagctgtcctctgagaccgggctggacatgagagtagtacaagtctggtttcagaatcgcagggccaaggaaaagcgacttaaaaaagatgccgggaggcagcgctggggtcagtactttcggaacatgaagcgcagccgagggggaagcaaaagcgataaagattccgtgcaagaggggcaggattcagatgctgaggtgtcattcccagacgagccttccctggcagagatgggacccgccaatggtctgtacgggagcctcggtgaacctactcaagccctggggcgtccttcaggggcgcttgggaactttagccttgaacatggcgggctagccggcccagagcagtacagggagcttagacctggatcaccatatggagtacccccttctccagctgctccacagtccctgcctggaccacagcctctactctcctccctcgtctacccagacacttccctgggcctagtgccgagtggcgcgccgggcggacctccccccatgcgggtgctggccggcaatggcccgagctctgacctttcgaccgggtcaagcggcgggtaccccgacttccccgcctctccagcatcctggttggacgaggtggatcacgcacagttctag

SEQ ID NO: 193360 - DNA, 1194 bp, synthetic construct
  misc_feature 1..1194: note = Description of Artificial Sequence: Synthetic coding sequence
  source 1..1194: mol_type = other DNA
atgctgctggagaccggcctggagcgggaccgggcccggcccggcgcagctgctgtctgcactcttggaggcactagagagatacctctgtgtgccgggtgtgatcagcacattttagatcggttcattttgaaagccctggatcggcattggcactccaagtgtttgaagtgcagtgactgccatacaccccttgcagagaggtgtttctcccggggggaaagtgtctactgtaaggacgattttttcaaacgtttcggaactaagtgtgcagcatgccagctggggattccgcctacccaagtggtaaggagagcccaggactttgtgtatcacctccactgtttcgcatgtgtggtatgcaagcgtcaactggccaccggagatgagttctacctcatggaggatagcaggctagtttgcaaggctgattacgagacagcaaaacagcgggaggccgaagccacagctaagagacccagaaccaccattacggcgaaacaacttgagacattgaagtctgcctataacaccagccctaagccagcaaggcacgtcagagaacagctgtcaagtgaaacaggtttagacatgagagttgtacaagtgtggttccagaaccgacgggctaaggagaaaagattgaaaaaggacgccggccggcagcgatggggacaatacttccgaaacatgaaacggtccagaggaggaagtaaatcagataaggacagtgtgcaagaaggtcaagatagcgatgccgaggtgagcttccctgatgagccctctctggcagaaatggggcctgcgaacgggttatacggctccctaggggaaccaacgcaagcactgggcaggccatcaggcgccctgggaaacttctccctcgaacacggtggcttggccggtcctgaacagtacagggagctccgtcccggctccccctacggagtgccacccagtcccgccgccccacagagcctgcccgggccacaaccgcttctgtcctctctcgtctacccagatacaagcctcggtttggttccatccggtgccccaggaggtcccccccccatgagagtcctggctggcaatggtccttcctctgacctgagtaccgggagctctgggggctacccagactttcccgcatcaccagcctcttggttggacgaggtggatcatgcccagttctag

SEQ ID NO: 193361 - DNA, 1173 bp, synthetic construct
  misc_feature 1..1173: note = Description of Artificial Sequence: Synthetic coding sequence
  source 1..1173: mol_type = other DNA
atgatgcagagcgccaccgtgcccgccgagggcgccgtgaagggcttacctgagatgttgggagtacccatgcaacaaatcccgcaatgtgccggttgtaatcagcacatactcgataaattcatcctcaaagtgttagatcggcactggcactccagctgcctcaaatgcgctgattgccagatgcaacttgccgatagatgctttagccgggcaggcagtgtgtactgcaaagaggatttctttaagcggttcggaacaaagtgcaccgcctgtcagcagggcatcccccccacgcaagtcgtgcggaaagcacaggacttcgtctatcatctccactgtttcgcctgcattatctgtaataggcagctcgctaccggcgatgagttttacctgatggaggatgggcgtcttgtatgtaaggaagactatgagacggccaagcagaacgacgattcagaggctggagcaaaacggcctcgaaccactattactgccaaacaactagagactcttaaaaacgcttataagaacagccccaagccagctcggcacgtgcgcgaacagcttagctctgaaaccgggctagatatgcgcgtcgtgcaagtgtggtttcagaaccgtagggccaaagagaaaagactgaaaaaggacgctggtcgacatcgctgggggcaattctacaagtccgtgaaacggagccgcggatcttccaagcaagaaaaggaatcttccgccgaggattgcggggtgtctgattcagagctctccttccgggaagaccagatcttgtccgagttggggcacaccaataggatctacggcaatgtcggagacgtaaccggaggacagttgatgaacggatctttttcaatggacggcacaggtcagagttaccaggacctccgggatgggagcccttatggcatcccccagtcaccttcatctatttcatctttgcctagccacgctccgctgcttaacggtttagactacactgtcgatagcaatttaggaattatcgcccatgccggccagggggtgagtcaaactcttagagccatggccgggggaccaacttctgacatttccacaggttcatctgtgggctatcccgatttccctacctctcccgggtcttggcttgatgaaatggatcatcctccattctag

SEQ ID NO: 193362 - DNA, 1209 bp, synthetic construct
  misc_feature 1..1209: note = Description of Artificial Sequence: Synthetic coding sequence
  source 1..1209: mol_type = other DNA
atgatggtgcactgcgccggctgcgagcggcccatcctggaccggttcttgcttaacgttctcgacagggcctggcacatcaaatgcgtccagtgttgtgaatgtaagactaatttgtcagagaaatgtttttcgagggaagggaagctctattgtaaaaacgattttttcaggcgcttcgggaccaagtgtgcggggtgtgcacagggcatctccccatccgacctggtacgcaaagcacgcagtaaggtgttccacctgaattgtttcacctgcatggtgtgcaacaaacagctgtctacaggtgaggagctgtatgtgattgacgagaataagtttgtgtgcaaggatgattatctgtctagttccagcctgaaagaaggctccttaaatagtgtgtcatcctgcaccgacaggagcttgtctcccgatcttcaggatgcgctgcaggacgacccaaaagagactgacaactccacttcttctgataaggaaacagccaataacgagaatgaggagcagaattccgggacaaaaaggagaggtccccgtacaactatcaaggccaaacagcttgagactcttaaggctgcctttgctgctacacccaaaccaacccgacatatccgggagcagctggcacaggagacaggtctgaacatgagggtaattcaggtgtggttccagaatcggagatctaaagaacgacggatgaagcagttatctgctctcggggcacggcgacatgccttcttccgctccccaagaaggatgaggccattgggtgggcggctcgacgagtccgaaatgctgggttctaccccttacacttattatggggattatcagggggactactatgcacccggcagcaattacgattttttcgcccacggccccccctctcaggcccaaagtccagccgactctagcttcttggctgcttccggcccaggaagcacgcctctgggggcattggagcctccattagctgggcctcatgccgcagataaccctcgattcacggatatgatcagccatccggacacaccatcccccgaacccggtctacccggtaccctgcatcccatgcctggggaggtattttccgggggacccagccccccatttccaatgagtgggacatctggctattccggcccactttctcatccaaatccagagctaaacgaggcagcagtttggtag

SEQ ID NO: 193363 - DNA, 1071 bp, synthetic construct
  misc_feature 1..1071: note = Description of Artificial Sequence: Synthetic coding sequence
  source 1..1071: mol_type = other DNA
atgcagatcctgagccggtgccagggcctgatgagcgaggagtgcggacggacaacggcccttgcagcaggtcggaccaggaagggtgcgggggaggaagggctcgtgagccctgaaggcgccggggatgaggacagctgctcttcttcggcgcccctcagtcccagctcaagtcccaggtcaatggccagcggaagcggatgtccgccagggaaatgcgtctgtaattcatgcggcctggaaatcgtggataaatacctcctgaaagtaaacgacttatgctggcacgtccgctgccttagctgctcggtttgccggaccagcctggggcgccatacgagctgttatataaaagataaggacattttctgcaagttagactattttaggcgttacggcactcgctgctctcggtgcggtaggcacatccatagtacagactgggtccgccgcgcgaagggcaatgtgtatcaccttgcatgctttgcctgtttttcgtgcaaaaggcagctgtccactggcgaagaatttgccctggtggaagagaaagtgctctgtcgtgtgcactacgattgcatgcttgacaacctcaaaagggaagtcgaaaacgggaatggaattagcgttgaaggcgctctgcttacggagcaggacgtcaaccatccaaagcccgctaagcgcgccagaacgtctttcactgccgatcagttacaggttatgcaagctcaattcgcccaagacaacaatccagatgcccagaccctgcagaagctggctgagcgtacaggtctgagtcgcagggtgatccaagtttggtttcagaactgtagagcgagacataagaagcatgtctcccccaaccactcaagttccacaccagttacagccgtaccaccatcacgcctgagtccgcccatgctggaggagatggcatacagcgcttacgtcccccaagacggcactatgctgacggctttacacagctacatggacgcccactccccaaccaccctcgggttgcagcctctcttgcctcacagcatgactcagttgcctataagccatacatag

SEQ ID NO: 193364 - DNA, 1041 bp, synthetic construct
  misc_feature 1..1041: note = Description of Artificial Sequence: Synthetic coding sequence
  source 1..1041: mol_type = other DNA
atgagcgaggagtgcggccggaccaccgccctggccgccggccggaccaggaaaggagccggagaggagggtctggtgagtcccgaaggagcaggagatgaggactcctgcagtagttcagctcccctgtcaccaagttcctcaccaaggtccatggccagtggctcaggctgcccccccggcaaatgcgtctgcaacagttgcggactggagatagtggacaaataccttctgaaagtgaatgatctctgctggcacgttaggtgcttgagttgttcagtgtgccgcacatctctcgggaggcacacctcatgttacatcaaggacaaagacatattttgcaaattggattatttccggcgctacggcacacggtgttccagatgcggacgtcatatccacagcactgattgggtccggcgggccaaggggaacgtgtatcaccttgcttgtttcgcctgcttttcctgtaagcgccagctgagtaccggcgaagagtttgcacttgtggaagaaaaggtcctgtgccgtgtacactatgactgtatgttggacaacctaaaaagagaggtggagaatggtaacgggatttccgtcgaaggcgcgttactgacagagcaggacgtgaaccatccaaagcccgccaagagggcccgaacaagtttcacagccgaccaactgcaggtaatgcaggcccagttcgcccaggacaataaccctgacgctcagaccctccagaagttggccgagaggactggactaagccggcgggtcatccaggtctggtttcagaactgtcgggccaggcacaaaaaacatgtttctccaaaccattcttcatcaactcctgtaacggctgtgccccccagccgcctctctccccctatgctggaggagatggcctactccgcttacgtgccgcaggacgggacaatgctgaccgcattgcactcttacatggatgcccacagccctaccaccctggggctgcaacctctcttgccgcacagcatgacccagctgcctatttcgcacacatag

SEQ ID NO: 193365 - DNA, 1194 bp, synthetic construct
  misc_feature 1..1194: note = Description of Artificial Sequence: Synthetic coding sequence
  source 1..1194: mol_type = other DNA
atggagatcgtgggctgccgggccgaggacaacagctgccccttcagacctccagcaatgctctttcacgggatcagtggtggccatattcagggtattatggaagagatggaaaggcggtccaaaacggaagcccggctggccaagggagcccagctcaacggccgtgacgccgggatgccaccgttgtcacccgagaaacccgcactttgcgctggctgcggcggcaagatctcagaccggtattacctgctagcagtggataaacaatggcatctgcggtgcttaaaatgctgtgagtgcaagttggcactggagagcgagttaacatgttttgccaaagatggtagtatttactgcaaagaggattactacagacgcttctccgtgcaacgctgcgcccgttgtcatctgggcattagcgcctcagaaatggtgatgagagccagggatagcgtataccatctgtcatgttttacttgctcaacttgtaataagacgctgaccactggcgaccacttcgggatgaaggattcattagtttactgtcgggcccacttcgagacactgcttcagggggaatacccgccacaactgtcctatacagaattggcagctaaaagcggaggactggcgctgccttattttaacggcaccggaaccgtgcaaaaaggccgtccacgcaaacggaaaagccccgccctgggagtcgacatcgtgaactacaactctggctgtaacgaaaacgaagcagatcatctggatcgggaccagcagccttaccctccatcccagaagaccaagagaatgcggacttcctttaagcaccaccagctgagaaccatgaagtcttattttgctatcaaccacaatccagatgccaaagacctcaaacaactcgcccagaagactggactgactaagagagtgctacaggtgtggtttcagaacgcgcgcgcaaagtttcggagaaaccttttaaggcaggagaacggaggtgttgacaaggcagatggcaccagcttaccagcaccaccaagtgctgactccggcgcattgactcctcctgggactgccacaacactcacagatcttaccaaccccacaataaccgtggtaacctcggtgacgtccaatatggactcccacgaatccggtagcccttcccagaccactttaactaacctgttttag

SEQ ID NO: 193366 - DNA, 1167 bp, synthetic construct
  misc_feature 1..1167: note = Description of Artificial Sequence: Synthetic coding sequence
  source 1..1167: mol_type = other DNA
atgctgaacggcaccaccctggaggccgccatgctgttccacggcataagcggcggacacatacaggggattatggaggaaatggaaaggcggagcaaaactgaggcgcgcttagccaagggagcccaattgaacgggcgtgatgctggcatgccaccactgtcccccgagaaaccagctctctgtgcaggctgcggaggcaaaatatccgatcgttactacttgctagccgtcgataagcagtggcacttgagatgcttgaagtgttgcgagtgtaagctcgctttggaatccgagctgacgtgcttcgctaaagacggctccatttattgtaaggaggattattatcgccggttctccgtccaacggtgcgcgcgttgccatcttggtatcagcgccagcgagatggtgatgcgcgctcgggattctgtgtatcacctgtcctgctttacgtgctcaacttgtaataagacactcacaaccggagaccacttcggtatgaaggacagcctggtctattgccgggctcattttgaaacgctgttgcagggggaatatcctccacaacttagttacactgagcttgcggcaaaatcagggggcttagccctgccctactttaatggcacaggtacagtacagaagggaagaccgcgcaagaggaagagcccagcgctcggggttgatatcgtaaactacaactctgggtgtaacgagaacgaggccgaccatctagaccgcgaccagcagccctaccctccctcccaaaagacgaagaggatgcgcacctcattcaagcaccatcagctacgtactatgaagtcatacttcgccattaaccataatccagacgcgaaggatttgaagcagctcgctcagaaaaccggtctcaccaaacgggtgctgcaggtgtggtttcagaacgcacgagccaaattcaggcgtaacctcctcaggcaggagaacggcggcgtcgacaaggcggatggtacctctctccctgctccgccttccgctgacagcggcgcactgacgcctccgggcactgcaaccactttaacagacttgactaatccaacgatcacagtggtgaccagtgtcacttcaaatatggacagtcatgagtcagggagcccttcacagacgaccctaaccaatctgttttag

SEQ ID NO: 193367 - DNA, 1149 bp, synthetic construct
  misc_feature 1..1149: note = Description of Artificial Sequence: Synthetic coding sequence
  source 1..1149: mol_type = other DNA
atgctggacggcctgaagatggaggagaacttccagagcgccatcgacacctccgcttctttcagctcactgttgggccgggcggtctcccccaaatccgtgtgcgaaggatgtcagcgcgttattctagatcgtttcctcttgagattaaacgacagcttttggcacgaacagtgcgtgcagtgcgcatcttgcaaggaacccttggagactacctgcttctatagagataaaaaactgtattgcaagtatgactatgagaaattatttgcagttaaatgcgggggttgttttgaagccattgcccctaacgagttcgtgatgagagcacaaaagtcagtttatcatctctcatgtttctgttgttgcgtgtgtgagcgccagttgcagaagggtgacgaatttgtcctgaaggagggccaactcctttgtaaaggggactacgagaaggagagggaattactgtcacttgttagccccgctgcgagcgacagtggcaagtctgatgatgaagaaagcctgtgtaagtcagcccatggagccggaaagggtaccgccgaggaggggaaggaccataagagacccaaaagacccagaaccattctgaccacccagcaaaggagagcgttcaaggcgtctttcgaggtctcctccaaaccttgcaggaaagtgagggaaactctggcggcagaaaccggtctgagtgtgcgagtggtgcaggtgtggttccaaaaccaacgtgctaagatgaagaagctggcccgcagacagcagcaacagcagcaggatcagcaaaacacccagaggttatcatccgcacagaccaatgggggaggttctgcaggcatggagggaataatgaacccttacactgctcttcctacgccacagcagctgcttgccatagagcaatctgtgtactcctcggatccattcaggcagggcctcaccccccctcagatgccaggagatcacatgcacccctatggggcggaacccttgtttcacgacctcgacagcgacgacacaagtttatctaacctgggggactgctttcttgctacatcagaagctggcccactacagtctcgtgtggggaatccgatcgaccacctgtattctatgcagaactcctattttacttcgtag

SEQ ID NO: 193368 - DNA, 1149 bp, synthetic construct
  misc_feature 1..1149: note = Description of Artificial Sequence: Synthetic coding sequence
  source 1..1149: mol_type = other DNA
atgctggacggcctgaagatggaggagaacttccagagcgccatcgatacaagtgcaagcttcagctcgttattgggacgagctgtgagcccgaaatcagtgtgtgaggggtgccagcgcgtaattctggatcggttcctgctcagactgaacgattccttttggcacgaacagtgcgtgcagtgcgcgtcctgtaaggagcccttggaaacaacttgcttttatagggataagaagctgtactgcaagtacgactatgaaaaactgtttgcagtgaaatgcgggggttgtttcgaggcaatcgcacccaatgaatttgttatgcgggctcagaaatctgtatatcatttaagctgcttctgttgttgtgtgtgcgaaagacagttgcagaagggagatgagttcgtgttgaaggaggggcagttgctttgcaaaggggactacgaaaaagaaagggaactactgtctctggtttctcctgccgcatccgactccggaaagtcagatgatgaggaatctctctgtaagagcgctcacggcgccggcaagggtaccgcagaagagggcaaggaccataaaaggcccaaacggccacggacaatcttgacaactcagcagagacgagcatttaaggcttcttttgaggtctcatcaaaaccctgtagaaaggttagagaaacactggcagctgaaacaggtctgtccgtgcgtgtcgtgcaagtgtggttccagaaccaaagagccaagatgaagaagctagctaggaggcagcaacaacagcagcaagaccaacagaacacacaaagactatcgagcgcacagaccaatggggggggcagcgcagggatggagggcattatgaacccttataccgcgttgccaacccctcagcagctgctggccatcgagcaaagcgtgtattcatcggacccatttaggcaggggctgacacctccccaaatgccaggtgatcacatgcacccttatggggccgaacctctgttccacgatctggacagtgatgatacctccctaagcaacttgggggactgcttcctcgcaacttctgaggccggcccactccaatctagagttgggaatcctatcgatcacctgtacagtatgcagaactcgtacttcaccagctag

SEQ ID NO: 193369 - DNA, 1149 bp, synthetic construct
  misc_feature 1..1149: note = Description of Artificial Sequence: Synthetic coding sequence
  source 1..1149: mol_type = other DNA
atgctggacggcctgaagatggaggagaacttccagagcgccatcgatacgagcgcctcgttctcgagcctcctgggcagggcggtgagccccaagtctgtatgcgagggatgccagagagtcatactggataggttcctgttgaggctcaacgacagtttttggcacgagcagtgcgtgcaatgtgcgagttgtaaggagcccttggagacaacctgcttttatcgggacaaaaaattgtattgcaagtacgactacgaaaaactcttcgcagtgaagtgtggtggatgcttcgaagccatcgctcccaatgagtttgtaatgcgcgcccagaagagcgtataccatctttcatgtttttgttgctgcgtctgcgaaagacagctccagaagggagatgagtttgtactgaaggaaggccagctgctgtgtaaaggggactacgaaaaggagcgtgagcttctctctctagtctcgccagccgcttctgattctggtaaatcagacgatgaggagtccctgtgcaagagcgcacacggagccggaaaaggtacggctgaggaggggaaggatcacaaacgtcctaagcgacctcgaactatcctgacaactcagcaaaggcgcgcgtttaaggcctcatttgaagtttcttctaaaccttgtcgcaaggtcagagaaactctggccgcggaaacaggcctttcagttcgcgtggttcaggtatggttccagaatcagagggctaaaatgaaaaaattagcccggcgacagcagcagcagcaacaggatcaacagaatacgcaaaggttgagctctgcacagactaatggcggaggaagcgccggaatggaagggataatgaacccttacacggcactccccacaccccagcagctactggctattgaacagagtgtctactcttccgacccatttcgacagggcctgaccccgccacaaatgcctggcgaccacatgcatccctatggggcagaaccgctgttccacgatctggattccgatgatacatccctgtcaaacctgggcgattgtttcctcgccacaagcgaggccggacccctgcagtcccgagttggtaacccaatcgaccatctgtactccatgcagaactcatatttcactagttag

SEQ ID NO: 193370 - DNA, 1221 bp, synthetic construct
  misc_feature 1..1221: note = Description of Artificial Sequence: Synthetic coding sequence
  source 1..1221: mol_type = other DNA
atggacatcgccaccggccccgagagcctggagcggtgcttccccagaggccagactgactgcgccaaaatgctcgacgggatcaagatggaagagcatgccctccgccccggccctgcaactctcggagtcctccttggatcggactgcccccaccctgctgtttgcgagggatgtcaaaggcctatttcggatcgattcctaatgagagtcaatgaaagctcctggcacgaggaatgcttacagtgtgcggcttgccaacaggcccttacaacgtcttgctacttcagagaccggaagctttattgtaaacaggattaccagcagctctttgcagccaaatgttcaggatgtatggaaaagatcgctcccacggagttcgtaatgagagccctggaatgcgtgtaccacctgggctgtttctgttgttgcgtctgtgagcgccagctgagaaaaggtgatgagttcgtgctcaaggagggtcagctactttgcaagggagattatgagaaagagaaagatctcctgagttcggtgagcccagacgaatcagatagcgtaaagagcgaggacgaagatggagacatgaaacctgcaaaaggacagggttcccagagtaagggatcaggtgacgacggcaaagatcctcgcaggcccaagcggcctcgcacaatattgaccacacagcagcgccgtgccttcaaggcttcattcgaggtatcctcaaagccttgtaggaaggtacgcgagaccctcgctgcagagaccgggctgtcagtacgggtggtacaggtgtggtttcagaatcaacgcgccaaaatgaagaagctcgcccgtcggcaccaacagcagcaagagcagcagaatagtcagagacttggccagggggaaccaggccctggccagggcctcgggcaggaggtcctcagttcacgcatggaaggaatgatggcgtcttatacccctctcgcccctcctcagcaacaaatcgtggcaatggagcagagcccctacggaagctctgacccttttcagcaagggctgaccccaccccagatgcccggaaatgactcaatcttccacgacattgactccgatacttctctcacttccctgtcagattgcttcctgggttctagcgacgttggatctctgcaggcccgcgtcggaaacccgatcgaccgtctttacagtatgcagtctagctatttcgccagttag

SEQ ID NO: 193371 - DNA, 1209 bp, synthetic construct
  misc_feature 1..1209: note = Description of Artificial Sequence: Synthetic coding sequence
  source 1..1209: mol_type = other DNA
atggacatcgccaccggccccgagagcctggagcggtgcttcccccgcggacagactgactgcgccaaaatgctagacggaatcaagatggaggagcacgcgctgaggccaggccccgcaacgttgggggtgctgttagggtccgactgcccgcaccctgcggtctgtgagggctgtcagcgcccaatctcagaccgctttcttatgcgtgtgaatgaaagttcttggcacgaggagtgcctgcagtgtgctgcttgtcaacaagctcttacaacaagttgttacttcagagatcggaagctgtattgcaagcaggactaccagcagttgttcgccgccaagtgcagtggttgtatggaaaagatcgcccctactgaatttgtcatgcgcgccctagaatgcgtgtatcatctgggctgcttctgctgttgcgtctgtgagaggcagctgcggaagggcgatgagttcgtgttgaaagaagggcagctcctgtgtaagggggactatgaaaaagagaaggacctgctgtcttccgtgtcccctgacgaatctgatagtgttaagagcgaagatgaggacggggacatgaaaccggctaaaggccaggggtcccagagtaaggggtctggggatgacggtaaagacccccgtagacctaagaggcctcgcacaatcctgactactcagcagagaagggccttcaaggccagttttgaggtgagttctaagccatgcaggaaggtacgggagaccctagcagcagaaacaggattgagcgttcgagtggtgcaggtgtggtttcaaaaccagcgggcaaagatgaagaagttggctaggcgacaccagcagcaacaggaacagcaaaatagtcagcggctggggcaagaagtgctgagctctagaatggagggtatgatggcgagctatacacccctcgcaccgccgcagcagcagatcgttgctatggaacaatcgccctacggatccagtgacccttttcagcagggtctcacaccaccccagatgcctggcgaccacatgaatccttacgggaacgattccattttccatgacattgatagcgacaccagtctgacaagtctgagtgattgcttcctgggttccagcgacgtgggatctctgcaagctagagtgggaaatcctatcgaccgcctgtactctatgcagtcatcctatttcgcatcctag

SEQ ID NO: 193372 - DNA, 1119 bp, synthetic construct
  misc_feature 1..1119: note = Description of Artificial Sequence: Synthetic coding sequence
  source 1..1119: mol_type = other DNA
atgctggacggcatcaagatggaggagcacgccctgcggcccggccctgccaccctgggcgtgcttcttgggtccgattgcccccacccagccgtgtgcgaggggtgtcagagacccatatcggaccgtttcctgatgcgcgtgaatgagtcctcctggcatgaagagtgccttcagtgtgcggcatgccaacaagcactcactaccagttgctacttccgggatagaaagctatactgcaaacaagactaccagcagctgttcgctgccaaatgtagtggttgtatggaaaagatcgctccaacagagtttgtcatgcgggcattggaatgtgtgtaccatctgggctgtttttgctgctgtgtctgcgagcgccagctgagaaagggagacgagttcgtgctgaaggaaggccagttgctctgtaaaggcgactacgagaaagagaaagatttgctgtcttccgtttctccagatgaaagcgactctgtgaagtctgaggatgaggacggagatatgaagcctgctaaggggcagggatcgcagtctaagggcagtggcgacgacgggaaggacccgagaagaccaaagcgtccacgtacgatcttgaccactcaacaaagacgggcattcaaggccagctttgaagtctcttcgaagccttgtcggaaggtgagagagacgttggccgctgagaccggcctgtcagtccgcgttgttcaagtgtggtttcagaatcagcgggcgaagatgaagaagctggccagacggcaccagcagcagcaggaacagcagaattcgcagagattgggccaggaggttctcagcagccgcatggagggaatgatggcgagctatactccactggctcctcctcagcagcagattgtggctatggaacagtcaccttatgggtcttcagacccctttcagcagggtctcacccctccccagatgcctggaaacgatagcatattccatgacatcgacagcgatactagtttaaccagcctgtccgattgctttcttggaagcagtgacgttggctctctgcaggcccgcgtgggcaatcccattgaccgcctgtatagtatgcagtcctcctactttgccagctag

SEQ ID NO: 193373 - DNA, 1188 bp, synthetic construct
  misc_feature 1..1188: note = Description of Artificial Sequence: Synthetic coding sequence
  source 1..1188: mol_type = other DNA
atggacatcgccaccggccccgagagcctggagcggtgcttcccccgtggacagaccgactgtgccaaaatgttggacggaataaaaatggaagaacatgccctcagacccgggccagcaaccctgggcgttcttctcggaagcgactgcccacacccggctgtgtgtgaaggttgccagagaccgatcagtgaccggttccttatgagggtgaacgaaagctcttggcatgaagagtgtctgcagtgtgccgcctgtcagcaggcactcactacgagctgttacttcagagaccgcaagctgtactgcaaacaagactaccagcagctgtttgccgctaaatgttctgggtgtatggagaagatagcccccacagaatttgtgatgcgtgccctagagtgcgtgtaccacctcggatgcttttgttgctgcgtgtgtgagaggcaactgcggaagggagacgaatttgtcttaaaagagggtcagctgctgtgcaagggggattacgagaaggaaaaggacttgctctccagcgtgagcccggacgagtctgatagcgtaaaaagcgaagatgaggatggagatatgaagcccgcaaaaggccagggttcccagtccaaggggagcggcgacgacggtaaagacccgcgtcgtcctaaaagaccccggacgatcttaacaacccaacagaggagagccttcaaggcatcattcgaggtgtcctctaagccttgtcggaaagtcagggaaaccctggcagccgaaacagggctgagcgtaagagtggtgcaggtttggttccagaatcagagggctaagatgaagaaactcgcccggaggcaccagcagcagcaggagcagcagaacagccagcgtctgggccaggaagtcctgtcttcccgcatggaaggaatgatggctagttacacaccccttgcgccaccccagcagcagatcgtcgcaatggagcagtctccgtatggatcctccgacccgttccaacagggattaactcctcctcagatgccaggaaatgactcaatttttcatgatatcgatagcgacacatccctaacgagtctgtccgactgctttctgggaagttccgatgtgggatccctgcaggcccgcgtgggcaaccctatcgatcgcctctacagtatgcagtcctcctacttcgcctcctag

SEQ ID NO: 193374 - DNA, 318 bp, synthetic construct
  misc_feature 1..318: note = Description of Artificial Sequence: Synthetic coding sequence
  source 1..318: mol_type = other DNA
atgagcatctacttccccatccactgccccgactacctgcggagcgcaaaaatgacagaggtgatgatgaatacacagccaatggaagaaatcggcttgagcccccgtaaagacgggctttcttaccaaatcttcccagacccttcagatttcgaccgatgctgcaagctgaaagacagattacctagcattgtggtggaaccaacggaaggggaagtggaaagcggcgagctgcgctggcccccagaggagtttctggtccaggaggatgaacaggacaactgcgaagaaacagcgaaagagaataaggaacagtag

SEQ ID NO: 193375 - DNA, 264 bp, synthetic construct
  misc_feature 1..264: note = Description of Artificial Sequence: Synthetic coding sequence
  source 1..264: mol_type = other DNA
atggtgagcagcgtggtgggcttctacagcctgcggttcttcggcaattttacacccaaaaaagacgacaccacgatgaccaaaatcattggcaattgtgtgagcattctcgtgctgagctccgctctgcctgtgatgtcccgcacactggggctgcacaaattgcatctgcctaacacttccagggacagcgagacagctagcgtgatgacttcctccgcaagggacacgggcttccaccacttgcaagcactgatgtgctag

SEQ ID NO: 193376 - DNA, 687 bp, synthetic construct
  misc_feature 1..687: note = Description of Artificial Sequence: Synthetic coding sequence
  source 1..687: mol_type = other DNA
atggagggccaggacgaggtgagcgcccgggagcagcacttccacagtcaggtacgcgagagcactatttgttttctcctgtttgcaatcttatatgtcgtgagctattttataatcactagatataagcgcaagagtgatgaacaggaggacgaggacgcaattgtcaataggatctctttgttcctctcaaccttcacccttgcagtgtccgcaggagccgtattgctgttgcccttttctatcatctcaaacgagatcctcctgtccttccctcaaaattattacattcagtggctgaacggcagtctgatacatggcctttggaatttagcttccctgttcagcaacctgtgcctgtttgttctgatgcctttcgcatttttttttttggagagcgaaggcttcgccggcctgaagaaaggtatcagggctaggattctggagacattggttatgcttcttttgctcgctctcttaatcctgggaatcgtgtgggtggcctccgctctgatcgacaacgatgcagcaagcatggaatccctgtacgatctgtgggagttttatctgccatacctgtactcctgcatctcattaatgggatgtctcctgctccatctgcctaacacatccagggatagtgagacagcaaagccgtctgttaatggccaccaaaaagccctgtag

SEQ ID NO: 193377 - DNA, 1473 bp, synthetic construct
  misc_feature 1..1473: note = Description of Artificial Sequence: Synthetic coding sequence
  source 1..1473: mol_type = other DNA
atggagggccaggacgaggtgagcgcccgggagcagcacttccactctcaggtacgggagtctaccatctgtttcctgctgttcgccatcctgtatgtggtgtcctacttcataattacacggtacaaaagaaagagcgatgagcaagaggacgaggacgcaatcgtgaacaggattagcctgtttttgtctacgtttaccctggcggtttcagcgggagccgtccttttgctgcccttttccattatcagcaatgagatcttgctgtcatttcctcagaactactatattcagtggcttaatggtagcctgatccatggcctgtggaacctggcctcactgttttccaacttatgcctatttgtccttatgcccttcgctttcttttttttggaatccgaggggttcgccggcctgaaaaagggcatcagggccagaatattagagacattggtgatgctattactactggcattactcatcctgggaatcgtctgggttgcctccgctcttatagataacgatgccgcatctatggaatcactgtacgatctttgggagttctacctcccctatctctacagttgcataagcttgatgggatgtttgctattgctgttatgcacgcctgtggggctgtcaaggatgttcacagtgatgggccagctacttgtaaaaccgaccattctggaggacctggacgagcagatttacatcattacattggaagaagaggctctgcagcgcaggctgaacggcttgtccagctcagttgaatacaatataatggaactggaacaggagttggaaaatgtgaagactctcaaaacaaaactcgagcgccgaaaaaaggcgtccgcctgggaacgcaaccttgtttaccccgcagtaatggtgctgctgctgatcgagacctccatctccgtgttgttggttgcttgcaatatattatgtctgctggtagacgagacagctatgcccaaaggcacgaggggcccagggattggaaacgctagcctcagcacgtttggattcgtgggcgccgccctggagattatcctgatcttttacctgatggtgtctagcgtagtgggcttttatagcctgcgattcttcgggaactttacacctaaaaaagatgacaccacgatgactaaaattataggcaattgtgtgtcaatcttggtactcagttcagctctgccagtgatgtcccggaccctgggtataacgaggtttgatttgctcggtgacttcggacgattcaattggctcggcaatttctacatagttttgagctacaacctgttgttcgctatcgttaccaccctctgtctcgtgaggaagtttaccagcgcggtacgggaggaactcttcaaggcattggggctgcacaagttgcacctgccaaatacctcacgtgactctgagaccgccaaaccgagcgttaacggacatcaaaaagccttatag

SEQ ID NO: 193378 - DNA, 1596 bp, synthetic construct
  misc_feature 1..1596: note = Description of Artificial Sequence: Synthetic coding sequence
  source 1..1596: mol_type = other DNA
atggagggccaggacgaggtgagcgcccgggagcagcacttccactctcaagtgagggagtccacaatctgtttccttctgttcgcgattctgtatgtcgtctcctacttcatcataactaggtataagcgtaaatctgatgagcaggaagacgaagatgccatcgtgaacaggattagcttgtttctatcgaccttcaccctggcagtgtccgcaggggcggtcctcttgctgcctttcagcatcattagcaatgagatcctgctgtctttcccacaaaactattatatccagtggctgaacggatcactcatccacgggttatggaacctggctagtttgttctctaacttgtgtctgtttgtgctgatgccttttgcctttttttttctggagtcagagggattcgccggtctcaaaaaaggcatccgcgctcgcatactggagacccttgtgatgctgctgttgcttgcgctgttgatcctcggaattgtttgggtggcctccgcactgattgacaacgatgccgcgagtatggagtctctctatgacctctgggagttttacctgccctacctgtactcctgcatcagtcttatgggatgtctcctgctcctgctttgtactcccgtaggtctttcaaggatgtttaccgtcatgggtcagcttctggtaaaacccactattcttgaggacctggacgagcagatttacattattacactcgaagaggaagctctccaacgtaggctgaatgtgggcatgctgtgcgctggcaatcctgaagttgctacaggaaggcaggtgccagaagaacaggccggacagctgcttctgggcaaatggattcaggaaggcggcgatatgattgctaacccccgcttgtcttcctctgtagagtataatataatggaactggagcaggagctggagaatgtgaagacactcaaaactaaattagaacgcagaaaaaaggcctccgcatgggagcgtaacttggtctacccagctgtcatggttttgctcctgattgagacctcaatctcggttctcctggtggcttgcaatattctctgtttgctggtggatgagacggctatgccgaaagggacccggggcccaggcatcggaaacgccagtctcagcacgtttggcttcgtgggtgccgcgctggaaatcatcctgattttttatctgatggtgtcctcagttgttggtttttacagtctccgattttttggcaatttcacacccaaaaaagacgacacaacaatgactaaaatcatcgggaattgtgtttccattctggttctatcctccgccctgcccgttatgtcacggacgctcggaataacacgttttgacttattgggtgatttcgggaggttcaattggctcggtaatttttacattgttctgtcctataatctcctgttcgcaatcgtaacaaccctgtgtctggttcggaagtttacaagtgctgtgagggaagaactgtttaaagctctggggctccacaagctccacctgcctaatacaagccgtgattcggagacagccaaacccagcgttaatgggcatcagaaggcactgtag

SEQ ID NO: 193379 - DNA, 855 bp, synthetic construct
  misc_feature 1..855: note = Description of Artificial Sequence: Synthetic coding sequence
  source 1..855: mol_type = other DNA
atgctgctgctgctggccctgctgatcctgggcatcgtgtgggtggcttctgcattaatcgacaacgacgcagcatccatggagtcactatatgacctgtgggaattctacctgccttatctttactcatgcatctctctgatgggatgcctcttgttgcttttgtgcacacccgtaggcctctctcgcatgttcaccgtcatggggcaacttctcgtgaagccgaccatactggaagatctggatgagcaaatatatattattactcttgaggaggaggcattgcaacggaggctcaatggcctgtcatccagtgttgagtacaacattatggagctcgagcaagagctggagaacgtgaagacactgaagactaaactggaaagaagaaaaaaggcgtcagcttgggaaagaaacttggtgtatccagccgtcatggtcttgctgctcattgagacatcgattagtgtgcttctggtcgcctgtaatattctgtgcctgttggtagacgagaccgctatgccaaaagggaccaggggtcccggcattggaaacgcctctttgagtacttttggttttgttggagctgcactcgagatcattcttattttctacctgatggtgagttctgtggttggattctattcactgcggttcttcgggaatttcaccccgaagaaggacgacactacaatgaccaagataataggtaactgtgtctcaatccttgtgctgagctccgctctgccagtaatgtcaaggaccctgggtctccataaacttcacttgccaaacacgtctagggactccgagacagccaagcccagcgttaacgggcaccagaaggccctttag

SEQ ID NO: 193380 - DNA, 1590 bp, synthetic construct
  misc_feature 1..1590: note = Description of Artificial Sequence: Synthetic coding sequence
  source 1..1590: mol_type = other DNA
ggccaggacgaggtgagcgcccgggagcagcacttccacagccaggtacgggagtctacaatttgctttctgcttttcgcaatcctgtacgtggtttcctatttcattatcacaagatataagagaaaatctgacgagcaggaggacgaggatgcaatcgtaaataggatatccttattcctgtccacttttacccttgcagtaagtgccggggctgtactcctgttacctttttccattatctctaatgagattcttcttagcttcccacagaactactatatccagtggctgaatggcagcctcattcatgggctgtggaatcttgcctcactcttttctaatctatgtttgttcgttctgatgccatttgcattttttttcctcgagagtgagggttttgcagggctgaaaaaaggcataagagccagaatcttggagaccctggttatgctattgctattggctctacttatactggggatcgtgtgggtggccagcgccctcattgataacgacgcagcttccatggaatcgctgtacgatctgtgggaattctacctgccatacttatattcttgcattagcctgatgggatgtctgctgttattactctgtacacccgtggggctctctagaatgtttactgtgatgggccaacttctggtcaagcccacgattctggaggatttggacgaacagatttacatcataacgctcgaagaggaggctttacagcgaaggctgaatgttggtatgctgtgtgctggtaacccagaagtcgctactggacgccaagttcctgaggagcaggccgggcagcttttgctgggaaaatggatccaagagggcggggatatgattgccaaccccagactcagttcatctgtagaatacaatattatggagctggaacaggaactagagaacgtgaaaacactcaaaaccaagttggagcggcgtaaaaaggcctccgcatgggaacggaacctagtctatccggctgtaatggtgctactcctgatagaaacctctatctctgtgcttctcgttgcgtgcaacatcctgtgtctgctcgtggacgagactgctatgcctaaagggacaagaggcccagggatagggaacgcctctctctcaactttcggtttcgtcggcgccgctctggagattatcctgatattctacttaatggtgagtagtgtggtcggattctattctctccgtttttttggcaattttacacctaaaaaggatgacaccacaatgactaaaattattggaaattgcgtgagtatcctggttctttctagtgctcttccggttatgtcccgtacactgggcataactcggtttgatctgctgggggacttcggccggttcaactggctggggaacttctacatagtgctcagttataacctgctgttcgccatcgtcacgacactgtgcctcgtccggaagttcacttcggccgtgcgggaggagctattcaaggccttaggcctgcataaattgcacctccctaacacttcccgtgatagcgagacagccaagcctagcgtgaatgggcaccaaaaagccctctag

SEQ ID NO: 193381 - DNA, 1248 bp, synthetic construct
  misc_feature 1..1248: note = Description of Artificial Sequence: Synthetic coding sequence
  source 1..1248: mol_type = other DNA
atgaaggaggacggccgggccggccggggcgtgggcgccggcgccgccctgcctcagccaagtgccggagttcatgacgagcaagaagatgaggatgccattgttaacagaatttccctattcctgagtacttttacattggccgtttctgccggagctgtgttactcctgccattctccatcatttccaatgaaattctgcttagtttcccacaaaattattatattcagtggctcaatggcagcctgattcacggactgtggaatctagcttccctgttttctaatctttgcctgtttgtccttatgcccttcgctttttttttcctggagtccgagggctttgccggtctcaagaaggggatccgcgcgagaatcctcgagactctcgtcatgttattgcttctggccttactgatactggggatcgtttgggttgcctctgctctgattgacaatgacgcagccagcatggaatctttgtacgatctatgggaattttaccttccatatctgtatagctgcatctccctaatgggatgcctgcttctattactgtgtacccccgttggcctatccagaatgttcactgtgatgggtcaactgctagtgaaaccaaccatattggaggacttggatgagcagatctacatcatcacccttgaggaagaagccctgcaacgcagactgaacgggcttagcagcagtgttgaatacaatatcatggagctcgaacaggagctggagaacgtcaaaacattgaaaaccaagctggagcggcggaagaaagcatctgcgtgggagcgtaatttggtttatccagcagtcatggtgttgctgctaattgagacttctatatctgtcctactggtcgcctgcaatatcttgtgtctgctcgtggacgagacagcaatgcctaaaggaaccagaggccctgggatcgggaacgcatccttaagtacattcggctttgtgggggccgcactcgagatcatcctcatcttctacctgatggtctcatctgtggtcggcttctacagtcttaggtttttcgggaatttcactcctaagaaagatgacacaactatgaccaaaataattgggaactgtgtcagcattcttgtcctgagctctgccttgcctgtgatgtcccgaacattggggctgcataaactgcatctgccgaatacgagcagagactccgaaaccgcaaaaccgagtgtcaatgggcaccaaaaggctctttag

SEQ ID NO: 193382 - DNA, 1470 bp, synthetic construct
  misc_feature 1..1470: note = Description of Artificial Sequence: Synthetic coding sequence
  source 1..1470: mol_type = other DNA
atggaggcccccgactacgaggtgctgagcgtgcgggagcagctgtttcatgagcgaatccgcgagtgtatcatttctaccctccttttcgcaacattgtatatactctgtcatatatttttaacaagatttaagaaacccgctgagttcacaaccgttgatgatgaggatgcgacagtaaacaagatcgcccttgaactttgtactttcaccctcgcgatcgccttgggagccgttctgctgcttcctttctctatcatttctaacgaagttctgctgtctctccctcggaattactacatccagtggctgaacggatccctgattcatggtctctggaatctcgttttcctgtttagcaatctctctcttatttttctaatgccctttgcatacttcttcaccgaatccgagggatttgccggcagccgcaagggagtgcttgggcgggtttacgaaaccgtggtgatgttgatgctgctgactttgctcgttctgggtatggtgtgggtagcttccgctatcgtagataagaacaaagcgaatagggagagcctgtatgatttttgggagtattatttgccctacctctattcatgcatttcattcctgggtgtgctgttactcttggtgtgtactcctcttggcttagcaagaatgtttagtgtgactggaaagcttctcgtgaaaccgaggctgctggaagacttggaggaacaactctactgtagtgcattcgaagaagccgctctgacgagaagaatttgtaatcccacgagctgctggctgcccctggacatggagctgctgcataggcaggttctcgcgttgcaaacacaaagggtccttctggaaaaaaggcgaaaagcttcagcctggcagagaaatctgggctatccactagccatgctatgcctcctggtcctgaccggtttgtcagtcctcatcgtcgccatccatattcttgaactgctgatagacgaggctgccatgccacgggggatgcaaggcacttcgctggggcaggtatcattttcaaagttagggtcatttggggcggtaattcaagtagtactcatattctacttgatggtttctagtgttgtgggcttttacagtagtcccctgttccgatcccttaggccacggtggcacgatactgctatgacccagattattggcaactgtgtgtgcctcctagttctgagctctgcattgcccgtgtttagccggaccttggggctgacccgcttcgacctgctcggcgacttcggcagatttaattggctcggcaatttttacatcgtgttcctctacaatgcagcttttgctggactgactaccctctgtctggtgaagactttcacagccgccgtcagagctgaactgattagggctttcggcctggaccggctacccttacccgtttccgggttcccccaggcctccagaaagacgcagcaccagtag

SEQ ID NO: 193383 - DNA, 1455 bp, synthetic construct
  misc_feature 1..1455: note = Description of Artificial Sequence: Synthetic coding sequence
  source 1..1455: mol_type = other DNA
atggtgaacgtgaaggccctgtgcgagcccgaggtgagcaactgctggatgaacgtcatcaccggcactggctctgttagctcccctctcctggttttgccacaaccagggccggagacgtccctgatgactggagaaccagtggacgatgaagatgcgaccgtgaacaagatcgctctggagctgtgcaccttcaccttggccatcgccctgggtgccgtgctgctgctcccttttagtatcatatcgaacgaagtcctcttatcgttacctcggaactattatattcagtggcttaatggctccttgattcatggcctgtggaacctggttttcctgtttagtaacctgtctctgatcttcctgatgcccttcgcctatttctttaccgagtcagagggcttcgctgggagtcggaagggggttctcgggagagtgtatgagacagtggttatgctgatgctgctcactctgctagtgttaggcatggtctgggtggcttcagcgatcgtggacaaaaacaaagcaaacagggaatctctgtacgatttctgggaatactacctgccttacttatactcctgtattagttttctgggggtcctgcttctgcttgtgtgtacccctctcggactcgctcgaatgttttcagtaacaggaaagcttttggttaaaccaagactgctggaggacctggaggagcagctttattgctctgcttttgaagaggcggctctgactcggcggatctgtaatccaacgagctgctggttacccttagacatggaacttctgcaccggcaggtcctcgctcttcaaactcaacgggtgttgctcgaaaagcggcgcaaagcatcagcctggcagaggaacttgggctaccccctggctatgctctgtttgttggtactgaccggactgtctgtgctaatcgttgctatacatatcctggagctgctgattgatgaagccgccatgccaagggggatgcaaggcacatcactcgggcaagtatcgttctctaagctgggctccttcggcgccgtaattcaagtggtgctcatcttttacctcatggtgtcaagtgtcgttggcttttattcttctcctctgttcaggtcccttcggcctaggtggcacgatactgcgatgacacagatcatcgggaattgcgtatgtctcttagtactcagctcagcgttacctgtgtttagcaggacccttggtctaactcgtttcgacctgttgggcgacttcggtcgctttaattggctgggtaatttttacatcgtctttttgtataatgcagcctttgccgggctgacgactctgtgcctggttaagacattcactgctgctgttagggcagagctcattcgcgcctttggtttagatcgtctacctttgccggttagtggtttcccacaggcgtccagaaaaacacagcaccagtag

SEQ ID NO: 193384 - DNA, 1410 bp, synthetic construct
  misc_feature 1..1410: note = Description of Artificial Sequence: Synthetic coding sequence
  source 1..1410: mol_type = other DNA
atggaggcccccgactacgaggtgctgagcgtgcgggagcagctgtttcatgaaaggatcagagagtgcattatttctactctgctgttcgccacactgtatatcctgtgccacatatttcttacaagatttaaaaagcctgccgaatttactaccgtcgacgacgaggacgcgactgtgaataaaattgccctcgagctttgcacctttactttagcgattgcgctgggcgcagtattactactcccctttagcatcatctcgaatgaggttctgctcagtttacctcgaaactactacatccagtggctaaacggatctttaattcatggactgtggaatttagtcttcctctttagcaatctgtctctgatattcctcatgccctttgcgtatttctttactgaaagcgagggatttgcggggtctagaaaaggcgtgcttggccgcgtctatgagacggttgttatgctcatgctgctcacactgttggtgctcggaatggtgtgggtggcttccgctatagtggacaagaataaggcaaacagggagagcttgtacgacttctgggagtactaccttccatacctttactcttgcatctcttttctgggagtgctgcttcttctcgtgtgtactcccttgggactggcccgtatgttcagcgtcactgggaaacttttagttaagcccaggctactcgaggatctcgaggagcagctctattgtagtgcttttgaagaggccgccctaacacggagaatttgcaaccccacaagctgctggctgcccctggacatggaactgctgcatcgacaggttctcgctttacagacccagcgagtgttgttggaaaagcgacgaaaggccagcgcctggcagaggaacctcggttaccccttggcaatgctttgtctgctcgtgctgaccggattatctgtgctgatcgtcgcaattcatattctagaactcctgatagacgaagccgccatgcctcggggcatgcaggtggttctgatcttctatttaatggtcagctctgttgtcgggttttactcctcacccctattccgaagtctaagacctaggtggcacgatactgctatgacacagattatcggcaactgcgtgtgcctgctggtccttagtagtgccttgcctgtcttttcccggacgttaggcttgacaagattcgacctgctgggcgactttggccgatttaactggctgggtaatttctatatagtgtttctgtataatgccgccttcgctggcctgacgacgctttgcctggtcaaaacatttacagctgctgtcagggctgagctgatccgggcctttgggctagataggctcccattgccagtcagtggattccctcaagctagccgcaagacccagcatcagtag

SEQ ID NO: 193385 - DNA, 384 bp, synthetic construct
  misc_feature 1..384: note = Description of Artificial Sequence: Synthetic coding sequence
  source 1..384: mol_type = other DNA
atggaggcccccgactacgaggtgctgagcgtgcgggagcagctgttccatgagcgcatacgggagtgcatcatttccacccttctgtttgccactctgtatattctctgccatatcttcctaacccgttttaagaaaccggcagagttcacaaccgtcgacgacgaagacgccactgtgaacaaaatcgccctggagctttgcacgttcacactagcaattgccctgggcgcagtgctattgcttccctttagcataatctccaacgaagtactcttgtctctgcccaggaactactacatccagtggctaaacgggagtttgattcatggactctggaatctggtgttcctcttttccaaccttagtttgattttcctgtag

SEQ ID NO: 193386 - DNA, 1017 bp, synthetic construct
  misc_feature 1..1017: note = Description of Artificial Sequence: Synthetic coding sequence
  source 1..1017: mol_type = other DNA
atggtgcggcgggtgcagcccgaccggaagcagctgcccctggtgctcttgcggctcctgtgcctgctgcccacgggcttacccgtgagaagtgtggactttaatcgaggcaccgacaatattactgtcagacaaggtgacacagcaatcctgcgatgcgtggtcgaagataagaatagcaaggtagcctggcttaaccgcagcggcatcatcttcgctggccacgataagtggtccctggacccgcgggtggagctggagaagcgtcattctctggagtattcattgcgaatccagaaagtagacgtatatgatgaaggcagttacacttgttcagttcagactcaacacgagcctaagaccagccaggtctacttaattgtgcaggttcccccaaaaatctcaaacatcagttcagatgtcaccgtaaacgaagggtccaacgttacgttagtatgcatggccaatggcaggcccgaaccagtaatcacttggcggcacctcacacccaccggcagggagtttgaaggcgaagaggagtatctcgaaatcttagggattacccgagagcaatccggcaagtatgagtgcaaggcagccaacgaggtatcctcagccgacgttaagcaggttaaagtaactgtgaactacccacctactatcacggagtcaaaatcaaacgaggctaccacaggacgacaggcctccctgaagtgcgaggcttcagcagtgcctgcaccggattttgagtggtatagggacgatactcgtataaattccgccaacggtctggagataaagtccaccgagggacaaagctccctgacagtaacaaatgtgaccgaggagcactacggaaattacacctgtgtggccgcaaataaactcggggtcacgaatgcttctctggtcctgtttcgcccagggtccgttcggggaattaacggctctatttcgctggcggtgccactatggcttctggcagcctccctcctttgtctgctaagtaagtgctag

SEQ ID NO: 193387 - DNA, 1077 bp, synthetic construct
  misc_feature 1..1077: note = Description of Artificial Sequence: Synthetic coding sequence
  source 1..1077: mol_type = other DNA
atgcggacctactggctgcacagcgtgtgggtgctgggcttcttcttatcgctcttctctttgcaggggctgccggtgcgctccgtagatttcaacaggggaactgataatatcaccgtgcggcaaggtgacactgcaatcctgcgctgcgtcgttgaggataagaactcaaaggtcgcctggctgaataggtccgggataatcttcgccgggcacgacaaatggtccttggacccgagggtcgagttggagaaacgacattcactggagtacagtttgcggatccagaaggtcgatgtttacgatgaaggctcgtacacgtgctcagttcaaacgcaacacgaacctaagaccagccaggtttatctcatagtacaagtccctcctaagataagcaacattagctcggacgtcaccgtgaacgagggctccaatgtgacgcttgtgtgtatggccaatggtcgacctgaaccagtgattacatggcgacatcttacccccacaggcagggaattcgaaggggaggaagagtatttggagattctcggcattacgagggaacagagcggcaagtacgagtgtaaggccgccaacgaggttagctctgcggatgtgaaacaggtgaaggtgaccgtgaattatccccctactattactgaatccaaaagtaacgaggctacaaccggtcgacaagcaagcttgaagtgtgaagctagtgcagtgcctgcacctgatttcgaatggtacagagacgacacaaggataaattcggcaaacggcttagagattaagtctaccgaagggcagtccagtctgaccgtgactaacgtgacagaggaacattacggaaactacacatgcgtggccgccaacaaactcggcgtgacgaacgccagcctcgtgctgtttaaacgcgttcttcccacaatcccccatcctatccaggaaatcgggacaaccgtgcattttaagcagaaaggccctgggtctgtccgcggaattaatggatccatttccttggcagtacccctgtggctgctggccgcctcgcttttgtgtctcctctctaaatgttag

SEQ ID NO: 193388 - DNA, 753 bp, synthetic construct
  misc_feature 1..753: note = Description of Artificial Sequence: Synthetic coding sequence
  source 1..753: mol_type = other DNA
atggccgagggcggcgccagcaagggcggcggcgaggagcccggcaagttgcccgagccagctgaggaagagtctcaggtgctgagaggtaccggccattgcaaatggttcaatgtgcgtatgggcttcggatttatttcaatgatcaatcgtgagggctccccactggatattcccgtagatgtgtttgtgcatcagagcaaactttttatggagggctttaggtccctgaaggaaggcgagccagtggagttcacgttcaagaagtccagtaagggtctcgaatctatacgggtaaccggacctggcggcagcccatgcctggggtccgaaagaaggccaaagggaaaaaccctgcaaaagagaaagcctaaaggagaccgctgttataattgtggtggactagatcaccacgccaaggagtgctcgctgcctccccagccaaagaaatgccattactgtcagtcaatcatgcatatggtggctaattgcccacacaagaatgtggcccagccccctgcttctagtcaaggcagacaagaagcagagagtcaaccctgcaccagcacgctgcctagggaggtgggcgggggccacggctgcacatcacctccgtttcctcaggaggctcgtgccgaaatttctgagcgttctgggcggagcccgcaggaggcttccagtactaagtcttcaatagcccccgaggagcaatcaaaaaaaggaccatctgttcaaaaaaggaaaaagacttag

SEQ ID NO: 193389 - DNA, 2250 bp, synthetic construct
  misc_feature 1..2250: note = Description of Artificial Sequence: Synthetic coding sequence
  source 1..2250: mol_type = other DNA
atggaggtggtgcccgccgaggtgaacagcctgctgcccgaggagatcatggacactggcattacacttgtggatgatgattccatcgaagctgtgattgtctcctcgcccatcccaatggagacagagctagaggagatagtcaatatcaattctacgggcgatagcacagcgactccgatttcaacggaacccatcactgtctatagcaaccatactaaccaagtggccgtgaacaccacaattacaaaggcagattctaatactacagtcaaacctgcttttccaagcggactacagaaactgggggcccagacccctgtaactatttccgcaaaccagatcatactgaataaggtctctcagacatctgacttaaagctcggtaatcagaccctgaagccggacggccagaagcttatccttacaactctcggtaaaagtggctccccaatcgtgctggctcttccccacagccagctgccccaagcccagaaggtgactactcaggctcagtctggcgacgctaaacttcctccccagcagatcaaagtggtcactattgggggtaggcccgaggtgaaaccggttattggcgtttcagctttgacacctggaagtcagttgataaatacgacaacccagccatcagtgctccagacgcagcaattgaagaccgtccagattgccaaaaagccacggacccccacctccggcccagtgataacgaaactgatcttcgccaaacctattaattccaaggccgtgactggacagactacccaggtgtcaccccccgtaatcgccggcagagtgttgtcccagtcgacgccagggacacccagcaagactattactattagtgaaagcggggtgatcgggtccactctgaatagcacaacccaaaccccaaataagatcgctataagtccactgaaatccccaaataaggccgtgaaatctactgttcagacgatcaccgtgggtggtgtatcaacgtcccagtttaaaacaatcattccgctcgcaaccgcacctaatgttcagcagatccaggtccccggatccaaattccactacgtacgcctggtgaccgctacatcggcatcttctagcactcaaccggttagtcagaatcctagtacaaatacacagcccctgcagcaagctaagccagtcgtcgttaatacaacccctgtgcgcatgagcgtgcctattgtgagcgcacaagcggtgaaacaagtggtgcccaagcccattaatccaaccagccagattgtgacaacatcacaaccccagcaaagactgatcatgcccgcaactcccttgccacaaattcaacccaatctgaccaacctccccccaggaacagtgttagccccagctccaggcaccggaaatgtgggctacgcggtgctcccggctcagtacgttactcagctgcagcagtcgagctatgtgagcatagcgtcaaattctacgttcactggaaccagtggaattcagacgcaggccaggctgccatttaatgggatcatcccctccgaatcagccagcagaccacgtaaaccttgcaactgtacaaaatctctgtgtctgaagctctattgcgactgcttcgctaacggggagttttgcaacaattgcaattgcactaactgctacaacaacctagaacacgaaaatgaaagacaaaaggccattaaggcctgtcttgaccgaaacccagaggcttttaaaccaaaaattgggaagggtaaggaaggagagagcgaccggagacactcaaaaggatgtaactgcaagaggtccggatgcctgaaaaattactgcgagtgctatgaggccaagatcatgtgctcatcaatttgcaagtgcattgggtgtaagaacttcgaagagagccccgaacggaagacactgatgcatcttgcagacgctgctgaagtgcgagtgcagcagcaaaccgcagctaagaccaaactgagttctcagatcagcgatctgctgacgcgccctacccccgcactgaatagcggaggcggcaagttgccctttacatttgtaacaaaggaagtggctgaggctacgtgtaactgtctactggcgcaggctgaacaagcagacaagaaaggaaaaagcaaagctgcagctgagcgcatgattttggaggagtttgggcggtgcctgatgtccgtgatcaatagcgcaggaaaagcaaagtcagatccgtgtgctatgaactgttag

SEQ ID NO: 193390 - DNA, 732 bp, synthetic construct
  misc_feature 1..732: note = Description of Artificial Sequence: Synthetic coding sequence
  source 1..732: mol_type = other DNA
atggaggtggtgcccgccgaggtgaacagcctgctgcccgaggagatcatggatacgggcatcaccttggtggatgacgactcgatagaggctgtgatagtcagtagccccatccctatggagactgagctggaagagatcgtgaatatcaattctactggggactccaccgccacacctatatctacagaacccatcactgtgtactccaatcataccaatcaggtggccgtgaatacgacaattactaaagctgattctaacacgactgtgaaacccgcgtttccatcgggactgcagaagctgggcgcgcaaacgcccgtgaccatttcggcgaaccagataattctcaataaggtaagtcagacatcggacctgaaacttggaaatcagacactcaaaccagacggtcagaaactgattcttacaacactcggtaagagcggtagtccgatcgtcctggccctgccacatagtcagctgccccaggctcagaaagttaccacgcaggcacagtctggtgacgctaaacttcccccacagcagatcaaggtggtgaccatcggcgggaggccggaggtgaagccggttattggcgtgtccgcacttactcctggcagccagctgattaacaccactacacaaccgagcgtattacagacccaacagttgaagacagttcaggtgggtttctttcacagcctgctccctgagctgcatcagagaccctag

SEQ ID NO: 193391 - DNA, 1983 bp, synthetic construct
  misc_feature 1..1983: note = Description of Artificial Sequence: Synthetic coding sequence
  source 1..1983: mol_type = other DNA
atggaggtggtgcccgccgaggtgaacagcctgctgcccgaggagatcatggacactgggatcacactagtcgacgacgactccattgaggccgtgattgtctcctcgccgattcctatggagactgaacttgaggagatagttaatatcaactcaaccggagacagcaccgccacgccaatttcgaccgaacctatcacagtatatagcaatcacacgaatcaggtggccgtgaatacaacaattaccaaggccgacagcaatacgaccgtgaaacccgcatttccttctggcttgcagaaattaggcgctcagacccctgtcactatcagcgccaaccagatcattctcaataaagtttcccagacaagcgatctcaaacttggtaaccaaacacttaaacctgatggccagaaactgattttaacaaccctcggaaagagtgggtcccctatcgttctggccttgcctcatagccagctgcctcaggcacagaaggttacaacccaggctcagtccggggatgccaaactgccaccgcagcagatcaaggtcgtgaccattggcggcaggcccgaggtgaaacccgtgattggggtgagcgccctgactccagggtctcaactaataaacacgactacacagccatccgtcctgcagacccagcagctgaaaactgtacaggcagtcaaaagcaccgtccaaactattaccgtgggtggggtctccactagccaatttaaaaccatcattccgctggcaacggctccaaacgtacagcagattcaggtgcctggctctaagtttcactacgtgagactggtaactgcaacctctgcttctagtagtactcagcccgtcagccagaatccctctaccaatacccaacctttacaacaggctaagccggttgttgtcaacacaacaccagtcagaatgtctgtccccattgtgtctgcacaggccgtgaagcaggtggttcccaagcctattaatccaacctcccagatcgtgacaacgtcccagccccagcagcggcttatcatgccggccacacccctaccccagatccagccgaatttgacgaacttaccacccggtaccgtactggccccagcccccggcaccgggaatgtaggttatgccgtgttgcctgcccagtacgtgacacagttgcaacaaagcagctatgtctctattgccagtaattcaacgtttacaggcactagcggaatccagacccaggctagactgcctttcaacggcattattccttctgaaagtgcttcccgcccaaggaagccatgcaattgtaccaaatctctgtgcctcaaactctactgtgactgctttgccaatggcgagttttgtaataactgtaactgcaccaactgttacaataatctagagcacgaaaatgaacgccagaaggcaatcaaagcgtgtttggaccgcaacccggaggcattcaaaccaaaaattgggaaagggaaggaaggggagagtgaccgccgtcatagtaagggttgtaactgcaagcgctctggctgcctgaagaactactgcgagtgctacgaagctaagattatgtgtagtagcatttgcaagtgcattggctgcaaaaattttgaagagtcgcctgagagaaagaccctgatgcaccttgctgatgcggcggaagtgagggttcagcagcagaccgccgctaagacaaaactgtctagccagatttcagatttactcacaagaccaactcccgcattaaatagcggaggggggaaactcccatttacatttgttaccaaggaggtggctgaggctacttgtaattgtctgctggcccaagccgagcaggcggataagaaaggtaaaagcaaggcagctgcagagcgtatgattctagaggaatttgggcgctgcctgatgagcgtcattaactcagccggcaaagcgaaatcggacccgtgtgccatgaactgctag

SEQ ID NO: 193392 - DNA, 1587 bp, synthetic construct
  misc_feature 1..1587: note = Description of Artificial Sequence: Synthetic coding sequence
  source 1..1587: mol_type = other DNA
atggaggtggtgcccgccgagatcgccaagaagccccggacccccaccagcgggccggtcattaccaaattgattttcgcgaagcctatcaacagtaaggcggtgaccggacagaccacgcaagtctcccctcccgtaatcgctggccgggtactgtctcaatctacccccggtactccttcaaagactatcaccatatctgagtctggggtaatcgggtctacccttaactctaccacccaaaccccaaataagattgccatttcccctcttaagtcccccaacaaggccgtgaaatctacagtgcagacaatcaccgtggggggcgtatccacttctcaattcaagaccataattcccctggctacagcacctaatgttcagcagattcaagtgccggggtctaagttccattatgtgcggctcgtgacggccaccagcgcctcttcctcaacacaacctgtatcccagaacccaagcactaacactcaacccctccagcaggctaagccggtcgtggtgaacaccacccccgtgcgcatgagcgtccctatcgtatccgcacaggcagtcaagcaggtggtgcctaagccaatcaaccctacgtctcaaatcgtcaccacctcccagccacaacaacggcttataatgccagctacccccctcccccaaatccaacccaacctcaccaatctgccacctggaactgtgctggctcctgccccggggacaggtaacgtaggctacgccgttctgccagcacagtatgtgactcagcttcagcaaagctcttacgtgtctatcgcaagtaactcaacttttaccggcacctccgggatacaaacacaggcaagactcccattcaacggcataataccttctgagtctgccagtcgccctcgtaagccttgcaactgtacaaaaagcttatgcttgaagctctattgtgactgcttcgcaaacggcgaattttgcaacaattgtaactgtaccaattgctataacaacctggagcacgagaacgaacggcagaaggcaatcaaggcttgcctggatagaaaccctgaggccttcaagccaaaaattggcaagggcaaggaaggggaatccgacagacgccacagtaaaggatgtaattgcaaacgatcaggctgtctcaagaattattgcgaatgttacgaagcgaagatcatgtgctcaagtatctgtaaatgcatcggatgtaaaaattttgaagaatctcccgaacgcaagactctgatgcacctggctgatgcagccgaggtcagagtccagcagcagactgctgccaagaccaaactctctagtcaaattagcgacctcttgacaaggcctacgcccgcactgaactcaggcggtggtaaactgcctttcacttttgtgactaaggaggtcgccgaggccacctgcaattgcctgttggcccaggcagagcaagccgataaaaagggaaaatcaaaagccgctgccgaaaggatgatactggaggagttcggacggtgtctgatgtcagtaataaacagcgcaggcaaagccaaatctgatccgtgtgcgatgaattgctag

SEQ ID NO: 193393 - DNA, 1587 bp, synthetic construct
  misc_feature 1..1587: note = Description of Artificial Sequence: Synthetic coding sequence
  source 1..1587: mol_type = other DNA
atggaggtggtgcccgccgagatcgccaagaagccccggacccccacgagcggtccagtgattaccaaacttatttttgcaaagcctataaactccaaggccgttactggacagactacacaagtcagtccccctgtaatagcaggtcgcgttctaagccagagcacaccgggcaccccttccaagaccattaccattagtgaatccggagtgattggctccactttaaattccacgacccagactcctaataagatagccatctcccccctgaagagtcccaacaaagccgtgaaatctaccgtccagacaataactgtgggcggggtctccacctctcagttcaagactataatacctctagccacggcccctaacgtgcagcagatccaggtccctggttccaagttccactacgtgcgattagtcacagcaacatcagcctcgtcttctacccaaccagtctctcagaatccatcaacgaacacacaaccgctccagcaagccaaacccgtggtggtaaacacaacccctgtccggatgtccgtacctattgtctcagcccaggccgtgaagcaagtggtccccaaaccaataaaccctacatcccaaattgtgactacaagtcaacctcagcagagactaatcatgcctgccacccccctcccccagatccaacccaatcttaccaatctaccacctggcactgtgctcgcaccagctcctggcactgggaacgtcggatacgccgttctgcctgcccagtatgtaacgcagttacagcaatccagttacgtctctattgcctccaatagtaccttcaccggtaccagtgggatccaaacccaggcgcggttgcctttcaatggcataatcccaagcgaatctgcaagcaggcctcgaaaaccgtgtaactgtaccaaatccttgtgcctaaagttatattgcgattgttttgccaacggcgagttttgtaataactgcaattgtactaattgctacaacaatctcgaacacgagaatgaacggcagaaagctattaaagcttgtcttgatcgcaaccccgaggctttcaagccaaagatcggcaaggggaaggagggtgaatctgacagaagacattctaaaggttgcaattgcaagcggagcggatgtctgaaaaactactgtgaatgctacgaggctaaaattatgtgttcctccatctgtaaatgtataggttgtaagaatttcgaggaatcccctgaacgaaaaactctgatgcatctcgccgatgccgccgaggtgcgcgtccaacaacagaccgccgcgaagacgaagctgtcatcacaaatcagtgacctgctgacacggcccactccagctctgaatagcgggggtggcaaactgccttttaccttcgtaacgaaagaagtggctgaggccacgtgcaattgtctgctggcacaagctgagcaggcagacaaaaagggaaaatctaaggctgccgccgagcgaatgattctggaggaattcggacggtgcctgatgtcagtgatcaactcagcaggtaaagcgaagtccgacccatgtgccatgaattgctag

SEQ ID NO: 193394 - DNA, 2250 bp, synthetic construct
  misc_feature 1..2250: note = Description of Artificial Sequence: Synthetic coding sequence
  source 1..2250: mol_type = other DNA
atggaggtggtgcccgccgaggtgaacagcctgctgcccgaggagatcatggacaccggaatcactctggtcgatgacgactccatagaagccgtgatagtgtcctctcctatcccaatggagacggaattggaggagatcgtgaacattaatagcaccggcgatagcaccgcaaccccgatcagtaccgagcctatcactgtctattccaaccacactaatcaggtggccgttaacacaaccatcaccaaggccgactcgaacacaacggtaaaaccagctttccctagcggcctgcagaagttgggtgcccagactcccgtgaccatctctgccaaccagatcatcctgaacaaggtgtctcaaacgtctgaccttaagcttggcaaccagaccctgaaaccagacggacaaaagctgatactgaccaccctggggaaaagtgggagccccatcgttctcgccctgcctcactcccagctgccgcaggcacagaaggtgacaactcaggcccagagcggcgacgccaagttacctccgcaacagataaaggttgtgactataggggggcgacctgaagtgaagccagtaataggggtgtctgccctgaccccaggtagtcagctcatcaatacaaccactcaaccaagtgtgctgcagacacagcagctgaagacggtacaaatcgcaaagaaaccaagaactcctacctcaggacccgtgattacaaagcttatctttgccaaacccatcaactcaaaggccgtgacagggcagaccacacaagtgagtcctccagtaattgctgggagggtgctgagccagagcacccctgggactccatccaaaacaattacaatttctgagtccggcgtcattgggtccaccctcaattctaccactcagacccccaacaaaatcgccatttcccctctcaagtccccaaacaaggcagtgaagtccactgtgcagacaataacagtgggaggagtgagtacttctcaattcaagacaataattcctcttgccacagcaccgaacgtacagcagattcaggttccaggctctaagttccactatgtgcgactcgtgacagcgacctctgctagtagttctacccagcctgtttctcaaaacccctccaccaacacccagcccctgcagcaagctaagcccgtggtggtgaacactacacctgtccgtatgtcagtgccaatcgtctccgcgcaggccgtgaaacaggtagtcccgaagcctattaaccctacatctcagatcgtgacaacctcacaacctcagcagcgcctgattatgccggcgacaccactgccacagatccagcctaatctgaccaatctcccacccggaacggtgttggccccagctcccggcaccggcaatgtggggtacgctgtgctgcccgctcagtatgtgacccaacttcaacaaagcagctatgtcagtatcgcctctaacagcacatttacgggaacgtctggaatccagacacaagcacgtctgccattcaacggcatcatcccaagcgagtcagcttctcgtcccaggaagccctgtaattgcactaagagcctctgcctgaagttgtactgcgactgctttgccaacggtgaattctgcaataactgcaattgcaccaactgttataataacctggaacatgaaaatgaaaggcaaaaggcaattaaggcctgcctggatcggaaccccgaggcattcaagcctaaaattggcaagggcaaggagggtgaatccgaccgacgtcactccaagggctgtaattgtaaacgatcaggttgtctgaaaaattactgtgaatgttacgaggccaagatcatgtgctcttccatctgtaagtgtataggctgcaaaaacttcgaggagagtcccgaacggaagacgttgatgcaccttgccgacgcggcagaagttcgtgttcaacagcaaaccgccgccaagaccaaactttcgtcccagatctctgaccttctcacccggccaacccctgctcttaattcaggcgggggcaaattaccctttacatttgtcaccaaagaggtggccgaggctacttgtaactgcctacttgcccaggccgagcaggccgacaagaaagggaagtcaaaagcagctgcagaacgcatgatcctcgaagaattcggacggtgcctgatgtctgtcattaatagtgccgggaaagcaaaaagcgatccttgtgctatgaattgttag

SEQ ID NO: 193395 - DNA, 1587 bp, synthetic construct
  misc_feature 1..1587: note = Description of Artificial Sequence: Synthetic coding sequence
  source 1..1587: mol_type = other DNA
atggaggtggtgcccgccgagatcgccaagaagccccggacccccaccagcggaccagtcattaccaagctcatcttcgctaagcccatcaattccaaagctgtgacaggccaaacgactcaagtgtcaccccctgtcatcgcagggcgcgtactgtcacagtcaacccccgggaccccctctaagacaattacaatttccgaatccggcgtcatcggatcaaccttaaacagcaccacccagaccccaaacaagatcgctatctcccctctgaagagtcctaacaaggctgttaaatcaactgtccagacaatcaccgtcggaggcgtcagcacatctcagtttaaaactataatacccctcgccactgcccctaatgtgcagcaaatacaggtccccggctcgaagtttcattacgtcaggctggtcactgccactagtgcttcctcttctacccagccagtttcccagaatccctctacaaatacacagccgcttcagcaggccaagcctgtggtggttaataccacaccagttcgcatgtcagtgccgatcgtctcagcccaggcagttaaacaggtcgtgccaaaacccatcaacccgactagtcagattgtgaccaccagccaacctcagcaaagattaatcatgccagccactcctctcccccagattcagccaaacctgacaaacctcccccctggcaccgttctggctcccgcccccggaactggcaatgtgggatacgctgtcctccctgcacaatacgtgactcagcttcagcagtctagctacgtctccatcgcttctaactcaacgtttacaggtacaagtggtattcagacgcaggcccgcctcccctttaacggcattattcccagtgagtctgcatcgagaccgcgcaagccctgcaactgcacaaagagtctgtgtttgaaattgtactgtgactgcttcgccaatggcgagttctgcaataactgtaattgtacaaactgttataataatcttgaacacgaaaacgagcggcaaaaggctatcaaggcatgcctagaccgcaacccagaggccttcaagcctaaaatcggcaagggcaaagagggagagtcggacaggagacactctaaaggctgtaactgtaaacggagtgggtgcctgaagaattactgcgaatgttacgaggcaaagataatgtgtagcagtatatgtaagtgtatcggatgtaagaacttcgaagagtcacccgaacggaaaaccctgatgcacttggcagacgccgcagaagtcagagttcagcaacagactgcagccaaaacaaaactgtccagtcagattagtgacctgttgaccaggcccactccggcactcaattcgggcggaggaaagctgcccttcacctttgtcacaaaggaagtggccgaggcgacctgtaactgcttgctggctcaagcggaacaggccgataagaaagggaaaagtaaggccgctgctgaacggatgattcttgaggaatttggccgctgtttaatgtcggtcatcaactcagcgggcaaagcaaaatcagacccctgcgcaatgaattgttag

SEQ ID NO: 193396 - DNA, 2025 bp, synthetic construct
  misc_feature 1..2025: note = Description of Artificial Sequence: Synthetic coding sequence
  source 1..2025: mol_type = other DNA
atgtggcacgaggcccggaagcacgagcggaagctgcggggcatgatggttgactacaagaagcgagccgaaaggagaagagaatactatgagaagattaagaaagatcccgcgcagttcctacaggtccatggtcgagcctgtaaagtgcatttggatagcgctgtcgccctggcggccgaatctcccgttaatatgatgccttggcagggagacaccaataacatgatcgatagattcgatgttcgggcgcatttggaccatattcccgactatacgcctccactgctgacgactataagtcctgagcaagagtctgatgaaagaaagtgtaattacgaacggtacagggggctggtgcagaacgacttcgctggcatctccgaggaacagtgtctgtaccagatctatatcgatgaattgtatggcggtctgcaaagaccaagtgaagacgagaagaaaaagctggctgaaaaaaaagctagtattggttacacctatgaggacagtactgtagcgaaggttgagaaagccgcagagaagcccgaggaggaagaatcagccgcagaggaagagtccaatagcgacgaagatgaggtcattccagacattgatgtggaggtcgatgtggatgaactgaatcaggaacaggtcgccgatctcaataaacaggccacaacatacggaatggcagacggcgatttcgtcaggatgctgcgcaaagataaagaagaggccgaagctattaaacacgcaaaagcacttgaggaggaaaaggccatgtactctggacggagatctcgcagacagcgccgggagtttagggaaaaacgtctgagaggtaggaagatttctccaccgtcgtatgccagaagagacagcccaacatatgacccatataaacggtcacccagtgagagctccagtgaaagcagatcgcgatcccgctcaccaactcccggtcgcgaggagaaaatcacattcattacaagctttggaggcagtgacgaagaggcggctgctgcagcagcagcagctgccgcaagcggggttaccaccggcaagccccccgcaccgcctcagcccggtggccccgcgcccgggagaaacgctagtgctcgtaggaggtcttctagcagtagctcgtcttcttccgcctcgaggacctcttcctccagatccagttctcggtcctcttccagatccagacgggggggcggctattatagatccggccgccacgctcgctcccggagtaggtcctggtcacgctcacgctcccgttcaaggagatactctaggtcacgttctagaggaagacggcactccggaggcggcagcagagatggacatagatactccagaagtccggcaaggagaggtgggtatggccctcgcagacgctctcgttcaaggagccacagtggcgatagatataggcgaggtgggaggggtctgcgccaccatagctcctctcggagtagatctagctggtccctgtcgccctctaggtcaaggagcctgactcggagcaggagccatagtccttcaccctcccagtctcgttcacgaagtcgtagccgttcccaaagtccctctcccagtcctgcacgtgagaagctgactcggccagccgctagccccgctgtcggcgaaaaactgaagaagacggaaccagcagccggcaaagagaccggtgctgcaaaacctaagctgacacctcaggagaagctaaaactgcggatgcagaaagcactaaatcgccagtttaaggccgataagaaggccgcccaggagaagatgatacagcaggaacatgaaaggcaggaaagggaggacgagctgcgtgctatggctagaaagatccggatgaaggaacgcgaacgcagggagaaagagcgcgaggaatgggagagacaatatagcaggcagagccgcagccctagtcccaggtacagtcgcgaatactccagtagcagaaggcggtctcgaagtcgctccaggtccccacactataggcattag

SEQ ID NO: 193397 - DNA, 594 bp, synthetic construct
  misc_feature 1..594: note = Description of Artificial Sequence: Synthetic coding sequence
  source 1..594: mol_type = other DNA
atggccgccctgggcgagcccgtgcggctggagcgggacatctgccgagctattgaattgctcgaaaaactacaaaggagcggcgaggtgcctccccagaaattacaagcattgcagcgggtcctccagtccgagttttgcaatgcagtgcgcgaggtgtatgagcatgtgtacgagacagtggatatcagcagctctcctgaggtacgggccaacgctacggccaaggccaccgtagccgctttcgcggctagtgagggacacagtcacccgcgtgttgttgaactgcctaagacggaggagggcctcggttttaatattatgggtgggaaggagcagaactcaccaatctacatttctagaatcatcccaggaggaattgctgatagacatggcggcctaaaacgcggcgatcagcttctgagtgtgaacggggtctctgtcgagggagagcatcacgaaaaagccgtggaattgcttaaagcagcacagggcaaagtgaagctggttgtccgctacactccaaaggtccttgaagagatggagagcagatttgagaagatgagaagtgccaagagaaggcaacagacgtag

SEQ ID NO: 193398 - DNA, 759 bp, synthetic construct
  misc_feature 1..759: note = Description of Artificial Sequence: Synthetic coding sequence
  source 1..759: mol_type = other DNA
atggaggaggccatcctggtgccctgcgtgctgggcctgctgctgcttccaattcttgctatgctgatggccctgtgcgttcattgccatcggctgcctggcagctacgattctacgtcatccgactcgctgtaccctagaggaatccagtttaaaagaccacacacagtcgctccatggccacctgcctaccctcccgtcacctcctatcctcccctgtcacaacctgatcttctcccaattccacgatcaccacagccacggcgagactctgatggtgctaatagcgtagcctcatatgagaacgaaggcgcatcaggtatccgcggagcacaggccgggtggggcgtttggggcccaagctggacacgtttgactccggtttctctaccaccggaaccggcctgcgaagatgctgatgaggacgaggatgactatcataatcccggatacctcgtggtcctgcctgactctaccccagctacctcgacggctgccccatctgctcccgcattatccactcccggaattcgcgatagcgcattctccatggaatcgatcgatgactacgtaaatgtgcctgagagcggagaatccgccgaggctagcttagacggctctagagagtacgtgaatgtgtcccaggaactgcatcccggagccgcaaagaccgagcctgcggctctgagtagccaggaggctgaagaagtcgaggaagaaggagcccctgactacgaaaacctgcaggaacttaactag

SEQ ID NO: 193399 - DNA, 789 bp, synthetic construct
  misc_feature 1..789: note = Description of Artificial Sequence: Synthetic coding sequence
  source 1..789: mol_type = other DNA
atggaggaggccatcctggtgccctgcgtgctgggcctgctgctgcttccgatcctcgccatgctcatggccttgtgcgtgcactgtcaccgccttccaggaagctatgatagtacgagtagtgactcactgtaccccaggggcatccagtttaaacggccccacaccgtagctccctggccgccagcctatcctccagtaacctcataccccccgctgtcgcagccagaccttctcccaatacccaggagccctcagccactgggaggctcccatcgcactccctctagccgccgggactcagacggcgccaattccgtggcctcttatgaaaacgaaggggcctcaggaatcaggggagctcaagctggctggggagtctggggtccctcctggactcgtctgaccccagtgagtctccctccagaacccgcttgtgaagacgcagatgaggacgaagacgactaccacaaccccggctatctggtcgtgttgccagattctactccagccaccagcaccgccgcaccctccgctcccgccctcagtacccccgggattcgggactcggctttctccatggagagcatcgacgactatgttaatgtccccgagagcggagagtctgctgaggcatctctggatggatccagagagtacgtaaatgtcagtcaggagttgcatccaggggccgccaagacagaacccgcagcattgtcaagtcaggaggccgaggaagtggaagaggagggtgctccagactacgaaaaccttcaggagctgaactag

SEQ ID NO: 193400 - DNA, 702 bp, synthetic construct
  misc_feature 1..702: note = Description of Artificial Sequence: Synthetic coding sequence
  source 1..702: mol_type = other DNA
atggaggaggccatcctggtgccctgcgtgctgggcctgctgctgctgcccatcctcgctatgctgatggctctgtgcgtgcactgtcatcgactacctggctcctatgatagcacctcatctgactcactgtaccctcggggcatccagtttaagcggccccacacggtggccccttggcccccggcttacccacccgtaacatcttacccacctttgtctcaacccgatcttctgcccattccaaggagtccacagccccttggcggcagccacaggacccccagcagtcgcagagatagtgacggcgcgaattccgttgcgagctatgaaaacgaggaacccgcttgtgaggacgcggacgaggatgaggacgactaccataatcccggttatctcgtggtgctgcctgatagtacgccagctaccagcacggcagcaccctctgccccagctttgagtacacccgggattcgcgactcagctttctccatggagtctattgatgattacgttaatgtgcccgagtcgggagaaagcgctgaggcttctctggatggtagccgagagtatgttaacgtctcccaggagctgcacccaggcgccgcaaaaaccgagcccgccgccctcagctcacaggaggctgaggaggtcgaagaagagggtgcaccagactacgaaaacttacaggagttaaattag

SEQ ID NO: 193401 - DNA, 810 bp, synthetic construct
  misc_feature 1..810: note = Description of Artificial Sequence: Synthetic coding sequence
  source 1..810: mol_type = other DNA
atggaggccaccgccgccagctggcaggtggccgtgcccgtgctgggcggggcatcaagacctctggggccacggggtgccgcttcactcctcagggcccccttacagatggaggaagctatcctagtcccttgtgtgcttggtttgctgcttttgcctatattggctatgctcatggcgctgtgtgtgcactgtcaccggctccccgggtcctacgactctactagctctgacagtctgtaccccagggggattcagttcaagcggcctcatacggtggccccctggcccccagcctaccctccagtgacatcttacccgcccctgtctcaaccagacctgctcccaataccccgctccccacagcctttaggcggtagccaccgaactccctcctctcggcgtgactctgacggggccaactcggtggcttcatacgagaacgaggagccagcctgtgaggatgccgacgaggatgaagacgactatcataaccctgggtacctcgtggtcctccctgactctactccagcaactagcaccgccgcaccttccgcccccgctctcagcactcccggcatcagagattcagccttttcaatggagtcaattgacgactacgtaaatgtgccagaatcaggcgaatccgccgaggcctctctggatgggtcgagagagtacgtgaatgtgtctcaggaactgcacccaggggctgcaaagaccgagcctgctgccctgtcctcccaggaggcagaagaagtggaggaggagggagccccggattacgaaaacttacaggagcttaattag

SEQ ID NO: 193402 - DNA, 699 bp, synthetic construct
  misc_feature 1..699: note = Description of Artificial Sequence: Synthetic coding sequence
  source 1..699: mol_type = other DNA
atggaggaggccatcctggtgccctgcgtgctgggcctgctgctgctgcccatcctcgctatgttaatggcgctctgcgtgcattgccacagactacccggatcctacgactccacgtcttctgactcactctacccccggggcatccagttcaaacgtcctcacacagtcgcgccatggcctcctgcatatcctcccgtgacatcctaccctccgctatctcagccagacctcctcccgattccctctccacagcccctgggggggtctcatcggaccccctcttcaaggcgcgattcagacggcgctaactctgtggcctcatacgagaatgaggaacccgcctgtgaagacgccgatgaagatgaggatgactatcataaccctggatatttggtcgtgcttcctgattctacacctgccacaagtaccgccgcaccaagtgccccggctctgagcaccccagggatcagggactctgcttttagcatggaaagtattgacgattacgtgaatgtgccagaaagtggcgagtcagccgaagcctcccttgatggatctagagagtatgttaatgtgtcccaagagcttcaccccggcgccgccaaaacagagccggctgccctgtcttcgcaggaggctgaggaggtggaggaagaaggggccccggactatgaaaacttacaggagctgaattag

SEQ ID NO: 193403 - DNA, 732 bp, synthetic construct
  misc_feature 1..732: note = Description of Artificial Sequence: Synthetic coding sequence
  source 1..732: mol_type = other DNA
atgagcagcggcaccgagctgctgtggcccggcgccgccctgctggtgctgctgggagtggcggcatctttgtgcgtcagatgctctcgcccgggcgccaagcgaagcgagaaaatataccaacaaaggagcctgcgagaagatcagcagagtttcactgggtccaggacttattcccttgttgggcaggcttggcccggccctcttgccgacatggccccaacgaggaaagacaaactacttcagttctatccgagtttggaagatccagcttcaagcagatatcagaacttcagtaaaggatctcgccacggcagcgaggaagcctatattgaccctattgcgatggagtactataattggggccgtttttctaaacctcctgaagatgacgacgctaattcctatgagaacgtcctgatctgcaaacagaaaacaaccgaaaccggagcgcagcaggagggaattggtgggttatgtaggggggatctgtccctgagcctggctctgaagacaggacccactagtgggctctgccccagcgcttcacctgaggaagatgaggaatcagaggactaccagaatagtgctagcattcatcagtggcgcgaatctcgaaaggtaatgggacagctgcaacgagaagcttctcctggcccggtgggcagcccagatgaagaggatggagagccagactatgtaaatggggaggtggcagcgacggaggcctag

SEQ ID NO: 193404 - DNA, 732 bp, synthetic construct
  misc_feature 1..732: note = Description of Artificial Sequence: Synthetic coding sequence
  source 1..732: mol_type = other DNA
atgagcagcggcaccgagctgctgtggcccggcgccgccctgctggtgctcttgggtgttgcagccagtctctgcgtgcgctgttctagacctggcgccaagagatccgagaagatctaccaacagagaagccttcgcgaggatcagcaatccttcaccggaagcagaacatactcactggtgggacaagcatggcccgggccattagcggatatggcccctactaggaaggacaaactcctccagttttacccctcactggaggatccagcttcttcaagatatcagaatttctcaaaaggatctagacatggctccgaagaggcatatatagacccaatcgcaatggagtattacaattgggggcgatttagcaaaccccccgaagatgatgatgcaaacagttatgagaacgttttaatttgtaagcagaaaacaaccgagactggcgcgcaacaggaagggatcggagggctttgtcgtggggacctgagcctgtccctggctctgaaaacgggaccaacaagcggattgtgccctagcgcctcccctgaagaagacgaagagtctgaagactaccagaattcagcgtctatccatcagtggcgcgaaagtagaaaagtcatgggacagctccagcgagaagcgtccccgggccctgtgggtagccccgacgaggaagatggcgaacccgactacgtgaatggggaggtggccgccacagaggcttag

SEQ ID NO: 193405 - DNA, 195 bp, synthetic construct
  misc_feature 1..195: note = Description of Artificial Sequence: Synthetic coding sequence
  source 1..195: mol_type = other DNA
atgagcagcggcaccgagctgctgtggcccggcgccgccctgctggtgcttctaggcgtcgccgcctccttatgtgtgaggtgcagccgcccgggagccaaaagaagcgaaaaaatttaccagcagcgctcactgcgagaggatcaacagagtttcacgggttcacggacatactccctcgttggccaggcctag

SEQ ID NO: 193406 - DNA, 732 bp, synthetic construct
  misc_feature 1..732: note = Description of Artificial Sequence: Synthetic coding sequence
  source 1..732: mol_type = other DNA
atgagcagcggcaccgagctgctgtggcccggcgccgccctgctggtactgcttggggtcgccgcctccctgtgcgtgcgctgtagcagacccggggccaaacgaagtgagaaaatctaccagcagagatcactccgggaggatcagcagtcctttacaggcagtaggacttattcacttgtaggacaggcctggcctggcccacttgctgatatggcgcccactcggaaagataaactgctccaattttatccttcactggaagatcctgccagctcgcgctaccagaacttctccaagggttcaagacatggatctgaggaggcctacatcgatccaatcgcaatggaatactacaactgggggcggttctcaaagcccccagaggatgatgacgctaattcttacgaaaacgtccttatttgcaagcagaagaccactgagactggagcccagcaggagggtattggcggattatgtcgcggcgatttatctctcagccttgcccttaagaccgggccaacatctgggctgtgcccctccgcctctccggaggaagacgaagagtccgaagactaccaaaactccgcttctatccaccaatggcgggaatccagaaaggtgatggggcagttgcagcgcgaagcatcacccggcccagtaggatcaccagacgaggaggatggggaaccagactacgtgaacggggaggtggccgctaccgaggcgtag

SEQ ID NO: 193407 - DNA, 732 bp, synthetic construct
  misc_feature 1..732: note = Description of Artificial Sequence: Synthetic coding sequence
  source 1..732: mol_type = other DNA
atgagcagcggcaccgagctgctgtggcccggcgccgccctgctggttcttcttggggtcgccgccagtttgtgcgtgaggtgttcgaggcctggggccaaaaggagcgagaagatttatcagcagcgatcactccgcgaggatcagcagagctttacaggatccagaacctactccctggtaggacaggcctggcccggcccacttgcggatatggcacccactaggaaggataaactgctccaattctaccccagcctcgaggatccggcaagctctagataccagaattttagcaaaggaagtaggcatggctcagaggaagcatacattgaccccatagcaatggagtactataactggggacgattctccaagcctcccgaagacgatgacgccaattcatacgaaaacgtgcttatttgtaagcagaagaccactgagacaggagcccaacaggaaggcataggaggcctttgcagaggggacctgagcttgtcactggcacttaaaacaggtcccacttccggactgtgccccagcgctagccccgaagaagatgaggaaagcgaggactatcagaacagtgcatcaatccatcagtggcgggagtcccggaaggttatgggccagctgcagcgcgaggctagcccagggccggttgggtctcccgacgaggaagatggagagccagattacgtaaacggcgaagtcgcagcaacagaggcctag

SEQ ID NO: 193408 - DNA, 177 bp, synthetic construct
  misc_feature 1..177: note = Description of Artificial Sequence: Synthetic coding sequence
  source 1..177: mol_type = other DNA
atgagcagcggcaccgagctgctgtggcccggcgccgccctgctggtgctccttggcgtagctgcgagcttgtgcgtgaggtgcagcagaccaggtgccaaaagatctgagaaaatttatcagcagcgctccctcagggaagaccagcagagttttacgggatcccgaacctactag

SEQ ID NO: 193409 - DNA, 303 bp, synthetic construct
  misc_feature 1..303: note = Description of Artificial Sequence: Synthetic coding sequence
  source 1..303: mol_type = other DNA
atgagcagcggcaccgagctgctgtggcccggcgccgccctgctggtgctgctgggggttgccgcttcactgtgtgtgaggtgctctcgtcctggcgctaagcggagcgaaaaaatatatcaacagagatcgctcagggaggatcagcagagtttcacaggttctcggacctatagtctggtggggcaggcctggcctggcccgttagctgatatggcgccaacacgaaaagataaactcctccagttctacccttcacttgaggatcctgcgtcctcaaggtaccagaacttttcaaaatag

SEQ ID NO: 193410 - DNA, 1704 bp, synthetic construct
  misc_feature 1..1704: note = Description of Artificial Sequence: Synthetic coding sequence
  source 1..1704: mol_type = other DNA
atgcggcccgacagccccaccatggccgcccccgccgagagcctgagaaggagaaagaccgggtactcagatcctgaaccagaatctccgccggcaccaggtcgtgggccggcgggatctcccgcccacctacacactggcaccttttggttaacccggatcgtgcttcttaaggccctcgccttcgtttatttcgtggccttcttggtggcttttcaccaaaataaacaactcattggcgacaggggactgctgccctgcagagtatttttaaagaattttcagcaatactttcaggaccgaacgagttgggaggtgtttagttatatgccaaccatcctgtggctgatggactggtctgacatgaacagtaacctggacctgctggctttattgggcctcggcatttccagcttcgtccttattactggttgcgcgaacatgcttctgatggccgccttgtggggactgtacatgtctctcgtgaacgtcgggcatgtgtggtactcattcggttgggagtcacagttactggagactggattcttggggatcttcctgtgtccactctggactttaagccgacttccgcagcatacaccaacaagtcggatcgtcctatggggattcagatggcttattttcaggatcatgctgggtgctggccttatcaaaatcagaggcgataggtgttggagggatcttacttgcatggatttccactatgaaacccagcccatgccaaaccccgtagcctattatctccaccacagcccttggtggttccatcggttcgagacgctatcgaatcatttcatcgaactgcttgtgcccttcttcctatttttgggcaggagagcctgcattatccacggcgtcctccagatccttttccaggccgtcttgattgtatccggaaacctgtcttttctgaactggttgacaatggtgcccagtctcgcatgcttcgacgatgcgacactgggttttctgttcccctctggccccggatctctcaaggaccgcgtgcttcaaatgcaaagagatatacggggggcgaggcctgagccaagattcggctctgtggttcgcagagctgctaatgtaagccttggggtcctcttggcctggctcagcgtaccagtggttctgaacttattatcttctcgccaagttatgaatacccactttaattctctgcacattgtcaatacgtatggcgcgtttgggtcaatcacaaaggagagggctgaggtcatcttgcaaggtacagctagctccaatgcgtccgccccggacgccatgtgggaagattatgaattcaaatgcaaaccaggcgacccctcccggagaccatgcctgatctccccttatcattatcgcttggattggctgatgtggttcgccgccttccagacctacgagcataacgactggataatccatctcgcaggaaagctcttagccagtgacgccgaggctctgagcctgctggcccataacccctttgctgggagacctccaccccggtgggttcggggtgagcattataggtataaattttccagaccaggcggcaggcacgccgcagaagggaagtggtgggtcagaaagaggattggagcttacttcccaccactgtctcttgaggagctgaggccatacttcagagacagaggctggccactgcccggcccgctgtag

SEQ ID NO: 193411 - DNA, 1704 bp, synthetic construct
  misc_feature 1..1704: note = Description of Artificial Sequence: Synthetic coding sequence
  source 1..1704: mol_type = other DNA
atgcggcccgacagccccaccatggccgcccccgccgagagcctgagacggagaaaaacgggatactccgaccctgaacccgaatctccacccgctcctgggcggggaccagccggttcacccgctcatctgcataccgggaccttctggctaaccagaattgtgctcctcaaggccctggcctttgtgtactttgtggccttcctggttgcatttcatcagaataagcagctcattggcgacagaggactgctaccctgccgcgtattccttaagaattttcagcagtactttcaggacaggacgtcttgggaggtcttctcgtacatgcccacaatcctgtggctaatggattggagcgacatgaatagtaatttggaccttctggccctgctgggcctcggtataagctcttttgtgctcattaccggctgcgctaacatgttgctcatggccgctctctgggggctgtatatgtcactcgtaaatgtgggacatgtttggtattcgttccggtgggagtctcaacttctggagaccggatttctgggcatctttctctgccccctgtggaccctaagtcgtctcccccaacatacacctaccagtaggatcgtactctggggctttcgctggttaattttcagaattatgctgggtgccggcctgattaaaatccgcggggacagatgctggagggatctgacatgtatggacttccattacgaaacacagcctatgcctaaccccgtcgcatattacctgcatcattctccttggtggttccatcgttttgaaaccttaagcaatcacttcattgagctattggtcccattcttcctctttcttggtaggcgggcctgcataatccatggcgtgttgcagattctcttccaggccgtactcatcgtatctggcaatctgagcttcctgaactggctcaccatggtgcccagtcttgcttgttttgatgatgccactttgggcttcctcttcccatctggtccaggaagccttaaggatagggtactgcaaatgcagcgcgacatccgaggtgcccgtccagaacctcgatttggatctgtggtcagaagagccgctaacgtgagtctaggagtgttgcttgcatggctttccgtgccagtcgtcctgaacttactgtcctctcggcaggtgatgaacacccattttaactccctgcacattgtcaacacgtacggagcttttggaagtataactaaggagcgagccgaagtcattctccagggtacagccagtagtaatgcttccgctcctgatgctatgtgggaggactacgagtttaagtgtaagccgggggacccatctaggagaccttgcctaatctcaccataccactacagactagactggttgatgtggttcgcagcatttcaaacgtacgagcacaacgattggattatacacttggcaggtaaattgctggcatccgacgccgaggccttgagcttgctggcccacaatccttttgctggtcggcctcctcctcgatgggtccgcggtgagcactaccggtataaattttcaaggcccgggggtcgtcacgccgccgagggcaagtggtgggtccggaagcgcatcggagcctacttcccacccttatctctcgaagagctccggccttattttcgggacagaggctggcccttgcccgggcctctgtag

SEQ ID NO: 193412 - DNA, 558 bp, synthetic construct
  misc_feature 1..558: note = Description of Artificial Sequence: Synthetic coding sequence
  source 1..558: mol_type = other DNA
atgcggcccgacagccccaccatggccgcccccgccgagagcctgcgccgtcgaaagaccggctatagcgacccagaacctgagtccccccctgcacccggacggggacctgcagggagtcccgctcacctgcatactggcacattttggctgacccggatcgttctgctgaaagcgctggcttttgtgtatttcgtggccttcttagtagcttttcaccaaaataagcagctgattggggacagaggacttttgccatgtagagtattcctgaagaactttcagcagtacttccaggacagaaccagttgggaggtcttctcatacatgccaacgatcttatggctcatggattggagtgacatgaatagcaatctggatttgctggcgctcctgggcctgggaataagttcctttgtcctgattactggatgcgcaaatatgctgctgatggccgccttatggggactgtacatgagcctagtcaacgttgggcacgtatggtgtcctagcctcgctagtgcaatctccctgccgtccatgcatggagggcagtag

SEQ ID NO: 193413 - DNA, 501 bp, synthetic construct
  misc_feature 1..501: note = Description of Artificial Sequence: Synthetic coding sequence
  source 1..501: mol_type = other DNA
atggccgcccccgccgagagcctgcggcggcggaagaccggctacagcgacccagagccggagagcccccccgcgccgggccgtggtcctgctggttcccctgcgcacctgcataccggcaccttctggctgacccgaattgtcctgttgaaggcccttgcatttgtttatttcgtcgcttttcttgttgcattccatcaaaataaacagctcattggagatcggggactcctgccatgtcgggtgttcctgaaaaacttccagcagtactttcaggaccggacctcctgggaggtgttcagttacatgcccactatcctttggttaatggactggtctgatatgaatagtaatcttgacctacttgcactcttagggctcgggataagtagcttcgttcttattacaggctgcgccaacatgctactcatggccgcactgtggggtctttacatgtcacttgttaacgtggggcacgtgtggtatagttttggcaagtag

SEQ ID NO: 193414 - DNA, 1053 bp, synthetic construct
  misc_feature 1..1053: note = Description of Artificial Sequence: Synthetic coding sequence
  source 1..1053: mol_type = other DNA
atgcggggcgccggcctgatcaagatccggggcgaccggtgctggcgagatctcacctgcatggacttccactatgaaacccagccaatgcccaacccagttgcatattatctacatcattctccctggtggtttcaccggtttgagaccttgtcaaaccatttcattgaattactagtgccattctttctgttcctgggcagacgggcctgtattatccacggagtgctgcagatacttttccaggctgttctgatcgtaagcggaaacctatccttcttgaattggctgacaatggtgcctagcctcgcttgctttgatgacgccactctgggtttcctgttccctagcggcccaggcagtctgaaagaccgtgtgttacaaatgcagcgggatatcagaggggctaggcctgaaccaaggttcgggtcggtagttcgccgggctgctaacgtgtctctcggagtcctccttgcctggttatccgtccctgtggttctcaatctgttaagctccaggcaggttatgaatacccatttcaacagcctgcatatcgtcaatacctacggagcctttgggtctattactaaggagcgtgcggaagtgatcctgcaaggcaccgctagcagcaacgcttccgcgcctgatgccatgtgggaggattacgaatttaagtgcaaacctggggaccccagtcgccggccatgtcttatcagcccttaccattaccgcctggattggctgatgtggtttgcagccttccaaacatacgagcataacgactggatcatccatctggcgggaaagttgctggcatcagatgccgaggccctgagcttgctggctcacaatccatttgcaggtcggccacctcctagatgggtcaggggagaacactacagatacaagtttagtagacccggaggacgccatgcagcggagggcaaatggtgggtgaggaagcgaataggggcctattttccaccccttagcctggaggagctgcggccttattttcgggatagaggttggccacttcctggacccctgtag

SEQ ID NO: 193415 - DNA, 993 bp, synthetic construct
  misc_feature 1..993: note = Description of Artificial Sequence: Synthetic coding sequence
  source 1..993: mol_type = other DNA
atggacttccactacgagacccagcccatgcccaaccccgtggcctactatcttcatcatagcccctggtggtttcataggtttgagaccctgtctaaccatttcatcgagttgttggtgccattctttctctttctcggacggcgagcttgtatcatacatggcgtccttcagatcctgtttcaggctgtcctaatcgtttccggcaacctatctttcctgaattggctgactatggtgcctagcctcgcatgcttcgacgacgctaccctgggcttcttattcccgtcaggcccaggttccctgaaggatagggtcctgcagatgcaacgcgatattcgaggggctagacctgagccacggtttggaagcgtagtgagacgcgctgcaaatgttagcctgggcgtcctactggcttggcttagtgtgccagtggtgctaaatctgttgagcagccggcaggtgatgaacacacactttaactctctccacatcgttaacacgtatggtgcatttggatccatcacaaaagaacgcgcagaagtcatactgcaggggaccgcgagctcaaatgcctccgcccccgatgccatgtgggaggattacgagtttaagtgtaagccaggtgacccttcgagaaggccttgccttatttctccttatcactataggctggactggttgatgtggttcgcagcctttcagacctatgagcataacgattggatcatccacctagccggaaaacttctcgcttccgacgcggaagcactcagtctcttggcgcacaatcctttcgctggcaggccaccaccaaggtgggtgagaggagaacactatagatacaaattttcaagaccagggggcaggcatgctgccgaaggcaaatggtgggtccggaaaaggataggggcatacttcccgccgttgtctcttgaggaactacggccctacttcagggatcgaggctggccactccctggcccactttag

SEQ ID NO: 193416 - DNA, 792 bp, synthetic construct
  misc_feature 1..792: note = Description of Artificial Sequence: Synthetic coding sequence
  source 1..792: mol_type = other DNA
atgcccaaccccgtggcctactacctgcaccacagcccctggtggtttcataggttcgaaacactgtccaaccattttatagaactgttggttcctttcttcttgtttttagggcgcagagcatgtatcatccacggagtgctccagatattgttccaggctgtgttgatagtgtccggtaacttgtcttttttgaactggcttaccatggtccccagcttggcttgtttcgacgatgctaccctgggatttctcttcccttccgggcctggatcattgaaggacagagtacttcaaatgcagcgcgacatcaggggggccaggccagaacccaggttcggaagcgtcgtacgacgcgccgctaacgttagtctaggcgtcctcctcgcatggctttccgtgcccgtggtcctaaaccttctgtccagcaggcaggtgatgaacactcattttaactcgctgcatattgtcaatacctacggcgcctttgggtcgatcaccaaagagcgtgccgaggtcatcctgcaaggcactgcctcatctaatgcatctgccccagacgccatgtgggaggattacgaattcaaatgtaagcctggggatccttccaggcgaccatgtctgataagcccgtaccactaccgacttgactggctgatgtggtttgccgcctttcagacttatgagcataacgattggatcattcacctggccggaaagcttctcgcctccgatgcagaagcacttagcctgctagcccacaacccattcgctggccgaccacccccatag

SEQ ID NO: 193417 - DNA, 1503 bp, synthetic construct
  misc_feature 1..1503: note = Description of Artificial Sequence: Synthetic coding sequence
  source 1..1503: mol_type = other DNA
atgagcaacagcgtgcccctgctgtgcttctggagcctgtgctactgcttcgctgccggctcgccggtaccttttggcccagaaggccggctcgaagacaaactccacaagcccaaagcgacccaaacggaagtgaagcccagcgtccggttcaacctccgcactagcaaagaccctgaacacgagggctgctacttgtctgtgggccactcccagcccttggaagattgttctttcaacatgactgcaaaaacatttttcatcatccacgggtggactatgtctggaatcttcgagaactggctgcacaaactggtgtcagcattgcacactagggaaaaggacgcaaacgtggttgtggtggactggctgccactggcacatcagttatatacagatgcggtgaacaacacacgtgtcgtaggccacagcatagcccgcatgttggattggttgcaggagaaggacgactttagtctcggaaatgtgcaccttatcggttactctctgggagcacacgtcgccggatatgctggaaactttgtcaagggtaccgtgggcaggataacagggcttgaccctgccggacccatgtttgaaggcgctgacatccacaaacgcctgagtcccgacgacgcagacttcgtcgatgtgctccatacctataccagatcattcggcctttccattggaattcaaatgcccgttgggcatattgacatataccctaacggaggagatttccaaccaggatgtggtcttaacgacgtgctcggatccattgcctacggaactatcaccgaggtggtgaaatgcgaacacgagcgagccgtacatctgttcgtggattcccttgtgaaccaggacaagcccagcttcgcgttccagtgcacagattctaatcgatttaaaaaaggaatatgcctgtcgtgtcgcaaaaaccgctgcaattctatcgggtacaatgcaaaaaagatgcgcaacaagcgcaactctaaaatgtatcttaagacccgcgcagggatgccctttagggtgtaccactaccagatgaaaattcacgtcttttcctacaagaacatgggagaaattgaacccactttttatgttacgctgtatgggactaacgctgatagccagacgctaccgctggagatcgtagaacggatcgagcaaaacgctaccaatacgttcctagtttacacagaagaagatttgggggatctgcttaagatccagctaacctgggaaggggcctcacaaagctggtataacctctggaaagaatttaggagctatctgtcccagccacggaaccccggccgcgagcttaacatcaggcggatcagagtgaagagcggagaaacgcagcgcaagctcactttttgtaccgaggatcccgagaacaccagtatttctcccggacgcgagctgtggttccgaaagtgtcgcgatggatggcgcatgaaaaacgagacgtctccaaccgtggaactcccctag

SEQ ID NO: 193418 - DNA, 1281 bp, synthetic construct
  misc_feature 1..1281: note = Description of Artificial Sequence: Synthetic coding sequence
  source 1..1281: mol_type = other DNA
atgagcaacagcgtgcccctgctgtgcttctggagcctgtgctactgttttgctgcagggagcccggtcccgtttggccctgagggaaggctagaggacaaactccataagccaaaggcaactcagaccgaagtcaagccatccgtgaggttcaatctgcgcacgagcaaagacccagagcatgaggggtgttacttgtccgtggggcatagtcagccgttggaagactgcagttttaatatgactgccaagaccttttttatcatccacggttggaccatgtcaggcatcttcgagaactggcttcacaaactcgtgtccgccctccacacccgcgaaaaagatgcgaacgttgtcgtagtcgactggttacctctagcacaccagctgtacactgacgccgtcaataatactcgcgtagtcgggcactccattgctcgcatgttggattggctgcaggagaaagacgactttagtctgggaaatgttcacctgatagggtactctctgggcgctcacgtggcaggatacgcaggcaactttgtgaaaggaacagtgggtaggatcacagccatcaccgaggtagttaagtgcgagcatgaacgcgcagtgcacctgtttgttgacagtctcgttaaccaagataagccctcctttgcattccagtgcaccgattcaaataggttcaagaaaggtatttgtttaagttgtagaaagaatcggtgcaactccattggctacaatgccaagaaaatgcggaacaaacggaatagcaagatgtacctgaaaacaagagccggaatgccattccgcgtgtatcattaccagatgaagattcatgtattttcctacaaaaacatgggggaaattgagcctaccttttacgttaccttatatggaacaaatgccgactctcaaactcttcccctcgagattgtcgagagaattgaacagaatgccacaaatactttcctggtgtacacagaagaggatctcggtgatcttctcaaaatccaactgacatgggagggcgcctcacagtcctggtacaatttgtggaaggagtttcggtcctacttgtcccagccacggaatcccgggcgtgagctgaacattcgtcggatccgggttaagtcaggagagacacagcggaaactcaccttctgcacagaagatccagaaaataccagcataagtcccggtcgggagctgtggttcagaaaatgccgggatggatggagaatgaagaacgaaaccagcccaactgtagagctgccttag

SEQ ID NO: 193419 - DNA, 1101 bp, synthetic construct
  misc_feature 1..1101: note = Description of Artificial Sequence: Synthetic coding sequence
  source 1..1101: mol_type = other DNA
atgaacatcagccagatcatcagctactggggctaccccgacgaggagtacgacatcgtgactgaggacgggtatatcctcgggctgtatcggatcccttattggagaacagataacaataaaaaccttgctcaacgcgttgtagtatatcttcagcatggcttgctcacctccgctagctcgtggatcagcaatctccccaataattctctaggttttattctcgccgatgctgggtatgacgtgtggatgggcaactctcgcgggaatacatggtctcgtaagcacctttatcttgagacctcttctaaagaattttgggctttctccttcgacgaaatggccaaatacgatcttcctgctagtattgatttcactgtgaaacaaaccagacaggaagagatcttttatgttggtcacagccaggggacgacgataggctttattacattctctaccattagcaagatcgccgagagaataaagatcttcttcgccctggctcctgtgttttccactaagtatcttaaatctccccttatcagaatgacgtacaaatggaaatctattgtcatggcgttttcagggaacaaggactttctccctaagacctccttcaaaaagttcatcggcagcaagctctgtcccctgcagatattcgacaaaatctgcctgaacattctttttatgatgtttgggtacgaccctaagaacctgaatatgtcacgattggatgtctatttttctcataaccccgccgggacttctgtgcagaatatgttgcattggagtcaactcctaaactccacacacttgaaggcctacgattggggcagtcctgacctgaatctggtgcactacaaccagacaacctctcctctttacaatatgacgaacatgaacgttgctacagctatctggaatggaaagtctgacctgcttgcagacccagaagatgttaatatcctgcattctgagataacgaatcatatatactataagacaatctcatactacaaccacatcgactcacttttcggactagacgtgtatgatcaggtgtatcatgagatcattgacatcatccaggacaacctctag

SEQ ID NO: 193420 - DNA, 1200 bp, synthetic construct
  misc_feature 1..1200: note = Description of Artificial Sequence: Synthetic coding sequence
  source 1..1200: mol_type = other DNA
atgtggcagctgctggccgccgcctgctggatgctgctgctgggcagcatgtacgggtacgataagaagggaaataatgccaatccagaggccaacatgaatattagccagatcatcagttactggggatacccatacgaggagtacgatgtcaccacgaaggatggttatatactcggcatttaccgtattcctcacggacgcgggtgtccaggtaggactgccccgaagccagccgtctacttgcagcacggtctgattgccagtgcctcgaactggatttgcaatttgcccaacaattctcttgctttcctgctcgctgacagtgggtatgatgtttggctggggaacagtagaggcaacacctggagtcggaagcatcttaagttgagtcccaaatctcccgaatactgggctttctctctggacgaaatggccaagtacgatcttcccgctactataaactttatcatcgagaaaactggccaaaaacgcctgtattatgtcggtcacagccagggaacgacaatcgcttttattgccttctcaacaaatccggaactggccaaaaaaattaaaatctttttcgccctcgcaccagtcgttaccgtgaaatacacacaaagccccatgaagaaactcacaaccctctccaggcgcgtggtcaaagtgctatttggtgataagatgtttcacccccataccctgtttgatcagtttatagctacaaaggtttgcaaccgcaagctgttcaggcggatatgttccaattttctgttcacgctgtctggcttcgacccccaaaatctgaacatgagtcgcttggacgtgtacttgtcacataatccagcgggaacctccgtccaaaacatgttacactgggcgcaagctgtgaattctggacagctacaggccttcgattggggtaattctgatcagaacatgatgcactttcaccagcttacgccacccttgtataatattaccaaaatggaggtgcccactgctatttggaacggcgggcaagacatcgtggcagaccccaaggacgtagaaaatttactgccacagattgctaatcttatttactacaagctgatccctcactataaccacgttgatttttatttgggagaggatgcgccccaagaaatctaccaggatctcataatcctgatggaagaatacctccagaactag

SEQ ID NO: 193421 - DNA, 1272 bp, synthetic construct
  misc_feature 1..1272: note = Description of Artificial Sequence: Synthetic coding sequence
  source 1..1272: mol_type = other DNA
atgctggagaccctgagccggcagtggatcgtgagccaccggatggaaatgtggctgctgattctggttgcctatatgtttcagaggaatgtgaacagtgtccatatgcctaccaaagcagttgatccagaggcatttatgaatatttcagaaataatccagcatcagggttacccatgtgaggagtacgaagttgctacagaagacggctatattctgtcagtgaacaggattccccgcggccttgtgcaacccaagaaaactgggtctagacccgtggttttgctacagcatggattggttgggggggcctccaactggattagcaacctccctaataactccctcggttttattctcgccgatgctggcttcgacgtctggatggggaacagcagaggaaacgcctggtctcgcaagcataaaacgctgtccattgaccaggacgagttctgggccttcagctatgatgagatggctagattcgacctgccagctgtgattaacttcatcctgcagaagactggtcaagaaaagatctactatgtgggctatagtcagggcaccacaatggggttcatagcatttagcacaatgccagagttggctcagaagattaaaatgtatttcgccttggcccccatcgcaaccgtgaagcacgcaaagtcccccggcactaaattcctgctcctgcctgacatgatgatcaaaggtttattcggcaaaaaggaattcctgtatcagactaggttcctgcgccagcttgttatctacctctgtggccaggttattctggatcagatatgcagtaacattatgctgctgctgggcggatttaataccaataacatgaatatgagccgcgcttcagtgtacgctgcccataccctagccgggacttcagtacaaaacattctgcactggagccaggccgtcaactctggagagctaagggcatttgattggggatctgagacgaagaatctagaaaaatgcaatcagcctacccctgtccgctatcgggtcagagacatgacagtgcctacggcaatgtggacgggcgggcaggattggctctccaatcccgaagatgttaagatgctcctctccgaggtgaccaatctgatctaccataagaacatccctgagtgggctcacgttgattttatctggggcctggacgccccccatcgaatgtacaatgagatcatccatctgatgcagcaggaagagactaacctctctcaggggagatgtgaggcagtgctttag

SEQ ID NO: 193422 - DNA, 1152 bp, synthetic construct
  misc_feature 1..1152: note = Description of Artificial Sequence: Synthetic coding sequence
  source 1..1152: mol_type = other DNA
atgacccggcccctggaccggaagcagagcgagatcatccagcaccagggatatccctgcgaggaatatgaggtggctactgaagacggctatatcctgtcggtgaatagaatacccaggggtctggtccagcctaaaaagactggtagccgacccgtggtccttctgcaacacggactagtcggcggtgcttccaactggatctccaatcttcctaacaactccctcggctttattctcgcggatgcaggatttgacgtgtggatggggaactcgcgaggcaatgcgtggagtagaaaacacaaaaccctgagcatagatcaagatgagttttgggccttcagctacgatgaaatggctagattcgatctcccagctgttatcaactttatccttcaaaaaaccggacaggaaaaaatatactacgtgggctactcacaaggaaccacaatgggatttatcgcgttctcaactatgcctgagctggcccaaaagattaaaatgtattttgcattggcgcctatcgctacggtcaagcatgccaaatcccccgggacaaaattcctcctgctcccagacatgatgatcaagggtctgtttgggaagaaagagtttctgtaccagaccagatttctgcggcagttggttatatacttgtgtggacaggtgatcctggatcagatctgctcaaacatcatgcttctgctgggcggcttcaatactaataatatgaatatgagtagagcgtctgtgtacgcagcccacactctggcaggcacctccgtgcagaacatactacactggagccaggccgttaactccggagaattgcgtgcctttgattggggctctgaaactaagaacttggagaaatgtaaccagcctacccccgtgcggtatagggtacgtgatatgaccgtgcctactgctatgtggactgggggccaagactggctctccaacccggaggacgttaagatgctgttgtctgaggtaactaacttgatttatcacaagaacatccctgagtgggctcacgtggatttcatctggggcctggatgctccccacaggatgtacaatgaaatcattcacctaatgcagcaggaggagaccaacctgagccaagggaggtgcgaggccgttttatag

SEQ ID NO: 193423 - DNA, 1197 bp, synthetic construct
  misc_feature 1..1197: note = Description of Artificial Sequence: Synthetic coding sequence
  source 1..1197: mol_type = other DNA
atgatgtggctgctgctgaccaccacctgcctgatctgcggcaccttgaatgccggagggtttctggatttggagaacgaggtcaatcccgaagtctggatgaacacatccgagattattatctacaacggctacccttctgaggagtatgaggtaacaactgaggatggatatatcctcctggtcaatcggattccttacggacgcacccatgcccgctccactggtccccggccagtagtctatatgcagcacgcactgtttgcggacaacgcctattggctcgaaaactatgcaaacggctcactaggcttcctcctcgccgatgccggctatgatgtttggatgggaaattcacgcggcaatacctggagccggcggcataagacactgtctgaaactgacgagaagttctgggcctttagttttgacgagatggcaaagtatgatctgccgggggtgatagacttcatcgtgaataagactggacaggagaagctttactttatcggccattctcttggtaccacgatcggatttgtggcattctcaacaatgcctgaactggcccagaggataaagatgaacttcgccttggggcctacaatctcctttaaatatcccacaggcatcttcacccggttttttctgctgccaaatagcatcattaaggccgttttcggtaccaaggggttcttcctggaggataaaaagactaaaatcgcaagcactaaaatttgcaacaacaaaatcctttggctcatctgtagcgagtttatgagtctgtgggcaggaagtaacaagaaaaatatgaatcagagcaggatggatgtctatatgtctcacgcacccactgggagttctgttcacaatatactgcacattaagcagctctaccattctgacgaattcagagcatacgattggggaaatgatgccgacaatatgaagcactataatcagagccatccaccgatttacgatttgactgcaatgaaagtccccacagcaatatgggctggaggccatgacgttctggtgactccccaggacgtggcaagaattctgccccagatcaagagcctccattactttaaacttctaccggattggaatcattttgatttcgtctgggggctggatgcccctcagaggatgtattctgagattattgccctgatgaaagcgtattcgtag

SEQ ID NO: 193424 - DNA, 1500 bp, synthetic construct
  misc_feature 1..1500: note = Description of Artificial Sequence: Synthetic coding sequence
  source 1..1500: mol_type = other DNA
atggacaccagccccctgtgcttcagcatcctgctggtgctgtgcatctttatccagtccagtgcactgggacagagcctcaaacccgagccattcggaagacgcgctcaagccgtggaaaccaacaaaaccctgcatgagatgaagacgcggtttcttttgttcggtgaaacaaatcagggttgccagattaggataaatcacccagacaccttgcaggaatgtggttttaattcttctctgcccctggtgatgataattcacgggtggtcagtggacggtgtgcttgagaattggatttggcagatggtggctgcacttaagagtcagccagcccaacctgtcaacgtcgggctggtggactggatcactctggcccacgaccactataccatagccgtcagaaatacacgtcttgtcgggaaggaggtggctgcgctcctcaggtggcttgaggaatccgttcaattgagcagatcccatgtgcatctgataggttactcactgggcgcccatgtgagcgggtttgccggcagcagcatcggagggactcataaaattgggaggataaccggcctggacgctgcaggacctttatttgaaggctctgccccatctaatcggctgtccccagatgatgccaacttcgtcgatgctattcacaccttcactcgagagcacatgggactcagcgtcggcatcaagcaacccatcggtcactacgacttctatcctaatggcggcagtttccaaccaggatgtcactttctggagttatatcggcacatagcccagcatgggtttaacgcaatcacccagactattaagtgtagtcatgaaagatccgtccacttatttatagactccctcttacatgccggcacgcagagcatggcatatccctgtggggatatgaattcattctcacagggactctgcttgtcatgcaaaaagggtcgatgcaacaccttgggctatcacgtgcgacaggagcctcgttccaagagtaagcgactatttttagtaactcgggctcagtctcccttcaaagtgtaccattaccagtttaagattcaatttatcaaccagactgagactcccattcagacaacattcaccatgtccttactggggactaaggagaaaatgcagaaaatccccattactctcggaaaggggatagcctccaacaagacatatagctttctgatcaccctggatgttgacatcggagagctgataatgattaagttcaagtgggagaactccgctgtctgggccaatgtatgggacaccgtgcaaacaattataccatggagcactggacctagacactccgggctggtactgaagaccattcgcgtcaaagcgggcgaaacccagcagcgaatgactttttgtagcgagaatacagatgacctcctgctgcgccccacccaagagaaaatattcgtgaagtgtgagatcaaaagcaagacaagtaagagaaagattcgctag

SEQ ID NO: 193425 - DNA, 1500 bp, synthetic construct
  misc_feature 1..1500: note = Description of Artificial Sequence: Synthetic coding sequence
  source 1..1500: mol_type = other DNA
atggacaccagccccctgtgcttcagcatcctgctggtgctgtgcatattcattcagtctagtgctctcggacagtccctcaaacctgaacccttcgggaggcgggctcaggccgtcgagactaataaaactctgcacgagatgaaaacccggtttctgctctttggcgagacgaaccagggctgccaaattcgtatcaaccatcccgacacccttcaggaatgtgggtttaattcaagccttccacttgtgatgatcattcacggctggagtgtggatggggtcctagaaaactggatctggcagatggtggccgctctcaagagtcagccagctcagcctgttaacgtggggttagttgactggatcaccttggcccatgaccattataccattgcggtgagaaacactaggttggtgggaaaggaagtggccgccctcctcagatggctagaggagtcggtgcagctgtcacgcagccatgtgcacctgataggctactctctgggagctcacgtttcagggtttgccggtagctcgattggaggaacacacaaaatcgggcgcataactggcctggatgccgctggcccactcttcgaggggagcgcaccatctaaccggctgtccccagatgatgccaattttgttgacgcgatacacacgtttacccgtgaacatatgggactgagcgtcgggattaagcagcccatcggacattacgacttctatcctaatggaggctcctttcagcccgggtgccacttcttagaactgtatagacatatcgctcagcacggtttcaacgctatcacccagactattaaatgctcccacgagcggtcagtacacttattcatagattccctactgcatgctggcacgcagtcaatggcctacccctgcggtgatatgaacagttttagtcaagggttgtgtctgagctgtaagaaaggacgttgtaacactctgggataccatgtgaggcaggagccccggtctaagtccaagcgcctgtttctggttaccagagcgcagagtccattcaaggtgtaccactatcagttcaagattcagttcatcaaccagacagagactcccatccagaccactttcaccatgagccttctgggtacaaaggaaaaaatgcagaagatccctataacgttagggaagggaattgcatctaataagacctactccttccttatcaccctggacgttgatataggcgaacttataatgatcaagttcaagtgggaaaattctgctgtttgggctaacgtctgggacacagtgcaaaccatcattccttggtctactggccccaggcacagtgggttagtgttgaaaacaatccgcgtcaaggccggcgaaacacagcagcgtatgacattttgttccgagaatacagatgacctcctcctccgccccacccaggaaaaaatctttgtgaagtgcgaaataaaaagcaagacaagcaaacgaaaaatccgctag

SEQ ID NO: 193426 - DNA, 3231 bp, synthetic construct
  misc_feature 1..3231: note = Description of Artificial Sequence: Synthetic coding sequence
  source 1..3231: mol_type = other DNA
atggagcccggcagcaagagcgtgagccggagcgactggcagcccgagccccaccagcgacccatcactcccctggaacccggacccgaaaagacaccaatcgcacagcccgaatcaaagaccctccagggtagcaatacccaacagaagccagctagtaaccagcggccactgacacagcaagaaacacccgcgcagcatgacgccgagagtcaaaaagagccaagggctcaacagaaatccgcctcccaggaggaattccttgctccgcagaaacccgctcctcaacagtccccctacatccagcgcgtgctgctcactcagcaggaggccgcctctcagcaaggtccaggactgggcaaagagtctatcactcagcaggagcctgctttgcgccagcgccatgtcgcccagcccggaccaggccccggcgagcctccccccgcccagcaggaggcagagtccacccccgctgcccaagcgaaaccaggggccaagcgggagccctcagcaccaaccgagtctactagtcaggaaacccctgaacagagcgataagcagacaaccccagtccagggcgcaaagagcaaacaaggcagcctcacagagctgggatttctcaccaaacttcaggagctgagcatccaacgctctgctctcgagtggaaggcgctgagtgagtgggttactgattcggaatcggagtcagacgtcggctcctcttcagacaccgatagtcccgcaactatgggcggcatggtagctcagggggttaagctcggttttaaggggaagagcggctataaagtcatgagtggctactccggaacgagcccccacgagaaaacatccgcacggaatcacaggcactaccaagacacagctagtagattgatccataatatggatttgcggaccatgacacagtccctggtcacgttggcagaggacaatattgcgttcttcagcagtcagggcccgggagagaccgctcagagactgagcggggtctttgctggagtgagggagcaggcccttggcctggagccagctctcggacggttactgggagtcgcccatctcttcgaccttgaccccgaaacacccgccaacggctatcgcagtctcgtgcacacggcccgctgttgtttggctcacctgctgcacaagagtagatatgtggcgagtaacagacgttccattttttttcgtacatctcataatctggcggagctggaagcgtatctggccgcattaacacagctccgggctcttgtatattacgcccagcgccttctggtaactaaccgtccgggagtcctgttcttcgagggagatgagggcctgaccgctgattttctgcgcgagtacgtgaccctgcataagggttgtttttacggtcgctgcctggggttccagttcaccccagctattcgtcctttcctccaaacaatctccataggcctggtgtctttcggtgaacactacaagcgcaacgagaccggactctctgtagcagcctcgtctctttttactagtggccggttcgccattgacccagaactgcgcggggccgagtttgagcgcattacccagaatctggacgtgcacttttggaaggcattctggaatatcacggagatggaagtcctatcctccctggccaacatggccagcgcaaccgtgagagtctcacgcctcctgagtttgccacctgaagcttttgagatgccattgacggctgacccgacactgactgtcacgatctctccccctcttgcgcatactgggcccggcccagtgctcgtcaggctgatcagttacgatcttagggagggccaggacagcgaagagctcagttccctgattaagtccaatggccagaggagtcttgaactctggccacgaccacaacaggctcccaggtctagaagtttaatcgttcattttcatggtggcggattcgtagcccagactagcaggtcccacgaaccttacttgaagagctgggcccaggagttgggtgcgcccatcattagcattgactactcgctggcaccagaggcacctttccctagggccctggaggagtgttttttcgcttactgctgggcgataaagcattgtgcgttgctgggcagcaccggggaaaggatctgcctcgcaggcgatagcgcaggcggaaacctgtgttttacagtggcccttcgagcagcagcgtatggtgtccgcgtgccagatggtatcatggccgcttatccagccaccatgcttcagcctgctgcttcgcctagccggttgctgtctcttatggaccctctcctacctctatccgtcctgtccaaatgtgtgagtgcatatgccggggccaagacagaagaccacagcaattccgaccagaaggctttaggaatgatgggtctagtccgaagagacaccgcactactgctgcgtgattttcggctgggggcctcaagctggctcaattcatttctcgaactgtcaggtcgcaaatctcagaaaatgagcgaaccaatagctgagccaatgagaaggtccgtctctgaggcggctctggcccagcctcagggaccactcgggacggattctctgaaaaacctgactctgagggatctgtccctgagaggcaattccgaaactagctccgacacgccagagatgagcctaagtgccgagacgctttctccctccacgccttctgatgtaaacttccttctaccccccgaggacgcaggtgaagaggcagaggccaaaaacgaactgtcaccaatggacaggggcttgggcgtgagagcggcttttcctgaagggttccatccacggaggagcagccagggagccactcaaatgcccctttacagctcccccattgtgaaaaatcctttcatgtctccactgttggcgcctgacagcatgctgaaatccctgccaccagtgcacattgtggcgtgcgccttagatccaatgctggacgattctgtaatgttagccagaaggttgcggaacttgggccagcccgtgacactgcgcgttgtggaagatctgcctcatggatttttaacactcgctgcgttgtgccgagagacgcgccaggccgctgaattatgcgtggaaaggataaggttagtgttaaccccccccgctggagccggaccttccggagaaacaggagctgccggcgtcgatgggggatgcggcggacgacattag

SEQ ID NO: 193427 - DNA, 1356 bp, synthetic construct
  misc_feature 1..1356: note = Description of Artificial Sequence: Synthetic coding sequence
  source 1..1356: mol_type = other DNA
atgctgcggttctacctgttcatcagcctgctgtgcctgagccggtcggacgcggaggagacctgcccctcattcactcgcctttctttccactcagctgttgtgggaaccggactaaatgtccgtcttatgctgtataccagaaagaacttgacatgcgcccaaacaataaatagctcagcattcggaaatcttaacgtgaccaaaaagactacctttatcgttcatggcttcaggcccaccgggagccctcccgtgtggatggacgacctagtgaagggactcttgtccgttgaggatatgaacgtcgttgtcgttgattggaaccgtggcgccaccaccctgatctacacgcacgcttccagtaaaacaagaaaagttgcaatggtgctcaaggagttcattgaccagatgctcgccgagggagcctccctggacgacatttatatgatcggggtgtccctgggagcacacatcagcggcttcgtaggggaaatgtacgacggctggctcggccggatcactggcctggatcctgccggtcctctctttaatgggaaacctcatcaggatcgccttgatcccagcgatgcccagttcgtagatgtaatccactctgacacggacgcattgggatataaggagcccctcggtaatattgatttctaccccaacgggggtctggatcagccgggatgtcccaaaaccattttaggagggtttcaatactttaaatgcgaccaccaaagaagcgtctacttatatctgtcgtccttgagagaaagctgcaccattaccgcttacccttgcgattcctatcaggactatcggaatggtaagtgcgtgagttgcggcacctcacagaaagagagttgcccgctattagggtactatgcggacaactggaaggatcaccttcgcggaaaagatcctccaatgacaaaggccttcttcgatactgcggaagaatcccccttctgcatgtaccactacttcgtggacatcatcacctggaataaaaacgttcggaggggtgacataacaatcaagttacgggacaaggcaggcaacactactgagagcaagattaatcacgagcctacaacctttcaaaaatatcaccaggtgtctctgctggcacggttcaaccaggaccttgataaggtggcagcaatttcgctcatgttttcgacaggatccctcatcggccctcgatacaaactccgcatcctgaggatgaagttgcggtctctggcccaccccgagcggcctcaactgtgtcgatacgatctggtactgatggaaaacgttgaaaccgtctttcagccaatcctgtgtcctgaacttcagctgtag

SEQ ID NO: 193428 - DNA, 1446 bp, synthetic construct
  misc_feature 1..1446: note = Description of Artificial Sequence: Synthetic coding sequence
  source 1..1446: mol_type = other DNA
atgctgctgaagtgcctgcacaacaacctgtgccagaagtacagcgcacacgcatttcagttttcaccacgcaacgtgctgtggctcctcgtggtgtgccttcgttcagataacaagcgcccatgtttagaattttcacagcttagtgtgaaagactcttttagagaccttttcatcccgcgtatcgagacaatcttgatgatgtatacccggaacaatcttaattgcgccgagcctttgttcgagcagaacaattctctgaacgtcaacttcaatactcaaaagaagaccgtttggctgattcatggttatcgaccagtggggagcattcctctatggcttcaaaatttcgtccggatcctattgaatgaggaagacatgaatgtgattgtggtggactggtcacgaggcgctactacctttatctacaatagagcagtgaagaacacacggaaggtggcagtgtccctaagcgtgcacataaagaatctgctcaagcatggagcctctctagataactttcactttatcggggtctccctcggggcccacatttcagggttcgtgggcaaaatctttcacgggcagctcggcagaattactgggctggatccggcaggaccgagattcagtaggaagcctccctacagtcgacttgattacacagatgctaaatttgtcgacgtcatacactccgactctaatggactcggcatacaagaacccctgggccatatagacttttatcctaatggcggcaataagcagccaggatgccccaagtctatcttctctggcattcagttcatcaagtgtaaccatcagagggctgtgcatctttttatggcctccctggaaaccaattgcaacttcatctcctttccatgcaggtcttataaagattacaagaccagcctgtgcgtggattgtgactgctttaaagaaaagtcttgtccacgcctgggctatcaggccaaactgttcaaaggcgttctgaaagaacgcatggagggaaggcctcttaggaccactgtgtttcttgacaccagtggaacgtaccctttttgcacatactatttcgtcttgagcattatcgtccccgacaagactatgatggatggcagtttttcattcaagcttctaaatcagctaggaatgattgaagaaccgaggctgtacgagaaaaacaagcccttctacaagctgcaggaagttaagatcctggctcagttctataacgacttcgtaaatattagtagcattggtctgacttacttccagagctcaaaccttcagtgctcaacatgcacctataaaatccagcggctcatgctgaaaagcctgacttatccagagaggcccccactgtgccggtacaacatcgtacttaaggatcgggaagaagtcttcctcaaccccaacacttgtacccctaagaatacctag

SEQ ID NO: 193429 - DNA, 471 bp, synthetic construct
  misc_feature 1..471: note = Description of Artificial Sequence: Synthetic coding sequence
  source 1..471: mol_type = other DNA
atgaacgtgatcgtggtggactggagccggggcgccaccaccttcatttataacagagctgtcaaaaacacaagaaaagtcgcggtgagcctgagcgtgcatattaagaatttattaaaacatggagcctcactagacaactttcattttataggtgtctctctgggagcgcatatatccggctttgtgggaaagatattccacgggcaactcggtagaattacaggcctggacccggccgggcctagattttctaggaagccaccttatagtcggcttgattatacagatgctaagttcgtggatgttatccacagcgacagtaacggaatccagtttattaagtgtaatcaccagcgagccgtgcatctgttcatggcgtcacttgagacgaactgcaatttcatctcctttccttgtagatcttataaggattataagactagtctatgcgtcgactgcgactgctag

SEQ ID NO: 193430 - DNA, 426 bp, synthetic construct
  misc_feature 1..426: note = Description of Artificial Sequence: Synthetic coding sequence
  source 1..426: mol_type = other DNA
tgatacaaccgggccgtgaagaacacccggaaggtggccgtgagccttagcgttcacattaaaaacctgttgaagcacggcgccagcctcgacaatttccacttcattggcgtctctttgggcgcacacatatctggcttcgtaggcaagatctttcacggacagctaggacggatcacggggttggaccccgcaggaccaagattctctcgcaaaccaccatactcaagactggactacaccgacgccaagtttgtggacgtgattcatagtgattcaaacggaatccagtttatcaagtgtaaccatcagcgcgcagtccatctgttcatggccagtctcgaaacaaactgtaacttcatttcctttccctgtaggtcgtacaaggactacaaaacgtccctctgtgtggactgcgattgctag

SEQ ID NO: 193431 - DNA, 1383 bp, synthetic construct
  misc_feature 1..1383: note = Description of Artificial Sequence: Synthetic coding sequence
  source 1..1383: mol_type = other DNA
atgcgggtgtacatcttcctgtgcctgatgtgctgggtgcggagcgacaacaagaggccatgccttgagttcagtcagctgtccgtgaaagactcattccgcgacctgttcatcccccggattgaaaccatcctcatgatgtatacacgcaataacctgaactgtgctgaacccctgttcgagcagaataatagccttaatgttaatttcaacacccagaaaaaaaccgtgtggcttatccacggctatagacctgtgggatccataccattatggctccaaaatttcgtcaggatcctgctgaatgaagaggatatgaatgtgattgtggttgattggtcccgaggggcaaccacatttatctataatagagcagtgaagaacactcgcaaggtggctgtgtcgctgtccgtgcacattaagaatcttcttaaacatggagcctccctggataactttcacttcattggcgtctccctgggagcacatatcagcggcttcgttggtaagatctttcatggacaactgggtaggattaccgggttagatcctgctgggcctcgattctctaggaaaccaccttactctcgcctggactatactgacgcaaagtttgtcgatgttatccattcagattcaaatggcctgggcatccaggagccgctcggacacatcgacttttaccccaacgggggcaataaacagcctggctgtccaaagtctattttttctggaattcagtttatcaagtgcaatcaccagcgggctgtgcaccttttcatggcgtcacttgaaactaactgcaatttcatcagcttcccatgtaggagttataaagactataagacatccttatgtgttgactgtgattgctttaaggagaaatcctgtcctcgcttaggctaccaggctaagttgttcaaaggcgttttgaaagagagaatggaaggaaggccactgaggaccaccgtgttcttagataccagtggcacctatccattctgtacctactacttcgtcctcagtataattgtccccgacaagactatgatggatggaagcttttccttcaaactgctaaaccagctcgggatgatcgaggaacctcgcttatatgagaagaataaacctttttataagctacaagaagtgaagatacttgcccaattctacaatgactttgtgaatattagcagtataggactgacgtactttcagtcatcaaacctgcagtgttcaacctgtacatataagatacaacgcctgatgttgaaatccctcacctaccctgagagaccccccttgtgtaggtacaatattgtgttaaaggaccgagaagaggtgtttttaaaccccaatacatgcaccccaaaaaacacgtag

SEQ ID NO: 193432 - DNA, 2673 bp, synthetic construct
  misc_feature 1..2673: note = Description of Artificial Sequence: Synthetic coding sequence
  source 1..2673: mol_type = other DNA
atgaactacgtgggccagctggccggccaggtgttcgtgaccgtgaaggaactgtataagggcctcaacccagccaccctgtcaggttgcatcgacatcatagtgattagacagccaaacggaaacctgcaatgctctccttttcacgtacgattcggaaagatgggtgtgttaaggtcgagagagaaagtagtggacattgagatcaacggagaatccgtggatttgcatatgaagttgggcgacaacggcgaggctttctttgtgcaggagaccgacaatgatcaggaagtgattccaatgcatcttgccacttccccaattctttctgagggggcttcgagaatggagtgtcagctgaagcgagggtcagtcgaccggatgcgtggactggacccttccacaccggcgcaggtgatcgctcccagcgaaaccccctctagctctagcgtggtgaagaaacggcggaagaggcgccgcaaatcacagctggattcactgaagcgcgacgataacatgaatacatcagaagacgaggacatgttcccaattgagatgagctcggatgaggctatggagctgctcgaatcatcacgcaccctgcccaacgatatccctccttttcaggatgatatcccagaggagaacctgtctctggcggtcatctatccccagtcagcctcttatcccaatagtgatagagagtggtcacccactccatcccccagcggctcccggccttcaacaccgaagagcgactctgagctggtgtcaaaatccaccgagcgcacaggccagaaaaatcccgaaatgctgtggctttggggcgagcttccccaggctgccaagagctcatcaccccataagatgaaggaaagcagcccattgtccagccgcaagatctgcgacaaatcacattttcaagcaatccattccgaaagctccgatacttttagtgatcaaagccccaccctggtaggcggcgcgctgctggaccagaacaaacctcaaactgagatgcagtttgtgaacgaggaggacctggagactctgggcgcagctgccccgctgttgccgatgattgaggagcttaagccgccttcagccagcgtggtgcaaactgcaaacaaaacagacagcccttctagaaaaagagacaagcggagcaggcacttgggcgcagacggggtatacctagacgatcttaccgacatggaccccgaagtggctgctctgtattttccgaaaaatggtgacccatctggactggctaagcacgcaagtgacaatggggccagatccgccaaccagagtccgcagtctgttggctccagcggagtcgattccggagttgagtcaacatctgacggtctgcgcgatcttcccagtattgcgattagcctctgcgggggcctgtctgatcaccgcgagatcactaaagatgcctttttggagcaggctgtatcttaccagcagttcgtagataacccagccatcatcgatgacccaaaccttgtagtaaagataggatccaagtactacaactggaccacagcagctccccttctcttggctatgcaggcattccaaaaacctctgccaaaagcaactgtcgagagcattatgcgggacaagatgcctaaaaaagggggtaggtggtggttttcttggaggggtcgaaacacaactattaaagaggagagcaaaccggagcagtgcctggccggtaaggcccattccacaggtgagcagcctccccagctctcattagccaccagagttaaacacgaaagcagttctagcgacgaggagcgagcagccgcgaagccatcaaacgcgggccacctccctttgctgcctaacgtcagctataagaagaccctccggctcacttccgagcagcttaaatcattgaagttgaaaaatggtccaaacgacgtggtctttagcgttaccacacagtaccagggaacctgcagatgtgagggcaccatctacctctggaattgggatgacaaagtgattattagcgacatcgacgggaccattactaggtccgacacgcttggacatatccttccaactttgggaaaggactggacacatcagggaattgctaagctataccataaagtctcccagaacgggtacaaattcctgtactgtagcgccagagctattgggatggccgatatgacccgggggtacctgcactgggttaatgagcggggaacagttctgccgcagggaccactgcttctgtcgccctccagcttgttctctgcactacacagagaagtgatagaaaaaaagcccgagaagttcaaggtgcaatgtcttactgatattaaaaacctcttttttccgaatacagaacccttttatgcggccttcgggaaccgtcctgccgatgtttactcttacaagcaagtcggggtgtctttaaaccggattttcactgtcaaccctaagggtgagctggtccaggagcacgctaagaccaatatcagttcctacgtccggctgtgcgaagtagtagaccacgtatttccactcctgaagaggagccattcctcggatttcccatgcagcgatacattctcgaatttcactttctggagggagcccctccccccgtttgagaaccaggatatacactcagccagcgcatag

SEQ ID NO: 193433 - DNA, 1863 bp, synthetic construct
  misc_feature 1..1863: note = Description of Artificial Sequence: Synthetic coding sequence
  source 1..1863: mol_type = other DNA
atgctgtggctgtggggcgagctgccccaggccgccaagagcagcagcccacacaaaatgaaggagagctccccccttagctcccgaaagatctgcgataaatcacatttccaagccatccactcggaatcttccgacaccttttccgaccagagcccaactctggtcggcggtgccctgctcgaccagaacaaaccccaaactgagatgcagtttgtcaacgaagaggatctggaaaccctgggcgctgcagctccactgctgccaatgatcgaggagcttaaaccgccatcggcttcagtggtgcagacagccaacaagacagatagcccatctaggaagcgagacaaacggagcagacacctgggcgcagacggcgtctacctggacgacctaactgacatggatcctgaggtcgcagctctttacttccctaagaatggtgatccctccggcctagccaaacacgcgtcagacaacggcgcccgatccgccaatcagtctccccagtctgttggttcttcaggagtggattctggcgtggaatctacatccgacggcctcagggatttgccaagtattgccataagcttatgcggtggtctgagtgatcacagagagattacaaaagacgcttttctggagcaggccgtgagctatcagcagttcgtcgacaaccccgctatcattgatgatccaaatctggttgtaaagatcggatccaagtactacaattggacaaccgctgcccccctgctcctggctatgcaagctttccagaagcctctgcccaaggcaacagtggaatccatcatgagagacaaaatgcccaaaaagggtggccggtggtggtttagctggcgggggcgcaacacaaccattaaggaagaaagcaaacctgaacaatgtttggccggcaaagctcattccacaggcgaacagcctccacagttgtccctggctacacgcgtaaaacacgagtctagcagctcagatgaagagcgggctgccgcgaaaccctctaacgctgggcatctgcctctgctacctaacgtttcatataagaaaaccctgcgcctgacgtctgagcaactcaaatctttaaagcttaagaacgggccgaacgacgtcgttttttccgtgacaactcagtatcaggggacatgccgatgtgagggcactatttacctctggaattgggatgataaggtgatcatctcagacatcgatggcaccatcacaaggtccgatacgctggggcacattctgccgacgttgggcaaggattggacccatcagggaattgcaaaactgtatcataaagtttcacagaacggatacaagtttctctactgcagcgctcgcgccataggaatggccgacatgacaaggggatacctgcactgggtgaacgaaaggggtacagtgctcccacagggccccctgttgctgtctcctagctccctgttttcagcgctgcaccgtgaagtgatagagaaaaaaccagaaaagtttaaggttcagtgcttgaccgatattaagaacctgtttttccccaatactgagcctttttacgctgccttcgggaaccggccagccgatgtgtactcctataagcaggtgggggtgtctctgaaccgcatttttaccgttaacccaaagggcgagttggtgcaggaacatgcaaaaactaatatatcctcatatgttaggttatgcgaggtcgtggatcacgtgtttcctttattgaagcgctcacactcttctgacttcccatgctcggacaccttctctaacttcactttctggagagaaccgcttccacccttcgagaaccaggatatccatagcgctagtgcttag

SEQ ID NO: 193434 - DNA, 2799 bp, synthetic construct
  misc_feature 1..2799: note = Description of Artificial Sequence: Synthetic coding sequence
  source 1..2799: mol_type = other DNA
atgagccgggtgcagaccatgaactacgtgggccagctggccggccaggtatttgttactgttaaggagttatacaagggcctgaaccccgccacgctctccgggtgtatcgatattatcgttattcggcagcccaatggaaacctgcagtgctcgccctttcacgtgcggttcgggaaaatgggtgtactgcggagcagagaaaaagtggttgacattgaaatcaacggagagtcagtagacctgcacatgaagctgggcgacaatggagaggccttcttcgtgcaggaaactgataacgaccaggaggtgatccccatgcatctggcaacttctccaattctgtctgagggtgccagtcgcatggaatgtcaattaaagcggggaagcgtggaccggatgcgcggcttagatccctccacccccgcccaagtgatcgccccttcagagactccgtcctcctcaagtgtggttaaaaagaggcgtaaacggaggagaaaatctcaacttgattctctgaagcgggatgacaatatgaatacctcagaagatgaagacatgttccccattgagatgagtagcgatgaggcgatggaattgctggaatctagccgtacccttccaaatgatataccacccttccaggacgacatccccgaggagaacctaagcttagccgtgatatatccacagagcgcctcttatcctaactcagaccgcgagtggagtcccaccccctcttccctcgttgattgcaaaagaacagccccgcacctggcagtagcggccgaaggggggttgagctcctcttgtcccccacagagttcactattccacccctccgaatctcccagtggatcccgccccagcacacctaaatctgacagtgaacttgtctcaaaaagcacagagcgaacaggtcagaagaatcccgagatgctctggctttggggagagcttccacaggccgctaagtcgagctcgccacataagatgaaagagagttcccccctgagctcccgcaaaatctgtgacaaatcccattttcaggcaattcattcagagtcctcagacacattcagtgatcagagccctaccctggtcggaggcgcgttattggatcagaacaaaccccagaccgaaatgcaattcgtgaatgaggaggatcttgagaccctcggagccgctgccccattgctacctatgattgaggaactcaaacccccatccgctagtgtagtgcagacagccaacaaaacggacagtcctagtaggaaacgggacaaacgctcacgccatcttggggcagatggggtatacctggacgacctcaccgatatggatccggaggtcgctgccctttatttccccaagaacggtgatccctctgggctcgccaagcatgcttccgacaatggcgcaagaagcgcaaaccagtcgcctcagagtgtgggtagctccggtgtagattctggagttgagtccacatccgatggcctccgcgatctaccgtccattgcgatctccctttgtgggggtctctcggatcacagggaaatcacaaaggacgccttcttagagcaggcggtgtcctatcagcagttcgtcgacaatcctgcgatcattgacgatccgaaccttgtggtcaaaattggatccaagtactataactggaccacagcggctccactactgcttgctatgcaggcctttcaaaaaccactgcccaaggctaccgttgagtctattatgcgcgacaagatgcctaagaaaggcggcagatggtggttctcatggagaggtaggaacaccactattaaggaggaatccaaaccagagcaatgtctagccggcaaagctcattcaaccggggagcaacccccccagctttccttggccactagagtcaagcacgagtcctctagttccgacgaggagcgggcagctgcgaagcctagtaacgccggccacctgcccctgttgcccaacgtcagctacaagaagaccctccggctcacttctgaacaacttaaatctttgaagttaaaaaatgggcccaatgatgtagtattctcggttaccacacagtatcagggcacctgccgttgcgagggaacgatttacctgtggaactgggacgacaaagtgatcatcagtgatattgacggtacaatcacccggtccgatacactgggacacatcttgcctaccctgggaaaggattggacccatcagggcattgcaaagctgtaccataaagttagccaaaacggctacaagtttctctactgctctgcaagagctatcggcatggcggacatgacccggggctatctacactgggttaacgagagaggaaccgttctgcctcaaggtcccttgctgctcagccccagctctttattcagcgcattgcaccgcgaagtgattgaaaagaagcctgaaaagttcaaggtgcagtgcctgacagacattaagaacctgttctttccaaacactgagccattctacgccgcctttggtaaccggcccgcggatgtgtacagctacaagcaggtgggcgttagcctgaatcgtattttcactgtgaaccctaagggtgaactggtgcaagaacatgccaagaccaacattagctcatacgtgaggttatgcgaggtagtggatcacgtcttcccccttctgaagagatcccattcatctgattttccctgcagcgatacgttctccaattttacattctggagagaacctctgccaccctttgaaaaccaagatatacattccgcctccgcttag

SEQ ID NO: 193435 - DNA, 1176 bp, synthetic construct
  misc_feature 1..1176: note = Description of Artificial Sequence: Synthetic coding sequence
  source 1..1176: mol_type = other DNA
atgcaggccttccagaagcccctgcccaagagcagctgcctgagctatctgcacgttatccttgacgccatcaggttttgcttctccaagattttcaatgcgcagatcgctaccgtggagtctatcatgagagataagatgcctaagaagggcggaagatggtggttttcctggagagggagaaataccaccataaaggaggaatcaaaacccgagcagtgcctggcggggaaggcgcactccacaggagaacagcctcctcaacttagtttggccaccagagtcaaacatgagtccagctcaagtgatgaagaacgtgcggcagctaagccatcaaacgccgggcacctcccattgttacctaacgtgtcttataaaaaaacactgcgcttaacttcagaacagctgaagagcctgaagctgaagaacggtcctaacgatgtggtgtttagcgtgacaacacagtaccagggcacgtgcaggtgcgaaggcactatctatttatggaattgggatgacaaagtgatcataagcgatattgacggaaccattactcggtcagatacactgggacatatccttccgaccctgggtaaggactggacgcatcaaggaatcgcaaagttgtatcacaaggtgtctcagaacggctacaagttcctgtattgttcagcccgcgctattggaatggccgacatgacacgcggatacctgcattgggtgaacgaacgtggcaccgttttacctcagggacctctactattgagcccctcttccctcttttcagcactacatagagaagtgatcgagaaaaagcccgaaaaatttaaggttcagtgcttgactgatattaagaacctgttttttcctaatacagagcctttctatgcagcgttcgggaacaggccggctgacgtgtactcatataaacaagtcggagtgagcctaaatcgcattttcacagtgaaccccaaaggcgaactggtccaggagcacgccaaaacgaatatcagttcttacgtgcgcctttgcgaagtcgtggaccatgttttccctctgttgaagcgatcccattcgtcggactttccctgcagcgacacttttagcaattttacattttggcgggagcccctacccccgtttgaaaaccaggacatacattccgctagcgcttag

SEQ ID NO: 193436 - DNA, 87 bp, synthetic construct
  misc_feature 1..87: note = Description of Artificial Sequence: Synthetic coding sequence
  source 1..87: mol_type = other DNA
atgaactacgtgggccagctggccggccaggtgttcgtgaccgtgaaagaactgtacaagggcctcaacccggcaacccttagctag

SEQ ID NO: 193437 - DNA, 2691 bp, synthetic construct
  misc_feature 1..2691: note = Description of Artificial Sequence: Synthetic coding sequence
  source 1..2691: mol_type = other DNA
atgagccgggtgcagaccatgaactacgtgggccagctggccggccaagtgttcgttacggtgaaggagctctataaagggctgaatccagctacactttccggctgcatcgacatcatagttatccgccaaccaaacggcaatttacaatgttcgccgtttcacgtcagatttgggaagatgggtgtgttgagatccagggagaaggtcgtggacattgagatcaatggggagagcgtggaccttcacatgaaactgggggataacggggaagccttctttgtgcaggagactgataatgatcaagaagtcattcctatgcatctcgccacctcccccatcctttccgagggcgcctcaagaatggagtgccagcttaagcggggaagcgtggaccgcatgcgaggtctggatcctagcactcccgcacaggttatcgccccatcagagacccccagctcaagtagtgtggtgaaaaaacggagaaaacgcagacggaagtctcaattagactcccttaagcgcgatgataatatgaatacaagcgaagacgaggacatgttccctattgagatgtcttcagacgaagccatggagctccttgagagctcccggacactgccgaatgacattcctccctttcaagacgacattccggaggaaaacttatccttagctgtaatttatccccagtcagcatcctatcctaacagcgatcgtgaatggagcccaactcccagtccctcaggaagtcggcctagcacccccaaaagcgactccgaactcgtttcaaaatccaccgaacgcacaggacaaaaaaaccccgaaatgctgtggctatggggagaactaccacaggcggccaagagcagttcacctcacaaaatgaaggaatcatctcccctcagttcccgaaagatatgtgataagtcccacttccaggctattcactccgaatcatccgatacctttagtgaccagtccccaactttagttggaggcgccctgctggatcagaacaaaccgcagacagagatgcagttcgtgaatgaggaggatctggaaacactgggagcagctgctcccctgttgccaatgatcgaggagttaaaaccccctagcgcctccgttgtacagacagccaataaaaccgacagccccagtcgaaaacgcgacaaaagatctaggcacctgggcgcggatggcgtctatctagatgatctcaccgacatggacccggaggtcgcagcgctgtactttccgaaaaacggggatccttctggacttgccaaacacgcctcggataacggcgctaggtctgccaatcaaagcccccagtccgtcgggtcaagcggagtggatagtggcgtagagagtacttctgacggtctgcgggaccttccctccatcgcgatttcgttatgtgggggactttccgatcatagagaaattaccaaagatgcatttctcgagcaggccgtttcatatcagcaatttgtggacaaccccgccatcatcgacgatcccaatcttgtggtgaaaatcggctctaagtactataattggaccacagctgccccgctgttgcttgccatgcaagcctttcagaaaccactgccaaaggcaacggtggaatctatcatgcgggataagatgcctaagaaaggtggacgctggtggttttcttggagaggacgcaatacaaccattaaggaggagtcaaagccggagcagtgtctggcaggaaaggcacacagcactggcgagcagcccccccagctgagcctggcgacacgtgtgaaacacgagtcctcctcgagtgacgaagaaagggccgccgcgaagccatctaacgcagggcatctgccactgctgcccaatgtctcttacaaaaagaccctcaggctgacgtccgaacagctcaaatcacttaagctgaaaaacgggccaaatgacgtcgtattttccgtcactacccagtaccaggggacctgccgctgtgaagggacaatctacctatggaattgggacgataaagttatcatatcagacatcgatggcacaatcacacgcagtgatactctgggccatatactgcccacattagggaaagattggacccatcaaggcatcgcaaaactgtaccacaaggtgtcccaaaatggttacaaatttctgtactgttctgcgagagccattggcatggccgatatgacgcgcggatatttgcactgggttaacgaaagggggacagttctgcctcaggggccactgctgctcagtccatcaagcttgtttagcgcactgcaccgagaggtgatcgaaaagaaacccgaaaagtttaaggtgcagtgccttaccgatattaagaacctcttcttcccaaacacagagccattttatgcggcctttggtaaccgcccagctgacgtttactcgtacaagcaggtgggggtctctttgaaccggatctttaccgtcaatccgaaaggcgaacttgtgcaagagcacgccaaaacaaatataagctcttacgtgagattgtgcgaggtagttgaccacgtctttccgttattaaagcgatctcacagctcagactttccctgctccgataccttctccaattttactttctggagggagccattacccccattcgaaaatcaggacatccatagcgcaagcgcttag

SEQ ID NO: 193438 - DNA, 291 bp, synthetic construct
  misc_feature 1..291: note = Description of Artificial Sequence: Synthetic coding sequence
  source 1..291: mol_type = other DNA
atgaactacgtgggccagctggccggccaggtgttcgtgaccgtgaaagagctctataaaggcctgaaccccgccactctttccggctgcattgacattatcgttattagacagcccaacgggaatctgcaatgttcacccttccatgtacggttcggcaagatgggtgtgctcagaagccgcgagaaggtggtagatatcgagatcaacggggaatccgtcgacctgcatatgaagctgggggacaacggcgaagcctttttcgtacaggaaacggacaatgaccagtag

SEQ ID NO: 193439 - DNA, 2928 bp, synthetic construct
  misc_feature 1..2928: note = Description of Artificial Sequence: Synthetic coding sequence
  source 1..2928: mol_type = other DNA
atgggcgagcaggacggcatccggagcagcagctgggagaccagccaaggcaaaagttcacccgacagcgcctggtcttggatccctataatgagggatcccggatggatcagaaacgtgtggtcgtcaaacattaacgtccagacaatgaactacgtgggacagttagccggtcaagtctttgtcacagtgaaggaactttacaagggactgaatcccgctacgcttagcggatgtattgacatcatagtcattcgacaaccaaacgggaatcttcaatgcagccccttccacgtgagattcggtaaaatgggggtcctgcggtcgcgcgagaaagtcgtagacatcgagattaacggcgagtctgtggaccttcacatgaagctcggcgataatggagaggcctttttcgtccaggaaactgacaacgaccaggaggtcatccctatgcacctcgcaacaagtcccatattaagtgagggagcatcaagaatggagtgccagctcaagcggggatcagtcgatcgtatgagagggctggacccctctactccagctcaggtcattgcaccatctgagacacctagcagttcaagtgtggtcaagaagcggcgaaaaaggagaaggaaatcccagcttgactccttgaagagggatgacaatatgaatacctcagaagatgaggacatgttccctatcgagatgtcatctgacgaagcaatggaactcctggaatcgtccagaacacttcccaatgacatccccccattccaggacgatatacctgaagagaacctgagcctggctgttatctacccacagagcgcctcctatccaaactccgaccgggagtggagccccactccgagctctctcgtcgactgtaaacgcacagcacctcacttggctgttgctgccgagggagggctgtcttcctcctgccctccccaaagctcactgtttcaccccagcgaatccccttctggcagccgtcctagtaccccaaagtcggacagcgagctggtgtcaaaaagcactgagaggactggccaaaagaacccagaaatgctgtggctgtggggggagctgcctcaagctgcaaaatctagcagcccccataagatgaaagaatcaagccccctctcctcgcgcaagatctgcgataagagtcactttcaggctatccactcagagtcatctgacacgttttctgatcagtcccctacccttgtagggggagccctgctggaccagaacaagccacagactgagatgcaattcgtgaatgaggaagatcttgagaccctcggagccgctgcccctctcttaccaatgatagaggaacttaagccccctagcgcgtccgtggtgcagactgccaacaagaccgactccccaagccggaagcgagacaagaggagcaggcatctgggagcagatggagtgtatttggatgacctaacggacatggaccctgaagtagcagccttgtattttcctaaaaatggtgatccaagtggcctcgccaaacacgcatctgacaacggggcccggtctgctaaccaaagtcctcaaagtgtggggtctagcggagtcgattccggtgtggaaagtacttcagacggtttacgcgacttaccatccatagcgatctccctgtgcggaggtcttagtgaccacagggaaattactaaagatgcctttctggaacaggccgtcagctaccaacaatttgtggacaatcctgccattatcgacgatcccaacctcgtggttaaaatcggctccaagtattacaattggaccactgccgccccactcctcctggctatgcaggcctttcagaagcccctgccaaaagcaactgtggagtccatcatgcgtgataagatgcctaagaaggggggcaggtggtggttctcctggagaggccgcaacactacaattaaggaggagtctaaacccgagcaatgcctggccggaaaagcacactccacaggggagcagccaccccagctttccttagccacccgcgtgaagcatgagagttcctcttcagacgaggagcgcgccgcagccaagcccagtaatgcagggcatctgccgttgctgcccaacgtatcctataaaaagacactgcggctgaccagcgagcagctgaagagcctcaagctgaagaatggccccaatgatgttgtctttagcgtgacgactcaatatcagggtacttgcaggtgcgaggggacgatctatttatggaattgggatgataaggtcatcatatccgacattgatggcaccatcactcgctcagacactctcggccacattttgccaacacttggtaaagattggacccaccaaggtatcgctaaactgtaccacaaggtgagtcagaatggctacaagtttctttactgttctgcgcgagctattggcatggccgacatgacccgaggatacctgcattgggtgaatgagcgcgggaccgtcctcccccaggggcctctgcttctgagcccgagtagcctgttctcggcccttcatagagaagtgattgagaaaaagcccgagaaatttaaagtccaatgcctcaccgacattaagaatctttttttccccaacaccgagccattttacgctgcttttggcaaccgacctgctgatgtgtacagctacaaacaggtgggagtgagcctaaaccgcatcttcacagttaatcccaagggcgagcttgttcaggaacatgccaaaactaatatttcttcctacgtgaggttatgtgaggtggtcgaccatgtctttcctcttctaaagcgtagccactcctctgattttccatgcagtgacacctttagtaactttaccttttggagagaacctctcccaccttttgagaatcaggacatccactctgcatccgcttag

SEQ ID NO: 193440 - DNA, 1380 bp, synthetic construct
  misc_feature 1..1380: note = Description of Artificial Sequence: Synthetic coding sequence
  source 1..1380: mol_type = other DNA
atgagccgggtgcagaccatgaactacgtgggccagctggccggccaggtcttcgtcaccgtgaaagaattgtataagggccttaatccggcgacactgtctggctgtatcgatattatcgtaattcgtcagcccaatgggaacttgcagtgctcccccttccatgtgaggttcggcaaaatgggagtgctcaggtccagagagaaggtggttgatatagaaatcaatggggaatcagtggacttgcacatgaaactgggggacaatggcgaggctttttttgtccaggaaaccgacaacgatcaggaagtcattccgatgcacttggcaacctctcctatcctcagtgaaggggccagccgaatggagtgtcagctgaaacggggcagtgtagacagaatgagaggattggacccaagcacgccggcgcaagtcatcgcaccttctgagacgccctccagctctagtgtggtcaaaaagaggaggaagcgcagaagaaagagccaactggactccttaaagcgcgacgacaacatgaacacatcagaagacgaagacatgttcccaatcgaaatgtcaagcgatgaggctatggaactgctggagagtagcaggaccctgcccaatgacataccgccatttcaagatgacattcccgaggaaaatcttagcctggcggtgatttacccacaaagtgcaagctatccaaatagcgatagggagtggagcccaacacctagcagtctcgtggattgcaagagaactgctcctcacctggcagtagcggctgagggcggactttcctcgagctgtcctcctcagtcaagcctgtttcacccttcagagtctccctctgggtcccgaccttcgaccccaaaatcagacagcgagctggtttctaagtccacagagcgtacgggacagaagaaccccgaaatgttatggctatggggcgaacttcctcaggcagctaaaagttccagtccacacaaaatgaaagagagctccccccttagcagccgcaaaatttgcgacaagagtcacttccaagccatccactctgagtcctctgacacctttagcgatcagtctcctaccttagtaggcggagccttgttggatcagaataagccacagaccgagatgcagttcgtaaatgaagaagatctcgagacgctgggtgctgcagcacctctgctgcccatgattgaagagctaaaaccccccagcgccagcgtggtgcagaccgctaataaaactgattcacccagtaggaaacgagataagaggtctaggcacctcggtgccgatggagtgtatctagatgatctaactgacatggaccctgaggttgcagcattatatttccccaaaaagtag

SEQ ID NO: 193441 - DNA, 2691 bp, synthetic construct
  misc_feature 1..2691: note = Description of Artificial Sequence: Synthetic coding sequence
  source 1..2691: mol_type = other DNA
atgaactacgtgggccagctggccggccaggtgatcgtgaccgtgaaagagctgtacaaaggaattaatcaggctactctgtccggatgtatcgacgtcattgtggtgcaacagcaggacggctcctatcaatgttctccttttcatgtgagattcggaaagctgggtgttctcaggtctaaagaaaaggtcattgacatcgagattaacggaagcgctgtcgatctccacatgaagctaggcgataacggagaagccttctttgttgaggagacagaagaggagtacgagaagttgcctgcctaccttgccacttctcccatccccaccgaggaccagttctttaaagacattgacacaccgttggtcaaatctggtggcgacgagaccccttctcagtcaagcgacatttcccatgtcttggagactgagacaatcttcacccctagttccgtgaaaaaaaagaaaagacgtagaaagaagtacaaacaggacagcaagaaagaagagcaggcagcctcggcagccgccgaggacacctgcgatgtgggcgtttcgtcggatgatgataagggcgcacaggcggctaggggctcttccaatgccagcctgaaggaggaagagtgtaaggagccattactctttcattcaggggatcactatcccctgtccgatggggattggtctcccctggaaacaacttacccccagaccgcatgccccaagtctgacagtgagctggaggttaagccagccgagtccctgctccggagcgaatcccacatggaatggacatggggaggctttcctgaaagtacgaaggtcagcaaaagagaacgcagtgatcaccatccacgtacggctacaataactccttctgaaaacacccacttcagggtgattccctctgaagacaatctcatctctgaggtggagaaggatgccagcatggaggatacggtgtgcactattgtcaagccaaaaccacgggccctgggtacgcagatgagcgatccgacctccgtcgctgagctccttgagcccccgctcgagtctacgcagatctcctccatgctggatgccgaccacctccctaacgccgccttagccgaagcgccaagcgagtctaaaccggcagccaaagtggactcaccctccaaaaagaaaggggtgcataaacggagccagcatcaggggcccgatgatatatacctagacgatctcaaagggctagagcctgaagtggcagccctctattttcccaagagtgaaagcgagcctggctcccgccagtggcccgaatctgacactctctcgggctcccagagccctcagtcagtgggctctgccgctgctgatagcggaactgagtgtctttccgattcagctatggacctccccgacgtcacattgtcactctgtggcggcttgagtgagaacggagaaataagcaaagagaaattcatggaacacatcattacctaccatgagtttgctgaaaatccagggttgattgataatcccaacctggttattagaatatataaccgttactataattgggccttagctgcgcctatgattttgagtctgcaagtgtttcagaagtctcttcccaaggcaaccgtggaaagctgggtcaaggacaaaatgccaaagaaatcaggtaggtggtggttttggcgcaagcgcgaatccatgaccaaacagcttccggagtccaaggaaggcaaatcggaagcaccccccgcctctgacctcccatcctccagcaaggagcctgcaggggcccgaccagcagaaaatgactcaagctcggatgaggggtcccaggagctggaagagtctattacggtggacccaatacctaccgagcccctatcccacgggagcacaacatcatacaagaaaagcctgcggctgtcttctgaccagattgcaaagctcaagctgcatgacggccccaatgacgtcgtgttttccattacaactcagtaccagggcacttgccggtgtgccggcacaatatatctctggaattggaacgataagattattatttccgacatagacggcacaattacgaaaagtgacgccctaggacagatccttccacaactcggaaaagactggacacaccagggcatagcaaagctgtaccactccatcaatgaaaatgggtacaaatttctgtactgctcggctagggccatcggcatggccgacatgacaagaggctacctacactgggtaaacgataaaggcaccattcttccaagaggaccattgatgttgtctccttcaagtctgtttagcgcattccaccgggaggttattgaaaaaaagccagagaagtttaaaatcgagtgcctcaacgatatcaagaacctgtttgcccctagcaaacaacccttctacgctgcctttggaaaccggccaaacgacgtgtacgcttatactcaggtaggggtccctgactgcaggatcttcacagtcaacccaaaaggagaactgattcaggaacgcacaaagggtaataagtcatcataccaccgactgtcagaactggttgagcacgtgttccctctgctgtcaaaagagcagaattccgccttcccatgccctgagttctcctccttttgttactggagagacccaattccggaggtcgacttggacgaccttagctag

SEQ ID NO: 193442 - DNA, 702 bp, synthetic construct
  misc_feature 1..702: note = Description of Artificial Sequence: Synthetic coding sequence
  source 1..702: mol_type = other DNA
atgaactacgtgggccagctggccggccaggtgatcgtgaccgtgaaagaattgtataagggtatcaatcaggcaaccttgagcggctgtattgacgtcattgtcgtccagcagcaggatggctcataccagtgcagtccgtttcatgttcgattcggaaagttgggggttctaagaagcaaagaaaaggtgatagacattgaaattaacggtagcgccgtggacttacacatgaagctcggcgacaacggagaggcgtttttcgtggaggagacagaggaggagtacgagaaactaccagcctaccttgcgaccagccccattccaaccgaagaccagttcttcaaggacatcgatactcccctggtcaaaagtggcggggatgagacgccaagccagagcagcgatatctcccatgtgctggagacggagactatctttacaccttctagcgtgaagaaaaagaagcgaaggcgaaagaagtataaacaagatagtaaaaaagaagagcaggcagcaagtgccgcagccgaagacacctgtgatgtgggagtgtcttcagacgacgataagggcgctcaggcggctaggggtagttctaacgctagtcttaaggaggaagagtgcaaagaacccctactgtttcactctggggaccactacccactgagcgacggcgattggagtccactggagacttag

SEQ ID NO: 193443 - DNA, 2556 bp, synthetic construct
  misc_feature 1..2556: note = Description of Artificial Sequence: Synthetic coding sequence
  source 1..2556: mol_type = other DNA
atgaactacgtgggccagctggccgagaccgtgttcggcaccgtgaaggagctttaccggggtttaaatccagcaactctctccgggggtatcgacgtgctcgtagtaaagcaagtggatggcagttttagatgcagcccgttccatgtccgctttggcaagcttggagttctgaggtcccgggagaaggtggtggacatcgaattgaatggcgagcccgtggatctacatatgaagctaggcgacagcggggaggcttttttcgtccaggagctggagagcgatgatgagcacgtccccccggggctatgcaccagtcccataccttggggcggcctgtccggtttcccttcagattctcagttaggcactgctagtgagccagaggggctggtgatggccggaactgcatcgaccggccgacggaagcgcaggcgcaggcgaaagcctaagcagaaggaggatgcagtggccaccgactcctcacctgaggagctcgaggcaggtgccgaatcagaactgagtctgccggagaagctgcgccctgaaccacccggagtacaactcgaggagaaatcttcattgcagcctaaagatatctatccatatagcgacggtgagtggccaccgcaggcatctctcagcgcaggcgaactgacttcgcctaaaagcgacagcgagctggaggtgaggacaccagaaccaagtcctctgagagcagaaagtcatatgcagtgggcctggggaagacttcctaaagtggcccgagccgagcgcccagaaagcagcgtagttctcgagggccgggccggcgctacttctcctcccaggggtggccccagcacgccgtcaactagcgtggcaggcggggtggatcccctgggcctccctatccagcagactgaagccggggctgatctgcaacccgatactgaggacccaacactagttgggccgcccttacacacaccggagacagaggagtcaaagactcagtcgtccggcgatatgggtttgccccctgcaagtaagtcctggagctgggctacactggaggtcccagttccgactggtcagccggaaagagtcagccgagggaaaggatcccccaaacgcagccagcatttgggccccagcgacatctatttggatgacctgcctagccttgactctgagaacgcagcactctacttcccccagtcggactccgggttgggagcgcgtaggtggtcagaaccctcaagtcagaaatcgctaagagacccaaaccccgaacacgagccagagcccacactcgacactgtggacacaattgctcttagcttatgtggcgggctcgccgactcacgggacatttctttggaaaaattcaatcagcattccgtcagttatcaggatttgactaagaacccaggtctgctggatgaccctaacctggtggtgaaaatcaacgggaaacactacaattgggcggtagcggcccctatgatcctgagtctccaagccttccagaagaacctccctaaatctaccatggacaaactggaaagggaaaagatgccccggaaaggcgggaggtggtggttcagttggcgcagacgcgatttcctggccgaggagcgctccgcccaaaaagaaaagactgcggctaaagagcagcaaggggaaaaaaccgaagtgctgagttccgatgatgatgcacctgatagccctgtgatccttgagataccgagcctgcccccatctacccccccttcaacccctacttacaaaaagtctctacgcctctcttctgaccagatcagacgtttgaatttacaggaaggcgccaatgatgtggtctttagcgtcacaactcagtatcagggcacttgccgttgtaaggcaactatttacctttggaaatgggatgataaagtggtgatctctgacattgatggcaccattacaaaatccgatgcgctaggacatattctgccccagttgggaaaagattggacacatcagggcataacatcactgtatcacaagatccagctgaatggctacaaattcttgtattgcagcgctcgagccatcggcatggccgacctaacgaaaggttatctccagtgggtaagcgaggggggatgctcacttcccaagggaccaatccttttgtcgccatccagcctgtttagcgctttgcatagggaagttatagaaaagaaaccggaagtgttcaaagtggcctgtctgtccgatattcagcagctctttctgccacatggccagcctttttacgcagcttttggtaacagaccaaacgacgttttcgcttatcgtcaggtgggactcccagaatctagaatattcactgtaaatccaagaggcgagttgattcaagagcttataaaaaaccataaaagcacctatgaaaggctgggcgaagttgttgaactcctttttccccccgtggcaagaggccctagcacggatctcgctaatcctgagtactcaaatttctgttactggcgcgaacccctccctgccgtcgatctggacaccctggattag

SEQ ID NO: 193444 - DNA, 1242 bp, synthetic construct
  misc_feature 1..1242: note = Description of Artificial Sequence: Synthetic coding sequence
  source 1..1242: mol_type = other DNA
atgggcctgccccccgccagcaagagctggagctgggccaccctggaagtgcccgtgcctaccggacagcctgagcgagtaagccgcgggaaaggctctccaaagaggtctcagcacctcgggccttcggacatttacctggatgatctaccatctctggattcagaaaacgcggcgctctacttccctcagtctgactccggtcttggagcccgccggtggagcgaaccatctagtcagaaaagcctgcgagatcccaatccagagcacgaaccagaaccaaccttagatacggttgacacgatagccttgtccctttgcggcgggctggcggatagcagagacatctccctggaaaagttcaaccaacacagcgtgagctaccaagacttaacaaagaatcccggcttgttggacgacccaaatctagttgtgaaaattaatggaaagcactacaattgggcggtagccgcgccgatgatcctgagtctacaggcctttcaaaaaaacctccccaaacgttcagcacagaaggagaagactgccgcaaaggagcaacagggagagaagaccgaggtcctatcctctgatgacgatgcccccgattcacccgttatcttagaaatcccctcactgcctcctagcactcctccttccacccccacatacaaaaagtcccttcggctatctagcgaccagattcggcggttaaacctacaggaaggcgccaacgacgtggtgtttagcgtgactacacagtaccagggaacctgtcgctgcaaagcgacaatttacctgtggaagtgggacgacaaagtcgtgatcagcgacattgacggaaccataacgaagagcgatgctttggggcacattttaccacaacttggcaaggactggacgcaccagggcatcaccagtctttaccacaagattcaattgaatggctacaagtttctttattgctccgctagggccatcgggatggctgacctgacgaagggttatctgcagtgggtctccgaagggggatgctctttacccaaaggtcccatcctgctgagtccatcaagcttattttccgccctgcatcgcgaagtgatagagaaaaaacctgaggtctttaaggtggcttgcttgtcggacatccagcagctctttcttccacacgggcagccattttacgcagcttttgggaataggccaaatgacgtgtttgcatatagacaagtgggtctgccttag

SEQ ID NO: 193445 - DNA, 813 bp, synthetic construct
  misc_feature 1..813: note = Description of Artificial Sequence: Synthetic coding sequence
  source 1..813: mol_type = other DNA
tgagtgaagatcaacggcaagcactacaactgggccgtggccgccccgatgatcctctccttacaggccttccagaaaaatctacccaagagatcagcacagaaggaaaaaacagctgcaaaagagcagcagggcgagaagaccgaggtcctctcatcagatgacgacgcccccgattcacccgtaatactggagatcccctctctccctccaagcacacccccaagcacaccaacttacaaaaaaagccttagactgtcctctgaccagatacgccgactgaatctgcaggaaggcgccaacgacgtggttttttccgtaactactcagtatcaggggacctgccgatgcaaagctacaatttatctgtggaagtgggacgacaaggtggtgatctctgatattgacggcaccataacaaagtctgatgccctggggcatattttaccacaactgggcaaggattggacacaccaggggataaccagcttatatcacaaaatccagctgaacggctacaaattcctgtattgttccgcgcgggcaataggaatggcagacctaaccaagggttacttacagtgggtttcagaaggaggatgttctctgcctaaaggcccaattctgctctccccttctagcctgtttagtgccctgcaccgcgaggtcatcgagaagaaaccagaggtcttcaaggtggcgtgtctcagtgacatccaacagctctttctgccccacggacagccgttttacgctgcatttggcaatagacccaatgatgttttcgcttaccgccaggtcggactgccctag

SEQ ID NO: 193446 - DNA, 531 bp, synthetic construct
  misc_feature 1..531: note = Description of Artificial Sequence: Synthetic coding sequence
  source 1..531: mol_type = other DNA
atgaagcccctgctgctggccgtgagcctgggcctgatcgccgccctgcaagctcaccatctgttggcttcagatgaggaaatccaggacgtctctgggacctggtatctgaaggccatgacagttgatcgggagtttcctgaaatgaatctcgaatctgtcacacctatgacacttactacactcgaggggggtaacctggaagccaaggtgacgatgctcataagcgggagatgtcaagaagtcaaagctgtgctggaaaagactgatgaaccagggaaatacaccgccgacgggggaaaacacgtagcttatatcatcaggtctcacgtgaaggatcactacattttttactgtgaaggggaactgcacgggaagcccgtgcgtggggtgaaactggtcgggcgtgaccctaagaataatctcgaggctttggaggatttcgagaaagcagccggcgcccggggcttgagcaccgagtcaattctcatcccccgccaatccgagacatgctctcccggtagcgattag

SEQ ID NO: 193447 - DNA, 531 bp, synthetic construct
  misc_feature 1..531: note = Description of Artificial Sequence: Synthetic coding sequence
  source 1..531: mol_type = other DNA
atgaagcccctgctgctggccgtgagcctgggcctgatcgccgccttgcaggcacatcacctgctggccagtgacgaagagatccaagacgtatccgggacttggtacctcaaggctatgacagtggaccgcgagtttcctgagatgaatcttgagtccgttaccccaatgactctcacaacattggaaggtgggaatttggaggccaaggttacaatgctcatcagtggcaggtgtcaagaagtcaaagcagtcctggaaaaaaccgatgaacccggaaagtacaccgccgacggcggcaagcacgttgcttatataatacggagccatgtgaaggatcactacatattctattgcgagggagagctgcatgggaagccagttcggggcgtgaaattagtggggcgcgatcccaaaaataacctggaggcgctggaggacttcgagaaggcagccggagcccgggggctgtccaccgagtctattttgatccctcgacagtctgagacctgctctcccggtagcgactag

SEQ ID NO: 193448 - DNA, 564 bp, synthetic construct
  misc_feature 1..564: note = Description of Artificial Sequence: Synthetic coding sequence
  source 1..564: mol_type = other DNA
atgcggcagggcctgctggtgctggccctggtgctggtgctggtgttagtactggccgcaggctcacaggttcaagagtggtacccccgcgaaagccatgctctgaattggaataagttctctgggttctggtatattctggccaccgcgacagacgctcagggattcttacccgctcgggataaaaggaaactgggcgcatctgtcgttaaggtgaataaagtcgggcaactgcgggttctgctcgcatttagacgtggccagggttgcggtcgagcacagccaaggcatccgggcacctccgggcacttgtgggcctcgctgagcgtgaaaggggtgaaagcatttcatgtcctctctacagattactcttatgggctggtgtacctacgcctcggtcgagcaacacagaattataaaaatctacttctattccatagacaaaacgtctccagttttcaaagtctgaaagagtttatggacgcatgtgacattctcggcctcagcaaggctgccgtaatcctgcctaaagatgcctcccgcacacatacgattctgccttag

SEQ ID NO: 193449 - DNA, 603 bp, synthetic construct
  misc_feature 1..603: note = Description of Artificial Sequence: Synthetic coding sequence
  source 1..603: mol_type = other DNA
atgcggcagggcctgctggtgctggccctggtgctggtgctggtgcttgtcctggctgctggatctcaggttcaggagtggtatccaagagagagtcatgcgctgaactggaataagttctcaggcttttggtacatcctcgcaaccgctaccgatgcgcagggcttccttcccgctcgggataagaggaagctgggggcttcggtggttaaggtcaataaggtgggacagctgcgtgttctcttggccttcaggcgcctcaagggctgtcaatcacaggaagttatcctgcggaaggacggcaagaaacctgtctttggcaacgcttgtgcctatgccgctgggcctagagaggggcaagagggcgtcaagggggtcaaagcattccacgttctgagcacggattattcttacggactcgtgtacctgcgtctaggaagagccacccagaattacaaaaatctcctactgttccatcgtcaaaacgtgagtagttttcagtctctgaaggagttcatggatgcctgtgacatcctgggattgtccaaggctgcagtcatcctgcctaaggacgcttctaggacccacaccattcttccttag

SEQ ID NO: 193450 - DNA, 273 bp, synthetic construct
  misc_feature 1..273: note = Description of Artificial Sequence: Synthetic coding sequence
  source 1..273: mol_type = other DNA
accttcgagctgagcgacgacggccggttcgaggtgtggaacgccatgaccagaggacagcactgtgacacctggtcctacgtgttgatccccgccgctcaaccgggtcagttcacagtggaccatggggttgacacgagggccggctggccatcctctgggagtgcctgctgggcaggcgctggctgttgtttacctggacgatggacatcatcttccgcctgggctgagctacgagccagtcgaatgacgaccagttcatcccagatgtag

SEQ ID NO: 193451 - DNA, 579 bp, synthetic construct
  misc_feature 1..579: note = Description of Artificial Sequence: Synthetic coding sequence
  source 1..579: mol_type = other DNA
atgcggctgctgtgcggcctgtggctgtggctgagcctgctgaaggtgctgcaggcccaaacaccgacccccctgcccctgcccccgccaatgcagagttttcagggaaatcagttccagggcgaatggttcgtgctcggactggccggtaactcatttcgcccagagcaccgggccctgctgaatgcgttcactgccacatttgagctatccgacgatgggcgcttcgaggtgtggaacgccatgacgaggggacagcactgtgatacttggtcctacgtgctgatccccgccgctcagcctggacagttcacagttgaccacggagtcgagcccggagctgaccgcgaagaaacgagggtggtcgatagcgattacacacagttcgcgttaatgctttccagaagacatacctcacgtctggcagtgctgaggatctcccttctgggaaggagctggctgctcccccccgggactctggaccagttcatttgtctcggcagggcacaaggcctgagtgacgacaacattgtgtttcccgacgttacaggttggtcaccccaggctagtgtctgttag

SEQ ID NO: 193452 - DNA, 597 bp, synthetic construct
  misc_feature 1..597: note = Description of Artificial Sequence: Synthetic coding sequence
  source 1..597: mol_type = other DNA
atgcccctgggcctgctgtggctgggcctggccctgctgggcgccctgcatgcccaagcccaggactctacctccgatctgattccagccccccccctgtctaaagtaccgctccaacagaacttccaagacaatcagttccaaggcaagtggtacgtcgtgggcctggccggcaatgccatcctccgagaagataaggacccacagaaaatgtatgcaactatctatgaattgaaggaggacaaaagctacaacgtcacatccgtgctgttccggaagaagaagtgcgattactggatacgtacttttgtcccagggtgccaacccggcgagtttactttggggaacatcaaaagttatcctggtctcacttcttatttagtccgagtggtgtcaactaactacaaccagcacgcaatggtcttcttcaaaaaagtgtctcagaaccgcgaatactttaaaataaccttatacggtagaacaaaggagttgacgagtgaactgaaagagaacttcatcaggttctccaaatcactgggactacctgagaaccatatcgtgttccctgtgccaattgaccaatgtatagatggctag

SEQ ID NO: 193453 - DNA, 603 bp, synthetic construct
  misc_feature 1..603: note = Description of Artificial Sequence: Synthetic coding sequence
  source 1..603: mol_type = other DNA
atgcccctgggcctgctgtggctgggcctggccctgctgggcgccctgcacgcacaggcccaggacagtacctctgatttgatacccgctccacccctgtctaaagtgccattgcagcagaattttcaggataatcagttccagggcaaatggtacgtggtagggctggctggtaacgctattctgcgtgaagacaaggatccccaaaagatgtatgcaactatttatgaactgaaggaggataagtcctacaatgtgacatccgtgctttttcgcgagaaagctcagaaatgtgactactggattcgaacctttgttccgggctgccagccaggggagttcacccttgggaatatcaagagctatccagggctgaccagctatctagtgcgggtggtgtccactaattacaaccagcacgccatggtcttcttcaagaaggtgagtcagaaccgggagtactttaagattactttgtatggtagaaccaaagagctgacatccgagctgaaggagaattttatacgattctcgaagtcactgggtctgcccgagaatcacatcgtttttccggttcccatcgaccagtgcatcgatggatag

SEQ ID NO: 193454 - DNA, 603 bp, synthetic construct
  misc_feature 1..603: note = Description of Artificial Sequence: Synthetic coding sequence
  source 1..603: mol_type = other DNA
atgcccctgggcctgctgtggctgggcctggccctgctgggcgccctgcatgcacaggcacaagattccacttccgacctcatcccagcaccccctctctcaaaagttcctctccagcaaaatttccaagataaccagtttcagggtaaatggtacgttgttggattagcgggtaacgccatactgcgagaagataaggatccacagaagatgtatgcaaccatatacgaactcaaggaggacaagtcgtacaatgtcacgtccgtgctgtttcgtcagtggaagaaaaaatgcgactattggattcggaccttcgtgcccggatgccagcctggcgaatttactctcggaaacattaaatcctacccaggcctaacaagttacctggtgagggtggtaagtaccaattacaaccagcatgctatggtgttttttaagaaagtatcacagaatagggagtatttcaaaataactctgtatggtagaaccaaggaactgacgtccgaactgaaggaaaatttcatccgcttttccaagagcctggggcttccagagaaccatattgtgttcccagtcccaatcgatcagtgcatcgatggttag

SEQ ID NO: 193455 - DNA, 597 bp, synthetic construct
  misc_feature 1..597: note = Description of Artificial Sequence: Synthetic coding sequence
  source 1..597: mol_type = other DNA
atgcccctgggcctgctgtggctgggcctggccctgctgggcgccctacatgcacaggcacaggatagcacttcagatctgatacctgcccccccacttagtaaggttccgctgcagcaaaatttccaagacaaccagtttcaaggaaaatggtatgtggtggggctggccgggaacgccatcctaagggaggacaaagacccgcagaagatgtacgccaccatttatgaactgaaggaggataagtcctacaacgtgacctctgtgctgtttcgcaaaaagaagtgcgattactggatcagaacattcgtgcctgggtgccagccgggtgagtttacactggggaacatcaaaagctacccaggacttacaagttacctggttcgcgtggtctcaactaattataatcagcacgccatggtgtttttcaagaaagtatcacaaaatagggagtattttaaaatcactttgtatgggcggaccaaggaactgacatccgaactcaaagaaaatttcatccggttcagtaagtctctggggctacctgagaaccacatagtcttccctgtacccatagatcagtgcattgacggttag

SEQ ID NO: 193456 - DNA, 597 bp, synthetic construct
  misc_feature 1..597: note = Description of Artificial Sequence: Synthetic coding sequence
  source 1..597: mol_type = other DNA
atgcccctgggcctgctgtggctgggcctggccctgctgggcgccttacatgcacaggctcaggatagtacaagcgacttgatcccagcccctccactttccaaggtccctttacagcagaattttcaggacaatcagttccagggcaagtggtacgtagtgggcctagccggtaatgcaattctgcgcgaagacaaagatcctcagaaaatgtatgcgacaatctatgaactgaaagaggacaagagttacaatgtgaccagtgtgctattccgaaaaaagaagtgcgactattggatccggactttcgtgcctggctgtcagcccggcgagttcaccctcgggaatattaagtcctacccagggctgacatcgtacttggtgagggtggtgtctactaactataaccagcacgctatggtgttttttaaaaaagtgagccagaacagggaatactttaaaataaccctgtatggaaggaccaaggaacttacaagtgagctgaaagagaatttcataaggttcagtaagagtctaggactgccagagaatcacattgtatttcctgtaccaattggcaatggtcagagcggatag

SEQ ID NO: 193457 - DNA, 492 bp, synthetic construct
  misc_feature 1..492: note = Description of Artificial Sequence: Synthetic coding sequence
  source 1..492: mol_type = other DNA
atgggcggcctgctgctggccgccttcctggccctggtgagcgtgcccagagcccaggctgtttggctggggagacttgaccctgagcaactactgggtccctggtacgtgctggccgtcgccagtcgggaaaaaggctttgctatggaaaaggacatgaaaaacgtggtcggcgtcgtagtgactcttacccccgaaaacaaccttcggaccctgtcttcccaacacggacttggggggtgtgaccagtcagtgatggatcttatcaagcgaaattccgggtgggtctttgagaacccttccattggagtgttagagttatgggtcctcgcaacgaactttcgcgactatgctataatttttacacagttagaatttggagacgagccctttaatactgtcgagctttattccttgacagaaactgccagtcaggaggcaatgggcctgtttactaagtggtctcggtccctggggtttctgtcacagtag

SEQ ID NO: 193458 - DNA, 459 bp, synthetic construct
  misc_feature 1..459: note = Description of Artificial Sequence: Synthetic coding sequence
  source 1..459: mol_type = other DNA
atggaggagctggaccggcagaagatcggcggcttctggcgggaggtaggtgtggcctcagaccagtctctggttcttacagcacccaagagggtggagggcctattcctcacactctctggcagcaatcttactgttaaggttgcctataacagttccggctcctgcgaaatcgaaaagatagtgggctctgaaattgattccacgggtaagttcgcgtttccagggcacagggaaattcatgtgctggacacggactacgaaggttacgccattctgagagtctccttaatgtggagggggcggaatttccgagtgttgaagtattttacccgctctttagaagacaaggacagattgggtttctggaaatttagggagctgactgccgacactggcctgtatctggcggcaagacctgggagatgcgcagaattgctgaaggaagagctgatctag

SEQ ID NO: 193459 - DNA, 531 bp, synthetic construct
  misc_feature 1..531: note = Description of Artificial Sequence: Synthetic coding sequence
  source 1..531: mol_type = other DNA
atggccctgctgctgctgagcctgggcctgagcctgatcgccgcccaggaattcgaccctcacaccgtgatgcagaggaattataacgtggccagagtatccggagtgtggtactcaatcttcatggcgtctgacgatctgaaccgaatcaaggaaaacggtgacctgcgggttttcgtaagaaacatcgagcacttgaagaacgggagtcttatcttcgacttcgagtacatggttcagggagagtgcgtagccgtggtggtggtgtgcgagaagacagagaaaaacggcgagtactccataaactatgaggggcagaataccgtggccgtgtcagagaccgactaccgactgttcatcacttttcaccttcagaactttagaaacggcaccgagactcacaccctagccctctatgagacttgcgaaaagtatgggttgggaagtcagaacatcatcgacctcactaacaaagacccttgctattccaagcactaccgctctccgccgcgcccaccaatgaggtggtag

SEQ ID NO: 193460 - DNA, 1119 bp, synthetic construct
  misc_feature 1..1119: note = Description of Artificial Sequence: Synthetic coding sequence
  source 1..1119: mol_type = other DNA
atgagcctgcggtgcggcgacgccgcccggaccctgggcccccgggtgttcggacgttatttctgtagtcctgtccggccattaagttccctgccagataaaaagaaggaacttcttcagaacggaccagacttgcaggacttcgtgtctggcgacctggccgatcgctccacttgggacgagtacaaggggaacctgaagcgtcagaagggggagaggttaaggttgccaccttggctgaagacagagattcctatgggcaagaactataacaagcttaagaacactctccggaacttgaatctgcataccgtgtgcgaggaggcaagatgcccaaacataggagagtgctggggcggcggagaatatgctactgctaccgctactattatgttgatgggcgacacatgcactcgaggatgtcgcttctgctccgtcaagacggcaagaaacccgcccccgctggatgcaagtgagccctacaatacagccaaggctatcgccgagtggggtctcgattatgtagtgctgacttctgttgaccgcgacgacatgccagatggtggggccgagcatattgcgaagacagtctcatacttgaaggagcgcaacccgaaaattttggttgaatgcttgacccccgattttaggggagacctgaaggctatcgagaaggtggcactgtccgggctcgatgtctatgcacacaacgtggaaacagtgcctgagctgcagtcaaaggtgagggatcctcgcgcaaacttcgaccagtctctaagggttttaaaacacgctaagaaagtccagcccgacgtcatttcgaaaaccagcattatgctcggtctcggggagaacgacgagcaggtgtatgcaacaatgaaggctcttcgcgaagccgacgtcgattgccttaccctcggacaatatatgcagcccaccagacggcatcttaaggtggaagagtatataactcctgagaaatttaagtattgggagaaggtgggtaatgagctgggtttccactataccgcaagcggtccactcgtgagaagcagttataaagccggtgaattctttcttaagaacctggtggctaagcgcaagacgaaggacctttag

SEQ ID NO: 193461 - DNA, 969 bp, synthetic construct
  misc_feature 1..969: note = Description of Artificial Sequence: Synthetic coding sequence
  source 1..969: mol_type = other DNA
atgagcctgcggtgcggcgacgccgcccggaccctgggcccccgggtcttcggccggtatttttgttctcccgtgcggccgctgtcctctctgccagataagaagaaagaactcctgcagaacggccccgatctgcaggattttgtctctggggacttggcagatagatctacatgggatgaatacaagggcaacctgaagaggcagaagggagaaagactgaggttaccaccttggctgaagacagagattcccatgggcaagaactataacaagctgaagaataccctacggaatttgaacctccatactgtctgcgaagaggcccgctgtccaaatatcggtgagtgttggggtggcggtgagtacgctaccgcaactgctaccatcatgctgatgggcgatacttgtacaaggggctgtagattttgcagtgtgaaaacggcacgcaacccgcccccattggacgccagtgagccctacaacacagctaaagcaattgcagagtggggactggattatgtcgtgctgactagcgtcgaccgggacgatatgcctgacggcggagccgaacacattgcaaagaccgtgtcctacttaaaggaaagaaatcccaaaatcctagtggaatgtctcacacccgattttaggggggacctaaaagccatcgaaaaggtggctctgtctgggctggatgtttacgcccacaacgtcgagactgtgcctgaactgcagagtaaagtgcgggatcccagggccaacttcgaccaatccctccgggtgcttaagcacgctaaaaaagttcaaccagacgtcatatccaaaaccagcatcatgctgggcttgggcgagaatgatgaacaggtatacgccaccatgaaggcgctcagagaagccgatgtggattgcctgactttagggcagtatatgcagcccacccgccgccacctgaaagtgaatttctcctag

SEQ ID NO: 193462 - DNA, 603 bp, synthetic construct
  misc_feature 1..603: note = Description of Artificial Sequence: Synthetic coding sequence
  source 1..603: mol_type = other DNA
atggccagcagcctgacctgcaccggcgtgatctgggccctgctgtcattcctttgcgccgccacgagttgcgtaggatttttcatgccttattggctgtggggaagtcagcttggaaaacccgttagtttcggcaccttccgccgatgctcctaccctgtccatgacgagagcagacagatgatggtcatggtggaagagtgcggccggtacgcgtcttttcaggggataccatcagctgaatggaggatttgtaccatcgtaacaggcctcggatgtggactgttgcttctggttgcgctcaccgccctgatggggtgctgtgtctccgacctgatatctcgcaccgtggggagggtggcaggagggattcagttcctcggggggctgcttatcggggctggatgcgctttatacccactggggtgggatagcgaggaagttaggcagacttgtgggtacacaagcggtcagtttgatctgggaaagtgtgaaattggatgggcctattattgtaccggagcaggagccacagcggctatgctgctttgtacttggctagcatgtttctcagggaaaaagcagaagcactatccatattag

SEQ ID NO: 193463 - DNA, 663 bp, synthetic construct
  misc_feature 1..663: note = Description of Artificial Sequence: Synthetic coding sequence
  source 1..663: mol_type = other DNA
atgcggagcagcctgaccatggtgggcaccctgtgggccttcctgagcctagtgacggctgtcacatcatctactagttactttctgccttattggttattcggctcccaaatgggaaaacccgtgagtttttctacatttagacgctgcaactaccctgttcgaggggagggtcactccttgatcatggtcgaagagtgcggccggtacgcctcctttaacgccatcccaagtcttgcctggcagatgtgcaccgtggttaccggcgctggttgtgctttgcttctgcttgtggccctggccgctgtgcttgggtgttgtatggaagaactgatctcccgcatgatgggcagatgcatgggggctgcccaattcgtgggtggtctgctgattagttccggatgcgcactctaccctttggggtggaatagcccagagattatgcagacatgcggtaacgtctccaatcagttccagctgggaacctgcagattaggatgggcctactattgcgctggcggaggggctgcggcagccatgttaatatgtacttggttgagctgtttcgcaggcaggaatcctaagcccgttatactggtggagtcaattatgcgcaatactaactcatacgccatggagctggaccactgtcttaaaccgtag

SEQ ID NO: 193464 - DNA, 564 bp, synthetic construct
  misc_feature 1..564: note = Description of Artificial Sequence: Synthetic coding sequence
  source 1..564: mol_type = other DNA
atgcggagcagcctgaccatggtgggcaccctgtgggccttcctgagcctggtgaccgcagtgaccagttctacatcctattttctgccctactggttattcggttcacagatgggcaaacccgtgtcattcagtacctttcgtaggtgtaattatcctgtgaggggcgaagggcatagtctgatcatggtggaggaatgtggccgatacgcctcctttaacgctatccccagcctggcgtggcagatgtgcacagtcgtgaccggggctgggtgcgctctactgcttcttgtagccctggctgcagtcttggggtgttgcatggaggagctaatatcccgcatgatggggcggtgtatgggggccgcacagtttgttggaggcacctgcaggttgggatgggcttactactgtgccggcggcggcgccgctgccgctatgcttatttgcacatggctttcttgctttgcaggcaggaatccgaagcccgtcattctcgtggagtccataatgagaaacactaactcttatgccatggagctcgaccattgcctgaaaccttag

SEQ ID NO: 193465 - DNA, 687 bp, synthetic construct
  misc_feature 1..687: note = Description of Artificial Sequence: Synthetic coding sequence
  source 1..687: mol_type = other DNA
atgtgccacgtgatcgtgacctgccggagcatgctgtggaccctgctatccatcgtcgtggcgtttgccgagctgatcgcattcatgagcgcagattggctcatcggcaaggcccgttcaagggggggcgtggagcccgcaggcccgggcggcggttcccccgagccttaccatcctacacttggcatttatgctcggtgtataagaaacccaggggtccaacacttccagcgtgacaccctgtgcggtccttacgcggagtcctttggagagattgcgagcggcttttggcaggccaccgcaatattcctggccgtgggtatctttattctatgtatggtggccttggtaagtgtgtttactatgtgcgtccagtctattatgaaaaaatctatcttcaacgtctgcgggcttctccaggggatcgcaggtcttttcctgatcctcggattaattctctaccctgctgggtggggctgtcagaaggccatagactactgtggtcattatgcttcagcgtacaaacccggggattgttctcttgggtgggccttctataccgcaatagggggaacagtgttgacattcatctgtgccgtcttctccgcacaggcggagatcgccacatcctccgacaaagtgcaggaggagattgaggagggcaagaacttaatatgtctcttatag

SEQ ID NO: 193466 - DNA, 687 bp, synthetic construct
  misc_feature 1..687: note = Description of Artificial Sequence: Synthetic coding sequence
  source 1..687: mol_type = other DNA
atgtgccacgtgatcgtgacctgccggagcatgctgtggaccctgctctctatcgtcgtggcttttgccgagctgatagcttttatgtctgcggattggctgattgggaaggcccgatcaaggggaggggtcgagcccgcaggacccggaggtggcagccccgaaccgtatcaccctactctggggatctacgctcgctgcattcgaaatcctggggtccaacactttcaacgggatactctttgtgggccctacgctgaatcttttggggagattgcatcaggattctggcaagctacagcgattttcttggctgtgggcatctttatcttgtgtatggttgctctggtgagtgtgtttacgatgtgcgtgcaaagcattatgaaaaagtccatttttaacgtctgcggtctgctgcagggcattgcgggcctgttcctgatcctgggccttattctctaccctgcgggatgggggtgtcagaaagcgatcgactattgtgggcactatgcgtccgcctacaagcctggcgactgttcgttagggtgggcattttacactgctatcggggggaccgttctcacattcatatgcgccgtcttctctgcccaggcagagatcgcgacctcgagcgacaaagtacaggaggaaatcgaggagggtaagaacctgatttgcttactgtag

SEQ ID NO: 193467 - DNA, 669 bp, synthetic construct
  misc_feature 1..669: note = Description of Artificial Sequence: Synthetic coding sequence
  source 1..669: mol_type = other DNA
atgctgcccgcccaggaggccgccaagctgtaccacaccaactacgtgagaaacagcagagccattggggtactgtgggctatcttcaccatctgctttgccatagtcaatgtcgtgtgtttcatacagccctactggatcggagacggcgtagacacaccccaggctgggtactttggcctttttcattactgtatagggaacggattttcccgggaattgacttgcaggggcagctttactgacttcagtaccctgccctcaggagctttcaaggccgcttctttttttatcggactgtcaatgatgctgattatcgcttgcattatttgctttaccctctttttcttctgtaatacagcaacagtttacaaaatctgtgcgtggatgcagctcacctcagcggcgtgtcttgtgttggggtgcatgatcttccccgatggttgggacagtgatgaggtcaaacgaatgtgcggcgaaaagacagataagtacacactcggcgcctgcagcgtgagatgggcttacatcctggcaattatcggcatcctcgatgccctgatcttgagcttcctggcctttgtgctggggaatagacaagatagtctgatggccgaggagctaaaagctgagaataaagtgcttctgagccagtactcacttgagtag

SEQ ID NO: 193468 - DNA, 711 bp, synthetic construct
  misc_feature 1..711: note = Description of Artificial Sequence: Synthetic coding sequence
  source 1..711: mol_type = other DNA
atgcccggcgccgccgccgccgccgccgccgccgccgccgccatgctgcctgcacaggaagccgccaagctgtaccataccaactacgtgcgaaatagccgcgctattggtgtactctgggccatcttcacaatctgttttgccatcgtgaatgtggtttgcttcatccagccgtattggattggtgacggtgtggacactccccaggcaggctatttcggtctgttccactactgtatcggcaacggcttttcccgcgagcttacttgccgtggctcctttacagatttctcgactctgccctccggtgcctttaaggcggccagcttcttcatcggtctcagtatgatgctcatcatcgcttgtatcatttgctttacattgttctttttctgtaacaccgccaccgtctataaaatttgcgcttggatgcaactcacttctggcgactgtttggttctttttgaccttcacttcccagacggttgggattctgatgaagtgaagcgtatgtgtggcgagaagacagacaagtatacgttgggggcttgctccgtacggtgggcgtatattctagctattatcggcattctggatgcactgattttatccttcctggcttttgttctgggtaatagacaggatagcctcatggccgaagaattgaaggctgaaaacaaagtgcttcttagccagtattctctcgagtag

SEQ ID NO: 193469 - DNA, 699 bp, synthetic construct
  misc_feature 1..699: note = Description of Artificial Sequence: Synthetic coding sequence
  source 1..699: mol_type = other DNA
atgcccggcgccgccgccgccgccgccgccgccgccgccgccatgctgccggcccaagaggcagctaagctgtaccacacaaactacgtgcgaaactcccgcgcaattggggtgttgtgggcgatatttaccatctgttttgccatcgtgaacgtggtgtgcttcatacagccgtattggatcggcgatggtgtggacaccccccaggccgggtatttcgggctctttcactactgcatcggaaatggcttcagtcgagagctgacatgtagggggtccttcaccgattttagcaccctcccttcgggcgcttttaaggctgccagcttcttcataggtctctcaatgatgttaatcatcgcctgtatcatttgtttcaccctgttcttcttctgcaataccgccactgtttacaaaatttgtgcgtggatgcaattaacatctggggattgcctggtgctgtttgacctgcatttccccgacggatgggactcagatgaagtgaagcgcatgtgcggggagaaaaccgataagtacactcttggagcctgttctgtgcggtgggcctatatcctggccattattgggatcttagacgccctgattctgtcatttctggcttttgtgctgggaaaccgacaggactccctaatggcagaagaattaaaagctgaaaacaaggatgacgggaatgcttag

SEQ ID NO: 193470 - DNA, 660 bp, synthetic construct
  misc_feature 1..660: note = Description of Artificial Sequence: Synthetic coding sequence
  source 1..660: mol_type = other DNA
atggtgaagctgctgcccgcccaggaggccgccaagatctaccacactaactacgtgagaaactctcgggcggtcggtgttatgtggggcacattaacaatctgttttagtgtccttgtgatggccctgtttattcagccctactggattggtgactctgtgaataccccgcaagccggctactttggtctcttttcatactgtgtagggaatgtactgtcttcggagctcatatgcaagggtgggccgttggacttctcgagcattccatcacgcgcctttaagacagcaatgtttttcgtagctctcggaatgtttctcataataggcagtatcatttgcttctctttattctttatctgcaacactgctaccgtctacaagatatgcgcatggatgcagctcgcagctgcaaccggacttatgataggctgtctcgtgtacccagatggttgggatagctccgaagtgagaagaatgtgcggcgaacagacaggaaaatacactctgggccactgtaccattagatgggcctttatgttagccattctttctattggcgacgccctgatattgtcattcctggcattcgttctgggatatagacaggacaagctgctcccggatgattacaaggccgacgggactgaggaagtgtag

SEQ ID NO: 193471 - DNA, 660 bp, synthetic construct
  misc_feature 1..660: note = Description of Artificial Sequence: Synthetic coding sequence
  source 1..660: mol_type = other DNA
atggtgaagctgctgcccgcccaggaggccgccaagatctaccacaccaactatgtaaggaattctcgggcagtgggcgtcatgtggggtaccctgaccatttgttttagcgtccttgtcatggccctctttattcaaccttattggatcggagactctgtgaatacaccccaggcagggtacttcggcctctttagttactgtgtgggtaatgtgctgtcctccgaactcatttgtaagggcggccctctggatttttcttccattccttcgagagccttcaagactgccatgttctttgtggctctgggtatgttcctcatcattggctcaattatctgtttttctctcttttttatctgcaatacagccactgtgtacaaaatatgtgcttggatgcagctcgcagccgccactggcctcatgattggctgcttggtttaccctgacgggtgggacagttcggaggttcgaagaatgtgtggggagcagaccggcaagtacaccctcggccattgcaccattaggtgggcttttatgctcgctatcttatctataggagacgcgctaatcctgtcctttttggcctttgtcctgggctaccggcaggataaactacttcccgatgactataaggcagatggaaccgaagaagtctag

SEQ ID NO: 193472 - DNA, 675 bp, synthetic construct
  misc_feature 1..675: note = Description of Artificial Sequence: Synthetic coding sequence
  source 1..675: mol_type = other DNA
atgagcgtgttcggcaagctgttcggcgccggcggcggcaaggccggaaagggcggccctaccccccaggaggctattcaaagactgcgcgacactgaagaaatgctgagtaagaagcaagagtttcttgagaaaaagattgaacaggagcttacggctgcgaaaaagcacggtaccaagaataagagagctgccctgcaagcactgaagaggaagaagcgctatgagaaacagctcgcccagatcgatggcaccctaagtaccatcgagtttcagcgagaggcactagagaatgctaacacaaacacggaggtactcaagaatatgggctatgccgcaaaagctatgaaggccgctcacgataacatggatatcgacaaagtagacgagcttatgcaggacatagctgatcagcaggaactagctgaggagatcagtacagccatctcgaagccagtgggttttggcgaggagttcgacgaggatgaactgatggccgaattagaggaactggagcaggaggagctggataagaacttgctggaaatcagcggacccgagacagtacctcttcctaatgtaccttcaatcgctctccctagcaagccagcaaaaaaaaaggaagaagaggatgacgatatgaaggaactagagaactgggcaggctctatgtag

SEQ ID NO: 193473 - DNA, 1434 bp, synthetic construct
  misc_feature 1..1434: note = Description of Artificial Sequence: Synthetic coding sequence
  source 1..1434: mol_type = other DNA
atgggcgccctggcccgggccctgcccagcatcctgctggccctgttgttaacttctaccccagaggctttgggtgcgaaccctggactcgttgcacgtattacagataagggcttacagtacgccgcacaggaaggcctcctggcccttcaaagtgagcttctacgcataacactgcctgatttcaccggtgatctgagaattccacacgtgggtcgaggccgctatgagtttcactcccttaatatccactcctgtgagctgcttcattccgccctgcgacccgtgcccggccagggcctgtcattgagcatatctgattcctctataagggtgcaaggcagatggaaggtacgcaagtcattcttcaaactgcagggaagtttcgacgtgagcgtgaaggggatctctatcagcgtgaacctgctcctgggctctgagtcctccggcagacccacagtgacggccagttcttgctcaagcgatattgcagatgtggaggtggacatgtctggagacttaggctggcttcttaatctttttcataatcagatcgagtcgaagtttcagaaagttcttgagtcacgcatatgtgagatgatccagaagtctgtgtcatcagacttacagccgtacttacagacactgccggtaacaacagagatcgacagcttcgccgacattgactatagcctcgttgaagccccgcgagccaccgcccagatgctggaggtgatgttcaagggtgagattttccatagaaaccatagatctccagtgaccttgcttgctgctgtcatgagcttgcccgaagagcataataagatggtatacttcgccatctcggactatgtatttaacactgcttccctggtgtatcacgaggagggttatcttaacttctcaataaccgacgatatgatccctcccgatagcaacatcagactgacaaccaagagtttcaggccgttcgtccctcgtctggcccgactgtaccctaacatgaatctggagctacagggcagcgtacctagcgctcctctactgaattttagcccgggcaacctgagtgttgatccttacatggagatcgacgcattcgtcctacttcccagctcatctaaggaacctgtctttaggctgtcggtggccactaacgtatcggccaccttaacattcaacacttctaagattacaggtttcctcaaacccggaaaggtcaaagtcgaactgaaggaatccaaagtgggtctgttcaacgctgaactgttagaggcgctgctcaactactacattttaaataccttttatcccaaattcaacgacaagcttgccgagggcttccctctgcctcttctgaaacgggtgcagctgtacgatctggggctgcagatccacaaggacttcccttcaagacgggaccaccccccctag

SEQ ID NO: 193474 - DNA, 486 bp, synthetic construct
  misc_feature 1..486: note = Description of Artificial Sequence: Synthetic coding sequence
  source 1..486: mol_type = other DNA
atgagcgtgcccggcccctaccaggccgccaccggccccagcagcgcacccagcgccccaccgagctatgaagaaactgttgccgttaactcctattaccctaccccccccgctccaatgcctggccctactaccgggttagtcactggaccagacggcaaggggatgaacccgcccagttactacacccaacctgcccctatcccgaataacaaccccatcaccgtgcaaaccgtgtacgtgcaacacccaatcacgttccttgatcgtcctatccaaatgtgctgtcctagctgtaataaaatgatcgtgtcacaactgagctacaatgccggggcactaacatggctgagctgcggctcgctatgcctgctggggtgtatagccggctgttgctttatccctttctgtgtggatgcactgcaagatgtcgatcactattgcccaaattgcagggcgctcctcggcacctacaaacgtttatag

SEQ ID NO: 193475 - DNA, 687 bp, synthetic construct
  misc_feature 1..687: note = Description of Artificial Sequence: Synthetic coding sequence
  source 1..687: mol_type = other DNA
atgagcgtgcccggcccctaccaggccgccaccggccccagcagcgccccgtcggcccctcctagctatgaggagaccgtggccgtgaacagctattacccaaccccaccagccccaatgcccgggccaacaaccggccttgttaccgggccggatggcaagggcatgaatccccccagctactacactcagccagcaccaatccctaacaataacccgatcaccgtgcagacagtgtacgtccagcaccccatcacctttctggaccgaccaatccagatgtgttgtccttcatgtaataagatgattgtgtctcagctctcatacaacgctggtgcactgacatggttgtcatgtggtagtctctgtctgctaggagtccacagcggcctcctgttacacccgctgttgcggggctgccccgctggccgtggcccacttctttcccaactccagagttctcctggccacctgcaagcgtttgtcggtctgtctcagacctggagggagccaggtgccgccggcagccccttccacctgtcctcctcttttaccccaggcggaggatcggccctggttgtgtcccctctacaaggtgcccatctccacgtatttttttggggtgagtacgttgccaagctgactaatcttcagactcctgagatcgccgcatggtctagagcctag

SEQ ID NO: 193476 - DNA, 459 bp, synthetic construct
  misc_feature 1..459: note = Description of Artificial Sequence: Synthetic coding sequence
  source 1..459: mol_type = other DNA
atgagcgtgcccggcccctaccaggccgccaccggccccagcagcgccccatcggcaccccccagctatgaggaaacggtcgctgtcaatagctactatccaactcctcctgctccaatgcctggccccacaaccggcttggtgacaggccctgatgggaaggggatgaatcccccatcttattatactcagccagctccaatcccaaataacaatcctataacagtgcagaccgtgtacgttcaacacccaatcacatttcttgataggcccatccagatgtgctgtcccagttgcaacaaaatgatcgtgagccagctgagctacaatgccggcgcgttgacctggctctcatgcgggtccctgtgcctcttgggacaagaatgtagcggtactatcgtcgcgctgcgatcattcgatctccttggatcttgcaatccacccagttcagcatcctag

SEQ ID NO: 193477 - DNA, 486 bp, synthetic construct
  misc_feature 1..486: note = Description of Artificial Sequence: Synthetic coding sequence
  source 1..486: mol_type = other DNA
atgagcgtgcccggcccctaccaggccgccaccggccccagcagcgcccctagcgcacctcccagctatgaagagactgtggccgtgaactcctattatccaacaccacctgcgcccatgccgggtcccaccaccggactggtgactggccctgatggaaaaggcatgaacccgccatcgtactatactcagcccgccccgatccctaataataaccctattacggtgcagacggtttatgtccagcaccccatcactttcctcgatagacctatccagatgtgctgccccagttgtaacaagatgattgtgagccagctgtcctacaacgctggcgccttgacgtggctgtcctgtggatcactttgcctcctagggtgcatcgcgggatgttgtttcatacctttttgcgttgacgctcttcaagacgtcgatcattattgccctaattgtcgcgcgctccttggcacatataagaggctctag

SEQ ID NO: 193478 - DNA, 6123 bp, synthetic construct
  misc_feature 1..6123: note = Description of Artificial Sequence: Synthetic coding sequence
  source 1..6123: mol_type = other DNA
atggagcacaaggaggtggtgctgctgctgctgctgttcctgaagtccgcagccccagagcaaagccacgtggttcaggactgttatcatggcgacggtcagtcctaccgcggcacatactctaccactgtgacggggaggacctgtcaggcatggtccagcatgaccccacaccaacacaatcgaacgactgagaattaccccaatgctggcttaatcatgaactactgtcgtaatcccgatgccgtggcagcaccttattgttatacccgcgaccctggggttcggtgggagtattgcaacctgacacagtgtagcgacgccgagggcactgccgtggcgccacctaccgtgactccggtcccaagcctggaagcgccgagtgaacaggcgcccactgagcaaagaccaggagtgcaggagtgttatcatggaaatggacagtcataccggggtacttattccaccacggtcaccggacggacttgtcaggcttggtcgagcatgaccccccacagtcattctcggacccctgagtactatcccaacgcagggctcataatgaattactgcaggaatccggatgccgtagccgccccatactgctacacaagggaccctggggtgcggtgggaatactgtaacctgacccagtgctccgacgccgaaggaacagctgtagctcccccaacagtgacacccgtgccgagtttagaagccccctcggaacaagctccaactgagcagcgaccaggcgtccaagagtgttatcacggaaacggccagtcctacaggggaacttactcaaccacggttaccggccgaacgtgccaggcatggtctagtatgaccccccacagccatagtcgcaccccagaatattaccctaacgccggtctgataatgaattattgcaggaacccggatgccgtggcagctccgtactgttacaccagagaccctggcgtgcgctgggagtattgcaaccttacccagtgtagcgatgctgaagggaccgccgtagcccctcccactgttacacccgtgccctctctcgaggccccatctgagcaggctcctactgagcagcggccgggcgtccaggagtgttaccacggaaatggacaatcatatcgaggcacttactccacaacagtaacgggccggacctgtcaggcctggtcaagcatgacacctcactcacactcccggactcctgagtattatccaaatgcgggactgattatgaattactgccggaatcctgatgcggttgctgccccatattgttacactagggacccaggcgtgaggtgggaatattgcaatttgacccagtgtagcgatgctgagggcaccgcggtggcacctccgacagtgacccctgtcccaagtctggaagcaccatccgagcaggcccccacggagcagaggccaggagtccaggagtgctaccacgggaatggccaaagttacagggggacctattctaccaccgtgacaggacgaacctgccaagcctggagctcaatgactccccattcccactcgagaacgcctgagtattatccaaacgcagggctgataatgaattattgtcgcaatccagatgcggtggcggccccttactgttacacacgggatccaggtgtacggtgggagtattgtaacttgactcagtgttcagacgctgagggcaccgccgtcgcaccacccactgttacccctgtcccaagtcttgaggcgccaagtgaacaggcccccacggagcagaggccgggcgtgcaggaatgctatcatgggaacggccagagctaccgcggcacctactctaccaccgtaacaggcaggacatgtcaggcttggtcctctatgacacctcacagtcacagccgaactccagagtactatcccaacgcaggcctcatcatgaattactgccggaaccctgatgctgtggcggccccatattgctacacaagagaccccggggtcagatgggaatattgcaacctgacccagtgctccgatgctgaaggtactgccgtggccccacccacggtcacaccagtgccttcattggaggcgccgtctgagcaggccccaaccgaacagcgccccggcgtgcaggagtgttatcatggaaacggacagtcctataggggtacatacagtactaccgtgacagggcgcacatgccaagcatggtcttccatgaccccgcatagtcacagccgcacacctgaatattatcccaatgccggcctgataatgaactattgtagaaacccagacgccgtggccgccccttattgttatacgagagatccaggcgtgagatgggagtattgcaacctgactcagtgcagcgacgccgaaggaaccgccgtggcccccccaacagttacacctgtgccatccttggaggccccatccgaacaggctcccacagagcagaggccaggagttcaggagtgttatcacgggaacggccagtcatatcgaggcacctacagcaccacagtcacgggaagaacctgtcaggcgtggagctctatgacccctcactctcattccagaacaccagaatattatcctaacgcgggcctgattatgaattactgcaggaatcctgatcccgtggctgccccctactgctatacccgagatcctagcgtgcggtgggagtattgcaatcttactcaatgttcagatgcggaaggcaccgcagtcgctccccccactataacaccgataccctcactagaggcaccctctgaacaggcgcccaccgagcagcgcccaggggtgcaggagtgttatcacggtaatgggcaatcataccagggtacatacttcatcacagtcacaggcagaacatgtcaggcttggtcctctatgactccacattcacactctcggacaccagcatactatcctaatgcaggcctgatcaagaactattgcaggaacccagatcccgtggcggcgccatggtgctacacaacagatccctcagtaaggtgggagtactgtaacctcacccggtgcagtgacgcggagtggactgcatttgtgcctcccaatgttatcctcgctccatccctggaagctttctttgagcaggctctaaccgaagagaccccgggggtgcaggactgctactatcactacggccagtcttatcgaggaacgtactctacaacagtgaccggacgcacatgtcaggcttggagttctatgacgccacaccagcacagcaggaccccggagaattatcctaacgcgggccttacccgtaattattgccggaatcccgatgccgaaatccgaccatggtgctacacaatggacccttcggttagatgggagtactgcaatctgacgcagtgtctcgtgacagagtcatccgtgcttgccaccctcaccgtggtccctgacccatctacagaggcgagttctgaggaagcacccacagagcaaagccctggcgtccaagactgttatcacggcgacgggcagagttatcggggttccttcagtacgactgttaccggaagaacctgtcaaagctggtcatccatgaccccgcactggcaccagagaaccacagaatactacccaaatgggggtctgacgagaaattactgtaggaatcctgacgctgaaatatccccctggtgctataccatggaccccaatgtacgctgggagtactgtaacctgacgcagtgcccagttacagagtcgagtgtcttggcgacaagcacggcagtgagtgaacaagcaccaaccgaacaaagccccacagtgcaggactgttaccatggggacggccagtcctatcgtgggagtttcagtacgacagtgacaggccgcacctgtcagagctggtcaagtatgacaccccactggcatcagaggaccaccgagtactaccctaacggtggcctcaccaggaactattgccgtaatcccgacgccgagatccggccctggtgctacacaatggacccttctgttaggtgggagtactgcaatttgacacagtgccctgttatggagtccactttgctgaccacgcctactgtggtgccagtgccttcaaccgagttgcccagtgaggaggcacctacagagaatagcacaggagtccaagactgttataggggggacggccagtcctaccgtggcacgctgtcaaccacgattaccggtaggacctgtcaaagctggagctccatgacacctcactggcacaggcgaatcccattatactatccgaatgcaggcttgactaggaactattgtcggaatccagacgccgagatccgcccatggtgctacacaatggatccttctgtaaggtgggagtattgcaacttaaccaggtgcccggtcactgaatcaagcgtgttgactaccccgacggtggctccagttccgtcaacagaggcccctagcgagcaggcaccacctgaaaaaagccccgtcgtccaggattgttatcatggtgacgggcgtagttacagaggcatctcctcgacaactgtaacaggcaggacctgccagagctggagttcgatgatccctcattggcaccagagaactcccgagaattaccctaatgccggtctaactgagaattactgcagaaacccggacagcggaaagcagccctggtgctacactacggatccctgcgtgcgatgggagtactgtaatctcacccaatgctctgagaccgagagcggcgtgctggagactccgaccgtggtcccagttccttccatggaggctcactctgaggcagctccaacagagcaaactcctgtcgtgcggcagtgctaccacggcaacggacaaagttacagagggacttttagtaccaccgtaactggcagaacttgtcaaagctggtcctccatgaccccacaccggcatcagaggactcctgagaattatcccaacgacggactgacgatgaactactgcaggaacccagatgccgataccggaccctggtgttttacgatggacccctccattcgctgggagtactgcaatttgacgcgctgttctgacacagagggcacagtcgtcgccccacctactgtgattcaagtccccagcctgggtcccccatccgagcaagattgcatgtttggaaatgggaaaggctaccgcggtaaaaaggcaactactgttacggggaccccatgtcaggagtgggccgctcaggaaccacatcggcactcaacctttattccagggaccaataaatgggccggactcgaaaagaactattgtcgtaaccccgatggagatatcaacggtccttggtgttacaccatgaaccctaggaagctgtttgactactgtgatatccctctctgcgcctcgtcatcttttgattgcgggaagccacaggttgaaccaaaaaagtgtccaggctctattgtcggcggttgcgtggctcacccccacagctggccttggcaggttagcttacggacgagatttggaaaacacttttgcggagggacactcatatcgcctgagtgggtgctgacggctgctcattgcctcaagaagtcaagccggccaagctcttacaaggtaatcttgggggcccaccaggaggtgaacctggaatcccacgtacaggaaattgaggtgagccgtctgttccttgaacctacacaggccgacatcgcattgcttaagctgtctagacccgcagtgattacagacaaggtgatgcccgcctgtctcccctctcccgactatatggttaccgcaagaaccgaatgctacatcactggatggggcgagactcaggggaccttcggtaccggcctactgaaagaggcccagctgctggtgattgagaatgaagtatgtaaccactataagtacatttgtgcggaacacctcgcacgaggtactgatagctgtcagggagactccggaggccccctggtatgttttgaaaaggataaatacattctgcaaggcgttactagctgggggttggggtgcgcgcggcccaataaacctggcgtgtatgcccgcgtctctcgctttgtgacctggattgagggcatgatgagaaacaactag

SEQ ID NO: 193479 - DNA, 6123 bp, synthetic construct
  misc_feature 1..6123: note = Description of Artificial Sequence: Synthetic coding sequence
  source 1..6123: mol_type = other DNA
atggagcacaaggaggtggtgctgctgctgctgctgttcctgaagtcggcggccccggagcagtcacacgtggttcaggattgctatcatggcgatggccagagttataggggcacgtatagcactactgtgaccggccggacctgtcaggcctggtcttctatgacccctcaccagcataaccggactacggaaaattacccgaacgcaggattgataatgaactactgccgtaatcccgatgctgtcgccgccccctactgctatacaagagacccaggggtgagatgggagtactgcaatctgactcaatgttcggatgcggaaggtacggccgtggcccccccgaccgtaacacctgtaccatccctcgaagcccccagcgagcaggcgccgaccgaacagcgacccggcgtgcaggaatgctatcacggtaatggccagtcataccggggaacatactctacaacggtcactgggcgtacatgccaggcctggagctccatgactccacattcccacagccggacacccgaatactaccccaacgctggactgattatgaactactgcaggaatccagatgctgtcgccgcgccctattgctatacgagggaccccggagtcaggtgggagtattgcaatctgactcagtgctccgatgcggaggggactgcagtggctcctccaaccgtcacccctgtcccaagcctagaggctcccagtgagcaagcgcctaccgagcagcgacccggagtgcaggagtgttaccacggaaatggtcaatcttatagagggacatactccaccaccgtcaccggtagaacatgccaggcctggtctagcatgacccctcacagccacagccggacacccgaatattaccccaatgctggcttaattatgaattattgtaggaatccagacgctgtggccgcaccatattgttatactagggaccctggggttcgatgggaatactgcaacctcacacagtgttccgacgcggaaggcaccgctgtggcgccccccactgtgacaccggtgccatctctcgaagctccatctgagcaggctcctaccgagcagcgacctggcgtgcaggagtgctaccacggcaatggccagagctacaggggaacgtattccaccacagtcaccgggagaacctgccaagcctggtccagcatgacaccacattctcactctagaacccctgaatactaccccaacgccgggctgattatgaattattgccgcaaccctgacgctgttgctgcaccctactgttacactagggacccgggagtacgatgggagtattgtaatctgacacaatgctctgacgctgagggaaccgccgtcgctcccccaaccgtgaccccagtgcctagtttagaggcaccttccgaacaggccccaactgagcagaggccgggcgtacaggaatgctaccatggcaatgggcagtcatatagagggacttacagcacaaccgtcacaggcagaacatgccaggcctggtcatccatgaccccccactcacacagccgcacacctgagtactaccccaacgccggcctgattatgaactattgtcggaatcctgatgcggtggccgctccctactgctacactagagatcctggagtgaggtgggaatactgtaatcttacccaatgttctgacgcggaggggacagccgtggctccacccaccgtaacacccgtaccatcacttgaggccccctctgagcaggctcctaccgagcagcggccaggagtgcaggagtgttaccatgggaatggccagtcatatagaggcacctattcaactactgtgactgggcgcacttgtcaggcctggtcgtcgatgactccccatagccatagccggactccggagtattacccaaacgccggactaattatgaattattgtcggaacccagatgctgttgcagccccctattgttatactagagacccaggagtgcgttgggaatattgcaacttgacgcagtgctcggacgccgaggggaccgctgtcgctcctcccacagttacacccgtgccatctctcgaagctcctagtgagcaggcccccaccgaacagaggcccggggtgcaagaatgctatcatggtaacgggcagtcgtaccggggcacctacagcacaaccgtgactggcagaacttgccaggcgtggagctctatgacacctcacagccatagtcgcactccagaatattaccctaatgcgggcctcattatgaattactgtcgtaatcccgacgctgtcgctgctccctactgctatacccgagatccgggcgtgcgctgggaatattgcaaccttactcaatgctctgatgccgagggtaccgcagtggccccaccgaccgtgacccccgtaccctcgttggaagcccctagcgagcaggcgccaactgagcagcgtccgggtgttcaggaatgttaccacggaaatggacaatcgtaccgggggacttacagcaccacagttaccggtcgcacgtgtcaggcctggtcttcaatgaccccacattctcacagcaggacacctgaatactatccaaatgcaggactgataatgaactattgccggaacccggatccagttgcagcgccatattgctacactagagacccctcagtcagatgggaatactgcaacctgacccagtgctccgacgctgaaggtacagcggtcgcaccaccaactattaccccgattccatccctggaggcgccctccgagcaggcacccacggagcagcgtcccggggtgcaggagtgttaccatggcaatggccaatcctaccagggaacctactttattactgtgactgggagaacatgccaagcttggagtagcatgaccccgcatagccattccaggaccccggcctattatcccaacgccggcctcattaagaattactgtagaaatcctgatccagtggctgctccttggtgttatactacagatccaagcgtcagatgggagtattgcaacctaacaaggtgctctgatgccgaatggacagcttttgtgccccccaacgtgatcttggcaccatccctcgaggccttctttgaacaagccctcaccgaggagactccaggggtacaggattgctactaccactatggacagtcttaccgcgggacatacagtactacagttacaggcaggacctgtcaggcgtggtcttctatgacgccccatcagcattctagaacacccgagaattatcccaatgccggcctgactcgcaactactgccgaaacccagatgctgaaatccgaccatggtgttataccatggacccctcggtccgctgggagtactgcaacctaacacagtgtctagtgactgaaagtagtgttctcgccacactgacggtggtgcctgacccctccacggaagcctcctctgaggaagcccccaccgagcagtccccgggggtgcaggactgttaccatggggacgggcagagttacaggggaagctttagtacaaccgtcaccgggcggacttgccagtcttggagctctatgactcctcattggcaccagagaactaccgagtattatccaaacgggggcctgacccgtaattactgtcggaacccagatgccgagatctctccctggtgctacactatggaccccaacgtgcggtgggagtattgtaatctgacacaatgcccagtgactgagagttcagtcctggccacctctaccgccgtgtctgaacaggcacccacggaacaaagcccaacagttcaggactgctaccatggtgatggccagagctatcgagggtctttttctactacagtgacagggcgcacctgccaatcctggtcttctatgactccacattggcatcagcgtactaccgagtactaccccaatggcggactcaccaggaattactgtagaaacccggacgcggagatcagaccttggtgttacacaatggatccaagtgtccggtgggagtattgcaatctaacccagtgtccagtgatggagtcaaccttgctaacgacaccgacagtggtgcctgttccgtccacagagttgccttctgaggaagcccccaccgaaaattcgaccggggtgcaggattgttaccggggcgatggccagtcttaccgggggaccttatctacaactataaccggtagaacttgtcaatcctggtctagtatgaccccacactggcacagaaggatacctctgtactacccaaacgcggggcttacgaggaattattgccgaaatccagacgctgagattaggccttggtgctacacaatggaccccagtgtgcgctgggagtattgcaacctgacaaggtgcccagttactgaaagtagtgtactgacaaccccaactgttgctccagtgccatctactgaggccccttccgagcaggcaccacccgaaaagtcacccgtggtacaggactgctatcatggtgatggacgtagttatcgcggcataagctccacaacggtgacagggagaacctgtcagagttggagctccatgatacctcactggcaccagaggactccagaaaactacccgaacgccggtttgacagagaactactgtcgcaaccctgattccggcaaacaaccatggtgttacacaacggacccttgtgtgaggtgggagtattgtaatttgactcagtgcagtgagacggagtccggagtgctggagacacctactgtcgtacccgtcccttccatggaggctcatagcgaagctgctcctacggagcagactcctgtggtgcgtcagtgctatcatgggaatggacagtcctatcgcgggacattttctacaaccgtgacgggtcgtacctgtcaatcgtggagttccatgacgccccacagacatcagcggacccctgaaaactacccgaatgacggcctcactatgaattattgtaggaatccagacgctgatactggaccttggtgctttaccatggatccttccatccggtgggagtattgcaatttgactcgatgttccgacaccgagggaaccgtggtggctccacctacagtgattcaagtcccctccttggggccaccttctgagcaggactgtatgttcggaaacggaaaggggtatcgcggtaagaaagccacaactgtgactggcaccccttgtcaggagtgggccgctcaagagccccacagacatagtacgttcattcccggcacaaacaagtgggccggactggaaaaaaattattgtcgaaacccggacggggatatcaatggtccctggtgctatacgatgaaccctcgaaagctctttgattactgcgacattcctctgtgcgctagcagcagcttcgattgtgggaaaccccaagtggagcccaagaagtgccctggtagcatcgtgggcggatgcgtggctcatccacactcgtggccatggcaggtatccttacgaacacgcttcggaaaacacttctgtgggggaacgctgatttctcccgagtgggtccttacggctgcacattgtttgaagaagagcagccgcccaagcagctataaggtgattctcggagcgcaccaggaggtcaacttagagtcgcatgtccaggagatcgaggtttctaggctttttctcgagcctactcaagccgatatcgcattgcttaagctgagtcgcccggcagtcataacagataaggtcatgcccgcatgcctgcccagtcccgattacatggtgaccgcccgtaccgaatgctatatcacaggatggggagagacccagggcacgtttggcactggtctgcttaaagaagcccagttattagtcattgaaaacgaggtctgcaatcattacaagtatatatgcgccgagcatctcgcacgcggcacggattcgtgtcagggggacagtggaggtcctttggtgtgcttcgagaaggataagtacattctgcaaggggtgacttcttggggactcggttgcgcacgcccgaacaaacctggcgtgtacgcccgcgtatcccgtttcgtcacatggatcgaaggcatgatgagaaataattag

SEQ ID NO: 193480 - DNA, 4602 bp, synthetic construct
  misc_feature 1..4602: note = Description of Artificial Sequence: Synthetic coding sequence
  source 1..4602: mol_type = other DNA
atgatgcagctgaccctgaacaccctgttccccgtggtgagcacccccgcaattacctacatcgtcacggtattcacaggtgatgtacgtggggccggtacaaaatcgaagatttacctggtgatgtacggcgcgcgggggaataaaaacagcggaaaaattttccttgaaggtggtgttttcgaccgtggacggaccgatatatttcacatagaacttgccgtcctgctatcccccctcagccgggtttccgtggggcacgggaatgtgggagtcaacagagggtggttctgtgagaaagtggttatactctgtccattcaccggaattcagcagacatttccctgctctaactggctggatgaaaagaaagccgatggattgattgaacgccagttatacgaaatggttagcctgcgcaagaaaagacttaaaaaatttccctggagcctgtgggtctggactaccgatctgaagaaagccggcactaacagcccaatcttcattcagatatatggccaaaaaggtagaacggacgagattctgcttaatccaaacaacaagtggttcaagcccggaatcattgaaaagtttcggatagaactgcccgacctcgggcgtttctataaaatccgggtctggcacgataaacgctcttccggaagcggctggcaccttgagaggatgactctgatgaacactctgaataaagacaagtataactttaactgtaatcggtggctggacgctaacgaggacgacaacgagatcgtcagggagatgaccgcggaaggtccaacagtacggcgcatcatgggcatggctagatatcatgtgactgtctgcactggagagttggagggggcaggcaccgacgccaatgtatacctgtgcctgttcggagatgtgggggatactggggagagattgctatataactgtcgaaacaatacagatctgtttgaaaaagggaacgcagatgagtttaccatcgagtccgtgaccatgcgaaatgttagacgagtgcgcattaggcacgacggaaaggggagtggatccggctggtacctggaccgggtgttggtcagggaggaggggcaaccagaatcagataatgtggagtttccctgcttgcgatggttggacaaggataaagatgacgggcagctagtcagggaacttctgcccagtgattcatctgctacactcaagaacttccgataccacatcagtctgaaaacaggcgacgtctcaggcgcgtccactgactctagggtatatattaagctgtacggagataagtccgatacaattaagcaggtgttgctcgtgtctgataacaatttgaaagattactttgaaagagggagggtcgacgagtttactttggaaacactcaatattggcaatattaaccgtttagtgatcggtcatgattctacagggatgcacgccagctggttcctcggctccgtccagatacgagtgccacggcaagggaagcaatacactttccctgcaaatagatggttagataagaaccaggctgacggcagactcgaagtggaactgtatccctctgaggttgtagaaattcagaagttggttcactatgaggtcgagatctggacgggtgatgtgggcggtgccggcacttcagcacgggtgtacatgcagatatatggagagaaggggaaaacagaagtgctctttctctcttccagaagtaaggtattcgaacgtgcgagtaaggatacattccagcttgaggccgcggacgtgggcgaggtgtacaagctgcgtttgggtcacacaggggagggcttcggacccagctggttcgtggatactgtctggctgcgtcatttggtagtgagagaagtggacttaaccccggaggaagaggccaggaagaagaaggagaaagacaagctgaggcagctgctaaaaaaagagaggctgaaggctaagctccaacggaagaagaagaagagaaaagggagcgatgaggaagacgagggcgaagaggaggagtcatccagcagcgaagaatcatccagcgaggaggaagagatggaggaggaggaagaggaggaggagtttggacccggcatgcaggaagtcatagaacagcacaaattcgaggcgcaccggtggctggcgcgaggcaaggaagacaacgagcttgttgtggagttagtaccagccggcaaacccggcccagagagaaatacttacgaggtgcaagtggttacaggaaacgtcccgaaggctgggacagatgctaatgtgtatcttaccatctacggagaagaatacggcgacaccggggaacgccccttaaaaaagagcgacaaaagcaacaagttcgagcaggggcagaccgacactttcacgatttacgctattgacttgggtgccctcaccaaaattagaattagacatgacaatacgggtaatagggccgggtggttccttgatcgcatcgacataaccgatatgaataatgagataacctactactttccctgccagcgctggctcgctgtggaggaggacgacggccagctctccagagaattactgccagtggacgagtcttatgtcctccctcagagtgaggagggcaggggaggcggcgataacaatcccctcgataatctagccttggaacagaaggacaagtctactacctttagcgtgacgattaagaccggggtcaaaaagaacgcgggaacagacgccaatgtcttcatcacgctcttcggaacccaggatgacacaggtatgacactcctaaaatcatctaagaccaatagtgacaaattcgaaagggactcaattgagatcttcactgtagaaacacttgacctcggcgatttgtggaaagtgcggttggggcatgacaacacgggcaaggcgcccggctggttcgttgactgggtcgaggtggatgcaccatcgctgggtaagtgcatgacctttccctgcggcagatggcttgcaaaaaatgaggacgacggatcaataattagggacctgttccacgctgagcttcagactaggttgtacaccccattcgtgccctatgaaatcaccttgtatacatctgatgtgtttgcagccggaaccgatgccaatatcttcattatcatatatggctgcgacgctgtgtgcacacagcagaagtatttgtgcacaaataagcgcgagcaaaagcagttttttgaacggaaatctgcatccagatttatcgtagaattggaagatgtgggagagatcattgagaagatccggatcggtcataataacacaggcatgaatcccggctggcactgcagccatgtagacatccggagactgctccccgacaaggacggcgctgagacgctgactttcccatgtgaccggtggctggcgacaagcgaggacgataaaaagaccatcagagaactagtgccctatgatatttttaccgagaagtatatgaaggacggcagtcttagacaggtttacaaagaggtcgaggaaccacttgatatcgtattatactctgtccagatatttacaggcaacattccaggagccggtacggatgctaaggtctatatcacaatttacggcgacctcggtgacactggcgagagataccttggtaaatcagagaatagaaccaacaagttcgaacgcggaacagccgacacttttatcattgaagccgcggatctgggagttatttataagatcaaactgcgccatgacaatagcaagtggtgcgccgactggtacgtggagaaagtggagatctggaatgacacaaacgaagatgagtttttgttcctgtgtggaaggtggttgagcctgaaaaaggaggatggccgactcgaaagactattctacgagaaggaatatactggagacaggtcttcaaactgctctagcccggccgatttttgggaaattgccctgtctagtaagatggctgatgtggatatttcaacagtgaccggccctatggccgattatgtgcaggaagggcccattatcccttactacgtgtcagtgacaacagggaaacacaaggatgcagcaaccgattctagagcttttattttcctgatcggcgaagacgacgagaggtctaagaggatatggctggactaccctaggggtaagcgagggttttccagaggaagcgtagaagaattttacgtcgcaggactggacgtgggtataatcaaaaagattgaggtgctctatgagatgactgtctggacaggcgatgttgtaggaggcggcacagactctaacatttttatgacactgtatggcatcaacggctctaccgaggaaatgcagttagacaagaagaaagccaggttcgagcgtgaacagaatgacacattcatcatggagatccttgatatcgccccatttaccaaaatgcgtatacggatagatggattaggatcgaggccagagtggttcctcgagagggtgaagtgcctggatcctcacagcagctttcagcctccgcccacaccctcaccaggaagctcgggcttgagcatggatctggtgaaggcgcagatgtctctatag

SEQ ID NO: 193481 - DNA, 5844 bp, synthetic construct
  misc_feature 1..5844: note = Description of Artificial Sequence: Synthetic coding sequence
  source 1..5844: mol_type = other DNA
atgatgcagctgaccctgaacaccctgttccccgtggtgagcacccccgcaattacctatatcgtcaccgttttcacaggagatgtgcggggggccggcaccaaatcaaagatctatttggtgatgtacggcgctcgcggcaacaagaactcgggaaagatctttcttgaggggggagtctttgatagaggccgtacagatatattccatattgaactagcagtgctgctgtccccattgagtagggtgtctgttggccatgggaacgttggtgtgaatagaggctggttctgcgaaaaggtagttattctctgtccattcactgggatccaacagacgtttccctgcagcaactggctcgatgagaagaaggccgatggtctgatcgagcggcagctctatgagatggtcagcctgagaaagaaaaggttaaagaaattcccctggagtctttgggtgtggacaactgacctcaaaaaggcgggaacaaattctccaattttcatccagatttatggacagaagggtagaacggacgagattctgttgaaccctaataataaatggttcaagcccggcatcatcgaaaagtttaggatagaactacctgacttggggcggttctataagataagggtgtggcacgataagcgcagttcaggatctggttggcatctggagcggatgaccctcatgaacacactgaataaggataaatacaattttaactgtaatagatggctcgatgccaacgaggatgacaatgagatcgtcagggagatgacggctgaagggcccaccgtgaggcgcataatgggaatggctcgctatcacgttacggtttgtacaggagagcttgagggtgctgggacagacgctaacgtatacctgtgcctgtttggagacgtgggagatacaggagagagactgctctacaattgccgaaacaacaccgatctgtttgaaaaaggaaatgcagatgagttcacaatcgagagcgtcacaatgaggaacgtccggagagttagaatccggcacgacggcaagggatctggttcagggtggtacttggatagggtactcgtccgtgaagagggacaacccgagtccgataacgtcgaatttccctgcttgaggtggctggacaaggacaaggacgatggccagttagtccgcgaactgctccccagtgacagctctgcaacactgaagaatttcaggtaccacatctctctgaagaccggagacgtcagtggcgcgtctaccgactctagggtctacattaagttgtatggcgacaagtccgataccataaagcaggtcctgcttgtttccgacaataatctcaaagattattttgaacgtggccgagtggacgagttcacattagagacactgaacatagggaatattaaccggttagttataggacacgacagtaccggtatgcatgcaagttggtttctcggctcggtgcagatccgggtccctagacagggaaaacagtataccttccctgccaatcggtggcttgacaagaaccaggctgatggccggctggaagtggaactgtatccctctgaagttgtggaaatccaaaagctagttcactacgaggtcgagatatggacaggcgatgttggcggcgcgggcacatcagcacgcgtgtatatgcagatctacggtgaaaagggcaaaaccgaggtcttattcctcagcagccgttccaaggtctttgagcgtgccagcaaagatacctttcagttggaagctgctgacgtcggagaagtatataagctgcgattaggccacactggtgagggattcggcccgagctggttcgtcgatacagtctggctccggcatctagtggttcgggaagttgatttgactcccgaggaggaggcacggaagaagaaggaaaaggacaaactcagacagttgctgaagaaagagagactcaaagcgaagcttcagagaaagaagaaaaaaagaaagggttctgacgaggaggatgagggcgaggaggaagagagttctagctcagaggaaagttcatccgaggaagaggaaatggaagaagaagaggaggaggaagagtttggacctggaatgcaggaggtcatcgaacagcataaattcgaggcgcaccgctggctggcgagaggaaaggaagataacgagctggtggttgagctggtcccagcaggcaaaccgggtccagaacgcaacacgtatgaggtccaagtggtcaccggaaacgttcccaaagccggcacagatgcgaatgtgtatctgacaatctatggtgaagaatatggggataccggtgagcgacccctaaagaaatccgataaaagcaataagttcgaacagggccagacggatacctttaccatttatgcgattgatctgggtgccctaaccaagatccgaatccggcacgataacacagggaaccgggccggttggtttttggaccggatagatataaccgatatgaataatgaaataacgtactacttcccctgccaaaggtggcttgccgtggaggaggatgacgggcaactgtcaagagagcttctgccagtcgatgagagctacgtgctgccccagagcgaggagggccgcgggggtggcgacaataacccccttgataacctggcactggagcagaaggacaagtccaccaccttttctgtgaccatcaaaacgggtgtgaagaagaatgctggcacagatgcaaatgtgttcattacgctgtttggcacgcaggatgacaccggtatgacactgctgaaatcctcaaaaacaaattcggacaaattcgaacgcgactcaatcgagattttcaccgtggaaaccctggatctcggggatctctggaaagttagactgggccacgataatacgggaaaggcccccggatggttcgtggattgggtggaggttgatgccccgagcctgggcaagtgcatgacattcccctgtggtagatggctcgctaagaacgaagatgatggttccatcataagagacttatttcatgctgagctacagactcgactgtacacgccctttgttccctacgagataactctttacactagcgatgtgtttgccgcagggacggacgcaaatatttttatcatcatctacggatgtgatgccgtgtgcacgcagcagaagtacctctgcaccaacaagcgggagcagaaacagttcttcgagcggaaatcagccagccgcttcatagtggagcttgaagatgtgggggagatcattgagaagattcgtatcgggcataacaatacgggcatgaaccccgggtggcactgtagccacgtagacattcgtcgcttgctgcccgataaggatggagccgaaacccttacatttccctgtgaccgttggctggccacaagtgaagacgataaaaagacaatcagagagctggtgccttacgacatcttcacggaaaagtacatgaaggacggatcacttagacaggtatacaaggaggtggaggagcccctggacatagtgctgtactctgtgcagattttcacaggaaacattcccggcgctgggacagacgccaaggtttacatcaccatttatggcgatttgggcgacactggcgagcggtacttagggaagtccgagaacagaacaaataaatttgagcggggcaccgccgatacttttattatcgaggcggcggacttgggtgtgatatataaaattaagctgcgtcacgacaattccaagtggtgcgcagattggtacgtggaaaaagtggaaatctggaacgacacgaatgaggatgaattcttattcctgtgcggcaggtggctctctctgaaaaaggaggacgggcggctggaacgtctcttctacgagaaagagtatacaggcgaccgatcatctaattgttcttcccctgcggatttttgggagatagccctgtcgagcaaaatggcggatgttgacatctccacagttacaggccccatggccgactatgtgcaggaagggcccatcataccttactacgtcagtgtcaccacagggaaacataaggacgctgctacagactcccgggcattcatcttcctcattggtgaagacgacgagcgctctaagcgaatttggctcgactacccccgcggcaagcgcgggttctctaggggctccgttgaagaattctacgtagctggccttgacgttggtatcattaagaagatagagctgggtcacgatggagcaagtccagagtcctgctggctggttgaagaactttgtttggcggtgcctacacaaggtaccaagtatatgctcaactgtaactgttggctggccaaagaccgtggggacggaattacatcccgggtgttcgatctcttagacgctatggtagtgaacataggcgtgaaagtgttgtacgagatgacagtgtggactggggatgtggtcgggggcggaacagacagcaacatttttatgacgctgtacgggattaacggctcaacagaagagatgcaattagacaaaaaaaaggctcggttcgagagagagcagaacgacacattcattatggagattttagacattgctcccttcaccaaaatgcgcataagaattgatggattaggctcccgaccagaatggttcctcgaacgaattctcctgaagaacatgaatactggggacctaactatgttctattacggagactggcttagtcagaggaaagggaaaaagaccttggtttgtgaaatgtgcgcagtgattgacgaagaggagatgatggagtggaccagctacacagtcgccgtcaaaacctcggatatcctaggggccggcactgacgcaaacgtattcatcattatcttcggcgaaaacggggactcaggcacgctggcactgaagcagtcagcgaactggaacaaattcgaacggaacaacacagatacatttaactttcctgacatgctctccctcggccatctgtgtaaactacgggtgtggcacgataataagggaatcttccccgggtggcatctgagttatgtcgatgtaaaggacaactctcgcgatgaaacattccatttccaatgtgattgttggctgtccaaatccgaaggagatgggcagaccgtgcgggactttgcctgtgctaacaataagatctgcgacgagttggaggagactacatatgaaattgtcatagaaactgggaacgggggggagacacgcgagaatgtatggcttattctagaagggcgcaaaaaccggtctaaggagttcctaatggaaaactcctctaggcagcgggcattcaggaaaggtacaaccgatacattcgaattcgacagtatttatttgggagacattgcaagcctgtgcgtcggacatctagcccgggaggaccgctttatcccaaagagagagctcgcgtggcacgtgaagaccataacaattacagaaatggagtatgggaatgtgtatttcttcaattgtgattgtttgatccccctaaagagaaaacgcaaatacttcaaagtttttgaggtgacaaaaaccacggaatccttcgctagtaaagtccagtccctggttcccgtcaaatacgaagtcatcgtaacaaccgggtacgagccaggcgcaggaaccgatgccaacgtgttcgtgaccatcttcggggccaatggagacaccgggaaacgggaattaaagcagaaaatgagaaatttgtttgagaggggatccaccgaccggttcttcctcgagacccttgaactcgtagtgacgaggcttggcctggcggctgagtgcggctag

SEQ ID NO: 193482 - DNA, 3435 bp, synthetic construct
  misc_feature 1..3435: note = Description of Artificial Sequence: Synthetic coding sequence
  source 1..3435: mol_type = other DNA
atgctgcggcacctgaccgacaccttcaccatctacgccatcgacctgggcgcgctgaccaagatccgcattaggcacgataacaccggcaatcgcgctggatggttcctggatcgtattgacatcacggatatgaataatgagatcacttactattttccttgccagaggtggcttgcagttgaagaggatgacggacagctcagtcgcgaactcctgcctgtggacgaaagttacgttctacctcagagtgaagaggggaggggaggtggggataataaccccttggacaacctggcactggagcaaaaagataagtctaccacattttcggtcacaatcaaaaccggcgtgaagaagaatgcaggtacagacgctaacgtttttattaccctgttcgggacacaggacgacacgggaatgaccctcctgaagagcagtaagactaatagtgataaattcgagagggattcaatcgaaatttttacagtggaaacattggatctgggggatctgtggaaggtccgcctgggtcatgataatactggcaaggcccccgggtggttcgtggactgggttgaagtggacgcacctagtctgggcaagtgtatgactttcccatgcggacggtggctggctaagaatgaggatgatgggagcatcatccgtgatttattccatgccgaactgcagacacgcctgtacaccccttttgtgccatatgagattacgctgtacacaagcgacgtcttcgcggctggcacagacgccaacattttcattattatttacgggtgtgatgcggtgtgtacccagcagaaatatctctgtaccaataagcgtgagcagaagcagttcttcgaacggaaatccgcttccagattcattgttgagttggaagacgttggagagatcatcgagaagatcagaatcggccataataataccggcatgaaccctggctggcattgcagtcatgtcgatattagacggctgctgcccgacaaggatggcgcagaaacactgacttttccgtgcgaccggtggctcgcaacttccgaggacgacaaaaaaacaatccgggaactggtgccatatgatattttcacagaaaagtatatgaaggacggcagcctcaggcaagtgtacaaagaggtcgaggaacccctcgacattgtactctattctgtgcagatcttcaccggtaacatcccaggagccggaacagatgcaaaggtgtatatcaccatttacggagatctgggcgacactggtgagcggtatctggggaagtctgagaacaggacgaataaattcgagcgtggaaccgccgataccttcattatcgaggcggctgacctgggcgtgatctataaaatcaagctgcggcacgacaatagcaagtggtgtgccgactggtatgttgaaaaagtggagatatggaacgacactaacgaggatgagttcttgtttctgtgcggacgatggctcagccttaaaaaagaagatgggaggctcgagagactattctatgagaaagaatacaccggcgatagaagttcaaattgttcttctccagctgacttctgggagattgccctttcatctaaaatggcagacgtcgatattagcacagtcaccggacccatggctgactacgtgcaggagggcccaatcattccatattacgtatccgttactactggcaaacataaagatgccgctactgacagccgcgcttttatcttcttgatcggtgaagacgacgaaaggtcaaaaagaatctggttggattaccctagaggaaaacgtggattcagccggggaagcgtggaagagttttacgttgccggtcttgatgtgggcataattaaaaaaattgaagttctgtacgagatgactgtgtggacaggcgatgtcgttggcggggggaccgattcgaatatttttatgacgttatacggcatcaacggatcaactgaggaaatgcagttggacaagaagaaagcgagatttgagagggaacagaatgacacattcatcatggaaatacttgacatcgctcccttcaccaagatgcggatccgcatcgacggcctgggttcacgtcctgaatggttcttggagcggatattattgaaaaacatgaacacaggcgatctgacaatgttctactacggtgattggttgtctcagagaaaaggaaagaagacgcttgtctgcgaaatgtgcgccgtaatcgacgaggaggagatgatggagtggacttcctatacggttgctgtaaagaccagtgatatcttaggggctgggacagatgctaatgtgttcattatcatctttggagaaaacggtgacagtggtacgctggctctgaagcaaagcgccaattggaataagtttgaacgcaacaatactgacacgtttaactttccggatatgctcagccttggccacctgtgcaaactcagagtctggcacgataacaagggcatctttcctggatggcatctcagttatgtagatgttaaggataacagccgcgatgagactttccacttccaatgcgactgctggctgtctaagtctgagggtgacggtcaaaccgtgcgggatttcgcatgcgctaacaacaagatttgcgatgagttagaggagacaacctatgaaatagtaattgaaacgggtaatggtggtgaaactcgtgaaaatgtatggttgatactggagggtcgaaagaaccggtccaaggagtttctgatggagaacagtagccgacagcgggccttcaggaagggaaccacggacaccttcgagttcgattctatttatctaggcgatatcgccagcctgtgtgtggggcatctggcacgcgaagatagattcatccctaagcgcgaactcgcgtggcatgtaaagaccatcacaattactgaaatggagtacggaaacgtgtatttctttaactgcgactgcttaattccactcaagagaaagagaaagtattttaaagtgttcgaggtcaccaaaactactgaatccttcgcaagcaaagtgcaaagcttagtgcctgtgaagtatgaagtcatcgtgacaaccgggtatgaaccgggtgcgggcaccgacgccaacgtgttcgttacgatttttggcgctaacggcgacacggggaagcgggagctcaagcagaagatgaggaatctgtttgagagaggatctacagatagattctttctggaaactctggaattaggggaactcagaaaggtgagactggagcacgacagctcagggtactgctctgggtggctcgtcgaaaaggtggaagtgacgaataccagcacgggcgttgctacgatattcaactgtggccgatggctggacaagaagcgtggcgatgggctgacctggagggaccttttcccaagcgtatag

SEQ ID NO: 193483 - DNA, 921 bp, synthetic construct
  misc_feature 1..921: note = Description of Artificial Sequence: Synthetic coding sequence
  source 1..921: mol_type = other DNA
atgcggctgggcaccaactgcgagcacccccagctgcccctggccgctccgagcggctactactttccttgccagcgctggctggccgtggaggaggatgatggccaactgagtagggagctcctccccgtggacgagagttacgttttgcctcagtctgaggaggggagggggggaggtgataataatcctctcgacaatctggcactagaacagaaggacaagagcactacgttctccgtgaccataaagactggtgtgaaaaaaaatgccgggacagacgccaatgtcttcattaccctttttgggacacaggatgacaccggtatgacgcttctcaagagctcgaaaactaattctgacaaatttgagcgggactccattgagattttcacggtcgaaactctagacttgggagatctgtggaaggtgagactgggccacgataatacggggaaagccccaggctggttcgttgactgggtcgaggttgacgctccttctcttggcaaatgtatgacctttccttgtggccggtggcttgccaagaatgaggacgatggctccatcataagggatctattccatgccgagctccagacccgtctatataccccattcgtgccctatgagattacattgtacaccagcgatgtgtttgcggccggaaccgatgcgaatatctttatcatcatctacgggtgtgacgctgtttgcactcagcagaagtatctctgtaccaacaaacgggagcaaaagcagttctttgaacgtaagtccgcctcacggtttattgttgagctggaggatgtaggcgagataattgagaaaattcggatcgggcataacaataccggcatgaatcccggctggcactgctcacatgtggatattaggaggttactgcctgataaggactag

SEQ ID NO: 193484 - DNA, 6636 bp, synthetic construct
  misc_feature 1..6636: note = Description of Artificial Sequence: Synthetic coding sequence
  source 1..6636: mol_type = other DNA
atgatgccccagaagaagcggcggcggaagaaggacatcgacttcttggccttgtatgaggctgagctgttgaactacgcttccgaggatgatgagggggagctggagcacgaatactacaaagccagggtatatgaagtggtcacagcaaccggtgatgtccggggcgcggggaccgatgccaatgtcttcatcactctgtttggcgaaaatggattatcacccaagctccagctcactagcaaatctaagagcgcttttgagaaaggtaatgtcgacgtgttccgagttaggacaaacaacgtaggcctgatttataaggtccgaatcgaacatgacaatactggcctgaacgcctcttggtacctcgaccacgttatcgtcacggacatgaagcggccacatctgcggtattacttcaactgtaataattggctttctaaggttgagggtgaccgccagtggtgccgtgatcttctcgcctcctttaatccgatggatatgccccgcggaaataagtatgaagtgaaagtctacacaggcgacgttattggggcaggtacggacgcggacgtctttatcaacattttcggggagtacggagataccggggaaaggcgcctggagaacgaaaaggacaactttgagaagggcgccgaggatcggttcattttggatgctcccgatcttgggcaactaatgaagataaacgtgggccacaacaacaagggcggctcagctggttggtttttatctcagattgtgattgaggatattgggaataagcgcaagtacgacttcccacttaatcgatggcttgcactggatgaagatgacggcaagatacagagagacatacttgtcggaggggccgagacgacagcaattacctacattgtgaccgtatttaccggggatgtgcgcggcgcaggtacaaagagtaaaatttatcttgttatgtatggggctcgcggcaacaagaatagcggaaagatcttcctggagggcggagtgtttgatagaggacggacggacatctttcatatcgaattggctgtgctgctcagtcccctctcccgggtgtctgtgggccacggaaacgtaggggtcaaccggggctggttctgtgaaaaagtcgttatcctctgccccttcaccggtatccagcagacctttccatgctccaattggctggacgagaagaaagcggacggtttaattgaaagacaactgtacgagatggtgtccctgagaaaaaagcgccttaaaaagtttccctggtcactttgggtatggaccaccgacctaaagaaagcgggcacgaacagcccgatctttatccagatatatggtcagaagggtcgcactgacgagattctgctgaatcccaacaacaaatggtttaagcctgggattatcgaaaaattccggattgagttgccagaccttggaagattctacaaaatccgggtttggcatgacaagcggagctcgggctctggctggcaccttgagaggatgactctcatgaataccctaaacaaggataaatacaactttaattgtaatcgctggttggatgccaatgaagacgacaacgagatcgtgcgggagatgactgccgagggcccgaccgtgcggcggattatgggcatggcccgctaccatgtcactgtctgtactggtgaattggaaggtgcaggaactgacgcgaatgtatatctttgcctgtttggcgacgttggagataccggcgagcgcctcttgtataactgcaggaacaataccgatctctttgagaagggcaatgcagatgagttcactattgaatcggtaactatgcgaaacgtcagaagggtgagaatacgccacgatggtaagggatctggaagcgggtggtatttggacagggtcctggtgcgggaggaaggccagccggaatccgacaatgtggagttcccctgtctgagatggcttgacaaggacaaggatgatggacaactagtcagagaactgctgcctagcgattctagcgccacgctaaagaacttcagatatcacatttccctcaaaacaggcgatgtgagcggcgcttctaccgatagtcgtgtgtacatcaaactatacggcgataaatctgacacaatcaagcaagtcctgctcgtgtccgataacaaccttaaggactatttcgaacgcggcagagtcgatgagttcaccctggaaacccttaatattggcaatattaataggctggtgatcggacatgactccacaggcatgcacgcgtcttggttcctgggaagcgtacagatccgcgtaccacgccagggcaagcagtatactttccccgcgaaccgatggttagataagaaccaggctgatggccgtctcgaggttgagctgtacccgagtgaagtggtggagatccagaagctcgtccattacgaagtggagatctggactggtgacgtgggcggggctggtacttcagcgagagtttacatgcagatatacggagagaaggggaagacagaagttctctttctgtcgagcaggagtaaggttttcgagcgagcatccaaggacacttttcagctggaggctgccgatgttggcgaggtttataaattgcgcctcggacataccggggagggctttggcccatcctggttcgtcgacactgtgtggttgcgccatttagtcgtgcgggaggtagacctcacccctgaggaggaagcccggaaaaaaaaggagaaggacaagctccggcagttgctcaagaaggagagactcaaggccaaactgcagcgcaaaaagaaaaaaaggaaagggtctgatgaagaagatgaaggcgaggaggaagagtcttcctcctctgaagaatctagcagcgaggaggaggagatggaagaagaagaggaggaagaagaattcggccctggaatgcaggaggtcattgagcagcacaaattcgaagctcacaggtggctcgctcgcgggaaagaagataacgaactggtagtggagctggtgcccgcaggaaagccagggcccgagaggaacacttacgaggtgcaggtagtgacagggaacgtgccaaaggctgggaccgacgcaaacgtgtatttaactatttacggagaggaatacggcgatacgggcgagcggcccctgaaaaagagcgacaaatccaataagtttgaacagggacagaccgatacttttaccatctatgccatcgatctgggggctctgacaaaaattcggatacggcacgataatacaggaaacagagccggctggtttctcgaccgcatcgatattactgacatgaataacgagattacctactattttccatgccagcggtggctggccgtcgaagaagacgatggtcagcttagtagagagttgctgcccgtggatgagagttatgtgctgcctcagtccgaagaaggccggggtggaggggacaacaatccattggacaatctggctctcgagcagaaagacaagtctactaccttcagcgtgaccattaagacgggtgttaaaaagaacgctgggacagatgccaacgtgtttataacactgttcggaactcaagacgatacagggatgaccctcttaaaaagctccaagactaactcagataagttcgaacgcgattccattgagatattcaccgtggaaaccctagacctgggggacttgtggaaagtgagactgggccacgacaataccgggaaagcacccggttggtttgtagactgggtggaggtcgatgctccatctctgggtaaatgcatgacttttccttgtggtagatggcttgccaagaatgaggacgacggctcaattatccgggacctgttccatgccgagctgcagacgcgcctgtatactcccttcgtgccatatgagattaccctatacacaagtgacgtgttcgccgccggtaccgacgccaatatatttatcatcatttatggttgtgacgctgtgtgtacccaacaaaagtatctgtgtacaaataagagagaacagaaacaattctttgaaaggaaatcagcctcgcggtttattgttgaactggaagacgtgggcgaaatcattgaaaagatccggatcgggcataataacaccggtatgaacccgggctggcactgctcccacgtggacatcaggcgcctgctgccggataaagacggcgctgaaacattgacatttccatgtgatcgttggctggctacctctgaagacgataaaaaaaccatcagggaacttgtcccttacgacatcttcaccgaaaaatatatgaaagatggcagcctgcggcaagtctataaggaggtggaagagcccttggacattgtcttatatagtgttcagatcttcacagggaatatacctggggcggggactgatgcgaaagtttacattacaatttacggggacctaggggacactggtgagcgctatctgggcaagtccgaaaatagaacaaataagtttgagagagggaccgccgacacctttataattgaggcggcggacctgggtgtgatctacaagatcaaactaaggcatgataacagtaagtggtgcgctgactggtacgtggagaaggttgaaatctggaacgataccaacgaagatgagtttttattcctgtgtggccgctggctatctcttaaaaaggaggacggcaggttggagaggctattttatgaaaaggagtacacgggggacagaagctccaactgttcttcgccagctgacttttgggagatcgcactttcttcaaagatggcggatgtcgacatatctactgtcaccggccccatggctgactatgtacaggaggggcctattattccgtactacgtgagcgtgacgacaggaaaacataaagatgccgctactgacagccgtgcattcattttcctgattggtgaagatgatgaacgatcgaaacgcatttggttagattaccctaggggcaaacgaggttttagccgcgggtctgtggaggagttctacgtggccggactcgacgttgggatcatcaaaaagatcgaggttctgtacgaaatgaccgtttggaccggggacgtagttggaggtggcacagactctaatatatttatgactctgtatggcattaatggaagcacggaggagatgcagctcgacaagaagaaggcacgatttgaaagggagcaaaacgatacctttattatggagatactggatatcgcacctttcaccaagatgagaatccgaattgacgggctcggaagcaggcctgaatggtttctcgaaagaatcctgctgaaaaacatgaacacaggcgaccttactatgttctactatggcgactggctgagtcaaaggaaggggaagaagaccttagtctgcgagatgtgcgcggtaatcgacgaggaagagatgatggagtggacctcttacactgtggccgttaagacttcagatatcctcggcgcagggaccgacgcaaatgtgttcataataatcttcggagagaacggagatagtggtacactggcactcaaacaaagcgctaactggaataaattcgagcgtaacaatacagatacttttaattttcctgacatgttgtctctgggccacctttgcaaacttcgtgtgtggcatgacaataaaggaatatttcccggatggcatcttagctacgtggatgtgaaagataactcgcgagatgaaactttccactttcagtgtgactgttggctgagcaaatctgaaggcgacgggcaaactgtccgtgactttgcctgcgccaataataaaatctgcgacgaactggaggagaccacctacgagatcgttattgagaccgggaacggtggtgaaacgcgagaaaacgtgtggctaattctggagggcaggaagaatagatccaaggagttcctcatggagaactccagtagacaaagagctttccgaaagggcaccactgatactttcgaattcgacagtatttacctgggcgacatagcgtcactgtgtgtcggccatctggcacgagaggacaggtttatcccaaaacgagagttagcctggcacgtgaagaccataaccatcacagaaatggagtacgggaacgtgtacttttttaactgtgattgcctgatacccctaaagagaaaacgcaaatatttcaaagtgtttgaagtgactaagacaactgagtcatttgcctctaaggtccaatccctggtcccagtcaagtacgaagtgatcgtgactacaggatatgagcccggggccggcaccgatgcaaatgtcttcgtaacgatcttcggcgctaacggtgacactgggaagcgcgagcttaagcagaaaatgcggaatctgttcgaacggggaagtacggaccgcttctttctggaaacgttagagctcggcgaactgcggaaggtgcgcctcgagcacgattcttctggttattgctctggctggctggtcgaaaaggtggaggtgacaaacactagcaccggcgtcgccaccatctttaactgcgggaggtggcttgataaaaaacggggggatggattgacgtggcgggatctgtttccctcggtctag

SEQ ID NO: 193485 - DNA, 3345 bp, synthetic construct
  misc_feature 1..3345: note = Description of Artificial Sequence: Synthetic coding sequence
  source 1..3345: mol_type = other DNA
atgaacaacgagatcacctactacttcccctgccagcggtggctggcagtcgaagaggatgatggacagctctcgcgagaactcctgccagtcgatgaatcatatgtcctcccacagagcgaggaaggacgggggggaggcgataataacccattggataacctagcactggagcaaaaggataagagtacaacatttagcgtgactattaagaccggggtcaaaaaaaatgccgggaccgatgctaatgtttttatcaccctttttggaacgcaggacgacactggcatgactctgcttaagtccagcaagaccaacagtgataagtttgaacgtgactcaattgagatttttaccgtggagacacttgacctgggggatctgtggaaggtacgactgggccacgacaacactgggaaagcccctggttggtttgtggattgggtggaggtggacgcaccttccttgggaaagtgcatgaccttcccctgcggacgttggctggccaaaaatgaagatgacggttcaatcatcagagatctttttcacgcggaactccaaaccagattgtacacacctttcgtgccttacgagatcacattatacacgtccgacgtatttgccgctggcactgatgctaacatttttattattatctacggttgcgatgccgtgtgtacccaacagaagtacttatgcaccaataaacgcgagcagaagcagttcttcgagcggaagtcagcaagtcgatttattgtagagctagaggatgtgggagagattatagagaaaattagaatcggccacaataataccggtatgaatcctgggtggcactgctcgcatgtggacatccggcgactgcttcctgataaagacggggctgagacgctcacttttccttgtgacaggtggttagccaccagcgaggacgacaagaaaaccatcagggaacttgtgccatatgatatattcactgagaagtacatgaaagacggctctctgcggcaagtgtataaagaggtcgaagaacccctggatattgtcctgtattccgtgcaaatctttacgggcaacattccaggagctgggacggatgcaaaagtctacataaccatctatggggatttgggcgataccggagagaggtatctgggtaaatccgagaatcgcactaataagttcgaaaggggcacggccgacaccttcatcattgaggccgccgacctaggggtgatctacaagattaagctccgtcatgataactctaaatggtgcgccgactggtacgtggagaaggtcgagatctggaacgatacgaacgaggacgagtttctctttctgtgtgggcgctggctgagcctcaagaaagaggatggacgactcgagcggctcttttatgaaaaagaatataccggggatcgctccagcaattgttcttccccagccgatttttgggagattgcgctgtcttctaaaatggccgatgtggatatttccaccgtgaccgggcccatggctgactacgtacaggagggccccattataccttactacgtaagtgtgacaacaggcaaacataaggatgcagcgactgacagccgcgcatttatatttctgattggggaagatgacgagaggtctaagagaatatggttggattatccgcgcggaaaacgggggtttagtcgaggctccgtagaagaattttacgtcgccggcctggacgttgggattatcaagaagatcgagctgggccacgatggcgcatcgccggagtcatgttggctggtggaagagctttgcctggctgtcccgacccaaggcacaaagtacatgctaaactgtaattgctggctcgcaaaagatcgtggggatggcatcacctctcgggtcttcgacctgttggatgctatggtggtgaacatcggggtgaaagtgttatacgagatgactgtgtggacgggggacgtggtgggaggtgggaccgacagcaacatctttatgactctatacggcataaacgggtcgaccgaggaaatgcaacttgataagaaaaaagcgcgcttcgagagagagcaaaatgacacattcattatggagatattggatatcgctccctttaccaagatgagaatacgcatcgacggactgggcagccggccggagtggttcctggagaggatactcctgaaaaatatgaatacaggagacctgaccatgttctactacggtgactggctgtctcagcgtaaaggaaagaagaccctcgtatgcgagatgtgcgctgtcatcgatgaggaagagatgatggaatggactagttacacagtggccgtcaagacgtctgacatcttgggtgcggggactgatgcaaatgtgttcattattatcttcggtgagaacggtgacagtggaacgcttgccttgaaacagtccgccaactggaacaaattcgaacgaaataatacagacacgtttaactttcctgacatgttatctctgggccacttgtgcaaactgagagtatggcacgataataaaggcattttcccgggatggcacctctcctatgtggatgtgaaagacaattcccgcgacgaaacattccatttccagtgtgattgctggttaagtaagagtgaaggggacggacaaactgtgagggactttgcgtgtgcgaataacaagatctgtgatgaactggaggaaacaacatatgaaattgttattgagactggtaacggaggcgagacacgagagaacgtgtggctgatactagaaggcaggaagaaccggagcaaagaatttttaatggaaaatagtagcagacagcgcgctttccggaaagggactaccgataccttcgagtttgactccatctacctcggcgatatagccagcctctgcgtggggcatctggccagagaagatcggttcattccaaaaagagagctggcctggcacgtcaaaaccattactatcaccgaaatggaatatgggaatgtgtattttttcaactgcgactgcctcatcccactgaagaggaaacgcaaatattttaaggtgtttgaggtgaccaagacgacggagagctttgcttccaaggtccaatctctggtgcctgtgaagtatgaggtgatcgttacaactggatacgagcccggtgctggaacagacgccaatgtttttgtaaccatcttcggagctaacggtgataccgggaagagagaactgaagcagaagatgcgcaacttgttcgaacggggttccacagaccggttctttttggaaaccctagagctagtagtgacgagactgggcctggccgcagagtgtggatag

SEQ ID NO: 193486 - DNA, 1539 bp, synthetic construct
  misc_feature 1..1539: note = Description of Artificial Sequence: Synthetic coding sequence
  source 1..1539: mol_type = other DNA
atgaccgtgtggaccggcgacgtggtgggcggcggcaccgacagcaatatcttcatgaccctttatggaattaacggctcaacagaagagatgcagttagataagaagaaagcaaggttcgagagagaacagaatgatactttcattatggaaatactggatattgcgcccttcacaaaaatgaggatacgtatagacggattggggtctaggcccgagtggtttctggagaggatattgctcaagaacatgaatacaggcgaccttacgatgttctactacggtgattggctttcacagaggaaaggaaaaaagacactggtgtgcgagatgtgtgcggtgatcgacgaggaggagatgatggaatggacgagttataccgtggctgtcaagacatccgatatccttggggctgggaccgatgctaacgtattcattatcatttttggagagaacggcgattcgggcacgcttgccctcaaacagtccgccaactggaataaatttgaaaggaataacaccgacactttcaactttcccgacatgctctctcttggacatctttgcaagctacgggtgtggcacgacaataaagggatctttcccgggtggcacctgagctatgtagatgtcaaggacaattctagagacgagacatttcacttccagtgcgattgctggctgtctaagagcgagggggacggacagacagtacgcgacttcgcgtgcgccaataacaagatctgcgatgagctggaagagacaacctatgaaatagtgatagagaccgggaatggcggtgaaacgcgggaaaatgtctggctgatactggaaggacgcaaaaatcgcagcaaggaattcttgatggagaacagctctcgccaaagagcctttcggaaaggcacaactgacacatttgagttcgacagtatctacctgggagatatagcatcactttgtgtcggccacctggctcgagaagacaggttcatcccaaagagggaactggcgtggcatgttaagacaatcaccatcactgaaatggagtacggcaatgtttacttctttaactgcgattgtctgatcccattgaagcgcaagaggaagtactttaaggtgtttgaggtcaccaaaaccacggagagtttcgcgtctaaggttcagagtctggtgcccgtaaagtatgaggtcatcgtgactaccggctacgagcctggagcagggaccgatgccaacgttttcgtaacgatttttggagcaaacggtgataccggtaaacgcgagctgaaacaaaagatgagaaatttgttcgaaaggggttctactgaccggttttttctggagaccctcgaactgggcgaactccgaaaggtgagattagaacacgatagctctgggtattgctccggctggcttgtcgagaaagtggaagtgaccaacacttcaacaggcgtggccacaatcttcaactgcggccggtggctcgacaagaaaaggggcgatggacttacttggcgtgatctctttccatctgtatag

SEQ ID NO: 193487 - DNA, 1374 bp, synthetic construct
  misc_feature 1..1374: note = Description of Artificial Sequence: Synthetic coding sequence
  source 1..1374: mol_type = other DNA
atgaccgtgtggaccggcgacgtggtgggcggcggcaccgacagcaatatttttatgaccctatatgggataaacgggtctaccgaggaaatgcagctggataagaaaaaagctaggtttgagcgcgaacagaacgacactttcatcatggagatactagatatcgcgcctttcactaaaatgcggatccggattgatggcctgggaagcagacctgagtggttccttgaaagaatcctgctaaagaacatgaacaccggcgaccttacaatgttttattacggtgactggctgtcacagcgcaaaggcaaaaagaccctggtgtgtgaaatgtgtgccgtgattgacgaggaggagatgatggagtggacatcatatacagtcgccgtgaagacttcagatatcctgggtgctgggactgacgctaacgtctttataatcatttttggcgaaaatggcgatagtggcactctggcgcttaagcagtctgcaaactggaataaattcgaaaggaataacaccgacacctttaattttcctgatatgctgtctctcggccacctgtgcaagttgagagtttggcacgacaacaaaggcatttttcccgggtggcacttgagctacgtggatgtaaaggacaatagcagagatgagacattccattttcagtgtgattgctggctgtcgaagagtgagggagatggccagacagtacgcgactttgcctgcgccaacaataaaatctgtgacgaactggaagagaccacgtacgaaatcgtaattgagaccggcaatgggggggaaaccagagaaaatgtctggttaatcctcgaaggcagaaagaacagaagcaaggagttcctgatggagaacagcagtcgccagagagcattcaggaaagggacgacagacacattcgagtttgactctatatacctgggggatattgcgtcactgtgcgtgggtcacctcgcaagggaggaccgttttattcctaaacgggagctcgcctggcacgtaaaaaccatcaccatcaccgagatggagtacggtaacgtctacttctttaactgtgattgtcttattcctctaaaacggaagaggaagtacttcaaggtgtttgaggtaactaaaactactgaaagtttcgcctccaaggtgcagtcgctggtacccgtaaagtacgaggtgatcgttaccacgggatacgagcctggcgccggcaccgacgcaaacgtgttcgtgacaatcttcggcgccaacggtgacaccggaaaacgcgaactgaaacagaagatgagaaacctattcgagcgggggagcacagacaggttcttccttgagacactggagttaggagaactcaggaaatag

SEQ ID NO: 193488 - DNA, 1122 bp, synthetic construct
  misc_feature 1..1122: note = Description of Artificial Sequence: Synthetic coding sequence
  source 1..1122: mol_type = other DNA
atgctgatccccttcagcatgaagaactgcttccagctgctgtgcaactgtcaggtgccggcagctggattcaagaaaaccgtcaagaacgggctaattctgcagtcaattagcaacgatgtgtaccaaaatctcgccgtggaggattggattcacgaccacatgaacctcgaaggtaaacccatcctatttttctggcagaacagtccttctgtggttatcgggcgacatcagaatccatggcaggagtgtaatttgaatctgatgagagaggaggggatcaagctggctcgtagaaggtctggcggggggacagtgtatcacgacatggggaacatcaatcttaccttcttcaccaccaagaaaaagtatgacagaatggagaatcttaaactgatcgtgagggctctgaatgccgtgcagcctcagttggacgtgcaggcgaccaaaaggtttgatttactgctggacggccagtttaagatctcaggtacagcgagcaaaatcggcaggactacagcctaccatcactgcacgctgttatgctcaaccgatggcacattcctttcctctttgttgaagagcccataccagggtattcgtagcaatgcgacggctagcatccccagcctcgtcaaaaacctgttggaaaaggacccaacattgacttgtgaagtgctgatgaatgctgtggccactgaatatgccgcctaccatcaaatagataatcatattcacctgatcaaccctacagacgagacattgttccccggaataaattctaaggccaaggaactacagacgtgggagtggatctacggcaaaacacccaaattctcaataaacacgtccttccacgttctctatgagcagtcccacctggagataaaagtgttcatcgacatcaagaacggtcgtatcgagatctgcaatattgaagcccccgaccattggctaccgctggaaattagagacaagttgaatagctcgcttatagggagcaagttctgcccaaccgaaactacgatgttgaccaacatactactacggacttgccctcaagatcacaaactgaactccaagtggaatatcctgtgtgaaaagatcaaggggataatgtag

SEQ ID NO: 193489 - DNA, 1122 bp, synthetic construct
  misc_feature 1..1122: note = Description of Artificial Sequence: Synthetic coding sequence
  source 1..1122: mol_type = other DNA
atgctgatccccttcagcatgaagaactgcttccagctgctgtgcaattgtcaggtgcccgctgcaggctttaaaaagacagtaaagaacggcctgatccttcagtccatcagcaatgacgtgtatcagaacctggctgtggaggattggattcacgatcacatgaacctggaaggtaaacccatcctattcttctggcagaattctccatcagtggtgattgggcggcatcaaaatccctggcaggaatgcaacctaaacctaatgagagaagagggaattaaactggcgaggcgccgttcaggcggcgggacagtctaccacgatatggggaacataaacctcacattctttaccactaagaagaagtacgacaggatggagaaccttaaactgatcgtgcgggccctcaacgcggtacaaccacaactggatgttcaggctaccaaaaggttcgatctgctgctggatggacagtttaagatttctggcactgcatctaagattggacggacaaccgcctatcaccattgcactctgctatgctcaactgacggaaccttcctgtctagcctgctgaaaagcccatatcaggggatcaggtccaacgccacagccagcatcccctccttagtaaaaaacctgctggaaaaggaccccactctgacttgtgaagtcttaatgaatgccgtcgccactgagtacgccgcttaccatcagattgataatcatatccatctaatcaatccaaccgacgagaccctatttccgggaattaacagtaaggccaaggaactccaaacctgggagtggatctatggtaaaactcctaagtttagcattaacacgtcctttcacgtcctgtacgaacaatcccacttagaaatcaaggtgtttatcgatattaaaaatggccgcatagagatatgtaacatcgaggcgcctgaccactggctaccactagaaatcagagataagcttaattcaagtctgataggatccaagttctgcccaaccgagactaccatgctgactaatatcctccttaggacctgcccacaggaccataaactgaattctaaatggaatatcctgtgtgaaaaaatcaagggcatcatgtag

SEQ ID NO: 193490 - DNA, 1122 bp, synthetic construct
  misc_feature 1..1122: note = Description of Artificial Sequence: Synthetic coding sequence
  source 1..1122: mol_type = other DNA
atgctgatccccttcagcatgaagaactgcttccagctgctgtgcaactgccaggtaccagccgcaggttttaagaaaacagtgaagaatggcttgatattgcaaagcatatccaacgacgtgtatcaaaacctggccgtagaggattggatccatgatcatatgaatctggagggaaagcctatactgtttttttggcagaactcaccttccgttgtgatcgggaggcaccagaatccttggcaggaatgtaatctcaacctgatgcgggaggaaggcatcaaactggcaaggaggcggtctggtggcgggaccgtctaccacgacatgggaaatattaatttgaccttctttactacaaagaagaagtatgacaggatggagaacctgaaactaattgtgcgggcgctcaatgctgtgcagcctcagctggacgtgcaagccaccaagcgatttgaccttctgctggatggccagttcaagatcagcggcacagcgagtaagattggacgcacaactgcttaccaccattgtaccctcctgtgtagtacagacggcactttcctttcttcactattaaagagtccttaccaggggattcggtctaacgctacagcatcaattccttctttggtgaaaaatctccttgaaaaagatcccaccctaacatgtgaggttttgatgaatgccgtggcgacagaatatgcagcctaccatcagattgacaaccacatccacttgatcaatcccactgatgaaacactgttccctggaattaactccaaggccaaggagctgcagacatgggagtggatatacggcaagacccccaaatttagtatcaatacgagtttccatgtgctgtatgagcagagccacctcgaaatcaaggtgtttatcgatataaaaaatggtcggattgaaatttgtaacatcgaggctcccgatcattggttgcccctggaaatacgcgataaactcaattcgtccctcatcggatccaaattctgccccacagaaactacaatgctgaccaacatcctgttaaggacctgcccacaggaccataagctgaattcaaagtggaatatcctgtgcgagaagatcaaggggataatgtag

SEQ ID NO: 193491 - DNA, 1122 bp, synthetic construct
  misc_feature 1..1122: note = Description of Artificial Sequence: Synthetic coding sequence
  source 1..1122: mol_type = other DNA
atgctgatccccttcagcatgaagaactgcttccagctgctgtgcaactgccaggtccccgcagcaggttttaagaagacagtcaaaaacggtctgatcctgcaaagcatatccaatgatgtctatcagaacctggcagtggaggactggatccatgaccacatgaacctagagggaaagcccatactcttcttctggcagaactccccctctgtggttatcggaaggcaccagaacccatggcaggaatgcaatctaaacctgatgagagaggagggaattaaattagccagaaggcgctctggagggggaactgtttaccacgatatgggaaatattaatctgacttttttcacaacaaaaaaaaagtatgaccggatggagaatcttaaactgatcgtcagagcactgaatgcggtccaaccacagttggacgttcaggctaccaaacgcttcgacctactcctggatggacagttcaagatctctgggacagcatctaagattggcagaactaccgcttatcatcattgtaccctgttatgctccaccgatggcaccttcctctctagccttctgaagtctccatatcagggcattaggtctaatgctactgcctctattccttctctggtgaagaatctgttagaaaaagatcccacattaacgtgcgaggtattgatgaatgcagtcgcgaccgaatatgctgcttatcatcagatagataaccacattcatctcatcaaccctactgacgagaccttgtttcctggtataaattccaaggctaaggagctacagacctgggaatggatctatggaaaaacaccgaagttcagtataaacacatcatttcatgtgctctatgagcagtcacatctcgagataaaggtatttatcgacattaagaatggcagaatagagatttgcaacatcgaagcgccagaccattggctgccgctcgagattagggataaactaaacagtagtctgatagggagtaagttctgtcccaccgaaacgacaatgctgaccaacattttgctgcgcacgtgccctcaggatcacaagctgaacagtaagtggaatattctgtgcgagaagatcaagggcataatgtag

SEQ ID NO: 193492 - DNA, 1122 bp, synthetic construct
  misc_feature 1..1122: note = Description of Artificial Sequence: Synthetic coding sequence
  source 1..1122: mol_type = other DNA
atgctgatccccttcagcatgaagaactgcttccagctgctgtgcaactgtcaggttccagccgcaggatttaagaaaactgtgaaaaatgggctgattctgcagtctatatctaacgatgtctaccagaacctggctgtggaggattggatacatgatcatatgaatcttgagggcaaacccatactctttttttggcagaactctccctcagttgtcatcgggagacaccaaaacccttggcaggaatgcaatctcaatctcatgcgcgaagagggcatcaagctggcccgaaggcggtccgggggcggcactgtgtaccatgatatgggaaatataaatctgaccttctttaccactaaaaagaaatatgacagaatggagaatctcaagctcatagtgcgagcactgaacgctgtgcagcctcagctggatgtgcaggccactaaacgctttgatcttctgttggatgggcagtttaagatctctgggactgcttccaagataggtcggacaacggcctatcatcattgtacgctcctgtgcagtacagacggaactttcctgtcatctcttctgaaaagcccttatcagggcatcagatccaacgcaactgcctcaatcccatccctggttaaaaacttgctggaaaaagatcctacacttacctgcgaggtactcatgaatgccgttgccacggagtacgctgcatatcaccagattgataaccacatccatttgattaaccccaccgacgaaacgttgtttcctggcatcaactcaaaagccaaggagttacagacttgggagtggatctacggcaaaacaccaaagttttctattaatacttcatttcacgtcctgtatgagcaatcccacctcgagattaaagtatttatcgacatcaagaatggacgaattgagatctgtaatatagaggcaccagaccattggctcccgcttgaaatccgagataagctgaatagcagtctgatcggcagtaaattttgccccacagaaacaacgatgttgacaaacattctgctgaggacatgccctcaggaccacaagctgaacagcaaatggaacatcctgtgtgaaaaaataaagggcatcatgtag

SEQ ID NO: 193493 - DNA, 321 bp, synthetic construct
  misc_feature 1..321: note = Description of Artificial Sequence: Synthetic coding sequence
  source 1..321: mol_type = other DNA
atgctgatccccttcagcatgaagaactgcttccagctgctgtgcaactgccaggtccctgcagcaggctttaaaaaaacagtgaagaacggtttgatccttcagagcatatctaatgacgtgtaccagaacctcgccgtggaggactggattcacgaccacatgaacttagaagggaagccaatcctttttttctggcagaactcccccagtgtcgtgattggacggcaccagaatccttggcaggagtgtaacctgaatcttatgcgcgaagaaggcataaagcttgcacgccgtcgcagcggaggtggaactgtgtag

SEQ ID NO: 193494 - DNA, 756 bp, synthetic construct
  misc_feature 1..756: note = Description of Artificial Sequence: Synthetic coding sequence
  source 1..756: mol_type = other DNA
atgctgatccccttcagcatgaagaactgcttccagctgctgtgcaactgccaagttccagctgcggggttcaagaaaactgttaagaacggcctgattctacagtccatttctaacgacgtttaccagaacctggctgtggaggattggatccacgaccatatgaacctggaaggcaagcccatcttattcttctggcagaattctcctagtgtggttatcggccggcaccagaacccctggcaggagtgtaacttaaacctcatgcgggaagaaggcatcaagcttgcccggcggaggagtggaggagggactgtgtatcatgacatgggtaatattaaccttacattcttcactaccaaaaaaaagtatgataggatggagaatctgaaattgatcgtccgcgcactcaacgccgtgcagccccagcttgacgtgcaagcgacgaaaaggttcgatctgctgctggatgggcagtttaagattagcggaacagcctccaaaattggacgaacgaccgcctatcaccactgtacgcttttatgcagcactgacgggacgtttctgagctcattgttgaaatccccctatcagggcattagatccaacgcaaccgctagtattccatctctggtcaagaatttgctcgaaaaggatccaactctgacctgcgaagtattgatgaacgccgtagcaaccgaatacgccgcctaccaccagatcgataaccacatacacctcattaatcccacatag

SEQ ID NO: 193495 - DNA, 120 bp, synthetic construct
  misc_feature 1..120: note = Description of Artificial Sequence: Synthetic coding sequence
  source 1..120: mol_type = other DNA
atgctgatccccttcagcatgaagaactgcttccagctgctgtgcaactgccaagtacctgcagcaggctttaagaaaactgtcaagaatggactaatcctgcaatcaatttcaaactag

SEQ ID NO: 193496 - DNA, 408 bp, synthetic construct
  misc_feature 1..408: note = Description of Artificial Sequence: Synthetic coding sequence
  source 1..408: mol_type = other DNA
atgctgatccccttcagcatgaagaactgcttccagctgctgtgcaactgccaagttcctgcagcaggcttcaaaaaaacggtaaagaacggacttattctgcagagtattagcaacgacgtgtaccagaacctcgctgtggaagactggatccatgaccacatgaatctcgaaggcaaaccaatactatttttctggcagaacagtccgtcggtggtgataggccgacaccagaacccttggcaggagtgtaatcttaacctgatgagggaggagggtattaaactggctcgccggcggtctgggggtggcacagtctaccacgacatgggcaacataaatctaactttctttacaacaaaaaagaaatacgacaggatggagaacctgaagctgatcgtcagatag

SEQ ID NO: 193497 - DNA, 5301 bp, synthetic construct
  misc_feature 1..5301: note = Description of Artificial Sequence: Synthetic coding sequence
  source 1..5301: mol_type = other DNA
atgggcggcaagaacaagcagcggaccaagggcaacctgcggcccagtaattccggcagagctgctgagttgttggccaaagaacaggggactgtgcctggttttatcggattcggtacttctcagtctgacctcggatacgttcctgcaattcaaggcgcggaggaaatcgatagtctggttgactccgatttccgaatggtgcttaggaaactgtctaagaaggacgtgacaactaaactgaaggcgatgcaggagtttggcaccatgtgcacggaacgagatactgagaccgttaagggagtgttgccctactggccccggattttttgtaaaatctctctagatcacgatcgtagagttcgtgaagccacacagcaggccttcgaaaagcttatactgaaggttaagaagcagctggccccgtatctgaagtctctcatgggttactggctaatggcccagtgtgacacttacacaccggcagccttcgctgctaaggatgcattcgaagcagctttccctccatcaaaacagcctgaggcaatcgccttctgcaaggatgaaatcacctccgtgctgcaggatcacttaatcaaggaaaccccagacaccctatccgatccacagactgtcccagaggaagaacgtgaagcaaaattctaccgcgtggtgacatgtagtcttctggctctgaaaaggctcctatgtctccttcccgacaatgagctggattcgttagaggaaaaatttaagagcctgctctcacaaaacaaattctggaagtacggaaagcatagcgtccctcaaattcgctccgcctacttcgaattagtgtccgctctgtgccagagaatcccccagctgatgaaagaggaagcttccaaggtttcaccttcagtgctcctatccatcgatgactccgatcccatagtttgcccggcactgtgggaggcagtcctgtacaccttaactaccattgaggattgctggctacacgtgaacgctaagaagtccgtcttcccaaaactgtctactgtcatacgagaggggggtcgaggactcgctaccgttatttacccttatctgcttcctttcataagcaaactccctcagtccatcacgaaccctaagctcgactttttcaagaactttcttacaagtcttgtggccggcttgtctacagaacgcaccaagacatcatctctggaatcatccgcagtgatctccgcattctttgaatgtctaaggttcatcatgcaacagaacctcggcgaagaggaaatagagcaaatgttggtgaacgatcaactgatcccatttatcgatgccgtgcttaaggatccaggactccaacacggccaactgttcaatcacctggccgagacactttcgagctgggaggctaaggctgatacagaaaaggatgaaaagacggcccataaccttgaaaatgttctgatccacttctgggagaggctctcagagatatgtgtcgccaagataagtgaaccagaagccgacgtggaatctgttttgggtgtgtcaaacctgttacaagtcttacagaaaccgaaaagttctctcaagtccagtaagaagaaaaatggaaaggtcaggtttgccgacgagatcttagaaagtaacaaagaaaacgaaaaatgcgtctcatctgaaggtgagaagatcgagggttgggagctgacaaccgagccctccctgacccacaattcttctgggctgctgtccccactgagaaagaagcccttagaagacctcgtgtgtaaactcgctgatattagcattaattatgtgaatgagcgcaagtccgagcaacacttacggtttctgagcacgctgctagattcattttcttccagccgggtttttaagatgctgcttggggacgagaaacagagcatagtccaagccaagccattggaaattgcaaaactcgtccagaaaaatccagccgttcagttcctttatcagaagctcatcgggtggctgaacgaagatcagcgcaaggactttgggtttctagtagatatcctgtactcagccttgcgttgctgtgataacgacatggagcggaaaaaggtcctcgacgacttgacaaaagtagacttgaaatggaactccctactcaagattatagagaaagcatgcccaagttcagataaacacgcactcgtaacaccctggctgaagggcgacatacttggtgagaaactggtgaatctggcggactgcctttgcaacgaggatctcgaatcaagggtctcctccgagtcgcacttctcagaacggtggacactgctgagtcttgtgctgagccagcatgtaaagaatgactatctgattggggatgtatatgtggagcggatcatcgtgcgcctgcacgagacgctctttaagactaagaaactttctgaggcggaatcttccgactcctcggtctccttcatttgtgacgtggcatacaattatttcagctcggctaagggttgcctgttgatgccgtcgtcagaggacctgctgttgacccttttccaactctgtgcccaaagcaaagagaagacccacctgcctgattttctgatttgtaaactgaaaaacacttggttgtccggagtgaacctcctcgtccaccaaactgactcctcgtacaaggagtctactttcctgcacctctcagctctgtggctgaagaatcaggtccaggcatcatctctcgatatcaacagcctgcaggtgttactgtccgctgtggatgatctcttgaataccctgctggagagtgaagactcatacttgatgggggtgtacataggctcggtgatgcccaacgactccgagtgggagaagatgagacagagtctgccgatgcaatggctgcaccgcccgctcctggagggacggctgtccctgaattacgaatgtttcaaaactgactttaaagagcaggacatcaaaacactgccgagtcacttatgcacctcagcactgctgtctaagatggttctgatcgccctgcggaaagagacagtacttgaaaacaacgagctagagaagatcatcgctgagctgctctatagcctccagtggtgcgaggagctcgataacccaccaatctttttgatcggattctgtgaaatactccagaaaatgaacatcacctatgacaatttgcgcgtgctggggaacacctccggactcctgcagctactgttcaatcgctccagagaacatgggactttatggtctctgatcatagccaagcttatcctgtcccgctccatttccagcgacgaggtcaaaccacattacaagaggaaggaatcattcttccccctgaccgaaggaaacctccacaccatccagtccctgtgcccgttcctctctaaggaagaaaaaaaagaattcagtgcccagtgcattcccgcgttactagggtggaccaagaaagatttatgtagcacaaatggcgggttcggccacctggccatttttaacagctgtctccagactaagtcaatcgacgatggagaactgctgcatggaatcttgaagatcatcattagctggaaaaaggaacacgaagacatctttctctttagttgtaatctttcagaggcgagtcccgaagtcctcggggtcaacatcgaaataatacgctttctgtccctctttcttaagtattgcagtagtcctctggcggaatcagaatgggacttcatcatgtgcagcatgcttgcttggttggaaactacgtctgaaaatcaggccctgtatagcatccctctggtgcagctttttgcctgtgtatcttgtgatctcgcatgtgacctcagtgcttttttcgatagcactaccctcgacaccatcgggaatctgcccgttaacttaataagcgaatggaaggagttcttcagccagggcattcactccttgttgttgcccattttggtcactgtaaccggggaaaacaaggacgttagcgagacttctttccagaacgctatgctcaaacctatgtgtgagactctcacatatatcagcaaggagcagctcctatcccataagctgccagccaggctcgttgccgaccagaaaactaaccttcccgagtatctgcagacgttactgaatacactcgctccactgctgctgttcagagcacggcctgtccagattgcagtctatcatatgttatataagttaatgcccgaactacctcagtacgaccaggataatctgaagagctatggggatgaggaagaggagcctgcactttcaccccctgctgcactgatgagcttgcttagcattcaggaggatttgctggaaaacgttctgggatgcattccagttggtcaaattgtaacaattaaacctctcagtgaggacttttgttacgtgctggggtacctgctcacgtggaagttgatcctcaccttctttaaggcggcctcatcacagcttagggcgctctattctatgtatctgcgcaagactaagtcccttaacaaacttctttatcacctgtttcgcctcatgccggagaacccaacatacgcagaaacagcagtggaagtgcccaacaaggaccctaagacctttttcaccgaggagctacagctcagcatccgcgaaacaaccatgctgccctaccacataccacacttggcctgcagtgtgtaccatatgacactgaaagacctgcccgccatggtacggctctggtggaattcctctgagaagcgggtcttcaatatagtggaccggttcaccagtaaatatgtctctagcgtcctttccttccaggaaatctcttccgtccaaactagcacccagctcttcaacggaatgactgttaaagcaagggctactacacgagaagtcatggctacctacaccattgaagacattgttatagagctcatcattcaactccccagtaattaccccctagggtcaattattgtggagtcaggcaaaagagtgggtgtggccgtccagcagtggcggaactggatgctacagttatccacttaccttacgcaccagaacggctcaatcatggaaggattggcactctggaaaaataatgtcgacaagagattcgaaggcgtggaggactgcatgatatgcttctcagtgatacacggatttaattatagcctgcccaagaaagcctgtcgcacctgtaaaaagaaattccattcagcatgcctgtacaaatggttcacctcttctaacaagtccacctgcccactgtgccgcgaaacgtttttctag

SEQ ID NO: 193498 - DNA, 1443 bp, synthetic construct
  misc_feature 1..1443: note = Description of Artificial Sequence: Synthetic coding sequence
  source 1..1443: mol_type = other DNA
atgggcggcaagaacaagcagcggaccaagggcaacctgcggccctccaatagcggacgcgccgctgagctgctggccaaggagcagggcaccgtgcccggcttcataggcttcgggaccagccagagtgacctgggatacgtgccagctattcagggggctgaggagatcgattccctggtggactccgatttcaggatggtgctcaggaaactgtcaaaaaaagatgtcactacaaaattgaaagccaacgccatgcaagagttcggtacaatgtgcactgagagagataccgagaccgtaaagggtgtgcttccatactggcctagaattttctgtaaaattagtcttgaccacgatcggcgtgtgagggaagcaacccaacaggcatttgaaaagctgatcttaaaagtgaagaagcagctggccccttacctcaagtctctgatgggatactggctcatggcccaatgtgacacctatacaccagctgcgttcgctgccaaggacgcgtttgaagctgcattcccaccctctaagcagcctgaggctattgctttctgcaaggatgagatcactagcgtgttacaggaccatttgatcaaggaaacacctgacacattgtccgacccccaaacagtgccggaggaggagcgtgaggccaaattttacagagttgtgacctgttcgctgctggcactcaaacgcctgctgtgcttactacccgacaatgagctggactctttggaggaaaagttcaaatcattactgagccagaacaagttctggaaatacggtaagcattcagtgccccaaataagaagtgcatatttcgaactggtctcagccctttgtcaaagaatacctcagctcatgaaagaggaagcctcaaaagtttctccctcagttttgctctccattgacgattccgacccaattgtctgcccagccctctgggaggccgtcctgtatacactcactaccatcgaggattgttggctccatgtgaacgcaaaaaaaagtgttttcccgaagctttctacagtgatcagggagggcggacgggggctcgccaccgtgatctacccttacctattgcctttcatcagcaaactaccgcagtcaatcacaaacccaaaattggattttttcaaaaattttctgacctcccttgtggcaggccttagcaccgagcgtacaaaaacttcgtcgctggagagcagcgcagtgatatccgctttttttgaatgcctacgtttcatcatgcagcagaacctgggagaagaagagatcgagcagatgctggtcaacgatcagcttatccctttcatcgacgccgtgctgaaggatccaggcttacagcatggtcagctctttaatcatctcgccgagactctttcttcttgggaggccaaggctgatacagaaaaggatgagaagtag

SEQ ID NO: 193499 - DNA, 5439 bp, synthetic construct
  misc_feature 1..5439: note = Description of Artificial Sequence: Synthetic coding sequence
  source 1..5439: mol_type = other DNA
atggaccgggtgggcggcggcaagggccccggcggcagctactaccgagtgagttcctccgccgcccgctccaggaagctctgccccgggcgagtaaacagaggactgtccgcccaatctacagcagccacagcaactatggggggcaagaacaagcaacgcacaaaaggcaacctccggccttctaactcaggccgagctgcggagctgctggccaaggaacaggggaccgtacccggcttcattgggtttggcacatcccaaagcgacttggggtacgtgcccgctattcaaggtgccgaagaaattgattccctagtcgactctgattttaggatggtgctccggaaactgtcaaaaaaggatgtgactaccaagctgaaagctatgcaagagttcggcaccatgtgcaccgagcgcgataccgagacagtgaaaggcgtgctgccttactggccacgtattttttgcaaaattagcttagaccacgatagaagggtgcgggaggccactcagcaagcatttgagaagctgatcctcaaagtcaaaaagcaactggccccgtacttgaaatcacttatgggatactggctgatggcccaatgcgacacgtataccccggcagctttcgcagccaaggacgcattcgaggctgccttcccaccctccaagcagcccgaggcgatcgccttctgtaaagatgagattaccagcgtccttcaggaccatcttatcaaagaaaccccagatacattgagcgaccctcagaccgtgccagaagaggagcgggaggccaaattttatcgcgtagtgacctgtagcttacttgctctgaagaggctgctctgtctgctgcccgataacgagcttgactcactggaggaaaagtttaaatcgctgctctcccagaacaaattctggaagtacggcaagcattcagtcccccagatacgctctgcttattttgagctggtgtccgctctgtgccagcgcatcccacagctgatgaaggaggaggctagcaaggtgtctccaagtgtgctgttgtcaattgatgactctgacccgatcgtgtgtccagcactgtgggaagcagtgctctacaccctgaccactattgaggactgctggctgcacgtgaatgcaaagaagagtgtgtttcccaaactgagcaccgtcattagagaaggcggacgaggcctggctaccgtgatctatccttatcttcttccatttattagcaagttacctcagagcataacaaatcccaagctagatttctttaagaattttctgacctccttagtcgcgggcttaagcactgagcgcaccaagaccagctcgctggaaagctctgctgtgatctcagcattcttcgaatgcctgagattcataatgcagcagaacttgggtgaggaagagatcgagcagatgctggtgaatgaccagttgattccattcattgatgccgtcctgaaggacccaggtctgcaacacgggcagcttttcaaccatctagctgagacgttgtcatcatgggaagctaaagctgatacggaaaaagacgagaagacagcacacaacttagagaacgtgctcattcacttctgggaacggctgtctgagatctgtgtggccaagatcagtgagcctgaagccgacgttgagtccgtgctgggcgtgtcaaacctcctccaggtgctacagaagcccaaatcgtcactgaagtccagtaagaaaaaaaatggtaaggtccgcttcgctgacgagattctggagagcaataaggagaacgagaaatgcgtctcttctgagggagaaaagattgagggatgggagttgacaaccgaaccctccctgactcataactcctctgggctgttgtcaccactgcggaagaaaccgctggaagatctggtatgcaagctcgccgatatttcgatcaactatgtgaacgagcggaaaagcgagcaacatcttagattcctttcgactctgttggacagcttctcttccagccgcgtattcaaaatgcttctcggtgatgaaaaacagtcgatagtgcaggccaagccactcgaaatcgccaagctggttcaaaagaacccggccgtgcagtttttgtaccagaaattgattggctggctcaacgaggaccagcgcaaagactttggcttcttggtggatattctttactcagccctccggtgttgcgataacgatatggaaaggaagaaggtgctggatgatcttacaaaagtggatctaaaatggaattcactcctgaaaataatagagaaagcatgcccctcgtcagacaaacacgctttggtcaccccgtggttaaaaggtgatatcctgggcgagaaattggtgaatctggccgattgcctgtgcaacgaggatttggagtccagagtctccagtgaaagccacttctctgagcggtggactcttcttagccttgtgctgagtcagcatgtgaaaaatgattacttaataggcgatgtgtacgtcgagcgcattatcgttagattgcatgagactctgttcaaaacaaagaaactgtccgaagctgagtcttctgactcttccgtatcgttcatttgtgatgtggcgtataactactttagcagcgccaaaggctgcctgctgatgcccagttctgaggatcttttactgaccctctttcaactctgtgctcagtccaaggagaagacccacctacccgattttctgatttgcaaattgaagaatacctggttgtcgggtgtgaatctgttggtgcaccagactgactcatcctacaaagagtccacattcctccacctgtcagctctgtggctcaaaaaccaggttcaggctagttctctcgacataaatagcctccaggttttgctgtctgcagtggatgaccttttaaacaccctgctagaaagcgaggactcatacctgatgggcgtctatattggttccgtgatgcccaatgattcggaatgggaaaaaatgcgccagtcattacctatgcagtggttacacaggcctctcctcgagggacgacttagtctcaactatgagtgcttcaaaactgattttaaggaacaggacatcaagactctaccttcccatctctgtacctcggccctgctaagcaaaatggtgttaattgccctgagaaaggagaccgtgctggagaataacgaacttgagaaaataatcgcagaactcctctattcactacagtggtgcgaagaattagataaccctccaatctttttgattggattttgtgaaatcttgcagaaaatgaacataacttacgacaatcttagggtcttaggaaacacgtctggtcttctgcagcttctcttcaatcgaagccgagaacacgggactttatggtccctcataatcgccaagctgatcctctcccggagtatctcctctgatgaagtcaagccacattacaaaagaaaggagagtttcttccccctgactgagggtaacctccacacgatacagtcactgtgtcctttcttgagcaaagaagaaaaaaaggagttcagcgcccaatgtatccccgccttgttaggatggactaaaaaggatctctgctcaaccaacggcgggtttggacatctggcaattttcaacagttgcctccagacaaaatctatcgacgacggtgagctcctgcacggcatcctgaagatcatcatcagttggaagaaggagcatgaggacatcttccttttcagctgtaacctgagcgaggcaagcccagaagttcttggagtcaatattgaaataatccgattccttagcctgtttctgaaatactgttcctcccctctggccgagtccgaatgggactttattatgtgtagcatgctggcctggctggagaccactagtgaaaaccaggccctttactcaatccctctagttcagctattcgcttgtgtttcatgtgatcttgcgtgtgacctatctgctttctttgatagtacaacacttgataccatcggaaacttgcctgtgaacttgatttctgagtggaaagaattcttttctcaggggatccacagtctgctgttgcccatattagtgaccgtgacgggcgaaaataaagatgtgtctgagacttcgtttcagaatgcaatgctgaagcctatgtgtgagaccctgacatacatcagtaaggaacagctcttaagccacaagctgccagcacggctggttgcagatcagaagacgaatctgccagagtatttgcagacactgctgaatacgctcgctccgcttctgttgtttagagcgagacctgtgcagattgctgtgtatcatatgctgtataaactcatgcccgagctgcctcagtatgatcaagataatctgaagtcatatggagacgaagaggaggaacctgcgcttagccctccagcggcactgatgtcccttctgagtattcaagaggatcttctggaaaatgtactgggctgcattcctgtgggccaaattgttaccatcaagccactgtcggaggacttctgttatgttcttggttatcttcttacgtggaagcttatcctgacgttcttcaaggctgcgagttctcagctcagagccctctacagcatgtatttgcgcaaaactaaatcgttaaacaagttgttataccatctcttcagactgatgccagagaaccctacctacgccgaaacagcagtcgaagttcctaataaagatcccaagacctttttcacggaagagctccagcttagtatccgcgagaccaccatgctcccgtatcacattccacacctggcctgctccgtatatcacatgacactaaaagatctgcccgcaatggtgcgtctttggtggaatagcagtgaaaagcgagtcttcaacatcgtggaccggtttacttccaagtacgtatcttccgtcttgtcttttcaggaaatttcatctgtgcagacgagcacccaactcttcaacggcatgactgtgaaggccagggccaccacccgggaggttatggcaacctacacgatagaggatatcgtcattgagctcattatccagctccctagcaattatccattgggatcaatcattgtggaaagcggtaagagagtgggtgtggcagtccagcagtggaggaactggatgctgcagctctctacgtatcttacccatcagaacggtagcatcatggagggtctggcgctgtggaaaaacaatgtggataagcgattcgagggcgtggaagactgcatgatttgcttctcagtcatccacgggtttaactattccttgcctaagaaggcgtgtcggacctgcaagaagaagttccactccgcatgcctttataaatggtttacttcatccaacaagtctacttgtcccctgtgccgagaaaccttcttctag

SEQ ID NO: 193500 - DNA, 1404 bp, synthetic construct
  misc_feature 1..1404: note = Description of Artificial Sequence: Synthetic coding sequence
  source 1..1404: mol_type = other DNA
atgaagaaccagaacggcaccttcaaggactgggccaacgccaacgtgtcccgccaaatagaggatactgtgctgtacggctactatacattgtacagcgtgattctcttctgtgtgttcttttggattcccttcgtttacttctactatgaggagaaggatgacgatgacacttccaaatgcacacaaatcaaaaccgccctcaaatataccttaggcttcgttgtgatctgtgctctcttgcttctcgtgggtgccttcgtacccctgaacgtgccaaataataagaatagtacagaatgggaaaaagtcaaaagcctgtttgaggagctcggatctagccatgggctggccgcgctaagtttttcgatctcctctctaacactcattgggatgttggccgcgattacctataccgcatatggcatgtctgctctgcccctgaatctgattaaggggactaggtctgccgcctatgaacggctggaaaacactgaagatattgaagaggttgaacagcatattcaaacaatcaaatctaaatcgaaggatggccgccctttaccggcacgagacaagagagctttgaagcagtttgaggagagattacggaccctgaaaaagcgagagaggcacctggagtttatcgagaactcgtggtggactaaattttgtggggctctcaggccactcaagattgtttggggtatcttctttatcctggtggctctgttattcgtgatctccctgtttctctccaatctagacaaggctctgcacagtgctggcatcgactcgggctttattatcttcggagcaaatctctctaaccctctgaacatgctgctccctctactgcagacagtgttcccgctagattatatcctcatcaccatcattatcatgtatttcatttttacaagtatggcaggcataaggaacataggcatttggttcttctggattcgtttatataaaattagaaggggaaggacccggccgcaggcactgctgtttctatgcatgatcctcctgttaatcgtcctccacacatcttatatgatatatagccttgccccgcagtatgtgatgtacgggtctcagaactatttaattgaaaccaacattaccagcgacaaccataaggggaactctactttgtcagtgcctaagcgctgcgacgcagatgctcctgaggaccagtgcacggtgacccgcacctacctgttcctacataaattttggtttttctccgctgcctactattttggcaattgggcctttctgggcgtgttcctgattggtttgatcgtcagctgttgcaagggaaaaaagtccgtaattgaaggagttgatgaggatagcgatatatccgacgatgagccgtcggtatactccgcatag

SEQ ID NO: 193501 - DNA, 1623 bp, synthetic construct
  misc_feature 1..1623: note = Description of Artificial Sequence: Synthetic coding sequence
  source 1..1623: mol_type = other DNA
atggccaccagcggcgccgccagcgccgagctggtgatcggctggtgtatcttcgggctcctcctgctcgccattctagctttctgctggatctacgttcgcaaataccagtcccgacgggagtcagaggtggtctctacaatcactgcaatattctcattggccatcgccttgatcacatctgcgttacttccagttgatatcttcctggtctcttatatgaagaatcagaatggtacattcaaggattgggccaacgctaacgtatctcggcagatagaagataccgtcctgtacggctattatacactgtactccgtgattctgttctgcgtctttttctggatcccgtttgtctacttctattacgaggaaaaagacgacgacgacacgtcaaagtgcacccagatcaaaacggctcttaagtacacgttaggcttcgttgttatatgtgctctcctgttgctcgtgggcgcctttgtcccattaaacgtccctaataacaaaaactctaccgaatgggaaaaggtgaagtctctctttgaggagctggggagtagccacggactcgcggccctgtccttttcgatcagctctctgacactcattggaatgctcgctgctatcacttatacagcctacggcatgtccgccctgcctctcaacctgattaaggggaccaggtcagcggcctacgagcgcctcgagaacactgaggatattgaggaagtcgagcagcacatacagacaataaaatctaaaagcaaagatggtagaccactgcctgcgcgggacaaaagagccctgaagcagtttgaggagcgtctcaggacactgaagaagagagaacggcatctggagttcattgagaatagctggtggactaaattttgtggcgcgctccgaccactgaagatcgtgtgggggatcttcttcatacttgttgcgctcctttttgttataagcctctttctctccaatttggataaggctctccacagtgcgggcattgattctggttttatcatctttggcgctaatctgagcaatcctctgaacatgctcctccccctgctgcagaccgtgttccccctggactatatcctgatcacgatcattattatgtacttcatattcacctcaatggctggcatcagaaatatcggtatatggttcttttggatccggttgtacaaaatcagaagagggagaacgcgcccccaagcattgctgtttctttgtatgatcctgttgcttattgtcctgcatacatcctatatgatttacagtctggccccccagtacgtgatgtatggcagtcaaaactacctcatagaaaccaatataacatctgacaaccacaagggtaactccacgttgagcgtaccaaaaagatgcgacgccgatgctccggaagaccagtgcacagtgacgagaacatatctctttctgcacaaattctggtttttctctgccgcctattactttggcaattgggcgttcctgggcgtttttctgattggcctgatcgtgtcttgctgtaagggtaagaagtccgtgatcgaaggcgtggatgaggatagcgacatttctgacgacgagccctctgtctatagtgcttag

SEQ ID NO: 193502 - DNA, 939 bp, synthetic construct
  misc_feature 1..939: note = Description of Artificial Sequence: Synthetic coding sequence
  source 1..939: mol_type = other DNA
atgagctaccagaagaagcagcccaccccccagccccccgtggactgcgtgaaaacctccggtggtggcgggggcggggggggctccggcggtggggggtgtgggttctttggcggcggtggatctggcgggggctcgtcagggtctggctgcggttactcaggtgggggcggctacagcggcgggggctgtggaggggggagctccggaggggggggcggaggcgggattggggggtgtggaggaggaagtgggggttccgtgaagtatagcggagggggaggcagctctgggggaggtagcgggtgtttctcttccgggggggggggttctgggtgctttagtagcggaggcgggggcagctccggtggcgggtctgggtgtttctccagcggggggggggggtcctctgggggcggatcggggtgtttttcatcggggggcggcggcttctcaggccaagccgttcagtgccaatcctacggcggggtgtccagcgggggttcctcaggtggaggcagcgggtgcttctcatctgggggcggcggtggaagtgtttgcggctattccggggggggctccggctgcggaggtgggtcgtccggtggttcaggttcgggctatgtgagtagccaacaggtaactcagacatcttgtgctcctcagccttcctacggaggcgggtcatccggaggcggtggttccgggggcagtgggtgcttctcttcagggggtggaggaggatcatctggctgcgggggcggctcatctggaattggcagtggatgcataatttctggcggggggagcgtttgtgggggcgggtcctccggcggagggggcgggggatctagtgtggggggatccggctctggaaaaggagtgccaatttgtcatcagacccagcagaagcaagcccctacctggccgtcaaaatag

SEQ ID NO: 193503 - DNA, 1002 bp, synthetic construct
  misc_feature 1..1002: note = Description of Artificial Sequence: Synthetic coding sequence
  source 1..1002: mol_type = other DNA
atgagctaccagaagaagcagcccaccccccagccccccgtggactgtgtgaaaacatcaggaggcggagggggaggtggcgggagcggcggaggtggctgcggttttttcggaggagggggcagtggcgggggaagctccggcagcggatgcggctactctggggggggaggttatagtggtggaggctgcggcgggggctcctccggggggggagggggaggcggtattggcggatgcggcgggggatccggtgggtccgtgaaatatagtggagggggtggtagttccggaggggggagcgggtgcttctctagtgggggaggtgggagcggctgcttctctagcgggggagggggatcttcaggaggtggctccggatgtttcagtagtggcggggggggatcgtcaggaggcggctccggatgtttctcctctgggggtgggggcttcagtggccaggcagtgcagtgtcaatcttatggaggcgtgtccagtggcggcagtagcggggggggtagcgggtgcttctctagtggcggcggcggtggatcagtatgcgggtattctggcggcgggtcagggtgcggcggcgggagttctggcgggtctggctccggctacgtgtcatcacagcaggtcacacagacttcatgcgctccccagccttcatacggcggcggcgtgcgacgcagacgacagaggagaaagagactcttgttgcagcggcggggccggagagagttgaggctgcgacggaggctgctcagggattggcagcggctccaccaccagtggaggggcctccggctgaggagatggttcctttggcgccggcgccgtagactcttaaggggctggctgcgcgaatggcaaggaagaccggacctgccacctgatcccgccgaagcaggtgcttacctggcagtgcagattgaccctcccggttaccacggaggcgaaggtgtggggggagtgtttcaggggcaccgctgggcctag

SEQ ID NO: 193504 - DNA, 927 bp, synthetic construct
  misc_feature 1..927: note = Description of Artificial Sequence: Synthetic coding sequence
  source 1..927: mol_type = other DNA
atggacgccctgaagagcgccggccgggccctgatccggagcccctccctcgccaagcagagttggggtggcggaggccggcataggaagctcccagagaattggacagatacgagagaaacgcttcttgagggcatgttgttttcactcaaatacttgggaatgacgctggtggaacagcctaaaggggaagaactgtccgccgctgccatcaagcgtatcgtcgctaccgctaaggcctccggtaagaagctacagaaggtgaccctcaaggtgagtcctcgcggaattatattgacagataatctcactaaccagctgattgagaatgtgagcatctaccgcatttcatattgtaccgctgataagatgcacgacaaggtctttgcttatatcgcccaatctcagcataatcagtccctggagtgtcacgccttcctttgcacaaagcggaaaatggctcaggccgtgacactgacggttgcccaggccttcaaagtcgccttcgagttttggcaagtgtctaaagaagaaaaggaaaagagggataaagcgagccaggaaggcggggacgtgcttggagcgcgccaagactgcaccccatctctgaagtcattagtggcaaccggtaatcttctggatctggaggaaactgccaaagcacctctttcaactgttagcgctaacaccacgaacatggatgaagtgcccagacctcaggcactctccggatcttcagtggtttgggaactagatgacggtttggatgaggcatttagtcggctggctcaatcccggactaatcctcaagttcttgatacagggttgactgctcaggacatgcattacgcacaatgtctatcacccgtagactgggataaaccagactcctccggtaccgagcaggatgacctgttttcattctag

SEQ ID NO: 193505 - DNA, 810 bp, synthetic construct
  misc_feature 1..810: note = Description of Artificial Sequence: Synthetic coding sequence
  source 1..810: mol_type = other DNA
atgagcagcgaccacctgaacaacagcaccctgaaggaggcccagtttaaagacctcttcctgaaaaaggctgaactggagtttgcccagatcattatcatagtggtagttgtaactgtgatggtggtggtcatcgtttgcctattgaatcattacaaggtcagcacgcgctcttttatcaaccgcccaaatcagtctcggaggcgggaggatggactccctcaggaagggtgcctatggcctagcgatagtgcagctccacggttgggtgcgagtgaaatcatgcacgcccctaggagtagagaccggttcactgcgccttccttcatccaaagagacagattcagccgcttccagcccacatacccgtacgtgcagcatgaaatcgatctgccacctacgattagcctgtcagatggagaggagcctcccccatatcagggcccttgtacattacagcttagggacccggagcagcaaatggaactgaatcgtgagtctgtgagagcacctcctaatagaacaattttcgatagcgatttaatcgatatcgcgatgtactctggagggccctgtccgccaagctccaattccggcatctctgcctctacttgttctagcaatgggcgtatggaggggcctccccccacttactcggaagtcatggggcaccacccgggagcctcattcctgcatcatcagcggtcaaacgcccatcgcggttcgcgactgcagtttcagcagaataacgcagagagtacaatcgtgcctattaaagggaaggaccgcaaaccaggaaatctcgtatag

SEQ ID NO: 193506 - DNA, 13635 bp, synthetic construct
  misc_feature 1..13635: note = Description of Artificial Sequence: Synthetic coding sequence
  source 1..13635: mol_type = other DNA
atgctgaccccccccctgctgctgctgctgcccctgctgagcgccctggtggccgccgctattgacgctccaaaaacctgcagccccaagcagttcgcttgccgggatcagatcacttgtatcagtaaaggatggagatgcgatggggagagagattgtcccgacggtagcgatgaagccccagaaatatgcccccagtccaaggcccaacgctgtcagcccaacgaacataattgccttggcaccgaactttgcgtgcccatgtctcgtctctgcaacggggtgcaggattgtatggacggctccgacgagggaccacattgtcgcgaattgcagggtaactgtagccgtcttggctgtcaacaccactgtgtgcctactttagatggacctacctgttattgtaattcctcctttcagctccaggccgacggaaaaacctgcaaggactttgatgagtgtagcgtctacggaacctgttctcagctttgtactaataccgacgggtccttcatatgcggctgcgttgagggctatctgcttcaaccggataatagaagctgcaaggccaaaaatgagccagttgacagaccacccgtgcttctgatcgcaaattcacagaatatcttggcaacttacctgagcggtgcccaagtgagcacaataaccccaaccagcactcggcaaaccactgcaatggatttctcctacgccaacgaaacagtgtgttgggtgcatgtgggagactcagctgcacagacccagctcaagtgcgctaggatgcccgggctgaaaggttttgtagatgagcacacaattaacataagcctgtcgctgcatcacgttgagcagatggcaattgactggctgacaggtaacttctactttgtggacgatatagatgataggatttttgtgtgcaaccgtaacggtgatacttgcgtgaccctgttggacctggaactgtataacccaaaaggaatcgctctggatcctgccatgggcaaagtgttttttaccgattacggacagattccgaaagtggaacggtgcgacatggacgggcaaaacagaaccaaactggtggatagcaaaattgtttttccccatgggattacactggacctggtgtcccggctggtgtactgggctgatgcctacctcgattacatcgaagtagtggactatgaaggtaaaggccggcagaccataattcaagggatcttgattgaacacctgtacggcctgacagtctttgagaactacctgtatgccaccaatagtgataatgctaatgctcagcagaaaacctccgtgatccgggttaaccggttcaactcgactgaataccaagttgtaacaagagttgataaaggaggcgctctgcatatataccatcagaggagacagcctagagttagaagtcacgcttgtgagaatgaccagtatgggaagccaggcggttgtagcgacatttgcttgctcgcaaattcgcataaggcccggacttgccggtgccgctctgggttcagccttgggtccgacggaaagtcctgcaagaagccagaacacgaattatttctcgtctacggcaaaggaagaccgggcatcatcagggggatggacatgggcgctaaggtgccagacgagcatatgattcccattgagaacctcatgaatccccgggccctagactttcatgctgagacaggattcatttattttgccgacaccacctcctacttgattggtaggcagaagatcgatggaacagagagggagacgatactgaaagacggtatccacaatgttgagggagttgctgtggactggatgggcgataatctgtactggactgatgacggcccaaagaaaacaatttccgtcgcgagattagaaaaggctgctcagacccgcaagactttgatcgaaggcaagatgactcatccccgggcgatagttgttgacccactaaacggttggatgtactggactgattgggaggaggaccccaaggattctagacgtgggaggctggaaagggcatggatggacggttcccatcgtgacattttcgtgaccagtaaaacagtattgtggcccaatgggctgtcactcgacatccctgccggacggctgtattgggtggacgcattctacgataggatcgaaaccatactcttaaatggtaccgaccgcaaaatcgtgtacgaggggcccgaactgaaccacgctttcgggctgtgccatcacggcaactacctcttttggaccgagtacagatccgggagtgtgtatcgccttgagaggggcgtcggaggcgcacctccaactgtgacgctgttgcggtctgagagacctcccatcttcgaaataagaatgtatgatgcacagcaacaacaagtcgggacgaataagtgccgcgtgaataacgggggatgtagctccctctgcctagccacccctggctcgcgacagtgcgcctgtgctgaggatcaggtgctggacgcagacggggtgacgtgcctggctaatccaagctacgtcccgccccctcagtgccagcccggggagttcgcttgcgcaaacagccgctgcatccaggagagatggaaatgcgatggagataacgactgcctggataactccgatgaagctcctgcactctgccaccaacacacatgtcctagcgaccggttcaagtgcgaaaacaataggtgtatccctaaccgctggttatgtgacggcgataacgactgtgggaacagcgaagacgaaagcaacgcaacttgttcagctaggacttgtccgcccaaccaattcagttgtgccagtggccgctgcataccgatcagttggacatgtgatttagatgatgactgtggtgatcgatctgatgagtctgcgtcatgtgcctatcctacatgctttcctctaacccagttcacatgtaataatggacgatgcattaatataaactggcggtgcgacaatgacaatgactgcggcgacaacagcgacgaggccggatgcagccacagctgttcaagtacccagttcaagtgcaattccggtcgatgcattccagagcactggacatgcgacggcgacaacgactgcggcgactacagcgacgaaacacacgccaactgtaccaatcaagcgactagacctcccggcgggtgtcataccgatgagtttcagtgtcggctggatggtttgtgcataccccttaggtggcggtgtgatggcgacacagactgtatggactcttcagatgaaaagagctgcgaaggagtgacccacgtatgcgatccttcggtcaagtttgggtgcaaagactccgccaggtgtatttcaaaggcttgggtttgcgatggtgacaacgattgcgaggataatagtgatgaggagaattgtgaaagtctggcttgccgtcccccctctcatccatgtgcaaacaatactagcgtgtgtctgcctcccgataaactttgcgatggcaacgacgattgcggcgacgggtcggatgagggtgagctgtgcgatcagtgttcattgaacaacgggggctgctcccacaactgcagcgtcgcacctggcgaagggatcgtttgttcctgccccttaggtatggagttaggccctgacaatcatacatgccagattcagtcctattgcgcgaagcatctaaaatgctcacagaagtgtgatcaaaataaattctctgtaaaatgctcatgctacgaggggtgggtgcttgaaccagacggagagtcctgccggtcactcgatcccttcaagcctttcatcattttttccaaccgacatgaaatccgccggatagacctgcacaagggcgactattcggtactggtgcctggacttagaaataccattgccctggactttcatctgtctcagagtgcgttgtactggaccgacgtggttgaagacaagatatatagaggaaaactactggacaacggggctcttacaagcttcgaggtggtgatccaatacggccttgcgacacccgaaggactggcagttgattggattgccggcaatatttattgggtcgagtccaaccttgatcaaatagaagtagccaagttggatggcacattaagaaccaccctgttagctggggacatagagcacccccgagcgatcgcactggacccacgggatggtatcttgttttggactgactgggacgccagcctgcccagaatcgaggccgccagcatgtccggtgctgggcggagaactgttcatcgggaaactgggagtgggggatggccgaacggccttaccgttgactatctggagaagagaatcctgtggatagacgcccgctccgatgccatctactccgctcgatacgacggctctggccacatggaagttctgaggggccatgagttcctctcccaccctttcgcggttactttatacggaggagaagtgtattggactgactggagaacgaataccctggcaaaagcaaacaaatggactggtcacaacgtgaccgtggtccagaggactaacacgcagcccttcgatctgcaagtctaccaccccagcaggcaaccgatggcgccaaacccgtgcgaggctaacggcgggcaggggccctgctcccatctgtgcctgatcaattataataggactgtgtcctgcgcttgcccgcacctaatgaagctgcacaaggacaacaccacctgttacgagttcaagaaattcctgctctacgcacgacagatggagatacgaggcgtggatctcgatgcaccgtactataactacattatttcgtttacagttcccgacatagacaacgtcaccgtgctggactacgatgcccgtgagcagcgggtatactggtctgacgtcagaacccaagcgattaaacgcgcgtttatcaatggcacaggtgtggagacggtggtatcggcggatttaccaaacgcacacgggctggcggtggactgggtttccaggaacctgttctggactagctacgacaccaataagaagcagataaacgtggcccgactcgatggatcctttaaaaacgctgttgtccagggtttagagcaaccccacggccttgtggtacaccctctgcgaggtaaactatattggacagacggcgataacatttctatggctaatatggatggaagtaacagaacgcttcttttttctggccaaaaggggcccgtcgggctcgccatcgatttcccggaatccaagctctattggataagtagcggtaatcatacgattaatcggtgtaatcttgacggttcaggcctggaggtgattgacgctatgcgctctcaattggggaaggcgaccgccctcgcaataatgggagataaactttggtgggctgaccaagtctccgagaagatgggcacctgctccaaagctgatgggtccggcagtgttgtcttacggaacagtactaccctcgttatgcatatgaaggtgtacgacgaaagcattcagttagatcataagggcaccaacccctgctcagtgaacaatggcgattgcagccagctgtgtctgccaacctctgaaaccactaggagctgcatgtgcactgccggctactccctgaggtctggccagcaggcgtgtgagggagtcggctcctttctgctgtactccgtgcacgaagggattcgaggcattcctcttgacccaaatgacaagagcgatgccctcgtgccagtgagtggcacctctctggccgttggcatcgacttccacgccgagaacgatacaatctattgggtggacatgggactatcaactatcagccgggctaaacgggaccagacttggagagaagatgtagtcaccaacggtattggtcgagttgaaggaattgctgtggattggatcgctggaaacatctactggactgaccagggcttcgatgtgatcgaggtggctcggctcaatgggtcatttagatacgtggtcatttctcaaggcctggacaagccacgcgctataacggtacatcccgaaaaaggatatctgttctggactgagtggggacagtaccctcgtattgagaggtctcgcctggacgggaccgagcgcgtggttctggtgaacgtatctataagttggcccaacggcatctctgttgactaccaagacggcaagctgtattggtgcgacgcccggaccgacaaaatagagcgcatcgatctggaaaccggagaaaatcgcgaagttgtcctttcatctaacaacatggacatgtttagcgtgagtgtgttcgaagacttcatctactggtctgatcggacacacgctaatggtagtattaagcgtggcagcaaggacaacgccactgacagcgttccactgcggaccggcataggggtacaactcaaggacatcaaggtgttcaatcgggataggcagaaaggaacaaatgtatgcgccgtggccaacggaggctgccaacaactgtgtttgtatcgcggacgcggacaacgagcttgcgcctgcgctcacggaatgctggccgaagacggggcctcttgccgggagtatgccggttacttgctgtacagcgagagaacaatccttaaaagcatccacctgagcgatgaacgtaatctcaacgcccctgtgcaacccttcgaagatccggagcacatgaaaaacgtgattgccttagcttttgactaccgggcgggtacatccccagggacccccaaccggatcttcttttctgacatacatttcgggaacattcaacagattaacgacgatggctctcgccggatcacgatcgtggagaacgtgggctctgtcgaagggctggcataccaccggggctgggacacactgtattggaccagctacacgacatccaccattacacggcacacagttgaccaaaccaggcccggtgccttcgagcgggaaaccgtgatcacaatgagcggtgacgatcatcctcgggcgttcgtgctcgatgagtgtcagaatctgatgttttggactaattggaacgagcagcaccccagtattatgcgcgcagctctcagtggggcgaacgtgctgactctgattgaaaaagatatcagaactcccaacgggctcgccatagatcacagggcggaaaaactgtatttttccgacgcaactcttgataagattgaacgctgtgaatacgatggctcccaccgctatgtaatactgaaaagcgaaccggttcaccccttcggtttggccgtgtacggtgagcacatcttctggaccgattgggtccgccgtgctgtacagcgtgctaataagcacgtcgggagtaacatgaaactgctgagagtagatatcccccagcagccaatgggcattatagctgtggcaaacgacaccaacagttgcgagttaagcccctgtagaataaataatggagggtgccaagatctgtgtctgctgactcatcaaggccatgtgaactgtagttgtcgcggcggcagaattctgcaggatgacctcacatgtcgtgctgtgaactcttcatgtagggcacaagacgaatttgaatgtgccaatggagagtgtattaacttcagccttacttgtgatggggtaccccattgcaaggataagagcgacgagaaacctagctactgcaatagcagaaggtgcaaaaagacgtttcgacagtgttctaacggccggtgcgtcagcaatatgttgtggtgtaacggcgcagacgactgtggagatggctccgacgagattccctgcaacaagacagcctgcggagtgggcgaattccggtgtcgtgacggtacctgtatcgggaatagcagtcggtgcaaccagttcgtggattgcgaggacgcctcagatgagatgaactgctccgccacagattgctctagctacttcagacttggcgtaaagggcgtactattccagccatgcgaaaggacaagcctgtgctatgcgccttcttgggtctgcgacggtgccaatgactgtggtgattacagcgatgagcgcgattgcccgggtgtgaagagaccccgctgtcctctaaactactttgcctgtccctccgggaggtgtatccccatgagttggacatgcgacaaggaggacgattgtgagcacggagaagatgagacacattgtaacaaattttgctccgaagcccagttcgaatgtcaaaatcatcgatgcatttccaagcaatggctgtgtgacgggagcgatgactgcggagacgggtccgacgaagccgcccactgcgagggtaagacttgcgggccctcctccttttcttgtcccgggacgcacgtttgcgtgccagagagatggctatgtgacggagacaaggattgtgctgatggcgctgacgagtccatagctgccggatgcctgtacaatagtacctgtgatgatagagaattcatgtgccagaaccgtcaatgcatccctaaacactttgtctgtgaccatgatagggactgtgcagatggtagcgacgagtcaccagaatgcgagtatcctacttgtggacctagcgaatttcggtgtgctaacgggcgttgtctttcgagcaggcaatgggaatgtgacggcgaaaacgactgccatgatcaatctgatgaggctccgaagaacccgcactgtacgagccaggagcataagtgcaacgccagcagtcagttcctgtgttcttcaggaagatgcgtggccgaggctctcctttgcaacggacaagacgattgcggtgactcctcggatgagcgcggatgccacatcaacgagtgcctttcccgcaagttgtctggctgcagccaagactgtgaggacctgaagattggcttcaagtgcaggtgccgaccaggatttcgtctcaaggatgatgggcggacatgcgcagatgtggacgaatgcagtactacattcccctgtagccaaaggtgtattaacactcacgggtcctacaagtgcctttgtgtcgaaggctatgcaccacgagggggtgacccacactcgtgcaaggcagtgactgacgaggagccattcctgatattcgccaatcggtactatctgagaaaattaaacttggacgggtcaaactatacactgcttaagcagggactcaacaacgccgttgcacttgactttgattaccgagaacaaatgatctattggacggatgttactacccagggatcgatgatacgtcggatgcatctgaacgggtctaacgtccaagtgttgcatagaacagggctatctaatccagacggactcgccgtggactgggttggaggaaatctgtactggtgcgataaaggaagggacacaatcgaggtgtcaaagttgaatggcgcctaccgcactgtgctcgtatcatccgggctgagagagccccgggctttggtcgtcgatgtgcagaatggctacctgtattggacggattggggggaccacagcttaataggccggattggaatggatgggtcctcccgaagtgttatagtggacaccaagatcacctggcctaatggccttacccttgattacgttaccgaaaggatttattgggccgacgccagggaagactacatcgaatttgcttccctggatggtagtaatcgacacgtggtgctatcacaggacataccacatattttcgccctcaccctgttcgaggattatgtgtactggacagactgggaaaccaagagtattaaccgggcccataaaactacaggaaccaataaaaccctgcttatatccactttgcatcggcctatggacctgcatgttttccacgctctgcgacagccagacgtgccaaatcacccctgcaaagtgaacaacggtggttgttctaatttatgcctcctgtcccccggcggtgggcataagtgtgcttgccctacaaacttttatctgggttcagatgggcgcacatgcgtctccaattgcactgccagtcaatttgtgtgtaagaatgacaagtgcatcccattctggtggaaatgcgacaccgaggatgattgcggagaccactcggatgaaccccccgattgtccggagtttaagtgtaggcccggacagtttcaatgtagcacagggatatgtacaaacccggcctttatctgtgacggtgataacgattgccaggacaacagcgatgaagccaattgcgacatccatgtctgtctgcctagccagttcaagtgtaccaacacgaaccggtgtatcccaggcatttttcggtgtaatggacaggacaattgtggagatggtgaggacgaacgggactgtccagaagtcacttgcgcccctaaccagttccagtgcagtattacaaaaagatgcattccccgggtgtgggtctgtgacagagataacgactgcgtagacggttccgatgaaccggccaattgcactcagatgacttgcggcgtcgacgaattccgctgcaaagatagcggaaggtgcatccccgcgcgatggaaatgtgacggcgaggatgactgcggggatgggtctgacgagcctaaggaggagtgcgacgaacgcacctgtgagccataccaatttagatgcaaaaataaccgatgtgtgcctgggcggtggcaatgtgattacgataacgattgcggagataatagtgacgaagaatcctgtactccacggccttgttcagaatcagagttctcctgcgccaacggacgctgtattgctggccggtggaaatgcgatggtgaccacgattgcgccgacggttctgacgaaaaagactgtaccccaagatgcgatatggaccagttccagtgtaagagcggtcattgtattcctctgcgatggcgttgcgatgctgacgcagattgcatggatgggtcagacgaagaagcttgcggcacaggggtgcggacatgccccctcgacgagttccagtgtaataatacactttgtaagccactggcgtggaagtgcgacggcgaagacgactgcggcgacaacagtgatgagaatccagaagaatgcgccaggtttgtgtgtcctccaaacaggccttttaggtgcaagaatgaccgggtttgcctttggatcgggcggcagtgtgacgggacagataattgcggtgacgggactgacgaagaagactgtgaacccccgactgcccacacaacacactgcaaagacaagaaagaatttctgtgccgtaaccagcgttgtttgagttcttccctacgatgcaatatgttcgatgactgtggggacggctcagatgaggaagactgttccattgacccaaaactgacatcatgcgcaaccaatgcctccatttgcggggacgaagcccggtgcgtgcggaccgaaaaagcggcttactgcgcctgccgcagcggctttcatacagtcccaggacagcccgggtgccaggacattaacgagtgcctaagatttggtacctgtagccagttatgtaataacaccaagggtggccacctgtgttcatgcgccaggaacttcatgaagacacacaacacttgcaaggctgagggaagcgaatatcaggtgctgtatattgccgatgataacgaaatccggtcactctttccaggacacccacactcagcctacgagcaggcatttcaaggggacgaaagtgtgcgaatcgatgctatggacgttcatgtcaaggcgggccgtgtttattggacgaattggcatacaggcacgatcagctatcgatccctccccccggccgctccccccactacgagtaataggcaccggagacagattgacagaggtgtcacacacttgaacatctccggcctgaaaatgcctcgcgggatagccattgactgggtagctggcaacgtatactggaccgacagcgggcgcgacgtaatcgaagtggctcagatgaagggtgagaaccggaagaccctcatctcaggaatgatagatgaaccccacgccatcgttgttgacccactgcgggggacgatgtattggagtgactggggaaatcatcctaagatcgagaccgccgcgatggacggaacattacgggaaacactcgttcaggataacattcagtggccaactggcctggcagtggattatcataatgagcgtctttattgggccgatgccaaactctccgttattgggtcaattagactcaacggaacagaccctatagtcgccgccgactctaagcggggactgtctcatcctttctccattgatgtgtttgaggattatatttacggtgtaacgtacatcaacaaccgggttttcaaaatccataagtttggccatagtccactggtcaacttaactggagggctaagtcacgcttctgacgtcgtactttaccaccagcacaaacaaccagaggtcaccaatccttgcgatagaaaaaaatgcgaatggctgtgcctcttgtcaccttccggacccgtatgtacatgtcccaacggtaagcgcctggataacggcacttgcgttcccgtaccatctcctacaccgccccccgacgctccccggcctggaacatgtaaccttcaatgtttcaatggggggtcctgttttctgaacgcccgccgccaacccaaatgtcgatgccagcctagatataccggcgacaagtgtgagctcgatcagtgttgggaacattgcaggaatgggggaacctgcgccgctagccctagcggcatgccaacctgtagatgtcccaccgggttcacaggccctaaatgtacccagcaggtttgcgccggctattgtgccaataactctacctgcaccgtcaaccaaggcaaccagccccagtgtaggtgcctgcctggcttccttggtgatagatgtcagtacagacagtgttctggttactgtgaaaactttggaacttgccagatggccgccgacggtagcaggcagtgccggtgcacagcatattttgagggctcaagatgtgaagttaacaaatgtagtaggtgtctggaaggcgcctgtgtggttaataagcagagcggagatgttacctgcaattgtacagacgggagagtggctccgtcttgtctgacctgcgtcggacattgtagcaacggtggatcctgtacaatgaacagtaaaatgatgccagagtgtcagtgccctcctcacatgacaggaccccggtgtgaggaacacgtatttagccagcagcagcctggccacattgcctctattttgattcctctgttgctacttctgttactcgtgttagtggctggggtggtcttttggtataaaaggcgcgtacaaggtgccaagggcttccagcatcaaaggatgacaaatggcgccatgaacgtggagataggtaatcctacatacaagatgtacgagggaggggaacccgatgacgtgggcggccttctcgacgccgactttgccctcgaccctgataagccaactaacttcacaaaccccgtgtatgcgacactgtacatgggaggacacgggtcacgtcactccctggcgtccacggatgagaaaagggagctcctgggacgggggcctgaagacgagatcggcgatcctctggcgtag

SEQ ID NO: 193507 - DNA, 2142 bp, synthetic construct
  misc_feature 1..2142: note = Description of Artificial Sequence: Synthetic coding sequence
  source 1..2142: mol_type = other DNA
atgctgctggccaccctgctgctgctgctgctgggcggcgccctggcccaccctgatagaatcatctttcccaaccatgcctgtgaagatccccccgcagttctgctggaggtccaaggaaccttgcagagacccctcgtgcgtgattcccggacaagccctgccaactgcacttggctaattctgggaagcaaggagcaaacagtgacaattaggttccagaagttacacctggcctgtggcagtgagcggttgacattgcgatcacctcttcagcccttaatatctctctgcgaagcaccaccctcccctttgcaattgcctggcggaaatgtaactatcacctactcatacgctggagcccgcgctccaatgggtcaaggctttcttctgagctactcccaggactggttgatgtgccttcaggaagaatttcagtgccttaaccacaggtgtgtctctgctgtccagaggtgcgacggagtggatgcctgcggagatgggagcgatgaggccggatgttctagtgacccctttccgggcctgacccctcgaccagtgccctctttgccatgtaacgttacgcttgaggacttctatggagttttttccagtcccgggtatactcatctcgcaagtgtcagccacccacagagctgtcactggcttctggacccgcatgacgggcgccgtctggccgtgagatttactgcccttgacttgggctttggtgacgctgtgcacgtttatgatggtcccggaccaccagagtcaagtcggcttctaaggtctcttacccatttcagcaacggaaaggcagtgactgtggaaacactgtcaggccaggccgtcgtgagctatcataccgtcgcctggtccaacggccgcggattcaacgccacataccatgtgcggggctactgtctaccttgggaccggccttgcgggttgggatcggggttgggcgccggagagggtctgggggaacgatgctatagtgaagctcagagatgtgacggatcctgggattgcgccgacgggacagacgaggaagattgccccggctgtcctccggggcattttccctgtggggctgctggcacgtctggagctaccgcttgctacttgcctgctgacaggtgcaattatcagactttttgtgcggatggcgctgacgagcgtcgctgccggcattgtcagccgggaaattttcggtgtagagacgaaaagtgcgtctatgaaacttgggtttgcgacggccagcccgactgtgctgacgggtcagatgagtgggactgcagttatgtgctcccccgcaaagtgattacagcagcagtcattggctccctggtgtgcggactgcttctcgtgattgctctggggtgcacctgtaagctgtacgctattcggacacaggagtatagcatcttcgctccactctctagaatggaagccgaaatcgtccaacaacaggcccctccaagctacggacagcttatcgcccagggcgctataccaccggtcgaggacttccccacagaaaatcctaatgacaactctgtgcttgggaatctgaggtccctgttgcaaatccttcgccaggacatgacaccaggtggaggcccgggagcacgtcgacgccagagaggtagactgatgcgacgcctcgtgcggaggctgcggcgatggggactgctgccacgaactaatacccccgcccgggctagtgaagcccgatcacaggttacaccttccgccgcacccctggaggctctggacggcggtaccgggcccgctcgtgaaggcggtgccgtcggcggacaagacggagaacaggcacccccactccccattaaggctcctctccccagtgcatcaacaagccctgccccgaccactgtgcctgaagcacctggtcctcttccatcactacccctcgagccttccctcctcagcggagttgtgcaagccctccgcggccgcctgcttccatccctaggcccccctggtcccacaagaagcccacctggccctcacacggctgtactcgccttggaggatgaggacgacgtgttgctcgtgccgctggcagagcctggggtgtgggtcgcagaggccgaggacgaacctctactgacctag

SEQ ID NO: 193508 - DNA, 1671 bp, synthetic construct
  misc_feature 1..1671: note = Description of Artificial Sequence: Synthetic coding sequence
  source 1..1671: mol_type = other DNA
atgctgctggccaccctgctgctgctgctgctgggcggcgccctggcccaccctgaccggatcatatttccaaaccatgcctgtgaggatccccccgccgtgctcctggaagtgcaggggacactccagcggcccttggtgcgcgattccaggaccagccccgcgaattgtacatggctgattcttggctccaaggagcagactgtgacgatcaggtttcagaaattacatctggcttgcggctccgagagactcacgcttagaagtccacttcagccactgatctcactgtgtgaagcaccacccagtcctctgcagctgccaggtggtaacgtgacaatcacctactcttacgcaggagctcgggcaccaatgggccaggggttcctgctgagttatagtcaggattggctgatgtgtctgcaggaggagttccaatgcctcaatcatagatgcgtttcagcggtccagcggtgcgatggcgtggacgcgtgtggggatgggtcagacgaggccggctgctccagcgaccctttcccagggctcaccccccggccagtgccgagcctcccttgtaatgtgacacttgaagatttctatggggtgttcagctccccaggctacactcacttagcgagcgtttcacaccctcaatcttgccattggttactcgacccccacgatggtaggcgcctcgccgtaagatttactgcgttggacctgggcttcggagacgccgtgcacgtatatgacggtccaggcccgccggagtcatcacgccttttgaggtccttgacacatttttccaacgggaaggcggtaactgttgagacactgtctggccaggcggtggtttcttatcataccgtggcttggtctaacggaaggggattcaatgcaacctatcacgtgagggggtactgtctgccatgggaccgtccatgtggtctcggaagcggactgggcgctggggagggccttggtgaacgatgttattctgaggctcagcgatgtgacggaagctgggactgcgccgatggcactgacgaggaggattgtcctggatgcccccctggccactttccgtgtggcgcagccggcacctccggagctactgcatgctaccttcctgctgacaggtgtaattaccagaccttctgtgcagatggggcagatgaaaggagatgcagacactgtcagcccggcaactttagatgtcgagacgagaaatgtgtctacgagacctgggtctgcgatgggcaacccgattgcgccgatgggtccgacgaatgggattgttcctacgttctgccaaggaaagtgattacagctgcagtgataggatctctggtatgtggcctactgctggtcatcgcgctgggctgcacatgcaagctatacgccataaggacgcaggagtactcaatttttgcgccactatcaagaatggaagctgagatagtacagcaacaggcacccccctcatatggacaattaatcgcacagggagccatacctccagtcgaggactttccgaccgagaaccccaatgacaactcggtgcttgggaacctaagatctctgctgcagatcttgaggcaggatatgactcctgggggtggccccggggctagacggaggcagcgcggaagacttatgcggcgactctag

SEQ ID NO: 193509 - DNA, 13968 bp, synthetic construct
  misc_feature 1..13968: note = Description of Artificial Sequence: Synthetic coding sequence
  source 1..13968: mol_type = other DNA
atggaccggggccccgccgccgtggcctgcaccctgctgctggccctggtggcttgcttggctcctgccagtggccaagaatgcgattctgcccatttccggtgcggaagcggacactgtataccagctgattggcggtgcgacggcaccaaggactgcagtgacgacgctgacgagatagggtgcgctgtggtcacttgccagcaaggctatttcaaatgccagagcgaaggacagtgtatcccaaatagctgggtttgcgatcaggaccaggattgtgacgacggtagcgacgagcgccaggactgcagtcagtccacatgcagtagccaccagatcacttgtagcaatgggcagtgcatcccctcagagtacagatgcgatcacgtccgcgactgtccagatggtgccgatgagaatgactgtcagtacccaacatgtgagcaactaacttgcgacaatggggcctgctacaacacgtcacagaagtgtgactggaaggtggactgtcgggattcttccgacgagataaattgcaccgagatctgccttcataatgagtttagctgcggcaacggcgagtgcatccctcgagcatatgtgtgtgatcacgacaatgactgccaggacgggtccgatgaacacgcttgcaactatccaacgtgcggcgggtatcagttcacctgtccctctggtcgctgtatctaccagaactgggtttgcgatggcgaagacgactgtaaggataacggcgacgaagatggctgtgaaagcggcccacacgacgtccacaagtgcagccccagggaatggtcatgtccagaaagcgggagatgcatctccatctataaggtctgcgatggtatcctggactgccccggacgcgaagatgaaaataatacaagcaccggaaaatactgttccatgaccctttgcagtgccctcaactgccagtaccagtgtcacgagactccttatggaggtgcttgcttttgcccacccggctacattatcaaccacaatgattcacggacctgcgttgaattcgacgactgccagatctggggcatatgtgaccagaaatgcgagtcacgtcctggaagacacctgtgtcattgtgaagagggctacattctggaacggggacagtattgcaaagctaacgattcttttggggaagcatctatcattttcagcaatggccgggatctgttgattggggatattcacggcagatccttcaggatccttgttgaatcccagaatagaggagtggccgtgggcgtcgccttccattaccacctgcagcgcgtgttctggactgataccgtgcaaaacaaagtcttcagcgtggatatcaatggcttaaacatccaagaggttctgaacgtgtcagttgagactcctgagaacctggccgtcgattgggttaacaacaaaatttatctcgtagagaccaaagtaaacagaattgacatggtgaacctggatggcagctatcgcgtgacactcatcacagagaatcttggccacccaaggggcatcgccgtcgaccccacagtcggatacctgttcttctcagattgggagagcctgagcggcgagccaaaacttgagcgcgcctttatggatggttcaaatcgcaaagacctggtgaagacaaagttgggatggcccgctggtgttactctggatatgatctccaagcgcgtgtactgggtggattcaaggtttgactacattgagactgtgacctacgatggaatccagcggaagacagttgtccacgggggttctctaataccacacccatttggtgtctctttgttcgaaggccaggtatttttcacagactggacaaaaatggccgttctgaaggcaaacaagtttactgagacgaacccacaggtgtattatcaggcgagcctacgtccctatggcgtgacagtctatcattccctgcggcaaccatatgcaacaaatccgtgcaaggacaacaacggcggctgcgaacaagtctgcgtgttatcacatcggactgataacgatggactcggattccggtgcaagtgtacgtttggtttccagcttgacaccgacgagcggcattgcattgctgtgcagaactttctgatcttcagctcacaggtggcgatcagggggattccattcacactgtcaacacaggaggacgtgatggtcccagtgtcagggaatccaagctttttcgttggcatcgacttcgacgcccaggacagtacgattttcttttccgatatgtcgaaacatatgattttcaagcagaaaattgatggcactggcagagagattctagccgctaatagggtggagaacgtagaatctttggcgttcgactggatttcaaagaacctgtactggacagactcacactataagtccatttcagtgatgcgcctggcagataaaaccagacggaccgtggtgcagtacctaaacaacccccggagcgtggtggtacacccctttgcgggctatctattcttcacggattggttcagaccagcgaagatcatgagagcgtggagcgatgggagtcacttgcttccagtgattaacacaaccctcggctggcccaacgggttagccatcgattgggcagcgagcaggttgtattgggttgacgcatatttcgataagatcgaacactccacttttgacgggttggacagacgtcgattgggccacattgagcaaatgactcacccttttgggttggccatattcggggagcacttgttcttcaccgattggcggctgggcgccattatcagagtccggaaggccgacgggggggagatgacagttatcagatctgggattgcatacattttacacctgaaaagttatgacgtcaatattcagaccggaagcaatgcctgtaaccaacctactcaccccaatggagactgttcgcacttttgcttcccggtgccaaatttccagcgggtatgtggctgtccatacgggatgcgcttagcttctaatcacctcacgtgcgaaggcgatcctacaaacgagcctccaactgaacagtgcgggttgttctcgttcccatgcaaaaatggcagatgtgtgcccaactactatctgtgcgacggggtcgacgactgtcatgacaactctgatgagcaactgtgcggcacacttaacaatacatgctccagctccgcatttacctgcggccatggcgagtgtattccagctcattggcgctgtgataaacggaacgattgcgtcgatggcagtgatgaacacaattgtccgacccatgctccagcgtcctgtttggatacccaatatacctgcgacaaccaccagtgcatatcaaagaattgggtgtgcgacacagacaatgactgcggcgatggatctgacgaaaaaaactgcaacagtactgaaacctgtcaaccttcccagttcaattgcccaaaccaccgatgcatcgacctatcttttgtctgtgacggagataaagactgtgtggatgggagtgacgaggttggatgcgtgctcaactgcacagcttcccagtttaagtgcgcatccggcgataaatgtattggagtcacgaatcgatgcgacggcgtgtttgactgtagcgataattccgacgaggctgggtgtccaactagacccccaggtatgtgtcatagcgacgagtttcagtgtcaggaagatggcatatgtattcccaatttctgggaatgcgacggtcatccagactgtctctacggctcagacgagcacaatgcttgtgtgcctaaaacctgccccagttcttatttccactgcgacaacggaaactgcatccatagggcctggctttgcgaccgagacaatgactgtggcgatatgtctgacgagaaagactgccctactcagccgttccgttgcccaagctggcagtggcagtgtttggggcacaacatttgtgtgaatttgtctgtggtgtgcgatggaatctttgactgtcctaacggaacggatgagtccccactgtgcaatggcaactcctgtagcgactttaatggaggatgcactcacgagtgcgtgcaggagccattcggggccaaatgtctctgtccattgggtttcctgcttgcaaacgatagcaagacttgcgaagacatcgatgaatgtgacatcctgggcagctgtagtcagcactgctacaacatgcgcggatcgtttcgctgtagttgcgatactggttacatgttggaatctgatggtcggacatgcaaagttaccgcgtccgaatcactattactgttggtagccagtcagaataagattatcgcggattccgtgacctctcaggtccataatatctatagtttagtcgagaatggtagttacatcgtagccgttgactttgactccataagcgggcggatcttttggtccgacgctactcagggaaagacatggtctgcttttcaaaatgggactgaccggcgcgtagtgtttgactcctcaattatactcacagaaactatcgcaatcgactgggtgggaaggaacctgtattggaccgactatgccctcgagaccatcgaagttagtaagatcgatggctctcacagaacggtgctgatttcaaagaacctgacaaatcccagaggtttggcactggaccctagaatgaatgaacatttgctcttctggagcgattggggccaccacccaagaattgaacgagcgtcaatggacggtagtatgcgcaccgttattgttcaagacaaaatattttggccctgcggcctgactatcgactacccaaatcgtctgctgtatttcatggactcatatcttgactacatggacttttgcgactacaatggccaccatcggaggcaggtgatcgcgtccgacctgatcattcgacacccctatgccctgacattgttcgaggatagtgtgtactggacagatagagcaacacgccgggtgatgagagcgaataaatggcatggcggaaaccagtctgtggtcatgtataacatccagtggccactcggcatcgtggcagtgcacccttcaaagcagcccaattccgtgaacccctgtgcgttctctaggtgtagtcatctctgtctgctgtcttcgcagggaccacacttctatagctgtgtttgtcccagcggctggtctctctctcctgacctgctgaactgcctccgcgacgatcagcctttcctcattactgtaagacagcacataatatttgggattagtctcaatcctgaggtcaagagcaatgatgctatggtacccatcgcagggattcagaacggactggatgtcgagttcgatgatgcagagcagtacatctactgggtcgaaaacccaggagaaatccaccgggtgaagacagacggcaccaaccgaactgtattcgccagcatctccatggtcggcccgtcgatgaatctggctctggactggataagtcggaatttgtattctaccaacccacgcacccagtcaattgaggtcctgactttgcacggcgatatcagatataggaagaccctgatcgccaatgatgggacggcattaggagtgggattccctatcggaatcaccgttgatcccgcgagaggcaaactctactggagcgaccagggtacagatagtggggtgccagctaagattgcctcagccaacatggacgggacaagtgtgaagacgctattcacaggaaacttggagcatctggaatgcgtgacactcgatatcgaggaacagaaactctactgggctgttactggacgtggtgtcatcgaacgaggcaacgtggacggaaccgaccggatgattctagtgcatcagctgtctcatccttggggcattgcagtacatgacagtttcttgtactatacagacgaacagtacgaggttattgagcgggtggacaaagcaaccggagctaacaagatagtcctgagggacaacgtgccaaacctgcgcggtcttcaggtttatcataggcgcaacgccgctgaatccagtaacgggtgcagcaacaacatgaacgcctgccaacagatctgcctccccgtacctggcgggctgttcagctgtgcctgcgccactgggtttaaacttaatccagataatcgcagctgcagcccctacaatagctttatagtggtatctatgctctctgcaatacggggcttctctctcgagctcagcgatcactccgagacaatggtccccgtagctggacagggacgcaacgccctacacgtggacgtggacgtgagcagcggatttatctattggtgtgatttcagttccagtgttgccagtgacaatgcaattaggaggatcaaaccagacggatctagcctgatgaatatcgttacccacggcattggcgaaaacggggtccggggaatcgcagtcgactgggttgctggcaatttatactttacaaacgccttcgtatctgagacacttatcgaggtcttaaggataaacactacttatcgcagagttttgctgaaggtcactgttgacatgcccagacacatcgtcgtggaccccaaaaaccgttatctgttttgggccgattacggccagagacccaaaattgaacgctcgtttctggattgtaccaatcggaccgtgcttgttagcgaaggtattgttactcctagagggctggcagtggaccggtccgacggatacgtctactgggttgacgattcattggacattatcgctaggatcagaataaacggcgaaaactctgaagtgattaggtatggttcaaggtatcccacaccgtatgggataaccgtgttcgaaaactccattatatgggtggatcgcaatcttaagaaaatttttcaggctagcaaggagcctgaaaacacggaaccacccacagtcattcgggacaatattaactggcttagggacgtgaccatttttgataagcaggtgcagccgcgttctccagcagaggtcaacaacaatccatgcctggaaaataatggtggttgctcgcatttgtgctttgccctcccgggcctccacacccccaaatgcgattgtgcctttggcaccctccagtctgacgggaaaaactgtgccattagtaccgagaactttcttatcttcgcactcagtaacagcttgaggtcactgcacctcgaccccgagaaccactcccccccgtttcagacaatcaatgtggaacgtaccgtgatgagcttggattacgattcggtatccgatagaatatactttacccagaatctggcctctggcgtcggacagatctcctacgccaccctgagtagtggcatccacacgccgaccgtcatagcctctggcataggcactgccgatggaattgctttcgattggatcaccaggcgcatatattatagcgattacctgaaccagatgatcaacagcatggcagaggatggatcaaatcgaaccgtcatcgctcgggtgccaaagccacgcgctattgttctggacccttgccaggggtacctgtactgggcagattgggatacacacgcgaagatcgaaagggcgacattggggggaaactttcgcgtgccaatcgttaatagtagtctcgttatgccttccggactaactcttgactacgaagaagacctgctgtactgggtggatgcatcgcttcaaagaatcgagagatccactcttacaggggtcgatcgggaggtgattgtgaatgccgctgtgcatgcgttcggccttaccctctatgggcagtatatatactggactgacctctatacccagaggatataccgggccaacaaatatgatggcagtggccagatcgccatgacaaccaacctgctctcacaacccagagggatcaacaccgtcgtcaaaaatcagaaacaacagtgcaacaacccctgtgaacagttcaacggcgggtgttcccacatatgcgctcctggacccaatggagccgagtgccagtgccctcacgaaggcaattggtatctggctaacaacagaaaacactgtatcgtggataacggggaacgatgcggcgcctcctcattcacctgtagtaacggccggtgcatttctgaagagtggaaatgtgacaacgacaacgattgcggtgatggtagcgatgaaatggagagcgtgtgtgcactgcatacctgctctccaaccgcctttacttgtgcgaatggccgctgcgtgcaatacagctaccgctgcgattactataatgattgtggcgatgggagcgatgaagccggctgtttatttcgcgactgcaacgccaccactgagttcatgtgtaacaataggcggtgtattccccgggagtttatctgcaacggcgtcgacaactgccacgataataatacatctgatgaaaaaaactgccctgaccggacatgccagagcggttataccaagtgccacaatagcaacatctgtataccacgggtttacctctgcgacggagacaatgattgtggggataacagtgacgaaaatcccacttactgtactactcacacttgttctagttcagagttccaatgtgcctccgggcgatgtatccctcagcattggtactgcgatcaggaaactgattgttttgacgccagcgatgaacccgcatcttgtggacactcagagcgcacctgcctagccgatgaatttaagtgcgatgggggccggtgcataccaagcgagtggatttgtgatggagataatgattgcggcgacatgagtgatgaagacaaaaggcaccagtgccaaaatcagaactgttccgacagcgagttcctgtgcgtcaacgaccggcctccagatcgaaggtgcattcctcagtcatgggtgtgcgatggagatgtcgactgtacggacggctatgatgagaaccagaattgtacacgcagaacatgttccgaaaatgagtttacctgcgggtacggcctctgcatcccgaaaatcttcaggtgtgaccgccataacgactgtggggactactccgatgagcgcgggtgtctgtaccagacctgccaacagaatcaattcacttgccagaatggaaggtgtatctccaaaacatttgtgtgcgacgaagacaacgactgcggcgatggaagcgatgaactgatgcacctgtgccacacaccggagcctacctgtccaccccatgaatttaagtgcgataacggcagatgcattgagatgatgaaattatgcaatcatttagacgattgtctggacaacagtgatgagaaaggatgtgggattaatgagtgtcacgacccttcgatttctgggtgtgaccacaactgtaccgatacgctcactagtttctattgctcctgtcgacctgggtacaagcttatgtccgataagcggacctgcgtggatattgatgaatgtaccgagatgcccttcgtctgtagtcagaaatgtgagaacgtcattggctcgtacatttgtaaatgcgcaccaggatacttgagggaaccagatgggaagacatgcagacaaaattccaacattgaaccttacctaatctttagcaaccgctattacttgagaaatctcaccattgacggctacttctattctctgatcttagagggtctggacaatgttgtagccttggactttgaccgagtggagaagagactttattggattgacacacagcggcaggtgattgaacgcatgtttttaaataagaccaacaaggaaacaattattaatcatcggcttcctgccgccgaatctctagcagttgattgggtgagtagaaagttgtactggctggacgcacgattagatggcctatttgtctctgatctcaatggaggccaccgccgaatgttagcccagcattgtgtggacgctaacaatacgttttgcttcgacaacccaagggggcttgcactgcaccctcagtatggatatctgtactgggccgattggggccaccgagcatacatcggaagggtaggcatggatggtaccaacaagtctgtgatcattagtactaaactcgagtggcccaacggcattacaattgattacacaaatgacctgctgtactgggccgacgcacacttagggtacatcgagtactcagacctggaagggcaccataggcacactgtgtacgacggagccctacctcatccttttgcaataacaatcttcgaggacaccatatactggacggactggaataccagaaccgtcgaaaagggaaataagtatgatggaagcaacaggcagacactggtcaatacaacacacagaccatttgacattcatgtgtaccatccataccggcagccaatagtgtcaaatccatgcggcaccaacaacggcggctgtagccacctctgcctaatcaaacctgggggcaagggattcacgtgtgagtgccccgacgactttagaacccttcagctctccggatccacttactgcatgccgatgtgcagctcaacacagttcctgtgtgcaaataatgaaaaatgcattcccatttggtggaagtgcgatgggcagaaggactgctcagacggctctgacgaactcgctttgtgcccacagcgcttttgtaggctgggccagtttcagtgcagcgatggtaactgcacatcccctcagacactgtgcaacgcacaccagaactgtcctgatggaagcgacgaagatcgactgttatgtgaaaaccaccattgtgattccaacgaatggcagtgtgccaacaagaggtgcatacccgaaagctggcagtgcgataccttcaatgattgtgaggacaatagcgatgaggactccagccattgtgccagtcggacttgcaggcccggccagtttagatgtgctaacggcagatgcattcctcaagcctggaagtgcgatgtggataatgactgcggagaccactcagacgagccaatcgaggagtgcatgagttcggcgcacctgtgcgataactttacagagtttagctgcaaaacaaactacagatgtataccgaaatgggctgtctgcaatggggttgacgactgccgcgataattctgacgagcagggatgtgaggaacggacctgtcaccctgtgggggatttccggtgtaaaaaccatcactgtataccactgaggtggcaatgcgatggtcaaaacgactgcggggacaattcggatgaggaaaactgcgctccccgtgaatgtacggagtcagagtttcgctgtgtcaaccagcaatgtattccgtcccgttggatttgtgaccattacaacgattgcggcgacaactcggacgagagggattgtgaaatgcggacatgccacccagaatactttcaatgcaccagcggccactgcgttcactcggagctgaaatgcgacgggagtgccgattgccttgacgccagcgatgaagcagattgtccaactagatttcctgatggggcctactgtcaggcaactatgtttgaatgcaagaatcatgtgtgtattcccccatattggaaatgcgacggcgatgatgattgcggagatggaagcgacgaagagttgcatctgtgtctcgatgtgccctgtaatagtccgaataggtttaggtgcgataacaatcgttgcatctacagccacgaggtatgtaatggagttgacgattgcggcgacggaacggatgagacggaggagcactgcaggaaaccgacccccaagccttgcactgagtatgaatataaatgcggtaatggccattgtatacctcacgataacgtgtgcgatgacgcggatgactgcggagattggtctgacgaattagggtgtaataagggcaaagagaggacctgcgccgagaacatctgtgaacagaattgcacccagctgaatgagggaggattcatctgttcatgtactgcaggtttcgagaccaacgtgttcgacagaacgtcttgccttgatatcaatgaatgcgagcagtttggcacgtgcccacagcattgccgcaatacaaaggggtcctacgaatgcgtgtgtgcagatggattcacttccatgtccgaccgccccggtaagaggtgcgcggccgaaggttcatcacctctgctgctgctaccagataatgtacggatccgcaagtataacttaagcagcgaaagattctcagagtatctgcaggacgaggagtatatccaagccgttgactatgattgggacccaaaggatatcggcctttcggtcgtctactacacagtcagaggagagggctctcgttttggggccattaaacgggcttatattcccaattttgagagtggccgcaataatcttgtccaggaagttgatttgaaactgaagtacgtgatgcagcccgacggcattgcagtggactgggtgggccgtcacatttactggagcgatgtcaaaaataaacgtatcgaagtcgcaaagctggatggcaggtaccgcaaatggttgatcagcacagatctcgatcagccagcagctattgcagtcaaccccaagctaggcctcatgttctggaccgattggggcaaggaacctaagatcgaaagcgcttggatgaatggagaggatcgcaacatcctggtattcgaagacctgggatggcccaccggtttgagtatcgactatcttaataacgatcggatctactggagtgacttcaaggaagatgtgattgaaacgatcaaatacgacggcactgaccgaagagtgattgcaaaagaggctatgaatccctattccttagatatttttgaggatcagctatactggatttctaaggagaaaggggaagtatggaagcagaacaagttcggtcaaggcaagaaggaaaagacacttgtggtgaacccctggttgacccaggttaggatctttcatcagctgcggtataataagagtgtgccaaacctgtgcaaacagatatgctctcatctctgcttactgcgccccggtggctacagctgtgcatgtccccaaggctccagcttcattgagggttctactaccgaatgcgacgctgccatcgaacttcccatcaatctgccaccgccttgtcggtgtatgcatggaggcaactgctattttgacgagaccgatcttcccaagtgtaagtgtccatcgggatacactggtaaatactgtgaaatggccttttccaaaggaatatccccggggacaaccgcggtggcggttcttcttacgattctcctaatcgttgtgattggagccttggctatagccggtttctttcattatcgcagaactgggtcactgctgcctgccctgcccaagttaccctcactgagctctcttgtgaagccatcagagaatgggaatggtgttacttttcggtctggcgctgacttgaacatggatataggagtatcgggcttcggcccagaaaccgccatcgacagaagcatggcgatgtccgaggattttgtgatggaaatgggaaagcagccaatcatcttcgagaatcctatgtattccgcacgagactcagccgtcaaggtggtgcagccgattcaggtgaccgtaagtgagaacgtcgacaataaaaattatggcagccccataaatcctagtgagatcgtgccagaaacaaacccaactagtcccgctgcagacgggacgcaggtgacaaaatggaatctctttaagaggaagtcaaagcagaccacaaacttcgaaaatccaatttacgcccagatggaaaatgaacagaaggagtccgtcgcagcaactcctcccccctcaccttctctcccagctaagccgaaacccccctctcgtagggatcctacacccacctactcagcaactgaggacacctttaaggacacagcgaatcttgtcaaggaagattctgaagtgtag

SEQ ID NO: 193510 - DNA, 3678 bp, synthetic construct
  misc_feature 1..3678: note = Description of Artificial Sequence: Synthetic coding sequence
  source 1..3678: mol_type = other DNA
atggaccggggccccgccgccgtggcctgcaccctgctgctggccctcgtggcgtgtcttgctccagcttctgggcaggaatgtgactcggcgcattttaggtgtgggtcaggccattgtatccctgctgactggagatgcgatggtactaaggactgttcggacgacgccgacgaaatcggctgcgccgtcgtgacttgccagcaaggttacttcaaatgtcaatcagagggtcaatgcatcccaaatagttgggtttgcgaccaggatcaggactgtgacgatggatccgacgagcggcaagattgcagccaaagcacctgttcatctcaccaaatcacctgtagtaacggtcaatgtatcccctctgaataccggtgcgatcacgtgcgtgattgtcccgatggcgctgacgaaaatgactgccagtaccctacttgcgagcagttgacctgcgataatggggcatgctacaatacttcccaaaaatgtgactggaaggtggattgtagggactccagtgatgaaattaattgcacagaaatctgtcttcataatgaatttagctgcgggaacggtgagtgcatccctcgagcatatgtgtgtgaccacgataacgattgtcaggacggaagcgacgagcatgcctgcaattacccaacctgtggaggataccagttcacatgtccctccggccgatgcatctaccaaaattgggtatgtgatggggaggatgactgtaaggacaatggtgatgaggatggctgcgaatccggccctcatgatgtccacaaatgcagcccccgggagtggagctgtcccgaatctgggaggtgtatctctatatacaaagtctgcgacggcatactggactgcccaggcagggaagatgaaaacaacacctccacgggaaagtactgcagcatgaccctgtgtagcgcattaaactgtcagtaccagtgccatgagacaccttatgggggggcatgtttttgcccccccggctacattataaatcacaatgactcccgaacctgtgtggaatttgacgattgtcagatttgggggatctgtgaccagaagtgcgaaagccggcctggccggcacctatgtcactgcgaggagggttacatcttagagagagggcagtactgtaaagcgaacgactccttcggggaagcgtccattatattttctaacggccgcgacctcttaattggcgacatccacggtagatctttccgcatactggtggaaagccagaatcgtggagtggctgtcggcgtagcgttccactaccatctgcagcgcgtcttttggaccgataccgtacagaacaaggtattttctgtggacatcaatggcttaaacatccaggaggtgcttaatgtgtcagtagaaacacccgagaacctcgccgtggattgggtgaataataagatttatttggtggagacgaaggtgaaccggatagacatggtgaacctggatggaagctaccgtgtgaccctcatcacagagaacttaggacaccctcgcggcatcgccgtagatcctactgtaggaaaaaccgtggtgcacgggggaagcttgatcccccaccccttcggggtctccctttttgaggggcaagtcttcttcacagattggacaaagatggccgtattgaaggcaaataaatttaccgagaccaacccccaagtgtactatcaggcctccctcagaccctacggcgtgaccgtgtatcattcactccggcaaccatatgccacaaacccttgtaaagacaataatggcgggtgtgagcaagtgtgcgtcctttcacaccgcactgacaatgacggactgggctttagatgtaaatgtacattcggcttccaactggacaccgacgagagacattgcattggtcgagagattctggctgcgaatcgggtggagaatgtggaaagcctggcattcgattggatttcgaagaatctttattggaccgattcccactacaagtctatctctgtaatgagattggcagacaagaccagacgtactgtggttcagtaccttaacaacccaagatccgtagtcgttcacccttttgccgggtatctgtttttcaccgactggttcagaccagccaagatcatgagggcctggagcgacggttcccatctactgccggtcatcaatactacactcggatggccaaatgggctagccattgattgggcagcatcgcggctatattgggttgatgcctatttcgataaaatcgagcacagcacctttgatggcctggaccgcagacgactcggccacattgaacagatgacacacccatttggcctcgccatcttcggtgagcatctattttttacagattggcgcctgggagccatcatccgggtacgcaaagctgatgggggagaaatgactgtaatccgatccggtatcgcatacatcttacaccttaaatcctatgatgtgaacatacagactggctcaaacgcatgtaaccagcctacccatcccaacggagattgcagtcatttttgcttcccagttccaaatttccagagggtgtgcggctgtccctacggaatgaggctggcatcaaatcatttaacctgcgagggcgacccaacgaacgagccaccaaccgaacagtgtgggctatttagcttcccttgtaagaacggtcggtgcgtgcctaattactacctgtgtgacggggtagacgactgccacgataacagcgacgaacagctgtgcggcactctgaataatacttgttcctcctccgcgttcacatgcggacatggcgaatgtatccctgcccactggaggtgcgataagcgcaatgactgcgttgacggcagtgacgaacacaactgcccaacccacgctccagctagttgcctggacactcagtatacatgcgacaatcaccaatgtatctcgaagaactgggtctgtgatacagataacgactgtggcgacggtagtgacgagaaaaattgtaactccacagaaacttgtcagcctagccagtttaattgccctaaccatagatgcattgatctttccttcgtttgtgacggggacaaggattgtgtggacggcagcgacgaagtgggctgcgttttaaattgtaccgcctcacagtttaagtgcgcatcgggggataagtgcattggcgtgacaaacaggtgtgacggcgtcttcgactgttccgataacagtgatgaggccggatgccccaccaggcctccaggaatgtgtcattctgatgagtttcagtgtcaggaagatgggatctgcattccaaacttttgggaatgtgacggtcacccggactgtctgtacggaagcgacgagcacaacgcctgtgttccaaaaacgtgcccctcaagttatttccactgtgacaatggcaattgtattcatcgcgcctggctctgcgatcgggacaacgattgcggagacatgtctgacgaaaaagactgtcccacccagccatttagatgccccagctggcaatggcagtgtttgggtcacaacatttgcgtcaatctgagcgtggtctgtgacggtatctttgactgccccaatggtactgatgaatcaccactgtgcagcaaattcccggatcatagcctgctggctataaatagcttttag

SEQ ID NO: 193511 - DNA, 1941 bp, synthetic construct
  misc_feature 1..1941: note = Description of Artificial Sequence: Synthetic coding sequence
  source 1..1941: mol_type = other DNA
atgctggcccagcactgcgtggacgccaacaacaccttctgcttcgataatcccagaggactggcccttcacccacaatatggatacctctattgggcagactggggccatagggcttatatcggcagagtgggcatggatggcacaaataaaagcgttattatcagcaccaaacttgagtggcccaacggaatcaccatcgactacaccaacgatctgttgtattgggccgacgcgcacttgggatatattgagtattcagatctggaaggtcatcacaggcacaccgtgtacgatggcgcgttgccccaccccttcgccattaccatctttgaggacacaatctattggaccgactggaatacgaggacagtggagaaggggaataaatacgacggcagtaatagacagacactcgtgaacactactcacagaccgttcgatattcacgtgtaccatccataccggcagccaatcgtgtcgaatccttgcggcacaaataatggcggatgcagccatctctgtttaattaagcccgggggaaagggctttacctgtgaatgtcctgatgactttcgcacgttgcagctgtccggaagtacatactgcatgccgatgtgctccagcacccaattcctgtgtgctaacaacgagaaatgtatccctatatggtggaaatgtgatggtcagaaagattgttctgatggcagcgacgaactcgcgctgtgtcctcagcgattttgccggctaggacagttccagtgctccgatgggaattgcaccagtccgcagaccctatgcaatgcacaccagaattgcccagatggtagtgatgaggatcgtctgttgtgcgagaatcaccactgtgactccaacgagtggcagtgtgcaaacaagaggtgcatcccagaatcatggcagtgcgacacctttaacgattgcgaagacaattccgacgaagactcttctcattgcgccagcagaacatgccggcccggacagttcagatgcgccaatggccggtgtatcccacaggcttggaagtgcgacgtcgataatgactgtggagaccattccgacgaaccgattgaggagtgcatgagttctgcccacctctgcgacaactttaccgaatttagttgcaagactaattatcgctgtattccgaaatgggccgtgtgcaacggcgtggatgattgtcgcgacaactctgatgagcagggatgcgaagaacggacatgtcaccccgttggcgatttcagatgcaagaaccaccactgtattccccttcggtggcagtgtgatggtcagaacgattgcggagacaactctgatgaagaaaactgcgcaccacgggaatgtaccgagtcagaatttcgatgcgtaaatcaacagtgcataccatcaagatggatttgtgatcactacaacgattgtggcgacaatagtgatgagcgtgactgcggcatgcggctcatgaagctcattgtgccccacgctttcctgatggttcacaccgcccgtttattatgttccaatgccaagactatgtttgtgtcgcgtcatatcggcaatgtgatggcaatgatgacagtggctatggtacaaatgaagaacttcacatgcgcatggatgtttcccgttatccaccaaacagtcagcggagtgaccactatcgctgcttttatagtgatgaggtgcgccatggtctggatgaccgttgaaatggagctgatgaggcaaagatctactgtggaaaacaggccgctgaacctggtgcagaatatgaatattagcgtggccatggggatcgcgttccacatgacaatgtgcgtgatgatgcccatgacagtggtgactggacctatgaactgggtggccataaaggagaaaaaagagcacgtcctgaaaatatacgccagcaagatcgttccaaattag

SEQ ID NO: 193512 - DNA, 2313 bp, synthetic construct
  misc_feature 1..2313: note = Description of Artificial Sequence: Synthetic coding sequence
  source 1..2313: mol_type = other DNA
atggagaagcgggccgccgccggcctggagggcgcccccggcgcccgagcccagctcgccgtggtttgtctggtgaatatcttcctcacaggacggctgagctctgccgtgcctgcacttgctgcctgcagtgggaagctcgagcagcatactgagcggcggggcgtgatttatagccccgcatggccactgaattaccctccaggtactaactgctcatggtatatccagggagatagaggggacatgatcacgatctcattcaggaacttcgatgtagaagagtctcatcagtgctccctcgattggttactgctggggccagccgcaccaccccgacaggaggccttcaggctctgcgggtccgcgatcccaccagccttcatatccgccagagatcatgtttggatcttcttccactctgatgcaagttcatctggtcaagcccagggtttcagattgtcgtacataaggggaaaactcggacaggctagttgccaggccgacgagttccgctgcgacaatggaaagtgcctccccgggccctggcagtgcaacacagtagatgaatgtggcgacggcagcgacgaggggaattgcagtgcccccgccagtgaacctcccggtagtctgtgcccaggaggcacctttccctgttccggagcacgcagtacacgttgccttcctgttgaacgcagatgtgacggtctgcaggactgcggggatggatccgacgaggccggatgcccagaccttgcctgcggacgacgacttggtagcttctatggaagcttcgcatccccggacctgttcggcgcagcaaggggaccctccgatctacactgtacttggctggtggacacgcaggactctcggcgagtgctgctccaactggaactgaggttgggctacgatgactacgttcaggtgtacgagggactgggtgagcgtggcgacaggctgctgcagacgctgagctacagaagcaaccatcgacccgtgagcttagaggccgctcagggtcggctgactgtggcctaccacgcaagggccaggagcgcgggacatggctttaatgcgacatatcaagtgaaaggctattgtctgccttgggagcagccctgcggatcaagtagcgacagtgacggcggaagcctcggcgaccaaggttgctttagcgagccccaacgttgcgatggatggtggcattgcgcctcaggacgcgatgagcagggctgtcccgcttgtccacctgaccaatatccatgtgaaggagggtcagggctttgctacactccggcagatcgctgtaacaaccagaaatcttgccctgacggggccgacgaaaaaaattgtttctcttgtcagccaggcacttttcactgcgggacaaacctgtgcatctttgagacctggagatgtgacggtcaggaagattgccaagatggctcagatgagcatggatgcctggccgccgtacctcgtaaagtcattaccgcagccctgataggctccctggtatgcgggctactcctggtgatcgccctgggctgcgcgttcaaactgtattcactgcgcactcaagaataccgcgcctttgagacacagatgactcggctggaggccgagtttgtccgacgcgaggccccaccaagttacgggcaactgattgctcagggactgattcctccagttgaggattttcctgtctactccgctagccaggcctctgtgctgcagaacttacgcacggccatgcgcaggcaaatgagaagacacgcatctcggcggggcccctcacggcggaggctcggcagactctggaatagactgttccaccggccgcgcgcgcctcgcggacagattcctctcctgactgccgctagaccaagccagacagtcctcggcgacgggttccttcagccggctccaggcgccgcccctgatccacctgctccactgatggacactggctctactcgtgccgcgggggatagaccacctagcgcacctggaagagctcccgaggttggacctagtgggcctccactgccttcaggcctacgcgacccggaatgccgaccagttgacaaagatcgcaaagtctgtcgagaacccctcgtcgacggtccggcccctgcagatgctcccagggagccgtgttctgcccaggacccccaccctcaggtatccacagcctcctcaactcttggtccacattctccagagcctttgggcgtgtgccgcaatccaccaccgccctgcagtcccatgttagaagcctccgacgatgaggccttgctggtgtgttag

SEQ ID NO: 193513 - DNA, 858 bp, synthetic construct
  misc_feature 1..858: note = Description of Artificial Sequence: Synthetic coding sequence
  source 1..858: mol_type = other DNA
atgggcaaccacctgcccgccttcggcccccggccccccggccggagagaagcactcctctctcccgattgcccacttttgcggctccatcctacaggcaagcttgggcaagcgagttgtcaggcagacgaattccgctgtgacaacggaaaatgtctccccggaccatggcaatgcaacactgttgatgagtgcggtgacgggtctgatgaaggcaactgcagcgctccagcttcagaaccaccagggtcactgtgtcctggaggcactttcccctgtagtggcgcacgtagtactcgatgtttacctgtcgagcgtcgatgtgacggcctccaggattgcggggacggctccgatgaagctggctgtccagacctggcctgtggaaggcgcctggggtccttttatggcagctttgcatctcccgacttgtttggggcagctaggggcccaagtgacctccactgtacatggctcgtggacacacaggacagccggcgggtattgctgcagctggagttgcggcttggctatgacgactatgtgcaggtgtacgagggcctgggagaacgaggggataggctgctgcagactctctcttatcggagtaatcatcggcctgtgtctctcgaggccgcacagggcaggctgaccgttgcctaccacgcgcgcgcacggtcagccggacacggctttaacgcaacatatcaggtgaaagggtattgtcttccctgggaacagccatgcggctctagcagcgattcagacggcgggagcctgggtgatcaaggctgtttttccgagccccagcgctgtgacgggtggtggcactgtgccagcggccgggacgagcagtag

SEQ ID NO: 193514 - DNA, 5718 bp, synthetic construct
  misc_feature 1..5718: note = Description of Artificial Sequence: Synthetic coding sequence
  source 1..5718: mol_type = other DNA
atgcggcggcagtggggcgccctgctgctgggcgccctgctgtgcgcacacggtctcgcctcctctcctgagtgtgcttgcggtaggtcacactttacatgtgccgtgtcagctttgggggagtgtacgtgcatacctgcgcagtggcagtgcgacggggataatgactgcggtgatcattcggatgaggacggttgtatactgccaacctgctcacccctggactttcactgcgacaacggtaaatgtattcggcgaagctgggtttgtgatggggacaatgactgcgaggacgacagtgacgagcaggactgcccaccccgcgagtgtgaagaggatgaatttccttgccagaacggttattgtattcgctcgctgtggcattgcgatggggataatgactgcggggacaacagtgatgaacaatgcgatatgcgcaagtgcagcgacaaggagtttcgatgctctgatggttcgtgcattgcggaacactggtactgcgacggtgatactgactgcaaggacggctccgatgaggagaattgtcccagcgccgtaccagcacccccctgcaatcttgaggaatttcagtgcgcctatggccgctgcattctggatatctatcattgcgatggggatgatgattgcggtgactggtcagacgagtccgactgtagctcccatcagccatgtaggtctggggagttcatgtgtgatagcgggttgtgcattaatgccggctggcgctgtgacggagatgccgattgtgatgaccagtcagatgaacggaattgcaccacatcaatgtgtacggccgagcagtttaggtgccacagtggtcggtgcgtgcgattgtcctggcgctgcgacggggaagatgattgtgcagacaatagcgacgaagagaactgtgagaatacaggatctccccaatgcgccctggaccaatttctgtgctggaacggtcgctgtataggccagcggaaattgtgtaatggggtgaacgattgcggcgacaattccgatgagtctccccaacagaactgccggccccggactggcgaggagaactgtaacgtgaataatggaggctgtgcccagaaatgccagatggtgagaggcgctgttcagtgtacttgtcacaccggatatagactaacggaggacgggcatacctgtcaggacgtcaatgaatgtgcagaagagggctattgttcccagggctgcaccaattctgagggcgcttttcagtgttggtgcgagacgggctacgagttgcgccctgaccggcgatcttgtaaggcactgggcccagagcctgtactcctttttgccaaccgcattgatattcgccaggtgctgccccaccggagcgagtacactctcctgttgaataacctagagaatgccattgcattagatttccatcacaggcgtgagctagtattctggagtgacgtcacactcgataggatcctaagagctaatcttaacggttcaaacgtcgaagaggtggtgtccacaggtctggagagcccaggaggcctcgctgttgactgggtgcatgataaactctattggaccgattccggaactagtcgaatcgaggtggccaacctcgacggagcacatcgtaaagtgcttctgtggcagaaccttgagaaacctagagcgattgctttgcatcccatggaaggcaccatctactggactgactgggggaatacccctagaattgaggcatccagcatggatgggtccggccggcgcatcattgccgatactcacctattctggccaaacgggctcacaatcgactacgccggacgacgcatgtactgggtggacgccaagcatcacgttatagagagggccaacctggacgggtcccacaggaaagcagttattagccagggtttaccacacccattcgctatcactgttttcgaggatagtctttactggacagattggcataccaaatcaatcaactctgccaacaagtttacagggaagaatcaggagattataaggaacaagcttcactttcccatggatatccatactctccatccccagcggcagccagccggaaaaaacagatgtggagacaataacggcggctgcactcatctgtgtctgccatcggggcagaattacacctgcgcctgcccaacagggttccgtaaaatcagcagccacgcctgcgcccagagtctggataaattcctgcttttcgcaaggcggatggatatcagacgtatatcttttgataccgaagatttgtccgacgacgtgattccactggccgacgttcgctcagcggtggcattagactgggacagtagggatgatcacgtgtactggaccgatgtttccacagataccatcagtcgcgcaaaatgggatgggaccggtcaggaggtggtcgtagatacctccctggaaagccccgccggcctggctatagactgggttacgaacaaactgtactggacagacgccggtacagatagaatcgaagtcgcaaatacagacggtagtatgagaaccgtccttatttgggagaacttggataggcctcgggatatagttgttgaacccatgggcgggtacatgtactggacggactggggtgcatccccaaagatagagcgggccgggatggacgcatctggacgacaggttatcatctcctcgaatctgacctggccaaacggcctggccatcgattatgggagtcagcgcctctactgggccgacgctggcatgaagactattgagttcgcggggttggatggcagcaaacgaaaagttctcattggctctcagctgcctcacccattcggcctcacactgtacggcgagcgcatctactggacagactggcaaacgaagtctattcaaagcgccgatagactgactggtttggatagagagacgctccaggaaaacttggagaatcttatggacattcacgtgtttcatcgccggcgccccccagtgagcacgccttgcgctatggagaacggtggctgctcccatctttgtctgagatccccgaatcccagcggctttagctgcacttgtcccacaggtattaacctactgtccgacggaaagacttgtagcccagggatgaactcctttctgatctttgcgaggaggattgatatcaggatggtgtccttggatataccttacttcgctgacgtggtagtgcccattaatattaccatgaagaacacaatagccatcggggtggaccctcaagagggaaaggtatattggagtgacagtaccctccataggatctcacgggcaaacctagatgggtctcagcatgaggacattatcaccaccggactgcagactacggatggcctggccgtggacgcgattggtaggaaagtgtattggacagatactgggacgaatagaattgaggtgggcaatctcgatggatctatgaggaaggtcctggtttggcagaatctggatagccctagggctatagttctgtaccacgagatgggattcatgtattggactgattggggagagaatgcaaagctcgaaaggtctggcatggacgggtcagacagggctgtcctgattaataacaacttaggttggcccaatgggctgacggtggataaagcaagcagccagctcctgtgggcagacgcacacacagagcgaatcgaggctgccgacttaaacggagcaaatagacacacgctggtgtccccagtccagcacccgtacgggctgacattgctggatagttacatttactggactgattggcagactcgatccatccaccgcgcagacaaaggtactggaagcaacgtgatcctcgtgaggagcaacctgcctggactgatggacatgcaggctgtggatagggctcagccattaggattcaacaaatgtggaagccggaacggcggatgctcgcatctctgcctccctcgaccttccggcttctcttgcgcctgtccaaccgggattcagctgaagggggatggtaagacttgcgacccatccccggagacctacttactctttagttctagagggtccattcgccgcatctcgttagacacatcagaccacacagatgttcatgtacccgtccctgaacttaataacgtgatatccctggactatgatagcgttgacggcaaggtgtactacacggatgtgttccttgatgttattcggagagctgatctaaatggctccaatatggagactgtcatcggtcgaggcttgaagactactgatgggctggcggtcgactgggtggccaggaacttgtattggactgacaccgggcgaaacaccatagaagcctccaggctggacgggtcatgccgtaaagttctcataaacaactctctggatgaaccacgcgccattgcagtgtttcccagaaaaggctacttgttttggactgactgggggcacatagctaagattgaacgtgctaatcttgacggttcagagagaaaggtgttaatcaataccgatctagggtggcctaatgggctgactctagactatgacactcgaaggatttattgggtggacgcccacttggatcgcatcgaatcggcagatctcaacggaaagctgcggcaggtgctagtatcccacgtgtctcacccgttcgctctgacgcaacaggatagatggatttattggaccgattggcagaccaagtctattcagcgagtggataagtatagtggtcggaataaggagacagtcctagcaaatgtggaaggacttatggacatcatcgtggtgtcacctcagcgccaaacaggcacaaacgcctgcggcgtgaataatggcggctgcacgcacctgtgctttgcgcgtgcatcagatttcgtgtgtgcttgcccggacgagcctgatagtagaccttgcagcctggttccgggcctagttcctcccgcaccgcgcgccaccggcatgagtgagaaaagccccgtcctgccaaacacacctcctacaacactgtattcttctacaactcggacgcggacttctctcgaagaggtagaaggacggtgtagtgagcgcgatgcgaggttaggactgtgcgcacgctctaacgacgcggtgccggctgctccaggcgaaggcttacatatctcctatgcgatagggggactgttaagtattctgctcattctggtggtgattgccgcactgatgctttatcgccacaaaaaaagcaagttcacagacccagggatgggaaacctaacctattctaacccttcttaccgtaccagcactcaggaggtgaaaatcgaagctattcccaagccagcaatgtacaaccagctttgctataaaaaagaaggtggcccagaccacaactacaccaaggaaaagatcaagatcgtggagggcatctgtctcctctccggagacgacgcagaatgggacgatctcaagcagctcagatccagccggggggggcttctccgagaccatgtgtgtatgaaaaccgacactgtgtctattcaagcctcctctggcagcctggacgataccgagaccgagcagcttcttcaagaggagcagtcagagtgctccagtgtccacacagctgctactcccgagagacgtggatcactgcccgatacaggctggaagcacgaacggaagttgtcctctgagtcacaggtgtag

SEQ ID NO: 193515 - DNA, 4848 bp, synthetic construct
  misc_feature 1..4848: note = Description of Artificial Sequence: Synthetic coding sequence
  source 1..4848: mol_type = other DNA
atggaggccgccccccccggccccccctggcccctgctgctgctgctgctcctgcttctcgctctatgcgggtgtccggcccccgcagccgcttcccctctgttgcttttcgcaaaccgtcgcgacgtcagactggttgatgccgggggtgtgaagctggagagcaccattgttgtttccggattggaagacgccgctgccgtagatttccaattcagtaagggggccgtttactggacggacgtgtctgaggaggctattaagcaaacgtatctgaatcagaccggtgcggccgtgcagaatgtggtgatcagtgggctggtttctcccgatggacttgcatgtgattgggttggcaagaagctgtattggacggactctgaaaccaaccgtatcgaggtggcgaatttaaatggtaccagccgcaaagtgctgttttggcaggacttggatcaacccagagctatcgcccttgatccggcacacggatacatgtattggactgactggggagagaccccgcggatcgaaagagccggtatggatgggagcacaagaaaaattattgtggactcagacatctattggccaaatggcctgaccatagatctggaggagcaaaagctctattgggccgatgcaaagctttcattcattcacagggctaatctcgacggctccttcagacagaaggtggtggagggtagtctgacacatcctttcgcattgaccctctcaggagacactctgtattggacagattggcaaaccaggtctattcacgcctgcaacaaaaggactggcggtaaacggaaagagattttgagtgcactgtacagtcctatggacatccaggtgctgtctcaagagagacagcccttctttcacaccagatgtgaagaggataacggcggctgctcgcatctctgcctgctgtcccctagcgaaccattttacacctgtgcttgcccaacaggagtacagttgcaggataacggaagaacgtgcaaggctggagccgaggaagttctgctccttgcccgcagaacagacttacgccgcatttctttagatacacccgacttcaccgatatagttttacaggttgatgatatccggcacgccatcgcaatagattatgaccccctcgaaggatatgtatactggaccgacgacgaagtgcgcgcaattagaagggcctaccttgatggttcgggtgcccaaactcttgtcaatacagagatcaatgatcccgacgggattgccgtcgactgggttgccagaaacttatactggacagataccgggacggatcgtattgaagtaactcggctgaatgggacttcaaggaagatcctggtgtccgaagaccttgacgagccaagggctattgccctacaccctgtgatgggattaatgtactggacagactggggggagaaccctaagatcgaatgcgcgaaccttgatggccaggagcgaagggtgctcgtcaacgcctccctgggatggcctaatggcctggccttagatctccaggagggcaaattatattggggggacgccaagacagataagattgaggtcataaatgttgacggcacaaagagacggactctcttagaagacaagcttccacacatctttggtttcactcttcttggggacttcatatattggacagactggcaaagacgatcaatcgaaagggtgcataaggtcaaggcatcacgggacgttatcattgaccaactaccagaccttatgggtctgaaagcagtaaacgttgccaaagtggtggggaccaatccctgcgccgaccgaaatggagggtgcagccacttgtgttttttcacacctcacgccacgcggtgcggatgccctatagggctggagctgctcagcgatatgaaaacttgtattgtccccgaagccttcctggtgttcacttctcgcgccgcaatccatcggatctctctggaaaccaacaacaatgatgtcgcgattcctttgacaggggtcaaagaggcctcagccctggatttcgatgtgagcaacaaccacatctactggactgatgtcagcttgaagacaatatcccgagctttcatgaatggcagcagcgtggaacacgtcgttgaatttggtcttgactaccccgaaggcatggccgtggactggatgggtaagaatctgtactgggcagatacagggacgaatcggattgaggttgccaggctggatggccagtttagacaggtgttggtgtggcgggaccttgacaaccctcgttctctggcattggatcctaccaagggttacatatactggactgagtggggtggcaagcctagaatcgttcgtgcattcatggacggaacaaattgtatgacgctcgtggacaaagtgggccgcgctaatgatctcacaatcgactatgcagaccagcgactctactggaccgacctggacactaacatgatagagagtagtaacatgttggggcaggagcgggtcgtcatagccgacgatcttccgcatccattcggtttgacacaatattccgactatatctattggacagattggaatcttcatagtatcgagcgggctgataagacgagcggaaggaatcgcacccttatccagggccacttagactttgtaatggacatcctggtcttccatagctcacgtcaggacgggctgaatgactgcatgcataacaacgggcagtgcgggcagttatgtcttgccattccaggtggtcatcgttgtggttgtgcctctcattatacactggacccttcctcccgcaactgcagccctccaacgacattccttctcttctcgcagaagtccgccatctcccgcatgattcctgacgaccagcatagcccggacctgatactcccactccacggattgcgcaacgtcaaggccatagattacgaccccttagataagttcatttactgggtcgacgggcgacagaatattaaaagagccaaggacgacggtacccaacccttcgtgctgacatctctcagtcagggtcagaatccagacaggcaacctcacgacctgtccatcgatatctactcgcggacattgttctggacctgtgaggctactaatacgatcaacgtgcacaggctgtcgggggaggccatgggggttgtcctacgaggggaccgggataagcccagggccattgttgttaatgccgaacgaggctacctgtactttaccaacatgcaggaccgcgcagcgaaaatagagcgcgctgctctggacgggactgagagagaggttcttttcactaccggccttattcgacccgtggcactcgtggtagataataccttgggaaagctgttctgggtcgacgccgatttgaagcgaatcgaatcatgcgacctctcaggcgcaaatagactcactcttgaagacgccaatatcgtccagcctctcggccttactattctcggcaagcacctgtattggatagacaggcagcagcaaatgattgaaagagtggagaagacaaccggagataagcgaacccggatccagggacgggtcgcacaccttaccggaattcatgccgtggaggaggttagccttgaagagttttctgcccatccctgtgcacgggacaacggaggatgcagtcacatctgcattgcaaagggggatgggacaccaagatgctcttgccctgtccacctagtgctgttgcagaatttgctcacctgtggcgaacctcccacatgtagccccgaccaattcgcttgtgcgactggtgagattgattgcattccgggcgcctggcgctgtgatgggtttcctgagtgtgacgaccagtcagacgaggaaggctgccctgtttgcagtgccgctcagttcccttgcgcaaggggtcagtgcgtagacctcaggcttaggtgtgatggcgaggccgactgccaggaccgatccgacgaagccgactgcgacgcaatctgcctccccaatcagttcagatgcgcttcagggcagtgcgtcctgatcaaacagcagtgtgactcgtttccagattgcattgacggctctgatgaactcatgtgcgaaattactaagcccccgtccgatgacagccctgcccacagtagtgccatcggaccagtgattggcataattctctcactttttgtgatggggggcgtctatttcgtatgtcagcgagttgtctgtcaaaggtacgccggcgcaaacggtccttttccccacgagtatgtatccggcactccacatgtgccactgaatttcatcgccccgggtggctcccagcatggcccctttacagggatcgcctgtggaaaaagcatgatgagtagcgtgtctctcatgggcggccggggaggagtgccattgtacgaccgtaatcacgtcacaggcgcctcttcttctagctcttccagcacgaaagctaccctgtaccctccaatcctgaatccgcctccttctcccgccacagatccatccctttacaatatggacatgttctacagctcaaacataccggcaacagcgagaccatatcggccatacatcatcaggggcatggcacctccaactacaccatgtagcacagacgtatgcgactccgactacagtgcaagccgttggaaggcctccaagtactatttagacttgaattctgactcagacccctaccctcccccgcccacaccccatagccaatacctctccgctgaagatagctgtccaccgagcccagccaccgaacggagttacttccaccttttccccccgcctccctcgccatgtactgacagcagttag

SEQ ID NO: 193516 - DNA, 4842 bp, synthetic construct
  misc_feature 1..4842: note = Description of Artificial Sequence: Synthetic coding sequence
  source 1..4842: mol_type = other DNA
atgggcgccgtgctgcggagcctgctggcctgcagcttctgcgtgctcctgagagctgcacccctcctcctttacgccaatcgccgagacttgaggctcgttgatgcaaccaatgggaaggaaaacgcaaccattgtagtcggcggactcgaggatgcggctgctgtggatttcgtattctctcatggacttatttattggtcggacgtgagcgaggaggcaattaaaaggactgagttcaataaaacagagagtgtgcaaaatgtggttgtcagcggattgctttcaccggatggcctggcctgcgactggctgggggaaaagttatattggaccgattctgagaccaacagaatcgaggtcagtaatttagacggaagcctacgcaaggtgctgttctggcaggagcttgaccagcctagagcaatcgctctcgatccgtctagcggctttatgtactggaccgactggggggaagtgccaaagattgaacgggcgggtatggatgggtcatctaggttcattataataaactctgagatctactggcctaacggattgacattggattacgaggagcagaagctatactgggcggacgctaagttaaacttcatccataagtcaaacctggacggcacaaatagacaggccgtcgtcaagggcagcctgccccacccattcgccctcaccctctttgaagacattctgtattggacagattggtctacccattcaatcctggcttgtaataagtacacaggcgagggcctccgggaaatccactccgacattttctcgcccatggacatccacgcattttcccagcagcgtcagccaaatgccaccaatccttgcgggatcgacaatggcggttgtagccacctctgcctgatgtcccctgtcaaacctttttaccagtgcgcatgcccaaccggagtgaaactccttgagaatgggaaaacctgcaaggatggggccacggagctgttgctgctcgctcgccgcacagacttgcgacgtatttctcttgatacacctgactttacagacattgtgttgcaactggaggacataaggcacgcgatcgcaattgactacgaccccgttgagggctacatctattggactgatgacgaagttagggccatccggcggagctttatagacggcagcggatcacagttcgtggtcacagcccagatagcccaccccgatggtattgcagtggattgggttgcccggaatctgtactggaccgataccgggactgacaggattgaagtgacaaggttgaacggaactatgcggaagattttaatctctgaggatctggaggagccacgggctattgtgttagatccaatggtgggctacatgtattggacggactggggggaaattcctaaaattgaaagagctgcgttagatggctctgacagagtggtcttggtcaatacatcccttggatggccgaatggactggccctggattacgacgagggcaagatctattggggcgacgccaaaacagacaaaattgaagttatgaacaccgacgggaccggcagacgagtgctggtggaggacaaaatacctcacatttttggcttcactttactgggcgattacgtgtactggactgattggcagagacggtccatcgagcgcgtgcacaagcggtctgccgagcgggaagtcattatcgatcagctgccagatcttatgggattgaaagcaaccaacgtgcatcgggttatcggctccaatccctgtgccgaagagaatggaggctgtagccacctgtgcctgtacagaccacaggggctgagatgtgcgtgccccatcggtttcgaactgatttccgatatgaagacctgtattgtgccggaagctttcctcttattcagccgcagggccgacatcagacgtattagcctcgagacaaacaataacaacgtcgctattccgctcacaggagtgaaggaagccagcgccctcgatttcgacgttacagacaacaggatatactggaccgatattagcctcaagacaatctctcgtgcctttatgaacggcagtgcccttgagcacgtcgtggaatttggtctcgactaccctgagggcatggcagtcgactggctgggcaagaacctgtactgggcagatacgggcactaatcgcattgaagtctcaaaactcgacgggcagcatcgccaagtgctcgtgtggaaggacctcgactcaccccgtgccctggccctggatccagctgaaggcttcatgtactggaccgagtggggtgggaagcccaagattgatcgagcagctatggacggctccgaaagaacaactttggtccccaacgttggacgagcaaacggcttgacgatcgactacgcgaagcgaagactctactggaccgatctggatacgaaccttattgaaagctcaaatatgctgggtcttaatagggaagttatagccgacgacctccctcacccattcgggctgacacagtaccaggattatatctattggaccgattggagcagacgctctatagagagagcgaacaagacatcaggacagaaccgtaccatcatccagggacatctggactacgtgatggatattctggtttttcattctagtaggcagtccgggtggaacgagtgcgcctctagcaacggccactgttcccacctgtgtctcgctgttccagttggagggttcgtgtgtggctgtccagcacattattcacttaatgctgacaatagaacctgctctgcgcccactactttcctgctgttttcacagaaatctgctataaataggatggtgatcgatgagcagcagagcccagacataattctgcctatccactctttacgaaatgtgcgagctatagactatgacccgcttgacaaacagctatactggatagatagcaggcagaatatgatcaggaaggcccaggaggatggttcacaggggttcactgtggtggtttccagcgttccatcacagaacctcgagattcaaccgtacgacctctccatcgacatctactcccgctacatatactggacttgcgaggcgaccaacgttatcaatgtgacccgactggatggacgcagcgtgggggtggtgctaaaaggtgaacaggatcgacctagggcggtggtggtgaaccccgagaagggttatatgtattttaccaatttgcaggagagaagccctaaaatcgagagagccgccctcgacggcactgaacgtgaggtcctgttcttctcaggactgagtaagcccatcgccctggcactggactcacgccttggcaagcttttttgggccgattcagatctcagacggattgaaagtagtgatctttcaggagctaaccgtattgtgctggaggactctaacatcctacagccagtcggtcttaccgttttcgagaactggctctactggatcgataaacagcagcagatgatcgaaaagatagatatgacaggtcgagagggcagaaccaaagtgcaggcacggatagcccagttgagtgatattcatgcagttaaggaattgaacctgcaggaatatcggcagcatccatgcgctcaagacaacggcgggtgtagtcatatctgtctggtaaaaggtgatggaaccacccgctgtagctgtcctatgcacttggtgcttctgcaggacgagctaagttgtggggagccccccacgtgcagcccacaacagttcacctgcttcaccggagaaatcgactgcattcctgtagcgtggcgttgcgacggctttaccgaatgcgaggaccactccgatgaactgaattgtcctgtgtgtagcgagtcccagttccagtgcgcctccggccagtgtatagacggcgccctgcgatgtaatggcgacgccaattgccaggataagtccgatgagaaaaactgtgaggtcctctgtctgattgatcagttcagatgtgccaatggacagtgcatcgggaagcacaagaaatgtgaccataatgtggactgcagcgacaagtccgacgagctcgattgttaccctacagaagaaccagcaccccaggcgacaaatactgtggggagcgtgatcggagtgatcgtgactatattcgttagtggaacagtttactttatctgccagcgcatgttgtgtcctaggatgaaaggggacggggaaaccatgacgaacgattacgtcgtccacgggcctgccagcgtgcctttgggatacgtaccccacccctcctccctgtcaggaagcttacccgggatgtcccggggcaagagcatgatcagcagcctgagcatcatgggaggttctagcggccctccttatgaccgggcacatgtgactggcgcttcatccagttcatcctccagtacaaagggcacttattttccagctatactcaatccccctccgtcccccgctactgagagaagtcactatacaatggagttcggatacagctccaacagcccgagcacccatagatcctattcctaccggccatactcttaccgacatttcgctcccccaactacgccatgctctaccgacgtctgtgactccgactacgccccttctcgtaggatgacatccgtggcaactgctaagggatacacttccgacctgaactacgactctgaaccggtgcctccccccccaacgccgcgctcacagtacctcagcgcggaagagaactatgaatcctgccccccgagcccatatacagagaggagttattcacaccatttgtacccgcccccaccatcaccctgtactgattctagctag

SEQ ID NO: 193517 - DNA, 4437 bp, synthetic construct
  misc_feature 1..4437: note = Description of Artificial Sequence: Synthetic coding sequence
  source 1..4437: mol_type = other DNA
tgactggaccagccccgggccatcgccctggaccccagcagcggctttatgtactggactgattggggagaggtgcccaagatagagagggctgggatggacggatcttcacggttcatcatcatcaattctgagatatattggcctaacggcctaacgctagactatgaggagcagaaattatactgggctgacgcgaaacttaattttatccacaagtcaaacctcgacggcaccaacagacaggccgtagtcaagggaagcctgccccatcctttcgcgcttactctgtttgaagacatactttactggactgactggagcacccactcaatccttgcttgcaataaatatactggcgaaggccttagggagatacactcagatattttctcaccaatggatatacacgccttttcccagcagaggcaacctaacgctaccaacccatgcgggattgacaacggggggtgctcccatctatgtttgatgagccccgtgaagcccttttaccagtgcgcctgtcccacaggagtcaagctgttagagaatgggaaaacttgcaaggatggagcaaccgaactccttctgctggctcggagaacagatcttcgaaggatttccctcgataccccagatttcacagacatcgtgctccagttggaagacattcgacatgccatcgcgatagactatgacccagtagaaggctacatctactggaccgatgatgaagtgcgggccattcggagatccttcatcgacgggtcgggctcccagtttgttgtgactgcccaaattgctcatcctgacggtattgcagtagattgggtggctagaaatctttactggacagacaccggtaccgaccgcatcgaggttacaaggttgaacggcaccatgcgaaaaatccttatcagcgaggaccttgaggagcctcgcgcaattgtgttggatccaatggttgggtacatgtattggacagattggggtgaaattccaaaaattgagcgtgctgccctggatggttccgatcgggtggtactcgtcaacaccagcctgggctggccgaacggcctggccctggactacgatgaaggtaagatttactggggcgatgctaagactgacaagattgaagtaatgaacacagacggcaccggccgaagggtgctggtggaagacaagatcccgcacatctttggtttcaccctgctgggcgattatgtttactggaccgattggcagcgccggagcattgagcgcgtgcacaaacgctccgctgaaagagaggtcatcatcgaccagctgcctgatctcatgggtctcaaagccactaacgtgcatcgcgtgatcggctcgaacccctgcgccgaggagaacggtgggtgctcacacctgtgtctgtatcggccccagggtctgagatgtgcatgtcccattgggttcgagctgattagcgacatgaaaacctgcatcgtccctgaggcatttctcctatttagccgccgcgcagatatacggcgtattagccttgagactaataataacaacgtggcgatacctctgacgggggtaaaagaggctagcgccctggactttgatgtgaccgataatcgaatttactggacagatataagcttgaagacaatctcccgcgcctttatgaatggaagcgctttggagcacgtggtggagttcggactcgactacccagaaggaatggccgtcgactggctcggcaaaaacctgtattgggccgatacgggaactaaccgtatcgaggtttcaaaacttgatggccaacacagacaggtgctggtttggaaggatctggattcccctcgcgctttggccttggaccctgcagagggcttcatgtactggacagaatggggtggcaagccaaaaatagaccgagcagctatggacgggtctgaacgaaccacacttgtaccgaacgtcggaagagcgaatggcctgactattgactacgccaaaagacggctgtattggacagatctggacaccaacctgatcgagtcgtccaatatgctgggtctgaaccgggaagtgattgccgatgacctacctcatccatttggcctgacacagtaccaggactacatctactggacggactggagcaggcggtctattgagagagctaataaaaccagcggtcaaaacaggaccatcattcaggggcacctcgactacgtgatggacatcctggtctttcactccagcagacaaagcgggtggaacgaatgcgcctcttcaaacgggcattgttctcacctttgccttgccgttcctgtcggaggctttgtgtgcgggtgcccggcccactattctcttaacgccgataaccgcacatgttcagcacccactaccttcctgttgttcagccaaaagagtgccatcaaccggatggtaatcgatgaacagcaaagtccagacatcatactgcccatccactctctgcggaacgtcagagctatcgattatgacccactggacaaacaattgtactggatcgatagtagacagaatatgatacggaaggcccaggaagacgggtcccaaggcttcaccgtcgtggtgtcctctgtgccctcccaaaacttggaaatccagccctacgatctgagcatcgacatatactctcgctatatctactggacttgtgaagcaaccaatgtcattaacgtgacaagactcgacggtaggagcgtgggggtggttctgaaaggcgagcaggataggccacgggctgtggtagtgaatccagaaaaaggttacatgtactttacaaatctgcaggaacgtagcccgaagatagaaagagcagcactggatggcaccgaacgggaagtattgttcttctctgggttaagtaaacccatcgctttggcactggatagccgtctgggaaagttattctgggctgattctgaccttaggaggatagaatcctcagatctgtcaggggcaaacaggattgtcctggaggattctaacattttgcagcccgtggggctgactgtatttgagaattggctttactggatcgataaacagcaacagatgatcgaaaagattgacatgactggccgcgagggcaggaccaaagtgcaagcacggatcgcacagttgtcagacatccacgccgtgaaggaattaaaccttcaagagtaccgacaacacccatgcgcccaagacaacggaggttgcagccatatctgtctcgtgaagggagacgggacaaccaggtgcagttgccccatgcacctcgtcctgctgcaggacgagctctcatgtggtgagcctcccacttgcagtccacagcagttcacgtgctttaccggcgagatcgattgcattccagttgcctggcggtgtgacggttttaccgagtgtgaagatcattcggatgagcttaattgtcccgtctgctccgagagccagtttcagtgcgcaagcggacagtgcatagatggggcgttgcgttgcaacggagacgcaaactgccaggacaaatctgatgagaagaattgcgaggtgttatgcctgatagaccagtttcgttgtgccaacggccagtgcatcggcaagcataaaaaatgtgatcacaatgttgattgtagcgataaaagtgacgagctggattgctacccaaccgaagagcctgccccacaagcaaccaacactgttggttctgtaattggcgtgatagttaccatcttcgtctcggggaccgtttacttcatatgtcagcgcatgctgtgccctaggatgaagggagatggcgagaccatgaccaacgactacgtggtgcacgggcctgcctccgtccccctcggatacgtgccacatccctcaagcctgtcaggaagcctcccaggaatgagcaggggaaagtcaatgatctctagcctctctataatgggcgggtcctcaggaccaccctatgaccgggcccatgtgaccggggcaagtagttcaagttcttccagcaccaaaggaacatatttccctgccatcctcaaccccccaccaagccccgccacggaacggagccactacaccatggaatttgggtacagctcaaactccccgtccactcataggtcatatagttataggccttattcatacaggcattttgcccctccgaccaccccctgctctacagacgtatgtgatagcgactatgctccctctagaaggatgacgagtgtcgccactgcaaaagggtatacctctgatttaaactacgatagcgagcccgttcctcccccccctactccacggtcccagtacctgagcgctgaagagaactatgagagttgccctccatcaccgtacactgaaaggtcatactctcaccatctttatcccccgcctcccagtccatgtaccgatagcagctag

SEQ ID NO: 193518 - DNA, 2382 bp, synthetic construct
  misc_feature 1..2382: note = Description of Artificial Sequence: Synthetic coding sequence
  source 1..2382: mol_type = other DNA
atgggcctgcccgagcccggccccctgcggctgctggccctgctgctccttttactcctgctcttgctgctgcagctgcagcatctggcagctgctgccgcggaccctctcttggggggccaggggcccgcgaaagattgcgaaaaggaccaatttcagtgtcggaacgagcgctgcattccatcagtgtggcggtgcgacgaggacgacgactgtctggatcactctgacgaggacgactgcccaaagaaaacttgcgccgatagtgatttcacttgtgacaatggacactgtatccacgaacggtggaaatgtgatggggaagaggaatgtcccgacggttcggacgagtccgaggctacatgcacaaagcaggtgtgtccagccgagaagctgtcatgtggacccacaagccataaatgtgtccccgcatcctggcggtgcgacggagagaaggattgtgaagggggggccgatgaagccggctgcgccacctggctgaatgagtgcttacacaataacggaggatgcagccacatctgcacagatttgaaaatagggttcgagtgcacatgtcccgcggggtttcaactcctagatcaaaagacatgtggcgatatcgacgaatgtaaggatcctgatgcttgtagccaaatttgcgtgaactataaggggtacttcaagtgcgaatgttaccctggctatgaaatggatcttctcacgaaaaattgcaaggctgctgccggaaagtccccctcccttattttcacaaaccgccacgaagtgagacgcatcgacttggtaaagcgaaattacagtcggctgataccaatgttgaagaatgttgtagcgttggacgtagaagtggcgacgaatcggatctactggtgcgacctgtcgtacaggaaaatctatagcgcctacatggataaggctagtgaccctaaagagcaggaagtgttgattgatgaacaactacactcgcctgaagggctggcggtggattgggtccacaagcatatttattggaccgactctggaaacaagaccatctctgttgccacagtcgacggagggcgaagaagaaccttgttcagccggaaccttagcgaaccgcgggcgatcgcagtggatcccctcaggggcttcatgtattggtctgactggggtgatcaggctaagatcgaaaaatccgggcttaatggagtggaccgacaaacgctggtgagtgacaacatcgaatggcctaatggcattacattggatctgttaagtcagagattgtactgggtggactcgaagttgcaccagttaagttcgattgactttagcgggggaaatcgcaagaccctgataagctcaaccgactttctgtctcatccatttgggatagccgttttcgaggacaaggtgttctggacagacctggaaaatgaagcaattttctccgcaaatcgtttaaacggattggagatcagcatccttgccgaaaatcttaacaacccacacgacatcgtgattttccatgaactcaagcaaccacgggcccccgacgcgtgcgagctcagcgtccagccaaacgggggttgtgaatacctgtgccttccagcaccacagatcagttctcacagtccaaaatatacgtgtgcatgtcccgataccatgtggctcggacctgatatgaagagatgctatcgagccccacagagcacaagcaccacaaccctggcaagcacaatgacacgcacagtgcccgcaaccacacgagcaccaggaaccactgtacacagaagcacctatcagaatcatagcacagagacaccttcactcaccgctgcagtaccaagttcagtttccgtcccacgggcaccgtctatcagccctagcacgttaagccccgccacctccaaccactcacagcactacgcaaacgaagatagcaagatggggtccacagtgacggccgcggtgatcgggataatagtgccaattgtagtgatagcactgctttgcatgagcggatacctcatctggcgaaattggaaaaggaagaacacaaagagcatgaactttgacaaccccgtctaccggaagacaacagaggaggaagatgaagatgagcttcacatcggtaggacagcccagatcggacatgtctacccagctgccatctcctcgtttgaccggcccctgtgggcggagccctgcctgggtgaaaccagggaacctgaagatccagctccagcactcaaggagttgtttgttctcccaggagaaccacggtctcagttacaccagctgcccaagaacccgctgtctgagctgccagttgtgaaatcaaagagggtggctctgtcactggaagatgacgggctgccgtag

SEQ ID NO: 193519 - DNA, 2892 bp, synthetic construct
  misc_feature 1..2892: note = Description of Artificial Sequence: Synthetic coding sequence
  source 1..2892: mol_type = other DNA
atgggcctgcccgagcccggccccctgcggctgctggccctgctgctcctgctcctcctcctgctccttctgcagctgcaacacctcgccgcggccgctgcggacccactgctgggaggccagggacctgcaaaggactgcgagaaagatcagtttcaatgcagaaacgaaagatgcatcccatccgtgtggcgctgcgacgaagatgacgactgcctcgatcatagtgatgaggatgattgccccaagaaaacatgtgctgactccgattttacctgcgacaatggtcattgtatccatgaacggtggaagtgcgacggtgaggaggaatgtcctgatggatctgatgagagtgaggccacatgcactaagcaggtgtgcccggccgagaaactgagttgtggacctaccagccacaagtgcgtacccgctagttggagatgtgacggagagaaagattgcgagggcggggctgacgaggcaggctgtgcaacactgtgtgctcctcatgaatttcagtgtggcaatagatcatgtctagcagccgtctttgtctgcgacggagatgacgattgcggtgacgggagcgatgaaagaggctgcgcagatcccgcgtgtggccctagagagttccggtgtggaggcgatggtggtggtgcctgcattcccgagagatgggtatgcgacaggcagttcgactgtgaggataggagcgatgaagctgcagaactgtgtgggaggcccggtcccggggctacctctgcgcctgccgcctgtgctactgcatcgcagttcgcttgccgctcgggagagtgcgtccatctgggatggcgctgcgatggggatcgggactgtaaggataaaagcgatgaagctgattgtccgttgggaacctgtcgcggagacgaatttcaatgtggagatggcacgtgcgtgctcgccataaaacattgtaatcaggagcaggattgccctgacggatctgatgaggccggatgtttgcagggccttaacgagtgcctgcacaacaatggtggatgttcccatatctgtaccgaccttaaaattggatttgagtgtacttgccctgctgggtttcagcttttagaccagaagacctgcggagacatcgacgaatgcaaggatccagatgcctgttcacaaatatgcgtaaattacaaggggtacttcaagtgcgagtgctatcccgggtatgagatggatctgctgactaaaaattgtaaggccgcagcagggaagtcaccatcccttatctttaccaaccgccatgaggtgaggcgaatcgacctggtgaagcgcaattacagcaggctgattcccatgttgaagaatgtggttgccctggacgtcgaggttgcgactaaccggatctattggtgtgatctgagttatagaaaaatctactcagcttatatggacaaggcatctgaccccaaggagcaggaggtgttaattgacgaacagctgcattctccagagggactggccgtagattgggtgcataaacatatttattggaccgacagcgggaataagacgatctctgtggctactgtagatgggggccgaaggcggactctattttcacggaaccttagcgagccgcgggccatcgccgtcgatcccctgcgcggatttatgtattggtccgactggggcgatcaggccaagatagaaaaaagtgggttgaacggcgtggatcgacaaactctggtaagcgataacatcgaatggcctaatgggattactctggacttgctttctcagagactgtactgggtggacagcaagctgcaccagctctccagcattgatttctcaggagggaatcggaaaacactcattagctccactgactttctctctcacccattcgggatcgctgtgttcgaggataaggtgttctggacagatctcgagaacgaggccatcttcagcgcaaatcggctgaacggactggaaattagtattctcgctgagaatctgaataatccccatgacatcgtcatctttcacgagctcaagcagccacgcgctccagatgcgtgtgaactttctgtgcagccgaacggcggctgtgagtatctgtgtctgccagccccacagattagctcgcactcccccaaatacacttgcgcctgcccagacaccatgtggttgggacctgatatgaagcgttgctatagagctcctcagtcaacatcaacaactacccttgcctctacgatgaccagaaccgtgcccgcaactaccagagcacccggtaccaccgtgcaccgaagtacataccaaaaccacagcaccgagacgccctccctaacagctgcagtgcccagctccgtctctgtgccacgcgccccatccatcagcccctccacactgagccccgccacctctaatcatagccagcactacgccaacgaggattccaagatgggaagcaccgtgacggcagccgtgattggcataattgtaccaattgtggtgattgccctactatgtatgagtggatacttgatttggagaaattggaagcggaaaaacacaaagtccatgaactttgataatccagtgtaccggaagactacagaagaggaggatgaagatgagctgcatataggaaggaccgcgcaaatcggccacgtatatcctgccgccatctcgtcattcgataggcctttgtgggcggaaccttgtctcggagagacccgagagcctgaggatcctgcccctgctctcaaggaactgttcgttctgccaggtgaacctagatctcagctccaccagctgcccaagaatcctctgagcgagttacccgtggtgaaatcaaagagggtagccctgtccttagaagacgacggcctgccctag

SEQ ID NO: 193520 - DNA, 2103 bp, synthetic construct
  misc_feature 1..2103: note = Description of Artificial Sequence: Synthetic coding sequence
  source 1..2103: mol_type = other DNA
atgggcctgcccgagcccggccccctgcggctgctggccctgctgctactcctgctccttctcctgttactgcagcttcagcacttagccgctgcagctgccgacccgttacttgggggccagggcccggcaaaagactgtgagaaggaccagttccagtgccggaatgaaagatgtattccttctgtctggcgctgcgacgaggatgatgattgtctggatcatagcgatgaggacgactgtcctaagaagacttgcgcggactcagatttcacatgtgacaacgggcactgcattcacgaaaggtggaaatgtgatggagaggaagagtgtcctgatggctccgacgagagcgaggccacatgcacaaaacaggtgtgccctgcagaaaaattgagctgcggccccacaagtcacaagtgtgtcccagcatcatggcgatgcgacggagagaaggattgcgagggcggagccgatgaggccggctgcgcaacatcactgggaacatgtcgcggggacgaattccagtgtggggatggtacgtgcgtgctggccatcaagcactgtaaccaagagcaggattgtcccgacggctcagatgaggcaggatgcctgcagggattgaacgaatgcttacataacaatggtggttgctcgcatatatgcaccgatctgaaaatcgggtttgagtgcacctgtccggctggttttcaattgttagatcaaaagacatgtggggacatcgacgagtgcaaggaccctgacgcctgctcccagatctgtgtgaactataagggatacttcaagtgtgaatgctatccaggctacgagatggatctcctgacgaaaaactgcaaagctgccgctggcaaatccccttctctgatcttcacaaaccggcatgaggtgaggcgaatagatctcgtgaaacgcaattacagtaggctcatccccatgctaaagaacgtggtggccctcgatgtggaagtggccacgaatcgcatttactggtgcgatctatcatatcgaaagatctattccgcctacatggacaaagcgtccgacccaaaagaacaagaagtgctcattgacgaacagctgcattcgcctgaaggtcttgcagttgattgggttcacaaacatatctattggacagattcaggcaataaaacaatttcagttgctacagtggacggggggaggcgaaggaccctgttcagccggaacctctcagaacctagggctatagccgtagatcctctgaggggattcatgtattggtctgactggggcgatcaggccaaaatcgaaaagtctggtctgaatggcgtggatcgccagactctcgtgtctgataacatcgagtggccaaacggcatcaccctggatttgctgtcacagcgtctctattgggtggactcgaagcttcatcaattaagttcaattgatttcagcggcggcaatagaaagaccctcattagctccaccgacttcttatctcatccattcggcatagctgtattcgaagataaggtgttctggacagacctggaaaacgaagcgattttttctgccaacagattaaatggtttggagatcagtattctcgcagaaaacttgaataacccacatgacatcgttatctttcacgagcttaagcagcccagagccccagatgcttgtgaactcagtgtacaacccaacggggggtgtgaatatttatgccttcccgcaccccaaatcagttcacatagccccaagtacacctgcgcatgccccgacactatgtggcttggcccagatatgaagcgctgttatagggatgccaatgaggactcaaagatgggatccacagtgaccgctgcagtgatagggattatcgtcccaatcgtcgtgattgccctgctgtgtatgagtggttaccttatatggaggaattggaagcgcaagaacaccaagtcgatgaattttgataatcctgtttacaggaagactaccgaggaagaggatgaggatgagttgcatatcggaagaacagctcagattggccacgtttatccagcacgcgttgctctgtcgcttgaagatgatggcctcccctag

SEQ ID NO: 193521 - DNA, 2715 bp, synthetic construct
  misc_feature 1..2715: note = Description of Artificial Sequence: Synthetic coding sequence
  source 1..2715: mol_type = other DNA
atgggcctgcccgagcccggccccctgcggctgctggccctgctgctacttctcctcctgctgctcctgcttcaactccaacacctggctgccgccgctgcagatccattgctggggggtcaaggcccagctaaagattgtgaaaaggaccagtttcaatgcagaaacgagcgatgcatcccatctgtgtggcggtgcgacgaggacgatgattgcctggaccactcagatgaagacgattgtccaaagaagacttgcgcggactctgatttcacatgtgacaatggccactgcatccacgagagatggaaatgcgatggagaggaggaatgtccagacggctcagatgaatccgaggccacttgtacaaagcaggtgtgcccagctgagaaactctcctgcggacccactagtcataaatgcgtgccggcgtcatggcgttgtgacggtgagaaagactgcgagggaggcgccgacgaggcagggtgcgctacgctttgcgcaccacacgaattccagtgcggaaatcggtcctgccttgcagccgtgtttgtgtgcgatggtgatgacgactgcggagatgggagcgatgaacgaggctgcgccgacccagcctgtgggcccagggaatttcgatgcggaggcgatggtggaggcgcgtgcatacccgagcggtgggtctgcgatagacagtttgactgtgaagatcggtccgacgaggcagcggagttgtgtgggcggcctggacctggcgccacctcagcaccagctgcctgtgcaacagcttctcagttcgcgtgtcggtccggcgagtgcgtgcacctcggctggcgctgcgatggtgatcgggattgcaaggacaagtccgatgaagctgattgtcctctagggacatgccggggagatgagtttcagtgtggtgacggaacttgtgtcctggctataaagcactgtaaccaggagcaagactgtccagatggttccgatgaagccggctgcctgcagggcctgaatgaatgcctccacaataatggaggctgctcacacatctgtactgatctcaagattggctttgagtgcacttgccccgctggcttccagcttttggatcagaagacctgtggtgatatcgatgaatgtaaggatccagatgcttgcagtcagatctgcgtgaactacaaagggtacttcaagtgcgaatgttaccccggttacgaaatggacttgttgacgaagaactgtaaggcagccgctggcaagagccccagccttatttttactaatcgacacgaggtgaggagaatcgacctcgtcaaacggaactattctcgtctgataccaatgctgaaaaacgtggtggcattggatgtggaggttgctacaaaccggatttattggtgcgacctgtcgtataggaaaatttattcagcctatatggacaaggctagcgaccctaaagagcaggaagtattaatcgacgagcaactgcactctccagaggggctggcggtggattgggttcacaaacatatttactggacggactctggcaacaaaactatttctgtggccaccgtggatggcggccgacggcgcactctgttctcccgcaatctatctgagcctagagcaatcgcagtcgaccctctgaggggctttatgtactggtcagactggggggaccaggcaaaaatcgagaaatctgggcttaacggagtcgatcggcagacattagtaagcgataatatcgagtggccaaatggcatcaccctggatctcctgagccaacgcctctattgggtcgactctaaactacaccaactctcttcgatcgactttagtgggggtaacagaaagactctgatttcttctaccgatttcctctctcacccatttggcattgctgtcttcgaggacaaagtgttttggacggatctcgagaacgaggccatcttcagtgccaaccgcctcaacggactggagatctcaatccttgccgagaacttaaacaatcctcatgacatcgtcatcttccacgaattaaagcagcctagagccccagatgcatgcgagctatccgtgcagcctaatggtggctgtgagtatctgtgtttacccgcaccacagatctccagtcactctcctaaatacacctgcgcatgcccggacacaatgtggctcggcccggatatgaaaaggtgttatcgcgcgccccaatcgacttcaactaccactctggctagcacaatgacccggaccgtgcctgccacaactagggcgcccggcaccacagttcacaggtctacatatcagaaccattccaccgagacgccttctcttaccgctgctgtacccagttccgtttccgtccccagggcaccctcgatttccccttccactctgagtcctgccacaagcaaccacagccagcactatgcgaatgaggatagcaaaatgggcagcaccgtgacagccgctgtcattggaatcatcgtccctatcgtcgtgatcgcattgctctgtatgagtggctatttgatctggcggaactggaagcgcaagaatacgaagtctatgaatttcgacaatcccgtgtatcgaaagaccaccgaggaagaggatgaggatgagctccacattggcagaaccgcccagatcgggcacgtgtacccagcccgagtcgcgctatctcttgaagatgatggactgccgtag

SEQ ID NO: 193522 - DNA, 1074 bp, synthetic construct
  misc_feature 1..1074: note = Description of Artificial Sequence: Synthetic coding sequence
  source 1..1074: mol_type = other DNA
atggccccccggcgggtgcggagcttcctgcggggcctgcccgcccttctgctgctcctcctatttctggggccatggcccgccgccagccacgggggaaaatacagccgcgagaagaaccagcctaagccgagccctaagcgagagagcggagaggagtttagaatggaaaagttaaaccagctgtgggaaaaggcccagcggctacatctgccgccagtgagattggcagaactgcacgccgatctgaaaatccaggaacgcgacgagctggcatggaagaagctaaaactagacggtctcgacgaggatggggagaaggaagcacgccttatccgaaacctcaatgtgatccttgccaagtacggattggatggaaaaaaagacgctcggcaggtgacatctaattctcttagcgggactcaggaggatggcctcgacgatcctagactggagaaattgtggcacaaggccaaaacttcaggcaaatttagcggtgaggagctcgacaagctgtggagggaattcctgcatcacaaagagaaagtacacgagtataatgtcttgctggaaaccttatccagaaccgaggagatacatgagaacgtcatctccccttcagatctctcagacattaagggcagcgtgctgcactcgagacatactgagcttaaagagaaacttagatcaatcaaccaaggattggaccgcctgcgaagagtgtcgcaccagggctatagcacagaggctgagttcgaggagcctagggttattgacctctgggatctcgctcaaagtgctaaccttacggacaaagagttggaggcttttcgagaggagctgaagcacttcgaagcgaaaatagaaaagcacaaccattaccagaagcagctcgagatcgcccacgaaaaacttaggcatgccgagagcgtgggtgatggcgaacgagtttcccggagccgggaaaaacatgcactcctcgaggggcgaaccaaggaattgggctacaccgtgaaaaagcatttgcaagacctatcgggacggataagcagggcccggcataacgagctctag

SEQ ID NO: 193523 - DNA, 402 bp, synthetic construct
  misc_feature 1..402: note = Description of Artificial Sequence: Synthetic coding sequence
  source 1..402: mol_type = other DNA
atgaactacatgcccggcaccgccagcctgatcgaggacatcgacaagaaacatctcgtccttctaagagatggtcgaacactgataggattcctgagatcgatcgatcaattcgccaacctggtgctccaccagacagttgaacgaatccacgttggcaaaaaatacggagatattccaagggggatattcgttgtgaggggcgagaacgtagttctgctgggggaaatcgacctcgaaaaagaaagcgacactcccttgcaacaggtgtcaatcgaggagatccttgaggaacagagggtggaacaacagactaagctcgaagccgaaaagctcaaagtgcaggcgctgaaggaccgcggtttatccatcccccgggccgatactttggatgaatattag

SEQ ID NO: 193524 - DNA, 588 bp, synthetic construct
  misc_feature 1..588: note = Description of Artificial Sequence: Synthetic coding sequence
  source 1..588: mol_type = other DNA
atggccgccccccccggcgagtacttcagcgtgggcagccaggtgagctgtcggacctgtcaggagcagcgactccaaggggaggttgtggctttcgattatcaatctaaaatgttagcacttaagtgtcctagcagctcgggaaagcccaaccacgctgatatacttctaataaatcttcagtatgtgagcgaagtggagatcatcaacgacagaacagaaacgcccccgccgctggcctccctcaacgtctccaaattagcttctaaggctagaacagaaaaagaagaaaagctgagccaggcttacgcgatcagtgccggtgtgtcacttgaaggccagcaactgtttcagacaatccacaaaactattaaggattgcaaatggcaggaaaagaacattgttgtaatggaggaggtcgtgatcacacccccttatcaagtggagaattgcaaaggaaaggaaggctccgctctgagccatgttagaaagatcgtggagaagcacttccgcgatgtggagagccagaaaattttacagaggtctcaagcccaacagccacaaaaagaagccgccctaagctcctag

SEQ ID NO: 193525 - DNA, 588 bp, synthetic construct
  misc_feature 1..588: note = Description of Artificial Sequence: Synthetic coding sequence
  source 1..588: mol_type = other DNA
atggccgccccccccggcgagtacttcagcgtgggcagccaggtgagctgcaggacatgtcaggagcagaggctgcagggcgaggtcgtggccttcgattaccaaagtaagatgcttgctttgaagtgcccaagctctagcggaaaacccaatcatgcggacattctcttgatcaaccttcagtacgtatccgaggtcgagataataaacgaccggacggaaacaccaccccctttagccagccttaatgtatccaagctggcgtccaaagctaggacggaaaaggaagaaaagctttcccaggcctatgccatcagtgccggcgtgtccctggagggccaacagctatttcagacaatacacaaaacaattaaggattgcaagtggcaggaaaaaaacatcgtggtaatggaagaggttgtgattacacctccatatcaggtggaaaattgtaaggggaaagaggggtcagccctctcacatgtgcgaaaaatcgtggagaaacatttcagagacgttgagagtcaaaagatacttcagcgctcccaggcccagcagccccagaaagaagcagcgctcagctcctag

SEQ ID NO: 193526 - DNA, 288 bp, synthetic construct
  misc_feature 1..288: note = Description of Artificial Sequence: Synthetic coding sequence
  source 1..288: mol_type = other DNA
atgctgttctacagcttcttcaagagcctggtgggcaaggacgtggttgtggagcttaagaatgatctgagcatctgcggtaccctccactctgttgatcagtacctgaatatcaaactgactgacattagtgtcaccgaccctgagaaatatccgcacatgctctcagtcaagaactgcttcataagggggtcagttgttagatacgttcaactgccagctgacgaggtggacacacagctgctccaggacgcagcccgcaaagaggccctgcagcaaaagcaatag

SEQ ID NO: 193527 - DNA, 288 bp, synthetic construct
  misc_feature 1..288: note = Description of Artificial Sequence: Synthetic coding sequence
  source 1..288: mol_type = other DNA
atgctgttctacagcttcttcaagagcctggtgggcaaggacgtggttgtggaacttaagaacgacctgagcatctgcgggacgctccattcagtggatcagtatctgaatattaagctcacggacattagcgtgaccgatcctgagaagtatccccacatgctatccgtcaagaactgctttattcgtggttccgttgtaagatatgtccagcttccagccgacgaggtggacacccagctcctgcaggacgctgccaggaaagaggcccttcagcagaagcagtag

SEQ ID NO: 193528 - DNA, 288 bp, synthetic construct
  misc_feature 1..288: note = Description of Artificial Sequence: Synthetic coding sequence
  source 1..288: mol_type = other DNA
atgctgttctacagcttcttcaagagcctggtgggcaaggacgtggtcgtagagctaaagaatgatctcagtatttgtgggaccctgcatagtgtcgaccagtatcttaacataaagctgactgatatatctgtcacggaccccgagaagtacccccacatgctgagcgtgaaaaactgtttcataaggggcagcgttgtgaggtacgtgcaactgcctgccgacgaagttgatacccaattgcttcaggatgctgctagaaaagaggctctgcaacagaagcagtag

SEQ ID NO: 193529 - DNA, 288 bp, synthetic construct
  misc_feature 1..288: note = Description of Artificial Sequence: Synthetic coding sequence
  source 1..288: mol_type = other DNA
atgctgttctacagcttcttcaagagcctggtgggcaaggacgtggtggttgagctgaagaacgatctaagcatttgtggaaccctgcactctgtcgaccaatatctaaatattaagctgactgacataagtgtgaccgaccctgaaaaatatcctcacatgctgagcgtgaagaactgcttcatcagggggagtgttgtccgctacgtgcagttgcccgctgacgaagtcgatactcagctgttacaggatgctgcacggaaagaggcgctgcagcagaagcagtag

SEQ ID NO: 193530 - DNA, 288 bp, synthetic construct
  misc_feature 1..288: note = Description of Artificial Sequence: Synthetic coding sequence
  source 1..288: mol_type = other DNA
atgctgttctacagcttcttcaagagcctggtgggcaaggacgtggtcgtcgagttgaagaacgacttatctatctgcggcacactgcactcagtagatcagtatttaaacattaagctgacagatatatcagtgaccgaccccgagaagtacccacacatgctctcagtgaagaattgtttcatccgcgggagtgtcgttagatacgtacagctgcccgcagacgaggtggatacccaactgctccaggacgcagctcgcaaggaggcactccagcagaaacagtag

SEQ ID NO: 193531 - DNA, 288 bp, synthetic construct
  misc_feature 1..288: note = Description of Artificial Sequence: Synthetic coding sequence
  source 1..288: mol_type = other DNA
atgctgttctacagcttcttcaagagcctggtgggcaaggacgtggtggttgagctgaaaaacgatctcagcatttgtgggactctgcactccgtggaccagtacctgaatatcaagctgaccgatatctctgtgaccgaccccgagaagtaccctcacatgttgtcagtcaaaaattgttttatccgtggcagcgttgtgaggtatgttcagttgccagcagacgaagtggatactcagttgcttcaagatgcagctcgcaaggaagccctccagcagaaacagtag

SEQ ID NO: 193532 - DNA, 309 bp, synthetic construct
  misc_feature 1..309: note = Description of Artificial Sequence: Synthetic coding sequence
  source 1..309: mol_type = other DNA
atggccgacgacgtggaccagcagcagaccaccaacaccgtggaggagccactcgatctaatccggctttccctcgacgagaggatttacgttaagatgaggaacgaccgggagctgcgcggacgtcttcacgcttatgatcagcacctgaatatgatattgggcgatgtagaagagactgtgacgactattgaaattgacgaggaaacatacgaagaaatttacaagagcaccaagcgaaatattcccatgctcttcgttaggggcgacggcgttgtcctggtcgcaccaccattgagggtggggtag

SEQ ID NO: 193533 - DNA, 420 bp, synthetic construct
  misc_feature 1..420: note = Description of Artificial Sequence: Synthetic coding sequence
  source 1..420: mol_type = other DNA
atgctgcccctgagcctgctgaagaccgcccagaaccaccccatgctggtcgagctgaagaacggagagacctataatggtcatcttgtgtcttgcgacaattggatgaacattaacctgcgggaagtcatatgcacgtctagagatggcgacaaattttggcgcatgcccgagtgttacatcagggggtcaaccattaagtaccttcgtatccccgacgagataatagacatggtcaaagaggaagtcgttgccaagggacgcgggcggggaggtctgcaacagcaaaaacagcagaaaggcagaggaatgggaggggctgggagaggtgtgtttggcggccgaggccgaggcggcatccccgggacaggtaggggccagcccgagaagaagcccgggcgccaagctgggaagcaatag

SEQ ID NO: 193534 - DNA, 420 bp, synthetic construct
  misc_feature 1..420: note = Description of Artificial Sequence: Synthetic coding sequence
  source 1..420: mol_type = other DNA
atgctgcccctgagcctgctgaagaccgcccagaaccaccccatgctggtcgaattgaagaatggcgagacttataatggacatttggtatcttgcgataactggatgaatattaatctcagagaagtcatatgcacaagccgggacggcgacaagttctggaggatgcccgaatgttacattaggggcagcaccattaagtacctgcgcatccccgacgaaattatcgatatggtaaaagaagaggtggtggccaaaggacgtggacgagggggactccaacaacaaaagcagcagaagggccgaggcatgggcggcgccggacgcggcgtttttgggggccgcggaaggggcggcatccctggcaccggccgagggcagcctgagaagaagccaggccggcaggccggcaaacagtag

SEQ ID NO: 193535 - DNA, 276 bp, synthetic construct
  misc_feature 1..276: note = Description of Artificial Sequence: Synthetic coding sequence
  source 1..276: mol_type = other DNA
atggccgccaacgccaccaccaaccccagccagctgctgcccctggaacttgttgataaatgcattggctcccggattcatatcgtgatgaaatccgataaggaaattgtcgggactttactcggcttcgacgatttcgttaacatggtgcttgaggatgtgaccgaattcgagattacacccgaaggaaggagaattaccaagttagatcaaatccttttgaacggaaacaatatcacaatgctcgtccccgggggggagggcccagaggtgtag

SEQ ID NO: 193536 - DNA, 243 bp, synthetic construct
  misc_feature 1..243: note = Description of Artificial Sequence: Synthetic coding sequence
  source 1..243: mol_type = other DNA
atgagcctgcggaagcagacccccagcgacttcctgaagcagatcatcggtcggcccgtggtggttaagctaaattcaggggtagattatcgcggtgtgctcgcatgcctggatggctacatgaatatcgccctggagcagactgaagaatacgtgaatggccaattaaagaataaatatggagacgcgtttatcagaggcaataacgtgttgtacatctccacccagaaaaggagaatgtag

SEQ ID NO: 193537 - DNA, 243 bp, synthetic construct
  misc_feature 1..243: note = Description of Artificial Sequence: Synthetic coding sequence
  source 1..243: mol_type = other DNA
atgagcctgcggaagcagacccccagcgacttcctgaagcagatcattggtagacctgttgtggttaaattaaacagcggagtagattatcgcggagtgttggcatgccttgacggttatatgaatattgcgctcgagcaaacagaggagtatgtgaatggacagcttaagaataagtatggcgatgcattcatccggggcaacaacgtactgtacatctccacacagaaaagacggatgtag

SEQ ID NO: 193538 - DNA, 243 bp, synthetic construct
  misc_feature 1..243: note = Description of Artificial Sequence: Synthetic coding sequence
  source 1..243: mol_type = other DNA
atgagcctgcggaagcagacccccagcgacttcctgaagcagatcattggtcgccccgttgtggtgaagctcaactccggagtggactaccgaggagtgctagcctgcctggatggctacatgaacatagcactggaacagacggaggagtacgtgaatgggcaattaaagaataagtatggtgatgccttcatccgaggcaacaatgtgctctatatctcaacacagaaaagacgaatgtag

SEQ ID NO: 193539 - DNA, 243 bp, synthetic construct
  misc_feature 1..243: note = Description of Artificial Sequence: Synthetic coding sequence
  source 1..243: mol_type = other DNA
atgagcctgcggaagcagacccccagcgacttcctgaagcagatcattggccgccccgtggtggtgaagctgaactccggagtggactaccgcggagtacttgcatgtttggacggctacatgaacatcgcactcgagcaaactgaagagtacgtgaatggccagctgaaaaataagtatggagacgcattcataagaggcaataatgtgctctatatttcaactcagaaacggcggatgtag

SEQ ID NO: 193540 - DNA, 312 bp, synthetic construct
  misc_feature 1..312: note = Description of Artificial Sequence: Synthetic coding sequence
  source 1..312: mol_type = other DNA
atggccgacaaggagaagaagaagaaggagagcatcctggacctgagcaaatatattgacaaaaccatcagggttaagtttcagggcggaagggaggcaagcgggatcctgaaagggttcgatcctctcctgaatttggtactggatggcacgattgagtacatgcgcgatccagatgaccagtacaaactgactgaggacacccggcaactcgggctagtggtttgtcgtggcacaagcgtcgtgctgatctgtccgcaggacggaatggaggccattcccaatccctttatccaacagcaggacgcctag

SEQ ID NO: 193541 - DNA, 1116 bp, synthetic construct
  misc_feature 1..1116: note = Description of Artificial Sequence: Synthetic coding sequence
  source 1..1116: mol_type = other DNA
atgagcgcccaggcccagatgcgggccctgctggaccagctgatgggaacagcaagagatggggacgagacacggcagcgggtcaaatttactgacgatcgtgtttgtaaaagccatttgctggattgctgtccccacgacatactggctggcactcgaatggacttgggtgaatgcacaaagatccatgatctagcacttcgcgcggactatgagattgcatccaaggagagggatctatttttcgaacttgacgccatggaccacctggaatcctttattgcggagtgcgacaggagaacagagctggccaagaaacgtttggccgagacccaggaggagataagcgccgaagtatctgccaaggcagagaaggtacacgaactgaacgaggagattggcaaattactagctaaagctgaacagctgggagcggaaggaaatgtggatgagtcccagaaaatcctgatggaggtcgagaaggtgagagccaagaaaaaggaagcagaggaggagtacaggaactccatgcctgcatcgagtttccagcagcaaaagctgcgggtttgtgaggtctgctccgcctatctgggcctacatgataatgatcgaaggcttgccgaccactttggaggaaaactacacctgggctttatccagattagagaaaagctggaccaattgaggaaaactgtcgcagagaaacaggagaaaaggaaccaggataggctccgaaggagggaggaacgggagcgtgaggagcgactttcccggcggagcgggtcaagaacacgcgatcggaggcggtcccggtcacgcgaccgccgtcggcgaagatcgcgaagcactagccgtgagcgccggaaactatccaggtcgaggagtcgcgatcggcacagaagacacaggtccaggagtagatctcactcacggggacacagacgcgcctctcgggataggtcagctaagtacaagtttagccgggaaagggcttcaagagaggaatcgtgggagagcggcagatccgaaagaggcccacctgattggcgcctcgaaagctccaatgggaaaatggctagcaggaggtccgaagaaaaggaagccggtgagatatag

SEQ ID NO: 193542 - DNA, 978 bp, synthetic construct
  misc_feature 1..978: note = Description of Artificial Sequence: Synthetic coding sequence
  source 1..978: mol_type = other DNA
atgagcgcccaggcccagatgcgggccctgctggaccagctgatgggcacagcaagagacggtgacgagacacgacagagggtgaagtttaccgatgaccgggtttgtaagtcccatctactggattgctgcccccacgacatactcgctggcacccgaatggacctgggcgagtgtacaaaaatccacgacttggccctcagggccgactatgagatagccagtaaggaacgagatctgttttttgagctggatgccatggatcaccttgagtctttcatagctgaatgcgaccggagaactgagctggctaaaaaacggcttgccgagactcaggaggagatcagcgcggaggtgtcggctaaggctgagaaagtgcacgagttaaacgaggagatcggcaagctcctggccaaggcagaacagctgggcgcagaagggaatgtggatgaatcccaaaaaattttgatggaggtggaaaaagttcgggccaagaagaaagaggcagaagaagagtaccgcaatagcatgccagcctcgagcttccagcagcaaaaattacgagtatgcgaagtgtgcagtgcgtacctagggctccatgataacgacaggagactggccgatcacttcggggggaagctgcacctgggtttcatccaaatacgcgagaaattggatcagctgcgcaagactgtggctgagaaacaggaaaaacgcaatcaggataggctgcgccggcgtgaagagagggagagagaggaacggctgtctcgtagaagtggatcacggacccgtgatcgccgacggtcccgcagtagggatcggaggaggcgccggtctcggtccacatcgcgcgagaggcggaaattgagtaggagtcgctccagagatcgacaccgccgtcaccgctccagatcccgcagccacagtagagggcacaggcgggcctctagggatagaagcgctaagtataagtag

SEQ ID NO: 193543 - DNA, 819 bp, synthetic construct
  misc_feature 1..819: note = Description of Artificial Sequence: Synthetic coding sequence
  source 1..819: mol_type = other DNA
atggacctgggcgagtgcaccaagatccacgacctggccctgcgggcagattatgagatcgcctccaaagaacgagacttgttctttgaattagatgcaatggatcatctggagtcattcatcgctgagtgtgataggagaaccgaactggcaaagaagcggctggcagaaacccaggaggagataagtgctgaggtcagcgccaaagcggaaaaggtgcatgagctcaatgaagagataggaaagttactggctaaagccgagcagctaggagcggaaggaaacgtcgacgagtcccagaaaatcctcatggaggtggagaaggtgcgcgctaagaaaaaggaggccgaagaagaataccggaactccatgcccgccagttctttccaacagcagaaactccgtgtttgtgaggtctgttcagcctatcttgggctgcacgataacgacagacgtctcgcggatcacttcggaggcaaattacacttgggattcatacaaataagagaaaagctggaccagctgcgtaaaacagtggcggagaagcaggagaagcgcaaccaggataggctccgaagacgggaagagagagaacgtgaagagaggctgtctaggaggtccggtagtcgcactcgagaccgccggcggtctcgcagtagagaccgccggcggcggcgttctcgaagcacaagtagggaaaggagaaaactatcccgcagtcggagcagagacagacacagacgacaccgctcccggtcccgctctcatagccggggacatcggcgtgcctcccgagaccggtccgcaaagtataagtag

SEQ ID NO: 193544 - DNA, 978 bp, synthetic construct
  misc_feature 1..978: note = Description of Artificial Sequence: Synthetic coding sequence
  source 1..978: mol_type = other DNA
atgagcgcccaggcccagatgcgggccctgctggaccagctgatgggtacagcccgcgatggcgatgagactagacaacgcgttaagttcacagacgaccgcgtgtgcaaaagccacctgctcgattgttgtccccacgatattctggcgggcacgaggatggacctgggcgagtgtaccaagattcatgatctcgcactaagagccgactacgagatcgcctctaaagagcgcgatctcttctttgagctggacgccatggatcatctggagagctttattgcggaatgtgacaggcggacagagctggctaagaagcggctcgctgaaacccaggaagagatatcagcggaggtgtcagcaaaggccgagaaagtgcatgagttaaacgaagaaattggcaagttgctcgctaaagccgaacaactaggggcagagggcaatgtcgatgagagccagaaaatccttatggaagtagaaaaggtgagggccaagaaaaaggaagcagaggaggagtaccgaaatagcatgccggcaagtagtttccagcagcagaaactgagggtgtgcgaggtatgctctgcatacctggggctccacgacaacgaccggagactcgccgatcactttgggggaaagctgcacctgggatttatccagatcagggagaaactggatcagctgagaaaaacggttgctgagaaacaggagaagagaaaccaggacagactgagaagacgggaggagagagagagagaggagaggctgagccgtcgaagtggcagcaggaccagagaccgacgtaggtctcgtagtagggaccgccggaggcgcagaagccgctcgacctcccgggaacgcagaaaactgagtagatccaggtccagggacaggcatcggcggcataggagccgcagcagatcacacagtaggggccaccgccgcgccagtcgcgacagatccgctaagtacaagtag

SEQ ID NO: 193545 - DNA, 99 bp, synthetic construct
  misc_feature 1..99: note = Description of Artificial Sequence: Synthetic coding sequence
  source 1..99: mol_type = other DNA
atggacctgggcgagtgcaccaagatccacgacctggccctgcgggcagactacgagatcgcgagcaaagagagagatctgttcttcgaactcgattag

SEQ ID NO: 193546 - DNA, 549 bp, synthetic construct
  misc_feature 1..549: note = Description of Artificial Sequence: Synthetic coding sequence
  source 1..549: mol_type = other DNA
atggaccacctggagagcttcatcgccgagtgcgaccggcggaccgagctagctaaaaagcgtctggccgagacacaagaagagatttcagcagaggtctctgccaaggcagaaaaggtgcatgagctcaacgaggagatcggcaagttattggccaaggcagagcagctgggcgcagaaggtaacgtagatgagtcccagaaaatccttatggaggtggaaaaggttagggccaagaaaaaggaggcggaggaagaataccgcaattccatgccagctagcagttttcaacagcagaaactgcgagtgtgtgaggtgtgttcagcatacctcggtctgcacgataatgacagaaggcttgcagaccatttcggaggcaagctgcatctcggattcatccagatccgcgagaagctcgatcaactacgtaagaccgttgcggaaaagcaggagaaacggaaccaggatcggctcaggaggagggaagaacgcgagcgagaagaacgactgtcccgccgctccggctctcggactcgcgaccggcggtag

SEQ ID NO: 193547 - DNA, 183 bp, synthetic construct
  misc_feature 1..183: note = Description of Artificial Sequence: Synthetic coding sequence
  source 1..183: mol_type = other DNA
tgacggcggcggagccggagccgggaccggcggcggcggcggagccgctctacatctcgcgaaaggcgtaagctctctcgatctaggagcagagatcgacatcgtagacatcgaagtagaagcagatcccactctagggggcaccgcagagcaagccgagacagaagcgctaagtacaaatag

SEQ ID NO: 193548 - DNA, 255 bp, synthetic construct
  misc_feature 1..255: note = Description of Artificial Sequence: Synthetic coding sequence
  source 1..255: mol_type = other DNA
atggaccacctggagagcttcatcgccgagtgcgaccggcggaccgaactcgctaaaaaacgtctggcggaaacgcaagaagaaatatcagctgaagtttctgctaaggctgaaaaggtacacgagctcaacgaggagatcgggaaactcctggccaaggccgagcagctcggtgctgaaggcaacgttgatgagtctcagaaaatactgatggaagtggagaaggtgagagcaaaaaaaaaggaggcagaatag

SEQ ID NO: 193549 - DNA, 1176 bp, synthetic construct
  misc_feature 1..1176: note = Description of Artificial Sequence: Synthetic coding sequence
  source 1..1176: mol_type = other DNA
atgcccgcctacctgaacctgcagggcagcgtgcggaaggccccccattcgccatcaagggatacgactcgacagcgcatcaagttttccgacgaccgagtgtgtaagtctcacttgctgaactgctgcccacacgacgtgctaagcgggactcgtatggacctgggcgagtgcctgaaggtgcatgatctggctcttcgggccgactatgaaatcgcctcaaaggaacaagatttcttcttcgagctcgacgctatggaccacctacaatcctttatcgccgactgcgaccggcgaaccgaggtggcgaaaaaaagactagccgagactcaggaagaaattagcgccgaagtcgcagcaaaagccgagcgcgttcacgagctgaacgaggagatcggcaagctgctggctaaagtcgagcagctgggagccgagggcaatgtggaggaatcccagaaggtgatggacgaggtggagaaggcacgggcaaaaaagagagaagccgaggaggtctaccggaattcaatgcccgcttccagctttcagcagcaaaagttgcgggtgtgcgaggtatgctcagcttatctgggccttcacgacaacgatagacgcctggctgaccactttggcggcaagctccatttaggttttattgagatcagggagaagcttgaggagctaaaacgcgtggtcgcagagaagcaagagaaacggaatcaggagcgactgaagcgacgggaagagagggaaagggaggagcgggagaagcttaggagaagtcggtcccatagtaagaaccccaaaagaagccggagtagggaacacaggcgacaccggtcccgaagcatgtcgagagaaaggaagcgacgcactcggtccaagtctagggaaaagcgacacagacaccggtcaagatctagttcgcgatccaggtcccggtcacaccagcgctcaaggcacagttcacgagataggtcgcgcgagaggtccaaacggcgttctagtaaagagcggttcagagatcaggatctggcgtcatgcgaccgcgatagaagtagccgtgatagatctccacgcgatagggatagaaaagacaagaaacgtagttatgagagcgcaaatggacgatcggaggataggcggtcttccgaggagagggaggcaggagagatatag

SEQ ID NO: 193550 - DNA, 1179 bp, synthetic construct
  misc_feature 1..1179: note = Description of Artificial Sequence: Synthetic coding sequence
  source 1..1179: mol_type = other DNA
atgagcgcccaggcccagatgcgggccatgctggaccagctgatgggaacgtctcgtgacggagacaccactagacagagaatcaagttctccgacgaccgagtctgcaagtcacacctgctgaattgctgtccacacgacgtactctccggtacccgcatggacctgggggagtgcctgaaggtgcatgaccttgcactgcgggcggattatgagatagccagtaaagagcaggatttcttcttcgagctggacgccatggaccatctgcagagttttatcgcggattgtgatcggcgtactgaggtggcaaagaagcggctggcggagactcaggaggaaatctccgcagaggtggccgccaaggccgaacgcgtccacgaactcaacgaggagataggtaaattgctcgccaaagttgagcaactgggggctgagggaaatgtagaagagtctcagaaagtaatggatgaggtggagaaggcccgtgccaagaagcgcgaggctgaagaagtgtaccggaatagcatgcctgcttcctcctttcagcagcagaagctccgtgtttgcgaggtgtgctctgcatatctaggcctgcatgataatgatcgccgcctggcagaccatttcggaggcaagcttcatctgggcttcatagagattagggaaaagttggaggagctcaaacgggtggtcgccgaaaagcaggagaaacggaaccaggagaggctcaaaagaagggaagagcgagaacgtgaggagcgcgagaaactgagacgtagccgctcccacagtaaaaaccctaaacggtcgaggtccagggagcaccgacgtcaccgctccagaagcatgtcgcgggagcgaaagcggcggactagatccaagtctcgggaaaaacgccatagacatcgctctcgttcctctagtcgcagtagatcgagaagtcaccaacggtcccggcacagctctagggataggagcagggaacgaagcaagcgacgctcttctaaagaaagattcagggaccaggatctcgctagctgtgatcgggacaggtcctctcgcgaccgaagcccgcgtgacagggatcgcaaagacaagaaacgcagctatgagtcggccaatggcagaagtgaggataggaggagctccgaggaaagggaagctggagagatctag

SEQ ID NO: 193551 - DNA, 1170 bp, synthetic construct
  misc_feature 1..1170: note = Description of Artificial Sequence: Synthetic coding sequence
  source 1..1170: mol_type = other DNA
atggtgatccacagccagctgaagaagatccagggcgccagcgagcggatgggagacaccacccgacagcggatcaaattcagtgacgatcgcgtgtgcaaatcacaccttctcaattgctgtccacacgatgttttgtctggaactaggatggaccttggtgagtgtctgaaggtccatgacctggcactcagggcagactacgagatcgcatctaaggagcaggacttcttctttgaactcgacgcaatggatcacctgcagtcatttattgcagactgcgataggcgcacagaagttgccaagaaaagattggcggagacccaggaggagattagcgctgaggtcgccgcaaaggcagagagggtccacgaactgaacgaggagattggcaagctgctggctaaggtggaacagctcggagccgagggcaacgtggaagagagccagaaggtgatggatgaggtcgagaaggccagggctaaaaaaagggaagccgaagaagtgtaccggaattcgatgccagcgagtagctttcagcagcaaaagttacgcgtttgcgaagtgtgctctgcctatttgggcttgcacgacaatgatcggcgactagctgatcacttcgggggaaagctccacctggggtttatcgagatcagggaaaaacttgaggagcttaagagggtggtcgccgagaaacaggagaagcgcaaccaggaaaggctaaaacgacgcgaagaaagagagagagaggaacgggagaagctgcggcggtcccgtagccatagcaagaaccccaagagatctcggtccagggagcaccgcaggcacaggagcagatcaatgtctcgtgaaagaaaacgccgaacgcggagtaagtcccgggaaaagcgccaccggcaccgatccaggtcttcatcccgttcccgatctcgtagccaccagcggagccgccactcctcacgggacaggtccagagagagatctaaacggaggagttctaaggaacggtttcgggaccaggatctcgcttcctgcgatagagatcgctccagccgagatagaagcccaagagatcgggatagaaaagataagaagcggtcatatgagagcgccaatgggcgatcggaggatagaaggagtagcgaggagcgcgaggcgggggagatatag

SEQ ID NO: 193552 - DNA, 1377 bp, synthetic construct
  misc_feature 1..1377: note = Description of Artificial Sequence: Synthetic coding sequence
  source 1..1377: mol_type = other DNA
atggccgccctgggcagccccagccacaccttccggggcctgctgagagagctgaggtacctgagtgctgcaaccgggaggccatatagagatacggctgcctatagatacctggtgaaagccttccgtgcccaccgtgtgacaagcgaaaagctatgccgcgcccagcacgaattgcacttccaggctgccacatacctgtgtctgctcaggagtatcagaaagcatgtggccctccaccaggaatttcacggcaagggcgatactaccaggcaaaggatcaagttttctgatgatcgagtgtgcaagagccaccttctgaactgctgccctcacgatgttttgagcggcacccgcatggatctaggggagtgtctcaaagtacacgacttggccctccgagccgattatgagattgctagtaaagagcaggatttcttctttgaactggacgcgatggatcatctgcagagctttattgcagattgcgatcgaagaaccgaggtagcaaaaaaaaggctcgcggaaacacaagaggagattagcgctgaagtcgccgcaaaagctgaaagggtgcacgagttgaatgaggagattggaaaactgctggccaaagtggagcaattgggggccgagggtaacgttgaggagagtcagaaggtcatggacgaagtggaaaaggccagagctaaaaaaagagaggctgaggaagtatatagaaactccatgccagcctccagcttccagcagcagaagctcagagtctgcgaggtctgctcggcttatttgggactgcatgataatgatagaaggctggctgaccacttcggaggtaaactgcatcttggctttatcgaaattagggaaaagttggaggagctcaaaagggttgtagcagagaaacaggagaagcggaaccaagaaaggctaaagcgacgggaggaacgggaaagggaagagcgggaaaagctgagaagaagtagaagccattctaagaaccctaaaagaagccgctcacgcgagcacagaagacacaggagccggtccatgagtcgggaacgaaagcgtcgcacacgcagtaaatcaagggaaaaacgccacagacatcgctctcgatcttcttcccgctccaggagcagaagtcaccagagatccagacacagcagccgcgaccgatcgcgcgagaggtccaaacgcaggtcttcaaaggaaagattccgtgaccaggaccttgcctcttgcgaccgcgacaggtcttcccgagatcgcagtccaagagatagagatcggaaagacaagaagcgctcatacgagtcagcgaatgggagaagcgaggacaggaggagtagcgaggagagggaggcaggcgagatatag

SEQ ID NO: 193553 - DNA, 1179 bp, synthetic construct
  misc_feature 1..1179: note = Description of Artificial Sequence: Synthetic coding sequence
  source 1..1179: mol_type = other DNA
atgagcgcccaggcccagatgcgggccatgctggaccagctgatgggtacctcacgtgatggcgacaccaccaggcagcgtatcaagttttccgacgatcgggtgtgtaagtctcacttgcttaattgttgcccacacgatgtgctcagtggtacgcggatggatcttggcgagtgtttgaaagtgcacgatctggccctgagggctgattacgagatcgccagcaaggaacaggatttttttttcgagctggatgctatggaccacctccaaagtttcattgctgattgcgaccgcaggactgaggtcgcgaagaaaaggctggcggaaacccaagaagagatctcggccgaagtagctgccaaggctgagcgagtgcacgagctcaacgaagaaatcggtaagctgctagctaaggtagagcagctgggcgctgagggaaatgtcgaagagagtcaaaaggtcatggacgaggttgagaaggcacgcgcgaagaagcgagaggccgaagaggtgtaccgcaactctatgccagccagctcatttcagcagcaaaagcttcgagtgtgcgaagtttgttctgcttatctgggcctccacgacaacgacaggaggcttgccgatcactttgggggtaagctgcatctcgggttcatagagatacgggaaaagctggaggagttgaaacgggtggtggccgaaaagcaagaaaaacgaaaccaagagcgcctgaagcgtcgcgaagagagagagagagaagagagagagaaactccgccgtagtaggtcacacagtaagaatcccaagagaagtaggagcagggagcatcgtcgccaccgttctagatcgatgagcagagagaggaaaagacggacaagatccaaaagtagggagaagagacaccgtcatcgttcaagatctagctctcggagtaggagccgttcacaccaacggtctaggcactcttccagagaccgcagccgtgaacgctcaaaaagaagaagcagtaaggagcgattcagggatcaggatctcgcctcatgtgaccgggatcggagcagccgggatagatcaccaagggacagggatcggaaagacaaaaaacgttcttatgagagcgctaacggacgatctgaagataggaggtcctcagaggagcgagaggccggcgagatttag

SEQ ID NO: 193554 - DNA, 252 bp, synthetic construct
  misc_feature 1..252: note = Description of Artificial Sequence: Synthetic coding sequence
  source 1..252: mol_type = other DNA
atgagcgcccaggcccagatgcgggccatgctggaccagctgatgggaacgtccagggacggctccatgtacttatgtctgcccacctccatttgcaaaggtgtctcagagcgcccgcgaatccgacaggccgaaatccagttggtaaacgagagcaattccgtgatgaccgaatacgccagagtcacatttagcaccgtagttctgatgatgtcgtttctcgagcttgaatggatacttgagaacgtgtag

SEQ ID NO: 193555 - DNA, 1299 bp, synthetic construct
  misc_feature 1..1299: note = Description of Artificial Sequence: Synthetic coding sequence
  source 1..1299: mol_type = other DNA
atgatcagcgccgcccagctgctggacgagctgatgggccgggaccggaacctggcccccgatgagaagcgcagtaacgttcgctgggatcacgagtcagtctgtaagtattacctgtgcggcttctgcccggccgagctctttaccaatactcgcagcgaccttggcccatgcgagaagatccacgatgagaacctcagaaaacagtatgaaaaatcttcccggttcatgaaagtaggatacgagagggattttttacgctatctgcagtccctcctagccgaagtcgaaagaaggatcagaagaggacacgcacgcctggccctatcacagaaccagcagtcttcaggcgctgcgggcccgacaggaaaaaatgaagagaaaatacaagttttgactgacaagattgatgtgttgcttcagcaaatcgaagaattaggttcagagggaaaggtggaagaagcgcaggggatgatgaagttggtggagcagctgaaggaagaacgtgagttgttgagatccaccactagtactatcgagtcatttgcagctcaggaaaaacagatggaagtttgtgaggtttgtggggcattcttgatcgtcggggatgcgcaatctcgcgtggatgaccatttaatgggcaagcaacacatgggctacgctaagattaaagccacagtggaagagctgaaagaaaaactccggaagagaaccgaggaaccagatagagacgagcgcctcaaaaaagaaaagcaggagagagaagagagagagaaggagagggaaagagagagagaggaacgggagaggaagcgtagaagagaggaggaggagcgggaaaaagagagagcacgggatcgcgagcgtcggaaacgatccaggtcccgttcacgacactcctctagaactagcgatcgacggtgctctaggagccgcgatcacaaacggtctagatccagagaaagacgtcggagtcggagtcgggacaggcgacgatcacgatctcatgacagaagcgaaagaaagcacaggagtaggtctcgggatcgccggcgatctaaatcccgcgaccgcaagtcatacaaacatcgcagcaagagtcgcgacagggagcaggatcggaaatctaaggaaaaggagaagcgcgggtcagacgataagaaaagttctgtcaaaagcggctcacgggaaaaacagagcgaagacactaatactgagagtaaagagtctgatactaaaaacgaggtgaacggaacaagcgaggacatcaagtcggagggcgatacacagagcaactag

SEQ ID NO: 193556 - DNA, 240 bp, synthetic construct
  misc_feature 1..240: note = Description of Artificial Sequence: Synthetic coding sequence
  source 1..240: mol_type = other DNA
atgatcagcgccgcccagctgctggacgagctgatgggccgggaccgcaacctcgctcccgacgagaagcggtccaacgtgaggtgggatcacgagagcgtgtgtaaatattacttgtgcgggttttgcccggccgagctattcaccaacactcgtagcgacttagacgtcttcggcaggggagacaacattcgagacgtctctaaatttttagaggacgataaatggatggaggaatag

SEQ ID NO: 193557 - DNA, 1299 bp, synthetic construct
  misc_feature 1..1299: note = Description of Artificial Sequence: Synthetic coding sequence
  source 1..1299: mol_type = other DNA
atgatcagcgccgcccagctgctggacgagctgatgggccgggaccgcaacctggccccggatgaaaagcgcagtaatgttcgttgggatcacgagtcagtttgcaagtactacctgtgtggattttgtccggccgagctctttaccaatacgcgcagtgaccttggaccttgcgaaaagatccacgatgagaatctacgcaagcagtacgaaaaatccagccggtttatgaaggtcggctacgagcgcgattttctcagatacctccagtcactcctggctgaggtcgaacgccgcatccggagaggccacgcacgtctggccctgtctcagaatcagcagtcctccggagccgctggccctactggaaagaatgaggagaagatacaggttcttaccgacaaaatcgatgtcttgctgcaacagatcgaggaattaggcagtgaggggaaggtagaggaggcccagggcatgatgaagctggtagagcagttgaaagaagaacgcgaattattacggtccaccacttccaccatcgagagttttgctgctcaggagaaacagatggaagtatgtgaggtgtgcggcgcgttcctaattgttggtgatgcccaatccagagtagatgaccatctcatgggaaaacagcacatgggttatgccaaaatcaaagctaccgtggaggaactcaaggagaagctgagaaagaggactgaggaacccgaccgtgacgaaagattaaaaaaggaaaagcaggaacgcgaggagcgcgagaaagaaagggagagagaacgggaagagcgcgagagaaaacgcagacgggaggaagaggaaagagagaaggagcgagccagggatcgtgaaagacggaaaagatcaagaagcaggtcacgtcactcttcccgcacatctgaccggcggtgctctcggtctcgcgaccataagaggtcaaggtccagggaacgcaggcgatcaagaagtcgtgacaggcgcagatctagatctcatgacaggagcgaacgaaaacacagatcacgcagcagagatagacggcgcagcaagtcccgggatagaaaaagttacaagcacaggtcaaagtccagagacagagagcaggatcggaaaagcaaagagaaggaaaagagggggtctgatgataaaaagtcatccgtgaagagcggtagccgggaaaaacagtccgaagacacaaacacagaatcaaaagagtcagacactaagaacgaagtgaacggtacgtcggaagacataaaatccgaaggcgacacccagtccaattag

SEQ ID NO: 193558 - DNA, 711 bp, synthetic construct
  misc_feature 1..711: note = Description of Artificial Sequence: Synthetic coding sequence
  source 1..711: mol_type = other DNA
atgatcagcgccgcccagctgctggacgagctgatgggccgggacagaaatctggctcccgacgagaagcgcagcaacgtgcgctgggaccatgaatctgtgtgtaaatattatctttgtgggttctgccccgctgaacttttcaccaacaccaggtctgatctgggtccttgcgagaaaatccacgacgagaacctgcgcaagcagtacgagaagtcttcccggtttatgaaagttgggtatgaacgagattttctcagatacctgcaaagcttgctcgcagaggtcgagagaaggattagacgcggccacgctaggctcgcactgtctcaaaatcagcaatcttctggcgcagctggccctactggaaaaaacgaggagaagattcaggtccttactgacaaaatagacgtgctgctccagcagatcgaagagctgggctccgaaggcaaagttgaggaggcacaggggatgatgaaattagtggaacagttaaaggaagagcgcgagctgctgagatccacaacttccaccatcgagagctttgccgcacaggaaaaacagatggaggtgtgtgaggtttgtggcgcctttctcattgtgggtgatgctcagagccgggtggatgaccaccttatgggaaagcagcatatggggtacgctaagattaaagccacagttgaagagaagaagaagaagaaaaagaaatag

SEQ ID NO: 193559 - DNA, 1071 bp, synthetic construct
  misc_feature 1..1071: note = Description of Artificial Sequence: Synthetic coding sequence
  source 1..1071: mol_type = other DNA
atgaaggtgggctacgagcgggacttcctgcggtacctgcagagcttgctggctgaggtcgaaagacggattcggcgtggacacgcccgccttgccctgtctcagaatcagcaaagcagcggggccgccggtcccacaggaaagaacgaagaaaaaatccaggtcttgacagacaaaattgatgttttactgcagcagatcgaagagctgggctcagaagggaaagtcgaagaggcgcaggggatgatgaaactggttgaacaattgaaagaggaacgggagctcctgagaagcaccacctccacaatcgaaagcttcgcggctcaggagaaacaaatggaagtttgcgaggtttgtggcgctttcttgattgtgggggatgctcagtcccgggtcgatgatcatctcatgggaaagcagcacatgggctatgccaagatcaaggcgactgttgaagagctgaaggaaaaactgcgcaaacgcacagaggaacctgaccgcgacgaaagactgaagaaggaaaagcaggaaagagaggagcgggagaaagaacgggaaagagagagggaagagcgtgagagaaaaagaaggagagaggaagaggagagagagaaagagcgtgctcgagacagggagaggcggaaaaggtcaagatccaggtctagacactcatcacggacctcggacagacgatgcagccggtcacgtgatcacaagagatcgagatctagagaacggagacgatcacggagccgcgacagacgacggagcaggtcacatgatcggtcagagaggaaacacagatcccggtctcgggacaggcgacggtccaagtccagggaccgcaagagctataagcatcggtccaaatcacgggatagagaacaggaccggaagtctaaggaaaaagagaagcgcgggagcgacgacaaaaagtctagtgtgaagtcaggctccagggagaagcagtcggaagacaccaatactgaatcaaaggaatcagataccaaaaatgaggttaacggcaccagcgaagacattaaaagcgaaggactgttcgtcaccgtgtag

SEQ ID NO: 193560 - DNA, 1017 bp, synthetic construct
  misc_feature 1..1017: note = Description of Artificial Sequence: Synthetic coding sequence
  source 1..1017: mol_type = other DNA
atgagcctgagcgccttcaccctgttcctggccctgatcggcggcacatcgggccagtactacgattatgacttcccactgtcaatctacggccagagctctcccaactgtgccccagagtgcaactgtcccgaatcatacccttcagcaatgtactgcgatgaactgaagttgaagtccgtgcccatggttccacctggaattaaatacctgtacctgcgcaataatcagattgatcacatagacgagaaagcttttgaaaacgtgacggacctgcagtggctaatcttggaccacaatttacttgagaattctaaaattaagggacgcgtgttttcaaaactcaagcaattaaagaaactgcacataaatcataacaatctcacagaatcagttggacccctaccgaaaagcctcgaggacctgcagttaacgcataataaaattaccaagctgggttcattcgaaggactcgtgaatctcaccttcatccatctgcaacacaacagactcaaggaggacgccgtcagtgctgcattcaagggtctgaaaagcctcgaatacctagaccttagctttaatcagatcgcccggctacccagtgggctgcccgtgagtctgcttacattgtacttagataataataagatatctaatatccccgacgagtacttcaagcggttcaatgctctccagtatctgagacttagtcacaacgaactggccgattctggcattcccggcaactctttcaatgtctcgagtctggttgagttggacttatcttacaacaagctgaagaacataccaaccgtcaatgagaatctcgaaaactattaccttgaagtaaaccagctcgaaaagttcgacatcaaatccttttgtaaaatcctaggacccctgtcttattcaaagatcaagcacctgagattggacgggaatagaatcagtgagacttcacttccacccgatatgtacgagtgtctgcgtgtggcaaacgaagtgactttgaactag

SEQ ID NO: 193561 - DNA, 2100 bp, synthetic construct
  misc_feature 1..2100: note = Description of Artificial Sequence: Synthetic coding sequence
  source 1..2100: mol_type = other DNA
atgaagcagcggttcagcgccctgcagctgctgaagctgctgctgctcctacagccgccactgcccagagcgctgcgcgaggccttgtgcccagagccttgtaactgcgtccccgatggcgccctgagatgcccggggccaaccgccgggctcactcgcctcagcctagcgtacttacctgttaaggtgatcccatcgcaagccttccgggggttgaatgaagtgataaagatagaaattagccaaattgactctctagagagaattgaagcaaacgcgttcgataacctgctgaatctgtcagagatcctaatacagaacactaagaacctgcgttacatcgagccaggggcgttcatcaacctgcccaggctcaagtacctgagtatttgcaacacagggataaggaagttcccagacgtgactaaagtcttttcgtctgagtcaaatttcattttggagatctgcgataatctgcatatcaccacaatccctggcaatgcctttcagggtatgaacaacgaatccgtgactctgaaactttacgggaatggatttgaggaggtccagtctcacgcctttaatggaacaacattgacttctctggaacttaaggaaaacgttcacctggagaaaatgcataatggcgcgttccgcggcgctactgggccaaaaaccttagatatatcgagcactaagctgcaagcattgccttcgtatggcctggagtccatacagagattgatagccacctcatcctacagcctgaaaaaactcccttcccgggagacatttgtgaatctgctggaggctaccctcacataccccagccactgttgcgcctttaggaatctgcccacaaaggagcagaatttctcccactccattagtgagaacttttccaagcagtgtgaaagcaccgtccggaaggtgaataacaaaaccttgtattcttctatgctcgctgaaagtgagttgagcggctgggattatgagtacgggttttgcctacctaaaactcctcgttgcgcccctgaacctgacgcttttaatccatgcgaagacataatgggctatgacttcctgcgagtactgatctggctaattaacattctcgctattatgggcaatatgactgtcctgtttgtgctgcttacatcaagatataagttaacagtaccgcgttttctgatgtgtaacctctctttcgcagacttttgcatggggctctatctgctccttattgctagcgtggacagccagacgaaggggcaatactacaatcatgccattgactggcagacaggaagtggatgttctacagccggcttctttacagtatttgcctctgagctgagtgtctacactttgaccgtgattaccctcgagcggtggcatacaattacatatgccatccaccttgaccagaagctcagactcaggcatgccatcctgataatgctcggcgggtggctcttttccagcctaattgcaatgctaccgctggttggagtgagtaattacatgaaggtgtcaatctgttttcctatggacgtggagactaccctcagccaggtctacatccttaccattcttattttaaacgtggtcgccttcttcataatttgtgcctgctatataaagatttattttgcggtgagaaatcctgagctgatggctactaacaaagatacaaaaattgccaaaaagatggccatcctgattttcacagacttcacatgtatggctccaattagcttcttcgcgatatctgcagcttttaaggtccccctgatcacagttactaacagcaaagtgctgctggtactcttctatccaataaactcctgcgctaacccctttctgtatgcaatttttaccaagaccttccagcgggatttctttctgctcctgtcaaaattcggatgctgcaaacgtagagctgaactgtacagaaggaaagatttctctgcttataccagcaactgcaagaatggctttactgggtcaaacaaaccttctcagagcacattgaagctttcaaccttgcattgccaagggactgctctattagacaagacccgatacacggaatgctag

SEQ ID NO: 193562 - DNA, 1914 bp, synthetic construct
  misc_feature 1..1914: note = Description of Artificial Sequence: Synthetic coding sequence
  source 1..1914: mol_type = other DNA
atgaagcagcggttcagcgccctgcagctgctgaagctgctgctgctgctgcagccccccctgccaagagcacttagagaagcactgtgcccagagccatgcaattgcgtgcccgatggtgccctgagatgcccaggacctacagcaggactcaccaggcttagcctggcatatttgcccgtgaaagtgatcccatcccaggccttccgcggactgaacgaggtgatcaagatcgagatttcccaaatagactccctggagaggattgaggccaacgccttcgacaacctcctcaatctctcagaaattctaatccagaacaccaagaacctgcgctatattgagccgggagcttttattaacttaccacgtctgaagtatttatcaatctgtaacaccggaattcggaagtttcccgacgtcacaaaagtattttcaagtgagagcaattttatcctggaaatatgtgataatttacacatcacaacaatccccggcaacgcttttcaggggatgaacaacgaatctgtgactctgaagctgtacggcaacggatttgaagaggtgcagagccacgctttcaacggaaccacactcacatctttagagctaaaagagaatgtgcatctcgagaagatgcacaacggagcctttagaggggcgactgggcctaagaccctgcaaaatttctcccattctatttcagaaaatttttccaagcagtgtgagagtaccgtgaggaaagttaataacaagacgctgtatagttcaatgctggctgaatccgaactgtctggatgggactatgaatacggattttgtctgcccaagactcccaggtgcgctcccgaacccgatgcattcaacccatgcgaggatattatgggctatgatttcctccgagtactgatttggttgataaacatcctggccattatgggcaacatgactgtactcttcgtactgctgacttccaggtataaactgactgttccacgttttcttatgtgtaacctgtcctttgccgatttttgtatgggactttatctgttacttatcgccagcgtcgattcacagaccaaaggccaatattataatcatgccatcgattggcagaccgggagtggctgttctacggcaggtttctttactgtgttcgcatccgaactgagcgtgtataccctgaccgtgatcaccctggaaaggtggcacactatcacttacgcaatccacctggatcagaagctccgccttcggcatgcgattctgataatgctgggggggtggctgttttcttcccttatcgcgatgttacctctagtgggggtttcaaactatatgaaagtcagcatttgttttccaatggatgttgagaccacactgagtcaggtctatatccttacgattcttattctcaatgtagtggcctttttcattatctgcgcttgttacataaagatctatttcgctgtgaggaaccctgagctgatggcgaccaacaaagacactaagatagccaagaagatggccattctgatctttaccgatttcacctgcatggcccccattagcttcttcgcaatctcagcggcattcaaggttcctctgataactgtgacaaacagtaaggtcctcctggtgctcttctatcctataaacagttgcgcgaacccctttttgtacgccatctttaccaagacattccagcgagacttcttcctattgctctcaaaattcgggtgttgcaagaggagagcagaactgtatcgccgaaaagattttagtgcttacacatcaaattgcaaaaacggctttaccggttcaaataaaccctcccagtccaccctcaaattgtctaccctgcactgccaagggactgccttactggacaaaacgagatacactgagtgctag

SEQ ID NO: 193563 - DNA, 978 bp, synthetic construct
  misc_feature 1..978: note = Description of Artificial Sequence: Synthetic coding sequence
  source 1..978: mol_type = other DNA
atgaagcagcggttcagcgccctgcagctgctgaagctgctgctgctgctgcaaccacctctccccagggcactgcgcgaggctctctgtcctgaaccctgcaattgtgttcccgacggagccctgaggtgccccggcccaaccgccggtcttacccgcctgagtctcgcatatctacctgtgaaggtcatcccaagccaggcgttcagaggactcaatgaggtgattaaaatcgagatctcgcagatcgactccctcgagcggattgaggctaacgcgtttgacaacttgctcaacctgagcgagattcttattcagaatactaagaacctgcggtatatcgagcccggcgcattcatcaatcttccgcgactcaaatacctgagcatctgcaatactggtattcgcaaatttcccgacgtgacaaaagtcttttccagcgaatccaatttcatcctggaaatctgtgacaacctgcatattacgaccataccaggtaacgcctttcagggtatgaataacgaaagcgtgactttgaaactctatggcaatggttttgaggaagtgcagagtcatgccttcaacggcaccacactgacttctctggaactgaaggaaaacgtgcatctggaaaagatgcacaatggtgcatttcgcggggctactggtccaaagactctggacatcagctcaactaagttgcaggccttaccaagctatggactggagtccattcagcggctaatcgccacctcaagttattctttaaagaagcttccctctcgggagacatttgtcaaccttttggaggccaccctgacatatccctcgcactgttgcgcctttcgcaacctccctacgaaggaacaaaatttcagccactcaatcagcgaaaacttctcaaagcagtgcgagtcgacagtgagaaaagtaaataacaagaccctgtctaagccacgcattaatggataccaatag

SEQ ID NO: 193564 - DNA, 990 bp, synthetic construct
  misc_feature 1..990: note = Description of Artificial Sequence: Synthetic coding sequence
  source 1..990: mol_type = other DNA
atgaagcagcggttcagcgccctgcagctgctgaagctgctgctgcttttacagccgcccttgccccgtgcactgcgtgaggccctgtgcccagagccttgtaattgcgtgccagacggtgctcttcgctgtcctggccctactgccggacttactcgcttgagcttggcctacctcccagtcaaggttatacctagccaggcttttaggggcctcaacgaggtgatcaaaatcgagattagccagattgacagtttagagcggattgaggcaaatgctttcgacaacctccttaatctaagtgagattctgatacagaacaccaaaaacctgcgctacatcgagcccggcgcttttatcaacctgcccaggttaaaatatttatccatctgcaacacaggaattaggaagtttcccgacgtaacgaaggttttctcatccgaatccaacttcattctcgagatttgcgataacctccatattacgacaatccccgggaacgcattccaaggcatgaataacgaatcggtgaccctgaagctgtacgggaatggattcgaggaagtccagtcacacgcattcaatggcactactttgacaagcctcgagctcaaggaaaatgtgcacctggaaaaaatgcacaatggtgcattccgtggggctaccggtccgaagaccttggatatctcctccacaaaactccaggcacttccctcttacggtttggaatccatccagcgcctgatcgcgacgagttcatactccttgaagaagctcccttcccgggagacctttgtcaacctgctggaagctacactcacctacccctctcactgctgtgctttccgaaatctgccaacaaaggagcagaattttagccacagcatttccgagaatttctctaagcagtgcgagtcaaccgtacgcaaagtgaacaataaaaccctcttgctgcatggcgccttgagtgccgcgcattcactgtcatag

SEQ ID NO: 193565 - DNA, 2019 bp, synthetic construct
  misc_feature 1..2019: note = Description of Artificial Sequence: Synthetic coding sequence
  source 1..2019: mol_type = other DNA
atgaagcagcggttcagcgccctgcagctgctgaagctgctgctgctcttacagccccctctgccccgtgcactccgggaagccctgtgccctgagccctgtaactgcgtgcctgacggggctctgcggtgcccgggacctaccgcgggcctaacaaggctaagccttgcatatctcccggtgaaggtgataccttcccaggctttcaggggtcttaacgaagtgatcaaaattgagattagtcagatcgactccctggagcgcatcgaagcgaacgcctttgacaacctgttaaacctgtcagagatattaatccagaataccaagaacctgagatacattgaacccggtgcctttattaacctgccacgcctaaagtatctgagcatctgcaatactggtattcgcaagttcccagatgttacaaaggtgttctcgagtgaatctaacttcattcttgaaatttgtgacaatctgcacattactacgattccaggaaatgcattccagggaatgaacaatgagagcgtgactctaaagctgtatggaaacggattcgaggaagtccaatcacacgcctttaatgggacaacactgacgtccctcgaattgaaagagaatgtgcaccttgagaagatgcacaacggcgcattcaggggcgctactggacctaagacactggatattagtagtaccaagttacaggccctgccgtcctacgggctggaatcgatccagcgcttgatagcgacttcctcctacagtttgaaaaaattgccaagccgggaaaccttcgtgaatctactggaagctaccctgacttatccgtcccattgttgcgccttccgcaacctgcctaccaaagattactcatcaatgctcgcagaaagtgaactttctggatgggattacgagtatggcttttgcttgccaaaaacgccaaggtgtgctcctgaaccagacgccttcaatccttgcgaggacatcatgggctatgacttccttcgcgtcctcatctggctgatcaatatcctggctatcatggggaacatgaccgtgttgttcgttctgctaacctctcgttacaagctaactgtgccacgctttctgatgtgcaatctgagttttgcagacttctgtatgggactgtacctgctcctgatcgctagtgtcgacagccagacaaagggccagtactacaaccatgcaatcgactggcaaactggatcaggatgctccactgccggcttcttcacagtattcgcatcagagctcagcgtgtatactctgacagtgattacgcttgagcgttggcataccataacgtatgcaattcacctagatcagaagctgagactgcggcatgctatcttgatcatgctgggtggttggctgttctcctccctgattgctatgctgccacttgtgggtgtgtcgaactacatgaaggtctcaatctgcttccctatggacgtcgaaactactctgagtcaggtgtacattcttaccattctcatcttaaacgtggtagcctttttcattatctgtgcctgctacatcaagatttacttcgcagtcagaaatcccgagctcatggcaactaataaggatactaagatcgctaaaaagatggcaattcttatctttaccgactttacttgtatggcccctatttctttctttgctatctccgccgcgttcaaagtccctctgattacagtcaccaattccaaggttcttctggtgctgttttacccaattaactcttgcgcaaacccttttctatacgccatctttactaagacatttcaacgggacttcttcctgctgctctccaagttcgggtgctgcaaaagaagagcggagctctaccgcagaaaggatttttcagcttacacgagtaattgcaaaaacggattcaccggttccaacaaacctagtcaaagcacgctgaagttatcaactctccactgccagggaacggcactgctcgataaaacacggtacactgagtgctag

SEQ ID NO: 193566 - DNA, 396 bp, synthetic construct
  misc_feature 1..396: note = Description of Artificial Sequence: Synthetic coding sequence
  source 1..396: mol_type = other DNA
atgacccccctgctgaccctgatcctggtggtgctgatgggcctgccactagcgcaggcattagactgtcacgtttgtgcgtacaacggggacaattgcttcaacccaatgcggtgtccagccatggtggcctactgcatgacaacccgcacgagtgccgctgaagccatttggtgccatcagtgcactggttttggcggctgctcacacggctccagatgccttcgtgattctacccactgtgtcacaactgctactcgcgttctgtccaacaccgaggacctcccacttgtgactaagatgtgccacattggctgtcctgatatacctagcctcggactcggtccctacgtgtccattgcctgctgtcagacttcgctgtgcaatcacgattag

SEQ ID NO: 193567 - DNA, 351 bp, synthetic construct
  misc_feature 1..351: note = Description of Artificial Sequence: Synthetic coding sequence
  source 1..351: mol_type = other DNA
atgacccccctgctgaccctgatcctggtggtgctgatgggcctgccactggctcaggccttagattgtcatgtctgtgcctacaacggtgacaactgctttaatccgatgagatgcccagctatggtagcttactgtatgacaactcggacatactatacgccaaccagaatgaaagtcagcaaatcgtgtgtgccacggtgcttcgaaactgtttatgacggatatagcaagcatgcttccacaacaagttgctgccaatatgatctgtgcaatgggaccggtctggctactcctgccactctggctttagcacccatcctcttggctacactgtgggggctgctctag

SEQ ID NO: 193568 - DNA, 351 bp, synthetic construct
  misc_feature 1..351: note = Description of Artificial Sequence: Synthetic coding sequence
  source 1..351: mol_type = other DNA
atgacccccctgctgaccctgatcctggtggtgctgatgggcctgccactggcccaagcactggattgccacgtttgcgcctataatggcgacaactgcttcaaccctatgaggtgccccgcaatggttgcctactgtatgacaacaaggacatactacacacccaccaggatgaaagtgtcaaaatcctgtgtgcctcggtgtttcgagacagtatatgacgggtatagtaaacatgcgtccacaacatcctgctgtcagtatgacttgtgcaatggtaccgggctcgctacgcccgccaccctggctctcgcccctatcctcttagctacactctgggggctgttgtag

SEQ ID NO: 193569 - DNA, 351 bp, synthetic construct
  misc_feature 1..351: note = Description of Artificial Sequence: Synthetic coding sequence
  source 1..351: mol_type = other DNA
atgacccccctgctgaccctgatcctggtggtgctgatgggcctgcccttggcacaggcactagactgccacgtctgcgcatacaacggtgacaattgcttcaatcctatgagatgcccggctatggtggcttattgtatgacgacgcgcacatattacacacctactcggatgaaggtcagtaaatcctgtgtccccagatgcttcgaaacggtctatgatggctacagcaagcatgcatccaccacctcatgctgccagtatgacctctgtaacgggactgggctcgccactccagccaccctcgccctggctccaatcctccttgctaccctgtggggactactgtag

SEQ ID NO: 193570 - DNA, 249 bp, synthetic construct
  misc_feature 1..249: note = Description of Artificial Sequence: Synthetic coding sequence
  source 1..249: mol_type = other DNA
atgacccccctgctgaccctgatcctggtggtgctgatgggcctgcccctggcccaggctttggactgtcacgtgtgtgcatataatggtgacaattgtttcaatcccatgaggtgccccgcgatggtggcgtactgtatgaccaccaggacctactacacgcctacacggatgaaggtgagcaagagctgcgttccgagatgctttgaaaccgtgtatgacggatatagcaagcacgcctctacttag

SEQ ID NO: 193571 - DNA, 255 bp, synthetic construct
  misc_feature 1..255: note = Description of Artificial Sequence: Synthetic coding sequence
  source 1..255: mol_type = other DNA
atgacccccctgctgaccctgatcctggtggtgctgatgggcctgcccctggcacaggctctcgattgtcacgtgtgtgcctacaacggggacaactgcttcaatcccatgcgatgcccagcaatggtcgcttactgtatgaccactagaacatactatactccgacaagaatgaaagtctccaaaagttgtgtcccaaggtgttttgaaactgtatacgatgggtactctaaacacgctagcacgacctcatag

SEQ ID NO: 193572 - DNA, 1041 bp, synthetic construct
  misc_feature 1..1041: note = Description of Artificial Sequence: Synthetic coding sequence
  source 1..1041: mol_type = other DNA
atggaccccgcccggaaggccggcgcccaggccatgatctggaccgccggctggctgctgctgctcctcttgcggggcggcgctcaggcactggagtgttacagctgtgtgcagaaagccgatgacggctgctccccaaacaagatgaagactgttaagtgcgccccaggggtggatgtgtgtactgaggctgttggggcagtggagactatccatgggcagtttagcctggccgtgagaggttgcgggagtggactgcctgggaagaacgatcggggtctggacttgcatgggctgttggctttcattcagttgcaacaatgcgcccaggaccgctgcaacgctaaattgaatctgacatcccgagccttggacccagctggcaacgaaagcgcttacccgccgaacggcgtggaatgctatagctgcgtgggcttgagccgcgaggcctgtcagggtacctctcctcccgtagtttcatgttacaacgccagcgaccatgtgtacaagggttgttttgatgggaatgtgaccctaacagccgcgaatgtgacagtgtccctccccgtgagagggtgcgtgcaggatgagttctgcaccagggatggagttaccggtcccggctttacactgagcggcagttgttgccagggatcacgttgtaactccgaccttagaaataagacgtacttcagccctcggattccaccgctggtacgcctccccccacccgagccaacgaccgtggcaagtacaactagcgttacaactagcaccagcgctccagttcggcccacttcaacaaccaagcctatgcccgctcccacaagtcagacaccccgccagggggttgagcatgaggcctccagagacgaggaaccacgcttaacaggcggggccgccggccaccaggataggtctaacagtggccagtatcctgcaaaaggcggtccacagcaacctcacaataaaggctgtgtagcgcccaccgccggactggccgcccttctgctggccgtcgccgctggggttctcctgtag

SEQ ID NO: 193573 - DNA, 885 bp, synthetic construct
  misc_feature 1..885: note = Description of Artificial Sequence: Synthetic coding sequence
  source 1..885: mol_type = other DNA
atggaccccgcccggaaggccggcgcccaggccatgatctggaccgccggttggctgttactgctgctcctccgggggggcgcccaagcgctcgagtgctattcttgtgtgcagaaggcggatgatggctgtagtcctaataagatgaagaccgtcaagtgcgctcctggggttgatgtgtgcaccgaggctgtcggagccgtggaaactatccacggacaatttagcctcgctgtaagaggatgcggttccggactgcctggtaagaatgataggggtttggacctgcacggattattagcctttatccagctgcagcagtgcgctcaggatcggtgtaatgctaagcttaatctcacctcacgagccctggaccccgccgcagccgcaaacgttaccgtttctctacccgtgagaggctgtgtgcaggacgaattctgtactcgggatggagtcaccggccctggtttcactttgtctggatcctgttgtcagggcagtcggtgcaattctgatctacgcaacaaaacctacttctcgcccaggatccccccactcgtacgactgcccccaccagagcccaccaccgtagccagcactacctccgtcaccacctctacaagcgcgcccgtccggcctacatccaccactaagccgatgcccgctcccacgagccaaactcccagacagggcgtcgaacacgaagcatctcgggacgaagagccccgtctcaccggcggtgccgccggccaccaggatcgatcaaacagtggacagtacccagcaaaaggcgggccccagcaacctcacaataagggttgcgtcgctcccacagccggcctagcagctcttctgctggccgtcgcggcaggggtgttgctgtag

SEQ ID NO: 193574 - DNA, 516 bp, synthetic construct
  misc_feature 1..516: note = Description of Artificial Sequence: Synthetic coding sequence
  source 1..516: mol_type = other DNA
atggagcccggccccgccctggcctggctgctgctgctgagcctgctggctgactgcctgaaggccgcccagtcaagggatttcacggtgaaagatattatctacttacacccatcaactacaccttatcccggaggcttcaagtgtttcacttgcgagaaggccgcagataactatgaatgcaaccgctgggcaccagatatctactgcccccgggagaccagatactgttacacccagcacacaatggaagtgacaggaaatagcatcagtgtcactaaaaggtgcgtgccccttgaagaatgcttatccactgggtgccgggactccgagcatgaggggcacaaagtgtgtacctcctgttgcgaggggaacatctgtaatttgcctctgcctcgaaatgagactgacgcaacattcgcaacaacatccccaatcaaccagactaacgggcatccccggtgtatgtctgttatcgtgtcctgcctctggctgtggctggggctgatgctgtag

SEQ ID NO: 193575 - DNA, 516 bp, synthetic construct
  misc_feature 1..516: note = Description of Artificial Sequence: Synthetic coding sequence
  source 1..516: mol_type = other DNA
atggagcccggccccgccctggcctggctgctgctgctgagcctgctcgccgattgtctcaaagccgcacaatcacgagatttcacagtcaaggatataatttatctccacccatctactacaccataccccgggggctttaagtgcttcacatgtgagaaggccgcagataattacgaatgcaatcgatgggcacctgacatctactgccctagggaaacccgctattgctatactcagcacactatggaagttaccggcaatagcatctccgtcacaaagaggtgtgtgcccttggaagagtgcctgtctacaggctgccgcgactcagaacatgaaggccacaaagtgtgcacatcctgttgtgagggcaacatctgcaaccttcctctccctcggaacgagacagacgccactttcgccacaacatctcccatcaaccaaacaaacggacaccccagatgcatgtcagttatcgtctcttgtctttggctgtggctgggccttatgctgtag

SEQ ID NO: 193576 - DNA, 162 bp, synthetic construct
  misc_feature 1..162: note = Description of Artificial Sequence: Synthetic coding sequence
  source 1..162: mol_type = other DNA
atggagcccggccccgccctggcctggctgctgctgctgagcctgcttgcagactgcctgaaggctgctcaatcaagagactttaccgtgaaagacatcatctatttgcacccaagcacaacaccatacccggggggtttcaaatgcttcacctgtgaatag

SEQ ID NO: 193577 - DNA, 969 bp, synthetic construct
  misc_feature 1..969: note = Description of Artificial Sequence: Synthetic coding sequence
  source 1..969: mol_type = other DNA
atggcccggtgcttcagcctggtgctgctgctgaccagcatctggactacaaggctgctcgtacaggggtctctccgagcagaagaactgtcgattcaggttagttgtcggattatgggtatcacgctggttagcaagaaagccaaccaacagctcaacttcaccgaagccaaggaggcctgtagacttctgggcttatctctcgcaggaaaagaccaggttgaaacagcccttaaggcgtccttcgaaacctgttcatacgggtgggtaggggatgggtttgtggtgatcagtcggatctctcctaatcctaagtgtggtaaaaacggagtgggagtcctgatttggaaagttcccgtcagtcgtcaatttgctgcctactgttataactcctcggacacctggactaatagctgtatccctgagattatcacaaccaaggacccaatcttcaatacccagaccgcgacccagacaaccgaatttattgtttctgacagtacctatagtgtggcgagtccctattccaccatccccgctccaactacgacacctcccgcgcccgcctcaacttcgatcccacggcgcaagaagctgatctgcgtgaccgaggtgttcatggagaccagcactatgtctacagagacggaacccttcgtggagaataaagccgccttcaagaacgaggctgccgggttcggaggggtgcctaccgctctgcttgtcctcgccctgctattcttcggagccgccgccggtttagggttttgttatgtgaagcggtatgtcaaggccttcccatttaccaacaaaaaccagcaaaaagagatgatagaaactaaagtggtcaaggaggagaaagcaaatgacagtaatcctaacgaagaatccaaaaaaactgacaagaatcctgaggaaagcaagagcccaagcaagactactgtacgctgtctggaggcggaagtctag

SEQ ID NO: 193578 - DNA, 387 bp, synthetic construct
  misc_feature 1..387: note = Description of Artificial Sequence: Synthetic coding sequence
  source 1..387: mol_type = other DNA
atgcggaccgccctgctgctgctggccgccctggccgtggccaccgggcccgcattaaccctcagatgccacgtatgtacgagctcctctaattgcaaacacagcgtggtgtgcccagcatcgtctcgcttctgtaagacaacgaatacagtagagccactccgagggaatctggtgaaaaaagactgcgctgagagctgcacaccatcatatacgctccaggggcaggtctcaagcggaacatctagcacacagtgttgccaggaggatctatgtaacgagaaactacacaacgcagcgccaactaggactgccctggcccatagcgccctgtccttggggctcgccctgagtcttttagccgtcattttagccccctcactctag

SEQ ID NO: 193579 - DNA, 396 bp, synthetic construct
  misc_feature 1..396: note = Description of Artificial Sequence: Synthetic coding sequence
  source 1..396: mol_type = other DNA
atgaagatcttcctgcccgtgctgctggccgccctgctgggcgtggagcgggctagcagtttaatgtgcttcagttgtctgaatcagaagagtaatctatattgcctcaaaccaacaatatgctctgatcaagacaactattgcgttactgtcagcgccagcgctggaataggcaacctcgtgacattcgggcatagcctgtcaaagacttgcagccctgcatgtccaatccctgaaggggtcaatgtgggcgtcgccagcatgggaatcagctgctgccagtcattcctctgcaactttagtgccgccgatgggggcctgagggccagcgtcactctgcttggggctgggctgctgctgagccttttgcctgctttactacgctttggcccttag

SEQ ID NO: 193580 - DNA, 396 bp, synthetic construct
  misc_feature 1..396: note = Description of Artificial Sequence: Synthetic coding sequence
  source 1..396: mol_type = other DNA
atgaagatcttcctgcccgtgctgctggccgccctgctgggcgtggaacgcgctagcagcctgatgtgtttctcctgtcttaatcagaaaagtaacctctattgtctcaagccgactatatgcagcgaccaggataactattgtgtcacagtgagtgctagcgccggcattggtaatctggtcacgttcggacattccttaagcaaaacgtgttcgcctgcctgccctattccagagggagtgaatgtgggagtggcctccatgggcatcagctgctgtcagtctttcctatgcaacttcagcgccgcagatggcggactccgcgcttctgttacactgctaggagccggtctcctgctgagtctgctgcccgcccttctgaggtttggtccctag

SEQ ID NO: 193581 - DNA, 267 bp, synthetic construct
  misc_feature 1..267: note = Description of Artificial Sequence: Synthetic coding sequence
  source 1..267: mol_type = other DNA
atgaagatcttcctgcccgtgctgctggccgccctgctgggcgtggagagagccagcagcctgatgtgctttagctgcttaaatcagaaatctaatttgtactgtctcaaaccgacaatatgttcagaccaggataattactgcgtcaccgtctcagcatcagccggaattggaaacctggttacgtttggacactcactgagtaaaacttgctccccagcctgtcccatcccagagggggtaaacgtcggtgtggcgagcatgtag

SEQ ID NO: 193582 - DNA, 396 bp, synthetic construct
  misc_feature 1..396: note = Description of Artificial Sequence: Synthetic coding sequence
  source 1..396: mol_type = other DNA
atgaagatcttcctgcccgtgctgctggccgccctgctgggcgtggagcgtgctagttcactgatgtgtttctcctgcctgaatcagaagagtaacctgtattgcctgaagcccactatttgcagtgaccaagataactattgcgtcacagtgagtgcttccgcggggatcggtaatctggttaccttcggacacagtttatccaagacctgtagcccggcgtgtcctatacccgagggcgttaacgtcggagtggcgtctatgggcatctcgtgttgtcagtctttcctgtgcaacttctccgctgctgatggcgggttgagagcatccgttaccctgctgggcgcggggctgctcctgtctcttctcccggcattactgcggtttggcccatag

SEQ ID NO: 193583 - DNA, 396 bp, synthetic construct
  misc_feature 1..396: note = Description of Artificial Sequence: Synthetic coding sequence
  source 1..396: mol_type = other DNA
atgaagatcttcctgcccgtgctgctggccgccctgctgggcgtggaaagagcgagttctcttatgtgcttttcctgtctcaaccagaaaagcaacctgtattgcctgaaacccacgatttgcagtgaccaggataactattgtgtcaccgtgagcgcttccgccggaatcggcaacctcgtgacttttggacactccctgtcaaagacatgctcccccgcgtgcccaattcccgaaggggtgaacgttggggtggccagcatgggcatctcttgctgccaatctttcttgtgtaattttagcgctgccgacggtggtcttagagcatccgtcaccctcctgggggcaggcttgctgctcagtctcctacccgccctcctgagatttgggccctag

SEQ ID NO: 193584 - DNA, 396 bp, synthetic construct
  misc_feature 1..396: note = Description of Artificial Sequence: Synthetic coding sequence
  source 1..396: mol_type = other DNA
atgaagatcttcctgcccgtgctgctggccgccctgctgggcgtggaacgggcgtcctcccttatgtgctttagctgtctcaatcagaaaagtaacctctactgcctgaaaccaactatctgttctgaccaggataattactgcgtgaccgtctccgctagtgccgggatcggcaacctagttacattcggccattcactgagcaagacctgctccccagcttgccccatccccgaaggcgtgaatgtgggtgttgccagtatgggcatttcttgttgccaaagtttcctctgtaacttctctgcagccgacgggggtttaagagccagcgtcaccctattgggcgccgggctcctgctgtctttgctgcccgccctattgcgcttcggaccctag

SEQ ID NO: 193585 - DNA, 396 bp, synthetic construct
  misc_feature 1..396: note = Description of Artificial Sequence: Synthetic coding sequence
  source 1..396: mol_type = other DNA
atgaagatcttcctgcccgtgctgctggccgccctgctgggcgtggagcgggccagtagtttaatgtgttttagctgtctgaaccagaagtccaatctctactgcctaaagcccacaatctgttcagaccaggacaactactgcgtgacagtctctgcctctgccggcatcgggaatctggtgacatttggccatagtctcagcaaaacttgcagccccgcttgtcccatcccagaaggtgttaatgtgggcgttgcgtcgatgggaatctcttgctgccagtctttcctgtgtaacttttcagctgcagacgggggccttcgtgcgagcgtcacactactcggcgctgggctcctcctgtccctgttgcctgccttgctacggtttggcccatag

SEQ ID NO: 193586 - DNA, 396 bp, synthetic construct
  misc_feature 1..396: note = Description of Artificial Sequence: Synthetic coding sequence
  source 1..396: mol_type = other DNA
atgaagatcttcctgcccgtgctgctggccgccctgctgggcgtggagcgggcgtccagcctgatgtgcttttcatgtctgaatcagaagagcaacctttactgcctgaaacctacaatctgtagtgaccaggataattattgcgtgacagtttctgcatccgcagggattggaaacctggtgaccttcggtcatagtctctctaagacttgctcccctgcatgtccaattccagaaggtgtcaacgtaggagttgcttccatgggaattagctgttgccagtcatttttgtgtaacttttctgccgccgatggtgggctcagagcatccgtcacccttcttggggccggccttctgttgtcgctactacctgcattgctgagattcggtccttag

SEQ ID NO: 193587 - DNA, 402 bp, synthetic construct
  misc_feature 1..402: note = Description of Artificial Sequence: Synthetic coding sequence
  source 1..402: mol_type = other DNA
atgaagccccagttcgtgggcatcctgctgagcagcctgctgggcgctgccttgggtaataggatgcgatgctataattgcggcggatcgccgagcagctcctgtaaggaggctgttacgacctgcggcgagggtagaccgcaaccaggcctcgagcagattaaactccccggcaatccgcccgtgactctgatacatcagcacccagcgtgtgtagctgcccatcactgtaaccaggtggagacagagagcgttggtgacgtcacatacccagcacaccgcgactgctacctgggtgacctatgcaacagcgcagttgcttcacacgtcgcccccgccggcattttggccgctgcagcgactgccctgacctgcctgctgcctggattgtggagtgggtag

SEQ ID NO: 193588 - DNA, 525 bp, synthetic construct
  misc_feature 1..525: note = Description of Artificial Sequence: Synthetic coding sequence
  source 1..525: mol_type = other DNA
atgaagccccagttcgtgggcatcctgctgagcagcctgctgggcgctgccctgggaaatcgtatgcgctgctacaactgcggcggatctccttccagctcttgcaaggaggctgttactacctgcggcgaaggcaggccccagcccggtttagaacagattaagctcccaggaaatagaagatgtttcttaaggggccttaagatccccctgggctcgcttaagagtcatctgctttgccctcggcggcaggtactcaaacctggcgtccagcatccatctttcatcctgagcttatcgccatcagacttggactcccccacatcttctctgaggcgctctccctccctccagtcatccggggaccgggtgggaggacggcgagatctttcgtctccacaaggcttacttccggggcgccctgtccagcagcggcgcggcaagccatgcgggccctgccgtcacttcggttgttcttcttaccgaccggatctctcactggccaggactgtggaaagaatctag

SEQ ID NO: 193589 - DNA, 402 bp, synthetic construct
  misc_feature 1..402: note = Description of Artificial Sequence: Synthetic coding sequence
  source 1..402: mol_type = other DNA
atgaagccccagttcgtgggcatcctgctgagcagcctgctgggcgccgcactagggaacaggatgaggtgctataactgcggcgggtcaccgtcttcctcgtgtaaagaagctgtgacgacctgcggcgagggacgaccacagcctggcctggaacagataaagctgcctgggaaccctccggtcactctgatccaccagcatccggcctgtgtggcagcccaccattgcaaccaggtcgagactgaaagcgtgggagatgtaacctaccctgcccacagggattgttatcttggtgatctctgtaactctgctgtcgccagtcacgtggccccggcaggtatacttgcggccgcggccacggcgctgacttgcttactgcccggactttggtctgggtag

SEQ ID NO: 193590 - DNA, 1149 bp, synthetic construct
  misc_feature 1..1149: note = Description of Artificial Sequence: Synthetic coding sequence
  source 1..1149: mol_type = other DNA
atggccgtgctgttcctgctgctgttcctgtgcggcaccccccaggcagctgacaacatgcaggctatttatgtcgccctgggcgaagctgtagagctcccttgcccatcgccaccaacccttcatggtgacgaacatctgtcttggttctgctctcctgctgccggctcctttaccacattggtggcccaggtgcaggtcggtaggcccgcccccgaccctggaaaacccggcagggagagcagattgcgactactggggaattattccctttggctggaaggctctaaggaggaggacgctggccgttactggtgcaccgtgcttggtcagcaccacaactaccagaactggcgggtttacgacgttttggtgctcaaggggagccagctttccgccagggccgccgatgggagtccttgtaatgtgctcctgtgcagcgttgtgccatctagaagaatggacagcgtgacatggcaagagggtaaaggacccgtgagaggtagagtgcagagcttctggggaagcgaggccgctctcttgctcgtgtgtcctggggagggcctcagcgagccccgctctaggcggccgcgcatcatacgatgtttgatgactcataataaaggtgtgtccttttcgctagcagcctctattgacgccagcccagctctttgcgccccctctaccggatgggacatgccatggattttgatgttgctgctgacgatgggccagggcgtagtaatcctggcactaagcatagtcctgtggcgccagcgagtgcggggtgcgcccggccggggcaaccggatgcgatgctacaactgtggtggctccccctcaagctcgtgcaaggaagctgtgactacttgcggagagggacgtccacagccgggactggaacagatcaaactgcccggaaatccacctgtgactctgattcaccaacatcccgcctgtgtggccgctcaccattgcaaccaggttgaaaccgaatcagtcggcgacgtgacctaccctgcgcatcgcgattgctacctgggggatctgtgtaattctgctgtggccagccacgtggcacctgctggtatcctggctgctgcagcaacggctctcacgtgtttgctgcctggtctatggtctggctag

SEQ ID NO: 193591 - DNA, 402 bp, synthetic construct
  misc_feature 1..402: note = Description of Artificial Sequence: Synthetic coding sequence
  source 1..402: mol_type = other DNA
atgaagccccagttcgtgggcatcctgctgagcagcctgctgggcgcagctctgggcaatcggatgagatgttataattgtggcggaagtccctccagttcctgcaaagaagcagtgacaacctgcggtgaaggcagaccccaaccaggactggagcagatcaaactgcctggaaatccacctgtcacactgattcaccagcaccctgcatgtgttgctgcgcaccactgcaaccaggtggagactgagtccgttggggatgttacataccctgcacaccgagactgctatcttggggacctctgcaattctgcagtagcgagtcacgtcgcccccgcgggtatcttggccgctgccgccacagccttaacgtgtctcctgcctggcctgtggtctgggtag

SEQ ID NO: 193592 - DNA, 402 bp, synthetic construct
  misc_feature 1..402: note = Description of Artificial Sequence: Synthetic coding sequence
  source 1..402: mol_type = other DNA
atgaagccccagttcgtgggcatcctgctgagcagcctgctgggcgcagcccttgggaaccggatgcgctgttacaattgtggtgggagcccctcctcctcttgtaaagaggccgttacaacctgcggagagggtagaccgcaacctggactagaacagatcaagctgcccggaaacccccctgtcacactgatccaccagcatcctgcttgcgtagctgctcaccactgtaaccaggtggaaaccgagagtgttggcgatgtgacctaccccgcccatcgtgactgttaccttggggacctgtgtaactctgccgtggcatcacacgtggctcctgctggcatcctcgcagccgctgcaacagctctcacctgtttgctgccgggtctgtggagcggatag

SEQ ID NO: 193593 - DNA, 1149 bp, synthetic construct
  misc_feature 1..1149: note = Description of Artificial Sequence: Synthetic coding sequence
  source 1..1149: mol_type = other DNA
atggccgtgctgttcctgctgctgttcctgtgcggcaccccccaggctgccgacaacatgcaggctatctatgtcgccctgggcgaagccgtggaactgccatgccctagccctcctacactacacggcgacgaacatttgtcctggttctgctcccccgccgcaggcagcttcacaactctggttgctcaggtacaggtggggcggccagcccccgaccctgggaagccaggcagggagagtcgcctgaggctgcttggtaactattccctttggctggaggggtccaaggaggaagatgcgggaagatattggtgtgcagtcttagggcagcatcataactatcaaaattggagggtttatgacgttctggtcttgaaggggtctcagctgtcagctcgggccgctgatggatcaccctgtaatgtgctcctgtgcagtgtcgtccccagccgtcggatggattctgtcacatggcaggagggaaaggggcctgttaggggtcgcgtgcagtcattttggggctcagaggcggctctgttgctggtatgcccaggtgaggggttgtccgaaccgcgcagtagacgtccccgcataatcagatgcttaatgacgcacaacaaaggtgtgtctttctcactagccgcctcgattgatgcgtctccagccctctgtgccccatccacaggatgggatatgccttggattctgatgctgttgctgacaatggggcagggtgtggtgatcctcgcgctcagcatagttttgtggaggcagcgtgtgcgcggggctcctgggcgaggtaatagaatgcgttgttacaattgcggggggtccccctcctctagctgcaaggaggccgtgactacatgcggtgaagggaggccgcaaccggggcttgagcagattaagctgccgggcaaccctcctgtgacattgatccaccagcatcccgcctgcgtggcggctcaccactgtaaccaggtggagaccgagtccgtaggagacgtgacttaccctgcccatcgggattgctacctaggagatctgtgtaatagtgccgttgcttcccacgttgctccagcgggcattcttgccgcggcagctactgctctgacctgtctgcttcctggcctttggtccggctag

SEQ ID NO: 193594 - DNA, 402 bp, synthetic construct
  misc_feature 1..402: note = Description of Artificial Sequence: Synthetic coding sequence
  source 1..402: mol_type = other DNA
atgaagccccagttcgtgggcatcctgctgagcagcctgctgggcgccgctctcggaaatcgaatgcggtgctataattgtggtgggtcccctagctcaacgtgcaaggaggcggtaaccacgtgcggcgaggggcgtccacagccagggttggagcagataaagctgccaggtaatccccctgtgactcttatacaccagcacccggcttgtgtggccgcacatcactgcaaccaggtggaaaccgagtctgtgggagatgtcacgtatccagcacaccgcgattgctacctgggcgatctgtgcaactctgctgttgcctcacatgtggctccagcaggcattcttgccgctgccgcaacggccctgacatgtctgctccctgggctgtggtccgggtag

SEQ ID NO: 193595 - DNA, 402 bp, synthetic construct
  misc_feature 1..402: note = Description of Artificial Sequence: Synthetic coding sequence
  source 1..402: mol_type = other DNA
atgaagccccagttcgtgggcatcctgctgagcagcctgctgggcgcagcactgggaaataggatgcggtgttataactgtgggggaagtccatccagttcgtgcaaggaggcggttacgacctgcggcgaaggtcggccccaaccgggtctagagcagataaaactgccaggaaatcccccggttacactgattcaccagcacccggcctgtgttgctgcccatcattgtaatcaagtggaaactgagtcggtgggcgatgtgacatatcctgcacacagggactgttatctgggcgacttgtgtaactctgccgtggcatcacacgtcgctcctgcaggaatattggccgcagcggccacagctctgacttgtctcttgcccggactctggagcggatag

SEQ ID NO: 193596 - DNA, 402 bp, synthetic construct
  misc_feature 1..402: note = Description of Artificial Sequence: Synthetic coding sequence
  source 1..402: mol_type = other DNA
atgaagccccagttcgtgggcatcctgctgagcagcctgctgggcgcagctctcggcaataggatgcggtgctacaattgcgggggttctcctagctcttcatgcaaggaagcagtgactacatgtggcgagggccgaccccaaccgggactggaacagatcaagctgcccggaaatccccccgtgacgcttatacatcagcaccctgcttgtgtagctgcacaccactgcaatcaggtggagaccgagagcgtaggcgacgtgacgtaccccgcccatagggactgttatttgggtgatctgtgtaatagtgctgtggcctcgcacgtggctcccgccgggatcttggccgctgccgctaccgcactgacctgtctgttgcctggcctctggagcggttag

SEQ ID NO: 193597 - DNA, 525 bp, synthetic construct
  misc_feature 1..525: note = Description of Artificial Sequence: Synthetic coding sequence
  source 1..525: mol_type = other DNA
atgaagccccagttcgtgggcatcctgctgagcagcctgctgggcgcggctctgggcaatcgaatgaggtgctataattgcggggggtcgccttcttcaagctgtaaggaggcagtcactacttgcggcgaggggcgaccgcagcccggactcgagcagatcaaactgcccggaaatcggagatgctttttaaggggtttgaagattccgctcggttcattaaagtcccacctcctttgcccacgacgacaggtgctcaagccgggcgttcagcatccctccttcatcctctcactgtcgcctagtgacctggactcgccaacgagcagcttgcgaagatctccgtcgctacagagttccggcgaccgagtgggcggtagacgagatctctcatctccacagggtctcctccccgggcgccctgtccagcagaggcgcggcaaaccatgtggaccttgccgacacttcggctgctcaagctatagacccgatctctctctcgccagaactgtggagcgtatctag

SEQ ID NO: 193598 - DNA, 486 bp, synthetic construct
  misc_feature 1..486: note = Description of Artificial Sequence: Synthetic coding sequence
  source 1..486: mol_type = other DNA
atgctggccccccagcggacccgggcccccagcccccgggccgccccgagacctacaagatcaatgctaccggccgctatgaagggcctgggcttagccttgctggccgtgttactctgctccgctccagcgcacggactctggtgccaggattgtactttgacgacgaactcatcccattgtactcctaaacaatgccaaccatccgataccgtctgcgcctcagtaaggatcactgatcccagctctagtagaaaggaccacagtgtgaataagatgtgcgcatcgtcatgtgatttcgtgaaacggcacttttttagtgactacctgatggggttcatcaacagcggaattctgaaagtggacgtcgattgctgtgagaaagacctgtgcaatggcgccgccggcgcgggtcactccccctgggctctcgctggaggacttttgctctcgttgggcccggctttactctgggctggcccatag

SEQ ID NO: 193599 - DNA, 486 bp, synthetic construct
  misc_feature 1..486: note = Description of Artificial Sequence: Synthetic coding sequence
  source 1..486: mol_type = other DNA
atgctggccccccagcggacccgggcccccagcccccgggccgccccgaggccaaccaggtccatgttacctgccgctatgaagggcctgggcctcgccttgctggcagtcttattatgctcagcacccgcacatggcctgtggtgtcaagattgcacactgacaaccaactcttcccactgcacaccaaagcagtgccagcccagtgacaccgtgtgtgcctctgtacgtattaccgacccctcttcctcccggaaagaccactctgttaataagatgtgcgcgagtagctgcgacttcgtgaagcgccatttctttagcgattatctgatgggtttcatcaatagtggcattctgaaggtcgacgttgactgttgcgagaaggatctttgcaatggcgccgccggggctggacatagcccatgggcactcgccggcgggctgttattgtccttgggaccagcgctgctctgggcgggcccctag

SEQ ID NO: 193600 - DNA, 423 bp, synthetic construct
  misc_feature 1..423: note = Description of Artificial Sequence: Synthetic coding sequence
  source 1..423: mol_type = other DNA
atgctgcccgccgccatgaagggcctgggcctggccctgctggccgtcctgctgtgcagtgcacctgctcatggtttgtggtgtcaggattgcaccctgacaaccaactcatcccactgcactccaaagcagtgccagcccagtgatacggtgtgtgctagcgtgagaatcacagacccgagctctagccgaaaggaccacagtgttaataaaatgtgcgcaagtagttgtgactttgtcaagaggcatttcttcagtgattatttgatgggatttatcaattctgggatccttaaagtggatgtagattgttgcgaaaaggacctttgtaacggggccgctggagcaggtcacagtccatgggctcttgctgggggcctcctattaagcctcggcccagcgctcttgtgggctggaccgtag

SEQ ID NO: 193601 - DNA, 1971 bp, synthetic construct
  misc_feature 1..1971: note = Description of Artificial Sequence: Synthetic coding sequence
  source 1..1971: mol_type = other DNA
atggtggcccccaagagccacaccgacgactgggcccccggcccctttagcagcaagccacagcgtagccaactccagatcttcagcagtgtgctgcaaacctctttgctgttcttactcatgggcttgcgggcatcaggaaaggattcagcgcccacagtggtctctggcattctgggagggtcagtcactctgcctctcaatatttccgttgacaccgaaatcgagaatgtgatctggataggccctaagaatgcactagcctttgcacgacccaaggagaacgtcactatcatggtaaaaagctatctggggcgcctcgacattaccaaatggtcatactccctgtgcatctccaacctgacactgaacgatgccggcagctacaaagcccagatcaatcagagaaattttgaggtcaccacagaggaagaatttaccttgtttgtgtatgaacaactccaggagccacaggtcacaatgaagagcgtcaaggtttccgaaaatttctcatgcaatatcaccttaatgtgctctgtgaaaggcgctgagaagagtgtgctgtactcttggacccctagagaaccccacgctagcgagagcaacggcggcagcatactcaccgtgtcccgcaccccatgcgacccggacctgccctacatctgtaccgctcaaaaccccgtctcccagcgctcgtcactccctgtccacgtgggccaattctgcactgacccaggagccagcagaggcggcaccacaggcgaaaccgttgtgggcgtcttaggcgaaccagtgacccttccattagcactccctgcctgccgggatacagagaaggtggtttggctttttaacacctcaataatctctaaggaaagagaggaagcagccacagcagaccccctgatcaagtctcgggacccctacaaaaatagggtttgggtctcttctcaggattgcagcctcaagattagtcaactgaaaatcgaggatgcaggcccctaccatgcatatgtgtgctccgaagcatctagcgtcacctccatgactcacgtcacccttctaatatatagaaggctacgaaagccaaaaattacttggtctctcagacactccgaggacggaatatgccgcatttctctgacatgttcggtggaagatggtggtaatacggtcatgtacacctggaccccgctgcagaaagaggccgttgtatcccagggggaaagtcatctgaacgtttcctggagaagctctgagaaccatccaaacctgacctgcacagcctccaacccagtgtcccgctcgagccatcagttccttagcgaaaatatctgtagcggcccagagaggaacacaaagttgtggattggtcttttcttaatggtctgcctgctttgcgtaggcatcttcagctggtgtatttggaaacggaagggtaggtgttcagtaccagccttctgctcatcccaagccgaagcccctgcggacacgcccgaaccaaccgccggtcacacactctatagcgtgctgagccaggggtatgagaaactggacacccccctgagacccgctagacagcagcccacgccaacgagcgattcatcttctgattcgaacctcactactgaggaggacgaagacaggcctgaggtccacaaaccaatctccggaaggtacgaggtattcgatcaagtgactcaggaaggtgctggccacgatcccgccccagagggtcaggccgactatgaccccgtcaccccttatgtgaccgaagtggagagtgtcgtgggggagaatactatgtatgcacaggttttcaatcttcaaggaaagaccccggtctctcagaaagaggagtcctcggccacaatctactgttcaatcagaaaaccacaagtggtagttcctcccccccaacagaacgaccttgagataccggagagcccaacttacgaaaattttacatag

SEQ ID NO: 193602 - DNA, 1566 bp, synthetic construct
  misc_feature 1..1566: note = Description of Artificial Sequence: Synthetic coding sequence
  source 1..1566: mol_type = other DNA
atggtggcccccaagagccacaccgacgactgggcccccggccccttttcaagcaaaccgcagcgctctcagctgcagatattctcatcggtactccagacttccctacttttcctccttatgggattacgcgccagtggaaaagatagcgcacccacggtggtcagcgggatcctgggaggatcagtgaccctgccactgaatattagtgtggacactgagatcgaaaatgtgatctggatcggcccaaagaacgctctcgcttttgcacggcccaaagagaatgtgaccatcatggttaagagttatttaggccgtctcgacatcaccaagtggtcatatagtctctgcatctccaatctgactctgaacgatgcaggctcatataaggcacaaataaaccagagaaattttgaggttaccacagaggaggaattcactttgtttgtatatgagcaactccaggagccacaggtaaccatgaagtcggtcaaggttagtgagaacttctcatgtaacattactctgatgtgctctgttaagggggccgagaagtccgtgctttactcctggacacctcgagagccacatgcctccgaaagcaacggcggatcgatactaaccgtgtcaagaaccccatgcgatcccgaccttccatacatctgcactgctcagaatccagtgtctcagcggtcctccctacccgtgcatgttggacagttttgcaccgaccccggcgccagtagaggaggcacaaccggggagaccgtcgtgggagtactgggggagcccgttacactccctttagctttgccggcctgccgggacaccgaaaaggtggtgtggctctttaacacgtcaatcatttccaaagagcgggaagaggccgccacggccgacccgctgatcaaatctagggatccctataaaaaccgggtgtgggtgtctagccaggactgttcgctaaaaatctctcaattaaagatcgaggacgccggcccctatcacgcctacgtgtgcagcgaagccagctctgtaaccagcatgacccatgtgacactgctaatctaccgtccagaaagaaacaccaagctttggataggcctgtttctcatggtctgtctgctgtgcgtggggatcttctcatggtgtatctggaagcggaaggggagatgcagcgtgcccgctttctgcagctctcaggcagaggctcctgctgatacccctgggtatgaaaaacttgacacgcccttgcggaaaccaatatctgggcgatatgaagtattcgatcaggtgactcaggaaggagccggccatgacccagcccccgagggccaggcagattatgaccccgtcaccccctacgtgaccgaagtcgaaagcgttgtcggagagaataccatgtatgctcaggtctttaaccttcagggaaaaacgccagtgagccagaaagaggagtccagcgctaccatctactgttccatacgcaagcctcaggtagtcccaccccctcagcagaatgacctcgaaatccctgagtcccctacgtacgagaactttacctag

SEQ ID NO: 193603 - DNA, 813 bp, synthetic construct
  misc_feature 1..813: note = Description of Artificial Sequence: Synthetic coding sequence
  source 1..813: mol_type = other DNA
atgacccacgtgaccctgctgatctaccggcggctgcggaagcccaagattacttggagcctgcggcatagcgaagacgggatttgccgcatcagcctaacctgcagcgtcgaagatggtggtaatacggttatgtacacgtggacacccctgcagaaggaagctgttgtctcgcagggggagtcgcacctgaacgtgtcctggcgctccagcgaaaatcaccccaacttgacatgtaccgcctctaaccccgtcagcaggagcagccatcagtttcttagcgagaatatctgttcaggtcctgagagaaacaccaagctctggattggactgttcctgatggtctgtttactgtgcgttggaattttcagttggtgtatctggaagaggaaaggccggtgctcagttccagctttctgctcctcgcaggctgaagcgccagcggacacacctggatacgagaagctggacacccccttacggccagctaggcagcagccaaccccaacatccgactcaagctcggactcaaacctgacaaccgaggaggatgaagaccgtcccgaggttcacaagccgatctccggccgctatgaggtgtttgaccaggtcacacaggagggggctggacatgatcctgcccccgagggtcaggcagattatgatcccgttacaccctacgttacggaggtggagtcagttgtaggggagaatacaatgtacgcccaggtcttcaatttgcaggtggtgccccccccccagcagaatgatttggagatccctgagtccccaacctacgaaaactttacttag

SEQ ID NO: 193604 - DNA, 813 bp, synthetic construct
  misc_feature 1..813: note = Description of Artificial Sequence: Synthetic coding sequence
  source 1..813: mol_type = other DNA
atgacccacgtgaccctgctgatctaccggcggctgcggaagcccaaaattacatggtctctccggcacagcgaagacgggatttgtcgtatatcattgacatgctccgtggaggacggaggaaacacggtgatgtatacctggactcctctacagaaggaagcagtggtgagccagggggaatcccacctgaatgtgagttggagaagttcagagaaccatcccaatctaacatgtactgcatctaaccccgtgtctcgatcctcacaccagtttctcagcgagaacatctgcagtggccctgagcggaacacaaagctttggattgggctgttcctgatggtgtgtctgctgtgtgttggcatcttcagttggtgtatctggaagaggaagggccgttgctccgttccagccttctgcagcagccaagccgaagccccagccgatactcctggatatgaaaagctggatacaccgctaagaccagcacggcagcagcccactcctacgagtgattcttcatctgactccaatttaacaacagaagaagacgaggaccggcccgaagtgcacaagccaatttctggaagatatgaggtgtttgatcaggtaactcaggagggggcagggcacgacccagcacccgaaggccaagcagactacgaccctgttaccccgtacgtaacagaagttgaatctgtcgttggcgaaaacacaatgtacgcccaggtctttaatttacaggtggtgcctcctccacagcagaacgatctagagattcccgagagtccaacctatgagaacttcacatag

SEQ ID NO: 193605 - DNA, 1968 bp, synthetic construct
  misc_feature 1..1968: note = Description of Artificial Sequence: Synthetic coding sequence
  source 1..1968: mol_type = other DNA
atggtggcccccaagagccacaccgacgactgggcccccggccccttctccagcaagccccagcgctcccagctccagatatttagtagcgtcctccagacttccttgctcttcctgttgatgggactacgggcgtccgggaaggatagtgcgcctacagtggtgtccgggattctcggtgggagtgttacacttcctttgaatatcagcgtggacaccgagatcgaaaacgtcatttggattgggccaaagaacgctttggccttcgctaggccaaaagaaaacgttaccatcatggttaagtcctacctgggtcgattggatattaccaaatggtcttattccctgtgtatcagcaacttgactctgaatgatgctggatcttacaaagctcaaatcaatcagagaaacttcgaagtaactacagaagaggaattcacgctgtttgtctacgaacagttacaggagccgcaggtgaccatgaaatctgtcaaagtgagtgagaactttagttgcaacataaccctgatgtgcagcgttaagggcgctgagaagtcagtcctgtactcatggactcccagggagcctcacgccagtgaaagtaacggcggatcgattctgaccgtttctaggactccatgcgacccagacctcccttacatctgcaccgcccaaaatcccgttagccagcggagcagcttgcccgtacacgtgggccagttctgcactgaccctggagctagtaggggagggaccacaggggagaccgtagttggggtcctcggggaacctgtcaccctccctctcgcattacctgcctgtcgagacacagagaaggtagtgtggctattcaatacaagtataatctcgaaggaacgcgaggaagcagcaactgccgacccactgatcaagtcacgtgacccatataagaaccgcgtgtgggtcagctctcaggactgctcactcaagatctctcagctgaagatagaggacgctggaccatatcacgcttacgtgtgttccgaggcaagctccgtgacaagcatgacccacgttacgctcctgatttaccggcgactgaggaaaccaaaaattacgtggagcctgagacattcagaggacgggatatgtcgtatcagcctgacatgttcagtcgaagatggggggaatacagtcatgtacacttggacacctctgcagaaagaggccgtggtatctcagggtgaaagccatctgaacgtgagctggaggtcctcagaaaaccaccctaacctcacttgcaccgcctccaaccctgtgtccagatctagccatcaattcctttcggaaaacatatgtagtggacctgaaaggaacaccaagctctggattggtttgtttctgatggtatgtcttctgtgtgttggtattttctcctggtgcatttggaaaagaaaaggccggtgcagcgtgcccgccttctgttcatcccaggccgaagcccctgctgacacgcccgaaccaacagctggccacaccctgtacagcgtgctctcacaaggttatgagaaactggacacccctttgaggccggcccgccagcagccaacgcccacctccgatagctccagtgactcgaacctgactactgaggaagatgaggaccggcctgaggtgcacaagccaatcagcggacgatatgaagtttttgatcaggtcacacaagaaggcgccggacacgacccagcccctgaagggcaggccgattatgacccggtgacgccgtatgtcacagaagtcgaaagcgtggttggcgagaatacaatgtatgcacaggtcttcaatctgcaggggaagacgcccgtgagccagaaagaggagagctctgctactatctattgctccatacggaagcctcaggttgtgcctcccccccaacagaacgatctggaaatcccagaatctccgacctacgagaacttcacttag

SEQ ID NO: 193606 - DNA, 1116 bp, synthetic construct
  misc_feature 1..1116: note = Description of Artificial Sequence: Synthetic coding sequence
  source 1..1116: mol_type = other DNA
atggtggcccccaagagccacaccgacgactgggcccccggccccttctctagcaaaccacagaggtcccagctgcaaattttcagcagcgtattgcagacgtccctgctattcttgcttatgggactccgagcgagcggcaaggattcagctcccacagtcgtgtcaggcattctgggtggttctgtgacccttccgctgaatatttctgtggacaccgagattgagaacgtcatttggataggaccaaagaacgcactggcttttgcacgacctaaggagaacgtcactatcatggtaaaaagttacctgggacgtctagatattactaagtggtcctactctctgtgtatttccaatttgactctgaatgatgcaggtagttataaggcgcagatcaatcaacgcaactttgaggtcactaccgaggaagaattcacactgttcgtctatgaacaactacaggaacctcaggttactatgaagagtgtcaaggtgtcagagaactttagttgtaatatcacattgatgtgctctgttaagggggcagagaaaagtgtgctgtactcgtggacacctcgcgagcctcacgccagcgaatctaatggaggatccatcctgactgtcagtcgaaccccctgtgaccctgatttgccgtatatctgtactgcccaaaaccctgtttcccagagatcttccttgccagttcacgttggccagttctgcactgatccaggcgcttcccgagggggcaccacgggagaaacggtcgtcggggtgctgggtgaaccagtaactctgcctctggcccttcccgcatgccgcgataccgaaaaagtggtgtggctattcaacacgagcatcattagtaaagagcgtgaggaggccgcgaccgcagatccactgatcaaatcaagggatccttataagaaccgggtgtgggttagcagccaagactgctcactgaagattagccagctaaaaatcgaggacgctggaccgtatcatgcgtacgtgtgtagtgaggcctcctcggtaacatcaatgactcacgtgacactgcttatttatagagaaagtctgggccgcgcaccgataacacgcttcctgctgtag

SEQ ID NO: 193607 - DNA, 1809 bp, synthetic construct
  misc_feature 1..1809: note = Description of Artificial Sequence: Synthetic coding sequence
  source 1..1809: mol_type = other DNA
atgggcctgcgggccagcggcaaggacagcgcccccaccgtggtgagcggtattttgggcggatccgttactttgccccttaacatctccgtggatacagagattgaaaatgtgatttggatagggcctaaaaatgctttggcgtttgctcggcctaaggaaaacgtcactatcatggtgaagagctatctaggacggctggacatcaccaaatggtcttattccctctgcatttccaacttgactcttaacgacgccgggtcctacaaggcacagatcaaccaacggaattttgaagtcactacggaagaggagttcactctcttcgtgtatgaacagttgcaggagccacaagttacgatgaagtcggtaaaagtatctgaaaacttttcttgcaacattacactcatgtgctcagtgaaaggcgctgaaaaatccgttctctattcttggactcccagagagcctcacgcctccgagtccaatggaggcagcattctgactgtttctaggaccccttgcgaccccgatctcccatatatttgtactgctcaaaatcccgtttcccaaagaagctcattgccagtgcacgtgggccagttctgtactgacccaggagccagcagaggagggacaaccggagaaaccgttgtcggggttcttggggagcccgttaccctccctctagctctccccgcgtgccgagacaccgaaaaggtggtctggctattcaatacgtcaattattagcaaagagagggaagaggcagccaccgccgacccactgatcaaaagcagagatccgtataagaacagagtgtgggtctcttctcaggactgctctctgaagatctcccaacttaagatcgaagacgccgggccataccacgcgtacgtgtgtagtgaggcttcaagtgtgacttccatgacacacgttacgttactcatatataggaggctgcgtaagccaaagatcacatggtccttgcgacacagcgaagatggcatctgcagaatttctctcacctgctcagtggaggacgggggaaacaccgtcatgtacacatggacacctcttcagaaggaagccgttgtaagccaaggggagtcacacctcaacgtcagctggagaagctccgagaatcatcctaatctgacgtgcacagcctctaatcccgtcagcaggtctagtcaccaattcttgagcgagaacatctgtagtggtcccgagcggaataccaagttgtggatcggtctttttctgatggtgtgcctgttgtgcgtcgggatcttcagctggtgtatttggaagcgcaaaggaaggtgcagcgtccccgccttttgttcttcgcaagccgaagcccccgcagatacacccggctacgagaaattagacacaccacttaggcctgccaggcagcaacctactccaacttcagactcatcctccgactccaatctcaccacggaggaagatgaagaccgtcctgaggtgcataagccgataagtggtaggtatgaagtgttcgatcaagtgacgcaggagggtgcgggacacgatccagccccagaaggacaggctgactacgatccagtcaccccctacgttactgaagttgaatccgtagtgggcgagaataccatgtatgcacaggtcttcaatctgcagggaaagactcctgtcagccagaaagaggagtccagcgctactatctactgctccatacggaagccacaggttgtcgtgccccctccacaacagaacgacctcgagattccagagagccccacctatgaaaacttcacttag

SEQ ID NO: 193608 - DNA, 582 bp, synthetic construct
  misc_feature 1..582: note = Description of Artificial Sequence: Synthetic coding sequence
  source 1..582: mol_type = other DNA
atggtggcccccaagagccacaccgacgactgggcccccggccccttcagctccaagcctcagcggtctcagctgcagatcttctctagcgtgcttcagacatccctgctgttcctgctgatggggctccgggcatcggggaaggactctgctcccactgtggtctccggcatcttgggcggctctgtcactctccctctcaacatcagtgtcgacaccgaaattgaaaacgtgatatggattggaccaaagaatgcgctggctttcgctaggcccaaggagaatgtcacaatcatggtaaagtcttaccttgggagactggacattacaaagtggtcctatagtctgtgcatttcaaatcttaccctgaacgacgcaggctcatataaggcgcaaatcaatcaaagaaattttgaggttactacagaagaagaattcacgctcttcgtctacgctcccttcatcgaaaaattaagcgtccacgtgattgagggggatcacagaacgctcctggagggatccgggctggaatcaatcatctcaacgctagccgagcccagagtgtctgtaagggagggctag

SEQ ID NO: 193609 - DNA, 1581 bp, synthetic construct
  misc_feature 1..1581: note = Description of Artificial Sequence: Synthetic coding sequence
  source 1..1581: mol_type = other DNA
atgggcctgcgggccagcggcaaggacagcgcccccaccgtggtgtcgggcattttgggggggagcgtcactctgcccctgaacatcagcgtggacacagaaatagagaatgttatatggatcgggcctaagaatgccctggcctttgctaggcctaaagagaatgtgacaatcatggtgaaatcttatttagggagactggatattaccaagtggagctattcactctgtattagcaatctcactctaaacgatgcaggctcttataaagctcagattaatcagaggaactttgaggttactacggaggaggaattcaccctctttgtatacgagcagcttcaagaaccgcaagtcacaatgaaatccgttaaagtgagcgagaactttagctgcaatattacgcttatgtgctccgtaaagggtgccgagaaaagcgtactatattcttggacaccccgcgagcctcacgcttcagaatctaacggtggcagcattttaaccgtatcccgaacaccttgcgaccccgaccttccctacatctgcactgcgcagaaccctgtgagtcagagatcctccctgccagtccatgtaggccagttttgcaccgaccccggagcctctcggggcggtactaccggagagacagtggtcggagtgttgggagagcccgtcaccctacctctggccctgcccgcctgccgcgataccgagaaggtggtctggctgttcaacacatctatcataagtaaggagcgggaggaagctgcgacagctgatcctctgattaagagtcgcgacccctataaaaatcgagtgtgggtgagttcccaagactgttctcttaaaatctctcaattgaagattgaagacgctggaccctaccacgcttatgtgtgctccgaagcttcgagcgttacatcaatgacacatgtgactttgctgatttaccggcctgagcggaataccaaactctggattggtctgtttcttatggtgtgtctgctctgtgtcggtatcttttcttggtgcatctggaagcgtaaaggccggtgctccgtccctgccttctgcagttcacaggctgaagctcctgcagacacaccagagcctacagccggacataccctgtactcagtcctgagtcaaggctacgagaaattggacactcctcttaggcccgcaaggcaacagccgacaccgaccagcgattcatccagtgacagcaatctgaccacagaggaagacgaagataggccagaggttcacaagcccataagcgggcgctacgaagttttcgaccaggtgacacaggagggagccggacacgatccagcccccgagggccaagccgattatgaccccgttactccttacgtgaccgaagttgagagtgttgtgggggagaatactatgtatgctcaggtctttaacttacagggcaaaactcctgttagccaaaaggaggagagttcggctactatatactgcagcatccgaaagccacaggttgtagtcccccctccccaacagaatgacctcgagatccctgaatcaccaacttacgagaacttcacatag

SEQ ID NO: 193610 - DNA, 1884 bp, synthetic construct
  misc_feature 1..1884: note = Description of Artificial Sequence: Synthetic coding sequence
  source 1..1884: mol_type = other DNA
atggcccggggcagcgtgagcgacgaggagatgatggagctgcgggaggcttttgccaaagttgatacggacggcaatgggtacatctctttcaatgagctgaacgacctgttcaaggccgcttgtctgccactacccggctaccgcgttagagaaatcacggagaatctcatggctaccggtgaccttgaccaggatgggagaatcagctttgatgagtttatcaaaatctttcacggactgaagagtaccgatgtggcaaagacttttaggaaagccatcaacaagaaggagggcatttgcgctatcgggggcacaagcgagcagtccagtgttggcacacagcactcctatagtgaggaggaaaagtatgccttcgtgaattggattaacaaagctctagaaaacgatcctgattgccgtcacgtcatccccatgaatcccaatacaaacgacctcttcaacgctgtgggcgatggcattgtgctatgtaaaatgatcaacctgtctgtgccggacactattgatgaacgcacaattaacaagaaaaagctgacacccttcactattcaggagaacctgaacctggcgctgaattctgcctcagcaatcggatgccacgtggtgaatattggagcagaggacctgaaggagggcaaaccctatttggtgttaggcctgctctggcaggtgatcaagatcggtttgttcgccgacatagagttgtccaggaacgaagctctcatcgccttattgcgggagggcgaatcactggaggatctgatgaagctgtcacccgaggagttgctcctgcgctgggccaattatcacctcgaaaatgcaggatgcaacaaaattgggaacttctctaccgatatcaaggactccaaagcatattatcacctgcttgagcaggtggctccgaagggtgacgaagagggcgtccccgctgtggttatagatatgtcaggcttgagagaaaaggacgacatccagagggccgagtgcatgttgcagcaggctgagcgcctgggctgccggcagttcgtgactgcaaccgatgtagttcgcggaaatccaaagctaaacctcgcgtttatcgcaaacctctttaatcgctaccctgccctccataaacccgagaaccaggacatcgactggggtgcccttgaaggcgaaacccgggaggagcggaccttcaggaattggatgaattcactgggtgtgaatccccgtgtaaatcacttgtacagcgatctgtctgatgctctcgtgattttccagttatacgagaagattaaagttcccgtagactggaatcgtgtcaataagcctccttatcctaagctgggtggtaacatgaagaagctggagaactgtaactatgcagtggagctcggcaaaaatcaagccaaatttagtctagtgggaattggtggacaggacttaaacgaaggaaaccgcacccttaccttggccttaatttggcagctcatgcgccggtatacattgaacattctggaagagatcggcgggggtcaaaaagtgaatgacgatatcattgtgaactgggtgaacgagaccctgagagaagccaagaaaagttcgagcatctcctcgtttaaagaccccaagatcagcacatccctccccgtgctggacctcattgacgccatccaaccggggtctatcaactatgatctgttaaagacagagaacctgaatgacgacgagaagctgaacaatgcgaagtacgctatcagcatggctcgaaagatcggggctagagtgtacgcgctgcccgaggatctagtggaagtgaatcctaagatggttatgacagtgtttgcttgtcttatgggaaagggtatgaaacgagtgtag

SEQ ID NO: 193611 - DNA, 1884 bp, synthetic construct
  misc_feature 1..1884: note = Description of Artificial Sequence: Synthetic coding sequence
  source 1..1884: mol_type = other DNA
atggcccggggcagcgtgagcgacgaggagatgatggagctgcgggaggctttcgccaaggttgatactgacgggaatggatatatctcttttaacgagctcaatgatctttttaaggcagcctgcctccctctgcctggataccgggtaagggagatcactgagaacctgatggcaacgggcgacctggatcaggacggacgcataagctttgatgagttcattaaaatattccacggcttgaaaagcacggacgtagccaaaacattccggaaggccatcaataaaaaggaaggcatatgcgctatcggcggcacttcagagcaaagctcggttgggacccagcatagctattccgaggaggagaaatacgccttcgttaactggattaataaagcactagagaatgacccagactgccgacatgtcattccaatgaaccccaataccaatgatttgtttaatgcagtgggagatggtatcgtgctctgcaaaatgattaatctgtccgtgcccgacaccatcgacgagcgcacaatcaataagaaaaagttgactccttttacaattcaggaaaatctaaacctggccttgaacagtgccagcgccatcggctgtcacgtggtgaatatcggcgctgaagacctcaaagaggggaaaccttacttggtgctggggctgctctggcaggtcattaaaatcgggctctttgcggacatcgagctatcacggaacgaggccctaattgccctcctgcgcgagggcgagagcttggaagacctgatgaaattgagtcccgaagagctcttgctcaggtgggccaattatcatctggaaaacgcagggtgcaacaagattggcaatttcagtacagacatcaaggactctaaggcctattatcaccttctggaacaggtggcccctaaaggagacgaggaaggcgtgcctgcagtggtgatcgatatgagcggccttcgagagaaggatgacattcagagagcggaatgcatgctgcaacaggcagagcggctaggatgtaggcagttcgtaaccgccaccgacgtggttagaggcaatccgaagcttaacttggcatttatagccaacctattcaataggtatccggcactacacaaaccagagaaccaagatatcgactggggcgctttggagggggagacgcgtgaggaaagaacattcaggaattggatgaactctcttggggtcaacccgcgagtgaaccatctgtacagtgatttgtccgacgccctggtgatatttcagttgtacgagaagatcaaagtgccagtggactggaatcgcgttaacaaaccaccataccctaagctgggaggaaatatgaaaaagctggagaactgcaactacgcagtggaactgggtaaaaaccaagcaaagttttcactcgtggggatagggggccaggatctgaacgaaggtaaccgaaccctcaccctggccctgatttggcaactgatgcggcggtacactttaaatattcttgaagagatcggaggcggtcaaaaggtgaatgatgacattattgtaaactgggtgaacgaaacattaagggaagcaaaaaagtcctccagcattagtagcttcaaagaccccaagataagtaccagcctccctgtactggacctaatagatgcaattcagcccggtagcatcaattacgatcttctgaagaccgaaaatctaaatgacgacgagaagcttaacaacgctaaatatgctatctcaatggcccggaagattggcgcgcgagtctatgccctccccgaagatctggtggaggtgaaccctaaaatggtgatgaccgtcttcgcctgcttgatggggaaaggcatgaagcgagtctag

SEQ ID NO: 193612 - DNA, 741 bp, synthetic construct
  misc_feature 1..741: note = Description of Artificial Sequence: Synthetic coding sequence
  source 1..741: mol_type = other DNA
atggcccggggcagcgtgagcgacgaggagatgatggagctgcgggaagccttcgccaaggttgatactgacggcaacggctacatttcattcaatgaactgaacgatttatttaaggcagcctgcctgccgcttccagggtacagagtcagggaaatcacagagaacctcatggccaccggcgatctagatcaggacgggcggatcagctttgacgagttcatcaaaatcttccatggactgaagagcaccgatgtggccaaaaccttccgtaaagcaatcaataagaaagagggtatttgcgcaatcggcggaacgagcgagcagtcatcagtaggaacacagcatagctatagcgaagaagaaaaatacgcttttgttaactggattaataaggctctggagaacgacccagactgccgccacgtcatccctatgaaccctaacaccaacgacctcttcaacgctgttggtgatggcatcgttctttgcaaaatgatcaacctttccgtaccagacacaattgacgaacgcacaattaataaaaagaagttgaccccctttactattcaggagaacctaaatttggcccttaacagtgcctcagccatcggttgccacgtcgttaatatcggagccgaagacctgaaagagggcaagccctaccttgtgctgggcctgctatggcaagttatcaagattggcctctttgcagatatagaactgtcccgtaacgagtag

SEQ ID NO: 193613 - DNA, 591 bp, synthetic construct
  misc_feature 1..591: note = Description of Artificial Sequence: Synthetic coding sequence
  source 1..591: mol_type = other DNA
atgtgcgccgaggacggcgacagcaagttcagcatgagcatcagcatgaatagcccttttctggagattctgcatctcgagaactgcaactatgctgtggagctggggaaaaaccaagccaaattcagtctagtcgggattggcgggcaggacttaaacgaaggcaacagaaccctgaccctggcactgatttggcagctgatgaggcgctatactctgaacatcctcgaagagattggtggcggtcagaaggttaacgacgacatcatcgtgaattgggtcaacgaaacgctccgtgaggcgaagaaaagctcctcaatcagctccttcaaggatccaaagatcagtacaagcctcccagtcctcgatctgattgacgccattcagccgggaagtattaactatgatctcctcaagactgagaatctcaacgatgacgagaagctaaacaatgctaaatacgccatcagtatggccaggaaaatcggggcacgcgtgtatgcgttgcccgaagacctagttgaagttaaccccaagatggtgatgactgtctttgcctgcttgatggggaaaggaatgaagagggtctag

SEQ ID NO: 193614 - DNA, 201 bp, synthetic construct
  misc_feature 1..201: note = Description of Artificial Sequence: Synthetic coding sequence
  source 1..201: mol_type = other DNA
atggcccggggcagcgtgagcgacgaggagatgatggagctgcgggaggcattcgccaaggtggatacagacggaaacggctacatctcttttaatgagctgaacgacctctttaaagctgcctgtcttccacttcccggctatagggtgcgagagataaccgagaacctgatggcgacgggtgatctagatcaagactag

SEQ ID NO: 193615 - DNA, 1602 bp, synthetic construct
  misc_feature 1..1602: note = Description of Artificial Sequence: Synthetic coding sequence
  source 1..1602: mol_type = other DNA
atggccctgcggaacgtgcccttccggagcgaggtgctgggctgggaccccgattccctggccgactacttcaagaagttgaactacaaagattgtgagaaggccgtgaagaaatatcatatcgacggagctcgcttcctgaatttgacagagaacgacatacagaagtttccaaaactgcgggtaccaatcctttcaaaactgagccaagagataaacaagaacgaagaaaggcgctcgatcttcacgcggaagccccaagtgccaaggttccctgaggaaactgagtcacatgaggaagacaatggtgggtggtcgtcattcgaagaggacgactacgagtcccccaatgatgatcaggatggggaggatgatggtgattatgagtccccaaacgaagaggaggaggcccctgttgaggacgatgcagactacgagccacccccatcaaatgacgaggaggcattgcaaaattccattctacctgccaagccatttcctaatagcaactcaatgtacattgaccggcccccatctgggaagactccccagcagcccccagtgcccccgcaacggcctatggcagcacttcccccgccccccgccggtcggaaccattcacccctgccacctccacagaccaaccatgaggaaccaagtagaagtcgcaaccataaaacagccaagctcccagccccttccatcgaccgctccacgaagccgccactggacaggtccttggctccgtttgatagagagcccttcacactcgggaagaaacccccgttcagcgacaagccgtctatccccgccggacggagtctaggagaacaccttcctaagatccagaagccccccctccccccgacgaccgagaggcacgagcgttccagccccctgccgggcaagaagcctccggtgcccaagcatggctggggacccgaccgcagagagaacgacgaggacgatgtgcaccagcggccactgccacagcctgccctgcttcctatgtctagtaacaccttcccttcaaggtcgaccaaaccttcccccatgaatcctttgccatccagccacatgccaggggccttcagcgaatccaattcctccttcccccagtccgcatctttacctccgtacttcagccaaggaccgagtaatcggccccccatccgggctgaagggagaaatttccccctgcctctgcctaacaagccgagaccaccatcacctgccgaggaggaaaatagcctgaatgaggaatggtacgtatcctacatcacaaggccagaggccgaggctgcattgagaaagatcaaccaggacggcaccttccttgtgagagattcgtccaaaaaaacaaccacgaacccatacgtgctgatggtgctgtataaggacaaggtctacaacattcaaattcgataccagaaggagagccaggtctatttgctgggaactggcctcaggggcaaggaagattttttaagcgtctccgacataattgactatttcaggaagatgcccctgttgttgattgatggtaagaatcggggtagcagatatcaatgcacactaacacatgctgccggatatccgtag

SEQ ID NO: 193616 - DNA, 1578 bp, synthetic construct
  misc_feature 1..1578: note = Description of Artificial Sequence: Synthetic coding sequence
  source 1..1578: mol_type = other DNA
atgtgggaggcccagttcctgggcctgctgttcctgcagcccctgtgggtggctcccgtaaagccattgcagcctggagccgaagtgcctgtagtgtgggctcaggaaggcgctcccgcccagttgccttgctcccccactattcccctgcaagacttaagcctccttcggagggcaggcgttacttggcagcaccagcccgacagtggcccgccggcagctgcccccggtcaccccctggcccctgggccccacccagcagctccttcttcctgggggccccgtccaaggaggtatactgtgttatctgtaggtccgggaggacttagatccggacgcttgcccctccaacctcgtgtccaattagacgagcgcggaagacaaaggggagacttttctctgtggttgcggcctgccaggcgagccgacgctggcgagtatagggctgccgtgcatttacgggatcgtgccctctcctgtcggctgagattgcgactgggacaggcatctatgactgcttctcctccggggagtctgcgggcctctgactgggtcattctcaactgctctttttcacgaccagaccgtcctgcttcggtgcactggtttaggaatcgaggccagggccgtgttcctgtgcgggaatctccccaccatcacctagcagagtctttcctgtttctgccccaggtgtcccccatggatagtggtccatgggggtgcatcctgacatatagggatgggtttaatgtgagtatcatgtataatttgacagtccttggcctggaaccccccacaccactcactgtgtatgctggtgccggctctagggtgggcctgccctgcagactccctgctggcgtgggaacaaggtcgtttctgacggctaaatggacgccccctgggggcgggccagatctcctggtgaccggtgacaacggggactttacgctgaggttagaagatgtgtcacaggcccaggcaggaacatacacctgccacatacacttgcaggagcaacagttaaatgcaacagtgacattggccatcatcaccgtgactcccaaatccttcggctctcctggctccctcggaaagctcctttgcgaagtcactcccgtctcagggcaggaaagattcgtgtggtcctctctggatactccctctcaacgctcattctcgggtccttggctggaggcacaggaggcacagctgttgtctcagccctggcagtgtcagctgtatcagggtgagaggctgctgggggccgcagtctattttactgaattgagctcacccggggcacaaagatcagggcgggcccctggagcgctccccgcgggccatctgcttctattcctgattctgggtgttctctctctgctgcttctggtaactggagcctttggatttcatttgtggcggcgacagtggcgcccccggcgcttctctgccctggagcagggtattcacccccctcaggctcagtcaaaaattgaggagcttgaacaagagcctgagcccgagcctgaaccagagccagagccagagccagaaccagaacccgagcagttatag

SEQ ID NO: 193617 - DNA, 1020 bp, synthetic construct
  misc_feature 1..1020: note = Description of Artificial Sequence: Synthetic coding sequence
  source 1..1020: mol_type = other DNA
atggccgaggccagcagcgaccccggcgccgaggagcgggaggagcttttagggcctacagcccaatggtccgtggaggacgaagaagaggcggttcatgagcagtgtcagcatgagagagacagacaactccaggcccaagacgaggaaggcggaggccatgttcctgaacgtccaaagcaagagatgcttctgagcctcaagccttcggaagcgccagagcttgatgaggatgaaggctttggggattggtctcagagaccggaacagcgccagcagcatgagggggcccagggagcactggatagcggtgaacccccccagtgtcggagcccggaaggtgaacaggaggaccgtccaggattgcacgcatatgaaaaggaggattcagacgaagttcatctagaagagctctctttatcaaaagaaggccctgggccagaagacactgtccaggataacctgggcgcggctggcgccgaagaagaacaagaagaacaccagaagtgccagcagccacgaacaccctcccctttggtcttggaggggactattgagcagagtagtccacccctttccccaacgacgaaattaatcgacaggacggaaagcctgaaccgcagcatcgagaagtctaacagtgtgaagaaaagccagcccgacttgcctatctccaaaatagaccagtggcttgagcagtacacccaagcgatagaaaccgctggtcgcactcctaaattggccagacaggcctctatcgaattgcctagcatggctgttgcctcgacgaaatctcgatgggaaacaggtgaggttcaggcacagtccgccgccaaaaccccctcctgcaaggacatagtcgccggtgatatgtcaaaaaaaagcctgtgggaacagaagggaggatcgaagacatctagtaccatcaagtcaactccgtcgggcaaacgatataaattcgtcgctactggtcacggaaagtacgagaaagtgcttgtcgaaggcggccctgcaccttag

SEQ ID NO: 193618 - DNA, 834 bp, synthetic construct
  misc_feature 1..834: note = Description of Artificial Sequence: Synthetic coding sequence
  source 1..834: mol_type = other DNA
atgctgctgagcctgaagcccagcgaggcccccgagctggacgaggatgagggattcggcgattggagccagcggcccgagcagcggcaacagcatgagggagctcagggagctctggactctggagagcctccccagtgcaggtctcctgagggggagcaagaggacagaccaggtctgcacgcctatgagaaggaggacagcgatgaggtgcatctggaggagctgagcttaagcaaggaagggccggggcccgaggatacagttcaagataacctcggggccgctggggcagaggaagagcaggaggagcaccagaaatgccagcagcctagaactccctcccccctggtgttggagggtactatcgagcagtcaagtccccccctgagtccaacaacaaagctcatcgaccggaccgagtccctcaaccgctctatcgaaaaaagcaattcagtcaaaaagtctcagcccgacctgcctatatcaaagattgatcagtggcttgaacaatatacccaagccatcgagaccgccggtagaactcctaagctggcaaggcaggctagtatagagctgccctccatggccgttgcctcaacaaaatcccgatgggagacgggtgaggttcaagcacagagtgccgccaagaccccctcctgcaaagatatcgtcgctggcgacatgtccaagaagtccttgtgggaacaaaagggcggatctaagaccagtagtaccatcaagagcacacctagcggaaaacgatataagttcgtggccacgggtcacggaaaatatgagaaagtcttggtagaaggagggcctgctccctag

SEQ ID NO: 193619 - DNA, 834 bp, synthetic construct
  misc_feature 1..834: note = Description of Artificial Sequence: Synthetic coding sequence
  source 1..834: mol_type = other DNA
atgctgctgagcctgaagcccagcgaggcccccgagctggacgaggatgaggggttcggagactggtcccagcggcccgaacagcggcagcaacacgagggcgcccagggcgccctcgattctggggaaccgcctcagtgtagatctccagaaggagagcaagaagataggcctgggctccacgcctacgaaaaagaggacagcgatgaagtgcatttggaggagctgagcctgtctaaggaagggcccggccctgaagatacagtgcaggacaacctgggggccgctggggcggaagaagagcaggaggaacaccaaaagtgtcagcaaccacggacccctagcccgctggttctcgaagggaccattgagcagtcctcgccccccttgtcacctaccactaagctgattgaccggacagaatccctcaaccgctccatcgagaagagtaattcagttaagaaatcacaacctgatctccccatctcgaaaatagatcagtggctcgagcagtatacccaggcaattgagaccgcagggcgcacaccgaaactcgctcggcaggcctcaattgaactcccctccatggcggtcgccagcactaagtctcgttgggagacaggtgaagtgcaggctcaatccgccgctaagacacccagttgcaaggacatcgtggccggggatatgtccaaaaagtccctttgggagcagaaggggggatcaaaaacgtccagcacaatcaagagtaccccatccggcaagcgatataaatttgtcgccactggccacggcaagtacgaaaaagtacttgtagaaggtggtcctgcaccttag

SEQ ID NO: 193620 - DNA, 669 bp, synthetic construct
  misc_feature 1..669: note = Description of Artificial Sequence: Synthetic coding sequence
  source 1..669: mol_type = other DNA
atgctgctgagcctgaagcccagcgaggcccccgagctggacgaggatgaaggatttggggattggtcccagcgaccagaacaacgacaacagcatgaaggggcccagggcgccctagattccggcgagcctccccagtgtaggtctccagagggggagcaggaggataggccaggcctacacgcttacgagaaggaggattccgatgaagtgcacctcgaggaactgagcctgtcaaaagaaggacccggaccagaagacaccgtacaagataatctgggcgccgctggcgccgaggaggaacaggaagaacaccagaagtgtcaacagccacgtaccccctcccccttggtgctcgaagggacaatcgaacaatcctccccccctttatcccctaccaccaaactaattgatcggacggaaagcctcaatcgaagcattgaaaagagcaactcagttaagaagtcccaacctgacctgcctatctccaaaatcgaccagtggcttgaacagtatacacaggccattgaaaccgctggaaggacgccgaaacttgcccggcaagccagtattgaactgcctagcatggccgtggcttccacaaagtctaggtgggagactggtgaggtgcaggctcagagcgcagcaaaaaccccatcctgcaaatag

SEQ ID NO: 193621 - DNA, 183 bp, synthetic construct
  misc_feature 1..183: note = Description of Artificial Sequence: Synthetic coding sequence
  source 1..183: mol_type = other DNA
atgctgctgagcctgaagcccagcgaggcccccgagctggacgaggacgagggatttggcgactggtctcagcgccccgagcaaaggcagcaacacgaaggtgcccagggcgcacttgacagtggggaaccaccgcagtgtaggagccctgagggtgaacaggaggacagaccaggtctgtag

SEQ ID NO: 193622 - DNA, 669 bp, synthetic construct
  misc_feature 1..669: note = Description of Artificial Sequence: Synthetic coding sequence
  source 1..669: mol_type = other DNA
atgctgctgagcctgaagcccagcgaggcccccgagctggacgaggatgaaggtttcggagactggtctcagcggcctgagcagcgccagcagcacgagggtgcccagggggctctggatagtggcgagcctcctcaatgccggtcgccagagggcgagcaagaagacagacctggcctgcatgcgtacgaaaaagaggattctgacgaggtgcatctggaagagcttagtctcagtaaggagggacctggaccagaagatacggttcaggacaaccttggggcagccggcgccgaagaagagcaggaggaacaccaaaaatgccagcagcccaggacgccatctcccctggtgttggagggcaccatcgaacagagtagtccccctctgtcgccgactactaagcttatcgaccggaccgagtcccttaatcgcagcattgagaagtcgaactccgtgaaaaagtcccagcccgatctgccgatctcaaagattgaccagtggctcgaacagtatacccaggcaatcgaaaccgccggcaggacacccaagctggcacgtcaggcctcaatagagctgccttcgatggcggtggctagtaccaagtccaggtgggagacgggagaggtgcaagcacagtcggcagcaaagaccccttcctgcaaatag

SEQ ID NO: 193623 - DNA, 381 bp, synthetic construct
  misc_feature 1..381: note = Description of Artificial Sequence: Synthetic coding sequence
  source 1..381: mol_type = other DNA
atgctgctgagcctgaagcccagcgaggcccccgagctggacgaggatgagggctttggcgattggagccagaggcccgaacagcgtcagcagcatgagggggctcagggtgcccttgattccggcgaacccccccagtgcaggtctccagagggagagcaagaagatcgccctggcctgcacgcatatgagaaagaagatagcgatgaagtccatctcgaggagctgtctctgtccaaggaggggccggggcctgaggatacagtacaggataacctgggggccgcaggcgcagaggaagaacaagaggagcaccagaaatgtcagcagccacgcacaccatcacccctcgtgttggagggtactatcgaacagagctag

SEQ ID NO: 193624 - DNA, 195 bp, synthetic construct
  misc_feature 1..195: note = Description of Artificial Sequence: Synthetic coding sequence
  source 1..195: mol_type = other DNA
atgctgctgagcctgaagcccagcgaggcccccgagctggacgaggacgaaggttttggcgattggtcacagcgacccgagcagaggcaacaacacgaaggggcccagggagcacttgacagcggagaacctccccagtgccggtcaccagaaggggagcaggaagaccgaccaggcctgcatgcttacgagtag

SEQ ID NO: 193625 - DNA, 1404 bp, synthetic construct
  misc_feature 1..1404: note = Description of Artificial Sequence: Synthetic coding sequence
  source 1..1404: mol_type = other DNA
atggcccccatctggagcccccccggccgggtgagcggctgccacctctcttccggcccggcccccggatctgcggttggcccatggctgggtactccacacccttcactcccactgcctctggcacctcacaagcccccccctcctggtttgccagggtcagccggacaaacttcactacccgcacaacgtgaatgtgtgttccccggcgatgccgccgtccatcaggaactttgtggtctgggatttgaggaatgcctgggttcaattccccaggctcatcaatgctacctcaccaacgggcccaaacgcagaaaatgttcaccaaggcggcggggcagagctcctgcttggttatgtggaggttcccccccctgccatcaaggtctgggccacgagcacccatcttcaggacccagtacgaattgtagccccagaccaactgcccagtggtctgtggaagatgaggaggaggctgttcacgaacaatgtcagcacgagcgggaccgacagttgcaggcacaggatgaggaggggggcggccacgtgcccgagaggcctaagcaagagatgcttctgtctctgaaaccctcagaagcccccgaactcgacgaggacgaaggttttggcgattggtctcagcggcccgaacaacgccagcagcatgagggagcccagggcgccttggactccggagagcccccacagtgtcggagccctgagggcgaacaagaagacagaccagggcttcacgcctacgagaaggaggacagtgatgaggttcatctggaggaactctcgttgtctaaagaaggacccggacccgaggacactgtacaggacaatcttggggctgcaggggccgaagaagaacaggaggagcatcaaaagtgtcaacagccccggaccccttctcccctggtactagaaggcacaatcgagcagagctcccctccgctgtctccaacaacaaagcttatagatcggaccgagagtctcaacaggtctattgaaaaatcaaattccgtcaagaagtcccagccagacctaccaatttccaaaatagaccagtggctcgagcagtatacgcaggctattgaaaccgccggccgtactcccaagctggcccgccaggcaagcatcgagctgccatctatggccgtcgcatcgacaaaaagtcgatgggagacaggtgaggtccaggcccagtctgcagccaaaacccctagttgcaaagacattgtggccggggacatgagcaaaaagtctctgtgggaacagaagggcggatcgaagacaagctcgactattaaaagcacgccttcagggaaaagatataaatttgtggcgacaggccatggtaaatacgagaaggttctggtggagggcggcccagcaccgtag

SEQ ID NO: 193626 - DNA, 618 bp, synthetic construct
  misc_feature 1..618: note = Description of Artificial Sequence: Synthetic coding sequence
  source 1..618: mol_type = other DNA
atgaccccccccgagcggctgttcctgccccgggtgtgcggcaccaccctgcatctgctgctccttggactcctcttggtgctgctgccaggcgcccagggcctgccaggcgtgggcctgacacccagtgctgcccaaacagccaggcaacaccccaagatgcatttggcccatagcaacctcaagcccgcggcccaccttatcggagacccttcaaaacagaattccttgctgtggcgcgctaatactgacagagcctttttacaagacgggttctccctgagtaataactcccttcttgtaccaacatccggcatctattttgtttattctcaagtagtgttttccgggaaagcatattctcctaaggcaacttctagtcctctgtacctggcccacgaagtgcagctgttctcctcgcagtatcccttccacgtcccacttctgagttctcagaaaatggtgtaccccgggctgcaggagccctggctgcactctatgtaccacggtgcagcctttcaactgacacagggcgatcagctcagtacacacacggatggaattcctcatctggtgctgagccccagcaccgtgttcttcggggctttcgccttatag

SEQ ID NO: 193627 - DNA, 618 bp, synthetic construct
  misc_feature 1..618: note = Description of Artificial Sequence: Synthetic coding sequence
  source 1..618: mol_type = other DNA
atgaccccccccgagcggctgttcctgccccgggtgtgcggcaccaccctgcacttgcttctgctggggttgctgctggtgttactgcccggggcccaaggcctgcccggggtcggcttaaccccaagcgctgcccagacagcacgacagcaccccaaaatgcatctggcacactctaatctgaagcctgccgctcacttgatcggggacccctctaagcagaactccctgttgtggagagccaacacagaccgagcttttttgcaggatgggttttcactgtcgaacaactccctgctcgttccgaccagcgggatttactttgtatactctcaagtggtgtttagcgggaaggcttatagtcccaaggccactagtagtccactctaccttgcacacgaggtccagctatttagctcccagtacccttttcacgtcccactgttatcgtcccagaagatggtgtatccagggctgcaggagccctggttgcattccatgtaccacggggctgctttccagctcacacaaggtgatcagctgtctacgcacacagacggaatccctcacctggtgttgtccccatcaaccgtgttttttggagcttttgccttgtag

SEQ ID NO: 193628 - DNA, 618 bp, synthetic construct
  misc_feature 1..618: note = Description of Artificial Sequence: Synthetic coding sequence
  source 1..618: mol_type = other DNA
atgaccccccccgagcggctgttcctgccccgggtgtgcggcaccacactgcacctcctccttctgggcctcctgctggtcctgctccccggtgcccagggattacccggggtgggactgacaccttcagcagcgcagaccgctcgacagcaccctaaaatgcatttagctcactccactttgaaacctgcagcacatctgattggtgaccccagcaagcagaattcccttctgtggcgtgccaacaccgatcgcgcctttctacaggatggcttcagtctttcaaataactcattgctggtccccacctccgggatctacttcgtgtattcccaagttgtgttctcaggcaaggcgtactctcccaaggctacctcttccccattgtaccttgcacacgaggtacagttgttcagctcccagtatcctttccacgtgcctcttctaagctctcagaagatggtctatcccggccttcaagagccgtggctgcactcaatgtatcacggcgcggcttttcagctgacccagggcgatcagttgagtacacatactgacggcatccctcatcttgtcctgtcaccttctaccgtgtttttcggggcattcgctctgtag

SEQ ID NO: 193629 - DNA, 618 bp, synthetic construct
  misc_feature 1..618: note = Description of Artificial Sequence: Synthetic coding sequence
  source 1..618: mol_type = other DNA
atgaccccccccgagcggctgttcctgccccgggtgtgcggcaccacgttacatctgttgttgctgggtttactgctggtgcttctgcccggcgcccaggggctaccaggggtcgggttgacaccttccgcggctcagaccgcaagacagcaccccaagatgcaccttgctcattcaaccctcaagcctgccgcgcatctgattggcgacccatccaagcagaacagtctcctctggagagccaacactgacagagccttcctgcaggacggcttttccctcagtaataactctctgctcgttcccacctctggaatctatttcgtgtacagtcaggtggtgttcagtggcaaggcttattcccccaaggccaccagtagccctctgtatctggcccacgaagtacaactcttttcctctcagtacccattccacgtcccccttctttcttcccagaagatggtctatccgggtctccaggagccctggctgcactccatgtatcatggagcggcatttcagttgactcaaggagatcagctctccacccacacagatggtatcccccatttagtgctgagcccctccacagtttttttcggagcattcgccttgtag

SEQ ID NO: 193630 - DNA, 618 bp, synthetic construct
  misc_feature 1..618: note = Description of Artificial Sequence: Synthetic coding sequence
  source 1..618: mol_type = other DNA
atgaccccccccgagcggctgttcctgccccgggtgtgcggcaccacactccatctcctgttacttgggctcctcctggtgctccttcccggcgcgcagggtctccccggagtgggcctgacaccttctgccgctcagactgccagacagcacccaaagatgcacctcgcccactcaacactgaaaccagcagcccaccttattggtgacccctctaagcaaaactctttgctgtggcgagccaacactgatcgggcattcttgcaggatgggttcagtctgagcaataatagcctgctggtccccactagcggaatctactttgtctacagtcaggtcgttttctcagggaaggcctacagccccaaagccacttcctctccgctgtacctagcccacgaggtgcagttgttcagcagccagtatcctttccatgttcctctgctgtcttcccagaaaatggtgtatcccggcttgcaggagccctggctacatagcatgtatcatggggccgcattccagctgacacagggtgatcagctgtccacccatacagacggcatccctcaccttgtattaagccctagcacggtgttttttggggcctttgccctgtag

SEQ ID NO: 193631 - DNA, 618 bp, synthetic construct
  misc_feature 1..618: note = Description of Artificial Sequence: Synthetic coding sequence
  source 1..618: mol_type = other DNA
atgaccccccccgagcggctgttcctgccccgggtgcggggcaccacactgcacctgctcttgctaggtctactcctcgtcttgttgccaggtgcgcagggtttgccaggcgtcgggttgacgccttcagctgctcagactgctagacaacatcccaagatgcatctcgcacactccactcttaaaccggccgctcacctcatcggggatccttccaagcagaacagtctgctctggcgagctaatacagaccgagcttttctgcaggatggtttttctctgtcgaataattcactccttgtgccaacatctgggatttatttcgtctactcccaggtggtattctcagggaaagcttacagcccgaaggcgactagctctcccttgtatttggcccacgaggtgcagcttttttccagtcaatatccattccatgtgccactgctttccagtcagaagatggtttaccctggattgcaagaaccttggctacactcaatgtaccacggggccgcctttcagctcacacagggtgaccagctgtcaacacatactgatggcatcccacatctcgtgctgagtccctccacagtgttctttggagccttcgccttgtag

SEQ ID NO: 193632 - DNA, 618 bp, synthetic construct
  misc_feature 1..618: note = Description of Artificial Sequence: Synthetic coding sequence
  source 1..618: mol_type = other DNA
atgaccccccccgagcggctgttcctgccccgggtgtgcggcaccactctccatctactcctactaggtcttctgcttgtgttgctgcccggagcacaagggctgccaggggtcgggttgacccccagtgccgctcaaaccgcacggcagcaccccaagatgcatttagctcactccacgctcaagcccgctgctcatctaataggagacccatccaaacagaattccctactttggagagctaacacagatagggcttttcttcaggacgggttctctctgtctaacaacagcctgcttgttccgacctcaggaatctacttcgtgtattcacaggtggtcttttctggaaaggcttattcccccaaggctacctcctcgccactttatctcgctcatgaggtccagctcttctcctcccaatatccattccacgtcccactattgtcttcccagaaaatggtgtatcctggtctgcaggagccctggctccatagcatgtaccatggagctgcctttcagcttacccaaggggaccagctgtccacccacacagatggcattccacacctcgtgctgtctcctagcacagtgttcttcggcgcattcgccctgtag

SEQ ID NO: 193633 - DNA, 417 bp, synthetic construct
  misc_feature 1..417: note = Description of Artificial Sequence: Synthetic coding sequence
  source 1..417: mol_type = other DNA
atgaccccccccgagcggctgttcctgccccgggtgtgcggcaccacactacacctgctccttctgggtcttttgctggtgctgctgcccggagcccagggcctcccaggtgtcgggctgaccccctccgcggcacagactgcaaggcagcacccaaaaatgcatttagcccatagtactttgaaaccggccgctcacttgattggtgacccctcaaaacagaacagcctgttgtggagggccaataccgaccgtgctttcttacaggatggtttctccctgagtaacaactccctgcttgtcccaacatcaggaatttacttcgtctattcccagggctcaagccctccgctgctgtggcccttccagcaactcaagtcatcactgatcaagtcaccagagctcagcaaaaaatag

SEQ ID NO: 193634 - DNA, 618 bp, synthetic construct
  misc_feature 1..618: note = Description of Artificial Sequence: Synthetic coding sequence
  source 1..618: mol_type = other DNA
atgaccccccccgagcggctgttcctgccccgggtgcggggcaccactttgcatttgctcctgctgggactgctgctggtactgctgccaggcgctcagggactgcctggcgtcgggctgacaccgagcgcagcacaaacagcaaggcagcaccctaagatgcacctggctcactctactctgaaacccgctgctcaccttatcggcgatcccagcaaacagaacagcctgttatggcgggctaacacagacagagcattcctgcaggacggattttctctgtcaaacaatagtctgctcgtccctactagcggaatctatttcgtgtatagccaggtcgtgttctcgggtaaggcttactcgcccaaagccacttctagccctctttacctggcccacgaggtgcagcttttctcctcccagtatcccttccacgttccactactctcaagccagaagatggtgtatcctggtctgcaggaaccgtggcttcactcaatgtaccacggagcggcgttccagctcacccagggcgatcagctaagcacacatactgatggcattcctcacttggtgttatcaccctcgactgtctttttcggcgcatttgccttatag

SEQ ID NO: 193635 - DNA, 618 bp, synthetic construct
  misc_feature 1..618: note = Description of Artificial Sequence: Synthetic coding sequence
  source 1..618: mol_type = other DNA
atgaccccccccgagcggctgttcctgccccgggtgcggggcaccacactgcacctgctgcttctggggctactgctggtgctcttgcccggggcgcaagggcttccaggagtggggcttactccttccgccgcccagacagccagacagcatcctaagatgcaccttgcccactcaaccctgaagcccgctgctcatctgatcggagatccctcaaaacagaattcgctgctgtggcgcgcaaacaccgacagggccttcctgcaggatggattctcattaagcaacaacagccttctcgtgcccacgtctggcatctatttcgtttactctcaagtggtctttagcggaaaagcctatagccctaaggcgacatcctcgcccctgtacctagctcatgaagtgcaattattctccagtcaatatcctttccacgttcctctcctttcctctcagaaaatggtttatccagggttacaggagccttggctgcattccatgtatcacggcgctgcctttcagttaacacagggcgatcaattatctacccataccgacgggattccacatctagtccttagccccagtaccgtgttctttggggccttcgcactttag

SEQ ID NO: 193636 - DNA, 618 bp, synthetic construct
  misc_feature 1..618: note = Description of Artificial Sequence: Synthetic coding sequence
  source 1..618: mol_type = other DNA
atgaccccccccgagcggctgttcctgccccgggtgtgcggcaccacattacatctgctgttgctcggattgttattagttcttctccctggggcccaaggactgcccggggtgggcctgacaccaagcgcggcacagactgcccgtcaacaccctaagatgcatctcgctcactctaccctgaaacccgcagcacacctgatcggggatccctccaaacagaattccctactatggagagcaaacacagacagagcatttttacaggacggattctctctgtctaacaattcccttctggtcccaacttcagggatctatttcgtctactctcaggtcgttttctccggtaaggcttacagccctaaagcgacaagcagcccgctgtacctagcccatgaggtgcaactcttcagcagtcaatacccgtttcacgtgcccctgctcagctctcagaaaatggtctacccaggtctgcaggaaccatggctgcacagtatgtatcacggggccgcttttcaacttacacagggtgatcagctgtcaacacacacagacgggatcccccacttagttttgtcacctagtaccgtgttcttcggcgcttttgccctctag

SEQ ID NO: 193637 - DNA, 618 bp, synthetic construct
  misc_feature 1..618: note = Description of Artificial Sequence: Synthetic coding sequence
  source 1..618: mol_type = other DNA
atgaccccccccgagcggctgttcctgccccgggtgtgcggcaccactctgcacctgctgttactaggcctcttactggtactgcttccaggagctcaaggccttcccggagtgggtctcacaccaagcgccgcacagacagcaaggcagcaccccaagatgcatttggctcactcaactctcaaacccgcagcccacctgatcggggacccgtcgaaacagaacagcctgctgtggcgcgccaacactgacagggcgtttctgcaggatgggttctccctgagcaacaactccctcctcgtgccaactagcggcatctatttcgtgtatagccaagtggtcttttcagggaaggcttattctcctaaagccacctctagccccctgtacctggcacacgaagtgcagctattcagttcacaatatccttttcacgtgccactattgagcagccagaaaatggtctatccagggctgcaagagccatggcttcacagcatgtaccatggagccgcttttcagttgacacagggagatcagctatctacacataccgatgggatcccgcatttagtgctcagcccttctacagtctttttcggggctttcgccctttag

SEQ ID NO: 193638 - DNA, 618 bp, synthetic construct
  misc_feature 1..618: note = Description of Artificial Sequence: Synthetic coding sequence
  source 1..618: mol_type = other DNA
atgaccccccccgagcggctgttcctgccccgggtgcggggcaccactctccacttgttgcttctaggcctgttactggttctgctgcccggcgcacaaggccttcccggcgttggacttaccccctctgcagcccaaaccgcacggcagcaccctaaaatgcacctagctcatagtaccctgaagcccgccgcacatttgatcggcgacccatccaaacagaattcactgttatggcgagccaacaccgatagagcttttcttcaggatgggttctcactgtccaataattccctgctggtgcctacctcaggaatctactttgtttattcgcaggtcgtgttcagtggaaaggcttatagccctaaggccacatccagtccactgtacttagcacacgaggtgcagctgtttagctcacagtacccatttcatgttcctttactgagctctcagaagatggtttatccaggcctgcaagaaccatggctgcattcgatgtatcatggtgcagcatttcagctgacgcaaggcgatcaactgtccactcatactgatggcattccccatttagttctgtccccctcaactgtctttttcggcgcctttgctctgtag

SEQ ID NO: 193639 - DNA, 417 bp, synthetic construct
  misc_feature 1..417: note = Description of Artificial Sequence: Synthetic coding sequence
  source 1..417: mol_type = other DNA
atgaccccccccgagcggctgttcctgccccgggtgcggggcaccacccttcacctgttgttacttggcctgctgttggtcctcctgccaggcgctcaagggttgcctggtgtcgggctcaccccatccgccgcccaaactgcccgccaacaccccaagatgcacctggcccattccacgctcaaacctgcagctcacttgattggcgatcccagcaaacagaattctctgctttggcgcgcaaacaccgatcgggcctttttacaagatggttttagcctatctaacaatagcctgctggtgccaacgagcggcatctacttcgtatattctcagggatcatctccccccctgttatggcctttccagcagttgaagtcttccttgatcaaaagcccagaactctccaaaaagtag

SEQ ID NO: 193640 - DNA, 474 bp, synthetic construct
  misc_feature 1..474: note = Description of Artificial Sequence: Synthetic coding sequence
  source 1..474: mol_type = other DNA
atgaccccccccgagcggctgttcctgccccgggtgtgcggcaccacactccacttgctcctcttgggactgctgcttgtgctgcttccaggagcccagggacttcccggcgtagggctcactccaagcgcggctcagacagcacgccagcacccaaagatgcacctggcacattctaatttgaagcccgctgcacaccttattggcgacccctccaagcagaactcactgctttggcgcgctaataccgacagagctttcctccaggacggctttagtttatctaacaattccctgctggttccgaccagtggcatctattttgtgtactcccagctacctgaagacggagtctcacgggctgccgggactttggcagccctcgatgttccaagaggatgcgtccccgcccatcccggccgtcctgccatccatccgcaccggtggcacccacctccttctcctcagccatag

SEQ ID NO: 193641 - DNA, 417 bp, synthetic construct
  misc_feature 1..417: note = Description of Artificial Sequence: Synthetic coding sequence
  source 1..417: mol_type = other DNA
atgaccccccccgagcggctgttcctgccccgggtgtgcggcaccacactgcacctccttttgctggggctccttcttgttctgttgcctggggcccaagggctgccaggcgtgggcctcacaccatcggccgcccagacagctagacagcatccaaaaatgcacctggcccactcaacattaaaaccagccgcccacctcattggggatccaagcaaacagaattctcttctgtggcgcgccaacactgatcgcgcctttctccaagatggattttcgttgagcaacaattcgctgctcgtacctactagtggaatttattttgtgtatagtcaggggagttctcccccgctgttgtggcctttccagcaacttaagagctccttgataaaatcaccagagctatctaaaaagtag

SEQ ID NO: 193642 - DNA, 417 bp, synthetic construct
  misc_feature 1..417: note = Description of Artificial Sequence: Synthetic coding sequence
  source 1..417: mol_type = other DNA
atgaccccccccgagcggctgttcctgccccgggtgtgcggcaccaccttgcatctgctgctattgggcttgctgcttgtgctgttaccaggcgctcagggactgcctggcgtgggactcaccccgagtgcggctcagaccgccaggcagcacccgaagatgcatctggcccattccacactgaaaccagccgcacacctgatcggtgatcccagcaagcagaactctctgttatggcgcgccaataccgacagagcctttctgcaggacggattcagcctcagtaacaacagtttgcttgttccgacttcaggtatctactttgtgtattcacagggaagcagtcctccccttctatggccatttcagcagttaaagagttcactgatcaaatcccccgagctgtccaaaaaatag

SEQ ID NO: 193643 - DNA, 417 bp, synthetic construct
  misc_feature 1..417: note = Description of Artificial Sequence: Synthetic coding sequence
  source 1..417: mol_type = other DNA
atgaccccccccgagcggctgttcctgccccgggtgcggggcaccacactgcacctgcttctcctggggctactgctggttttactgccgggggctcagggactccccggggtggggctgacacctagcgcagctcagactgcacgtcaacaccccaaaatgcacctcgcccactccacactgaaacctgccgctcatctcatcggcgacccctctaagcagaactcccttctgtggcgtgccaacaccgatcgcgccttccttcaggacggcttctcactgtccaataacagcctccttgtccccacttcggggatctacttcgtatactctcagggaagctcccccccacttctctggccattccagcaactgaagtcttcgctgataaaaagccctgaattgtctaagaagtag

SEQ ID NO: 193644 - DNA, 735 bp, synthetic construct
  misc_feature 1..735: note = Description of Artificial Sequence: Synthetic coding sequence
  source 1..735: mol_type = other DNA
atgggcgccctgggcctggagggccggggcggccggctgcagggccgcggctcccttctactggccgtggctggagccacatcactggtgactctcctactagctgtcccaataactgttctggctgtgctcgccttagtccctcaggatcaggggggcctagttactgaaactgccgacccaggcgcccaagcccagcagggccttggcttccaaaagctgcctgaagaagaaccagagactgacctgagccctgggctgccagcagctcatctgataggtgccccgctcaagggtcagggactgggctgggagaccaccaaagaacaagctttcctgactagcggcacacagttttctgacgctgaagggctagcactgccgcaggacggcttgtattatctgtattgcttagttggctaccgcggaagggcaccgccgggtgggggagacccacagggacggtccgtgacattgcgcagcagtctctatagagccggcggggcctatggacctgggactcccgaacttcttttagagggggctgaaaccgtgacacctgtgcttgaccctgcaagacggcagggctatgggccactatggtacacatctgtggggtttggtggcctggtccagctccgacggggggagcgggtctacgtgaacatatcccaccctgacatggtggatttcgctcgtggtaagacgtttttcggggccgtgatggtgggttag

SEQ ID NO: 193645 - DNA, 735 bp, synthetic construct
  misc_feature 1..735: note = Description of Artificial Sequence: Synthetic coding sequence
  source 1..735: mol_type = other DNA
atgggcgccctgggcctggagggccggggcggccggctgcagggcaggggcagcctgctgctggccgtcgccggagcaacctccctggtaacgctcttgctggccgtacccatcactgtgctggcggtgttagcgctggtgccacaggaccagggtgggctcgtgaccgagacagcggatcctggcgctcaggctcagcagggcctgggcttccagaaacttccagaggaggaacctgagacagacctgagccccggtctgcccgctgcacatctgataggcgccccactgaaagggcagggactgggttgggagaccacaaaagagcaggctttcctcacctccgggacacagttctccgacgcagaggggttagctcttcctcaagacggcctgtactatttatactgcctcgtcggctaccgcggcagggccccacccggtgggggcgatccgcaagggcgtagcgtgaccttaagatcaagtttgtatcgggccggcggcgcctacggacctgggacacccgagttgctactcgaaggcgccgagacagtcaccccagtgctggaccccgcccggagacaaggttacggcccattgtggtacacatctgtcggctttggtgggttagtccagctcagaaggggtgaacgggtttatgtcaacatctctcaccctgatatggtggattttgctcgcggtaagacattctttggagcggttatggtggggtag

SEQ ID NO: 193646 - DNA, 735 bp, synthetic construct
  misc_feature 1..735: note = Description of Artificial Sequence: Synthetic coding sequence
  source 1..735: mol_type = other DNA
atgggcgccctgggcctggagggccggggcggccggctgcagggccgtggctctttactgctggcagtagctggcgcaacttccctcgtgacactcttgctggctgttccaatcaccgtgttagctgtgttggctctcgtccctcaggaccagggcggcctggtgacagaaaccgccgatcctggcgcacaggcacagcagggtcttggcttccagaagttgcctgaagaagagcccgaaactgatttgtcacctggcctccctgccgctcacctcatcggggctcccttgaaagggcaagggctgggctgggaaactactaaagagcaagcctttctcacctcaggtacacaattctcagacgctgagggcctggcccttccccaggatggtctttattacctgtactgcctagtgggttacagggggagagcccctccaggcggtggcgatccgcaaggcaggagcgttacccttcgctcttctctatacagggctggcggggcctatggaccaggcacgcccgagctgctccttgaaggagccgaaacagtgactcccgtgcttgatccagctcggaggcagggatatggccctctatggtacacctctgttggctttgggggtctagttcagctaaggcggggcgagagggtttacgtgaacatttcccatcctgatatggtagactttgccaggggaaagactttctttggagccgttatggtggggtag

SEQ ID NO: 193647 - DNA, 735 bp, synthetic construct
  misc_feature 1..735: note = Description of Artificial Sequence: Synthetic coding sequence
  source 1..735: mol_type = other DNA
atgggcgccctgggcctggagggccggggcggccggctgcagggcagaggtagcctgttgctcgccgtagccggcgccacttcgctcgtgactttactcctagccgtcccaattactgtgctggctgtgctggcactggtccctcaggaccagggtgggcttgtgactgaaactgcagacccaggtgcccaagcacagcagggactgggatttcaaaaactgcctgaggaagagccggagaccgacctctcacccggcttaccagctgctcaccttatcggggccccactgaagggccaggggctgggttgggaaacaaccaaagaacaagcattcctgacaagcgggacacaatttagtgacgccgaaggcctggcgctgccgcaggatggcctgtactatttatattgtctggtgggttaccgcggccgtgcaccacccggaggcggggatcctcaaggacggagtgtaacattgagatcgtctctctacagggccgggggcgcttacgggcctggaacccctgagcttcttctcgagggagctgaaaccgtgacacctgtgctcgatcccgcacggcggcagggatatggcccgctgtggtacacaagcgtgggattcggcggtttagtgcagctgcgccgtggcgagagggtgtatgtgaacatctcccatcctgacatggttgatttcgcccgcggcaagaccttcttcggcgccgtgatggtggggtag

SEQ ID NO: 193648 - DNA, 735 bp, synthetic construct
  misc_feature 1..735: note = Description of Artificial Sequence: Synthetic coding sequence
  source 1..735: mol_type = other DNA
atgggcgccctgggcctggagggccggggcggccggctgcagggcagaggatccctcttgctcgcagttgccggggccacaagtctggtcaccttgctgctggcagtcccgattaccgtactcgccgtgctagcactggttccacaggaccagggaggcctagtgactgagactgccgatcccggagcacaggctcagcagggtttgggcttccaaaagctgccggaggaagagccagaaactgatctctctcctggtctcccagcagctcacttgatcggagctcctctcaaaggacaagggctgggctgggaaacaacaaaagagcaggcatttttgactagcggcacgcagttctctgacgcagagggactcgcccttcctcaagatgggctgtattacctctactgcctcgtcggataccgtggacgggccccgcccggtggaggtgatcctcagggaagaagcgtcacactaagaagcagcctctacagggctggaggcgcctacgggcctggaactcccgaactcctcctggagggagccgaaaccgtgacacctgtgctggatcccgctcggagacaaggttatgggccactgtggtacacgagtgttgggttcggcgggttggtgcagcttagacgaggggaaagagtgtacgtaaacattagccaccctgatatggtcgattttgcacgtggaaaaacattcttcggagcggttatggtgggctag

SEQ ID NO: 193649 - DNA, 735 bp, synthetic construct
  misc_feature 1..735: note = Description of Artificial Sequence: Synthetic coding sequence
  source 1..735: mol_type = other DNA
atgggcgccctgggcctggagggccggggcggccggctgcagggcagaggttcattattgttagccgtggccggagccacgagtctggttactcttctgctggccgtccctatcaccgtgttagccgtgcttgccctggtgcctcaagatcagggtgggttggtcaccgagacagcggacccaggcgcccaggcacagcaggggttgggttttcagaaactccctgaagaggagcctgaaaccgatctgtccccagggcttccagccgcccatctcataggagcccccctgaaaggccaaggcttagggtgggaaaccacaaaggagcaggctttccttacgtcaggaactcagttttctgatgctgaggggctggccttaccccaggatgggttgtactatctatattgtcttgtaggctaccggggcagggctcctccaggtggtggggatcctcaaggccgcagtgtaacactgcgaagtagtctataccgggccggcggagcctatgggcctggcacacccgagctgttgctggaaggcgctgagacggtcacacccgtgttggaccccgccagaaggcaggggtatggaccactatggtacacatccgtggggtttggaggactggtgcagctgcggaggggtgaacgggtatacgtgaacatcagccaccccgacatggtggacttcgctaggggcaagaccttcttcggtgccgttatggtgggatag

SEQ ID NO: 193650 - DNA, 234 bp, synthetic construct
  misc_feature 1..234: note = Description of Artificial Sequence: Synthetic coding sequence
  source 1..234: mol_type = other DNA
atgggcgccctgggcctggagggccggggcggccggctgcagggccgagggagtctgctgttagccgtcgcaggtgcaactagtctcgtaactttgctgctggctgtcccaatcactgtactggcagtgttggcccttgtcccacaggatcagggagggttaggctttagaagctgtcagcgtcgctcccaaaagcagatcagcgcccctggctctcaactgcccacctcttag

SEQ ID NO: 193651 - DNA, 735 bp, synthetic construct
  misc_feature 1..735: note = Description of Artificial Sequence: Synthetic coding sequence
  source 1..735: mol_type = other DNA
atgggcgccctgggcctggagggccggggcggccggctgcagggccgaggttcactcctgctagccgtcgccggtgccaccagcctggtgaccctcttgctcgccgtgccaataaccgtgttagccgtgcttgcgctggtaccacaggatcaggggggactcgttaccgagacagctgaccccggcgcccaggcgcagcaggggcttggttttcagaagctgccagaggaagagcctgaaaccgacctgtccccaggcctcccagctgcccacctgattggggcacctctcaaagggcagggcctgggatgggagactacgaaagagcaggcattcctcacttccggaacccagtttagcgacgcggaagggttagctcttccgcaggacggattatattacctgtactgcctcgtcggctacagaggacgggctcctccgggaggcggcgatcctcagggtaggagtgttaccctgcgctcctccctatacagagcagggggagcatatggaccagggactcctgaactgctgcttgaaggcgccgaaacagtgacacctgtgttggatcctgcacgacggcaaggatacgggcctctctggtacacgtccgtgggattcggcggactggtacagcttagaaggggggaaagggtgtatgtaaatatctcccacccagatatggtcgatttcgccaggggcaagacgttctttggcgctgtcatggtggggtag

SEQ ID NO: 193652 - DNA, 735 bp, synthetic construct
  misc_feature 1..735: note = Description of Artificial Sequence: Synthetic coding sequence
  source 1..735: mol_type = other DNA
atgggcgccctgggcctggagggccggggcggccggctgcagggcagggggtctctactgctagccgtggctggagcgacatccctcgtgacactcctcctggctgtgccaattacagtactggctgtgttggccctggttccccaggaccagggcgggctggtgacagagaccgcagaccccggcgcacaagcccagcagggactcggattccaaaaactccctgaggaggagcccgagacggacctttctccagggttaccggctgcccatctgataggtgcccccctcaaaggccaggggttgggctgggaaacaactaaagaacaggcattcctaacttccgggacacagttcagcgacgcggaaggcctagccctcccccaagacggactttactatctgtactgcctggttggctaccgcggccgggctcctccgggtggcggggacccccaaggccgaagcgtgacccttcgcagtagtctctacagagctggaggagcgtacggacccgggactccggagctgttgctggagggcgccgaaacggtcacgcccgtactggatcccgcccgccgccagggctatgggcccctgtggtacacctctgtgggtttcggcggtctcgttcagttacgcaggggcgaacgagtctacgtcaacatctctcatccggacatggtggactttgctaggggaaagactttctttggcgccgtcatggtaggctag

SEQ ID NO: 193653 - DNA, 276 bp, synthetic construct
  misc_feature 1..276: note = Description of Artificial Sequence: Synthetic coding sequence
  source 1..276: mol_type = other DNA
atggccgccagcagccgggcccaggtgctgagcctgtaccgggccatgctgcgggaatctaaacggttttcggcctataattatcgaacatacgcagtcaggcgcattcgcgacgctttcagagaaaacaaaaatgtcaaggatcccgtggagatacaaactttggtgaataaggcgaaaagggacctcggcgtgattaggagacaggtccatatcggtcagctgtatagtactgacaagctgattatcgagaatcgcgacatgccaagaacgtag

SEQ ID NO: 193654 - DNA, 393 bp, synthetic construct
  misc_feature 1..393: note = Description of Artificial Sequence: Synthetic coding sequence
  source 1..393: mol_type = other DNA
atggccgccagcagccgggcccaggtgctgagcctgtaccgggccatgcttagggaatcaaagaggttctccgcttacaattaccggacatatgccgtgagacgcatacgggatgcattcagggagaataaaaacgtaaaggacccggtggaaatccagaccttggtaaataaagccaagcgagacctaggtgtgattcggagacagatggactctcactccgtggcccaagctggcgtgcactggaatgatctctcctctctccagcctctgcccccctggtttaagcagttttcatgcctttccctgccaagcagttgggattaccgacgcactcctcctcggttggccaatttctgcattttgtcccgagatgttatttccctgtactag

SEQ ID NO: 193655 - DNA, 291 bp, synthetic construct
  misc_feature 1..291: note = Description of Artificial Sequence: Synthetic coding sequence
  source 1..291: mol_type = other DNA
atggccgccagcagccgggcccaggtgctgagcctgtaccgggccatgctccgggaatctaagagattctcagcctacaactacagaacatatgcagtcagaaggatcagggatgcttttcgagagaataaaaacgtcaaagatcccgtggaaattcaaaccctggtgaacaaagccaagcgcgaccttggagtgattcggcgacaggttgcagaacagggcactgcagctcgaagaaagagcggcaattcctcgcgatcgcttggcaaaccatgcacgagttggccttag

SEQ ID NO: 193656 - DNA, 2559 bp, synthetic construct
  misc_feature 1..2559: note = Description of Artificial Sequence: Synthetic coding sequence
  source 1..2559: mol_type = other DNA
atgctgagcggcaagaaggccgccgccgccgccgccgccgccgccgctgcggctactgggacggaggcaggtcctgggaccgccgggggctcggagaacggctcagaagtggccgctcagcctgcggggttgagtgggcccgctgaggtgggacccggcgcagttggtgaaaggacccccaggaaaaaagagcctccccgcgcttcaccccccgggggcctcgccgagccccccggctctgccggtccacaagcaggccctactgtggtccccgggtcagcaacgcccatggaaaccggaatcgccgaaacacccgaaggccgcaggacttcaaggcggaaacgtgccaaagtcgagtaccgggaaatggacgagtctttggccaacttgagcgaggatgagtactacagcgaagaagagcgaaacgcaaaagctgagaaggagaagaagctgcctccccctcctcctcaggcaccgccagaggaggaaaacgaatctgagccggaagaaccatctggtgtcgagggcgcagcctttcagtcccgtctccctcatgataggatgacttctcaagaggcagcctgcttcccagacatcatttcaggaccacagcagacccagaaggttttcttgtttattaggaatcgtaccctgcaattgtggcttgacaacccaaaaatccagctcacatttgaagctaccctccagcagctcgaggccccatataattccgacactgttctagttcacagagtccatagctatctggagcggcatggtttgattaatttcggaatctacaaacgaatcaaacctctgcccaccaagaagacaggcaaagtaattattataggctcaggagtttcaggactggcagctgcacggcagctccagagcttcgggatggacgtgacccttttggaagcgcgcgaccgggtcggcggcagagtggcaacattcagaaaaggtaattatgtcgctgaccttggcgcgatggttgttacaggactcggcggaaatcctatggccgtggtctccaagcaagtgaacatggagctggcgaagattaagcaaaagtgcccattatatgaagcgaacggccaagccgtaccaaaagaaaaggacgagatggtggagcaagagtttaatcgcctcctggaagctacctcctacctgtctcaccaactcgatttcaacgttctcaataataaaccggtttcgctggggcaagccctggaggttgtgattcagctgcaggagaaacatgtcaaagatgagcagattgagcattggaaaaaaatagtgaagacgcaggaggaattaaaggagctcttgaacaaaatggtgaatttgaaagagaaaataaaagagctccatcagcagtacaaggaagcttccgaagttaaaccaccccgagacatcacagcagagttcctggtaaagagcaaacacagagacctaactgccttatgcaaggaatacgacgagttagccgaaacccagggtaaactcgaagaaaaactccaagagctggaagctaaccccccatcagacgtgtacctcagtagcagggaccgacagatactcgactggcactttgcgaatctggaattcgcaaatgccacccccctttccaccctgagcctcaagcattgggatcaggacgatgactttgagttcaccgggagtcacctcactgtgaggaacggctactcttgcgtaccagtggctctggcggaagggctggacattaagctcaacaccgcagtgcgccaggttagatatacagcttccggttgcgaggtgatcgctgtcaacacacgatcaacttctcaaacgtttatctataaatgtgacgctgtcctttgcacgctcccgctaggtgtcctgaagcagcagccaccggcagttcagttcgtccctcccctgcccgaatggaaaacaagcgccgtgcagaggatgggctttggtaatcttaataaggtggttttgtgctttgaccgtgtcttctgggacccctccgttaacttgttcggccacgttggctcaacaacagcatcgagaggggagttgtttctgttctggaacctgtataaagcccctatcttgctggccctcgttgccggagaagctgcggggatcatggagaatatctcggatgatgtaattgtcggtcggtgcctggcaatcctgaaggggatttttggaagtagcgcggtcccacagccaaaagagacagtcgtctcaaggtggcgcgctgatccctgggctagaggttcttactcttatgtggcggcgggttcctctgggaatgactacgatcttatggcccagccgatcacaccaggccccagtatccccggtgcaccccagcccattcctagactgtttttcgcgggtgaacacaccatcaggaattaccccgcgaccgttcacggtgctctgcttagcgggttgagggaagctggaagaattgccgatcaatttctcggggctatgtatacactaccacgccaggctacccctggggtccccgctcagcaaagccctagcatgtag

SEQ ID NO: 193657 - DNA, 2631 bp, synthetic construct
  misc_feature 1..2631: note = Description of Artificial Sequence: Synthetic coding sequence
  source 1..2631: mol_type = other DNA
atgctgagcggcaagaaggccgccgccgccgccgccgccgccgccgccgccgcgactggcaccgaagccggcccagggactgcaggaggctctgagaacgggagcgaagtggcggctcagcccgccggcctctccgggccggcagaggtgggaccaggcgctgtcggtgagcgtacccccagaaaaaaggagccccctagagcatcaccacctggtggtctcgcggaacccccggggtctgcggggcctcaggctggccccacagtggttcctggaagcgccaccccgatggagactggtattgccgagacgcctgaaggtcgacgtacctctagaaggaaaagagctaaggtcgaatatagggagatggatgaatctttagcaaatctgtctgaggacgagtactattctgaagaggagcgcaacgccaaagcggaaaaggagaagaagcttcctccgcccccgccccaggcacctcccgaagaggagaatgagagcgagccagaggaaccttcaggtcaggcaggagggctccaagacgattcttctggggggtatggcgatggacaggctagcggcgtggagggtgcagcattccaaagtcgccttccccatgatcgtatgacatctcaggaggctgcctgtttcccagatatcatatccggaccacagcagacccagaaagttttcttattcatccgcaaccgcacactccagctgtggctggacaatcccaagatccagctgactttcgaagcgacactgcagcagctggaagccccttacaacagcgacaccgtcctggtgcatcgcgttcactcttatctggagagacacggcctgattaacttcgggatatacaaacgaataaagcctctcccaaccaaaaaaacaggcaaggtcattatcatcggcagtggcgtctccggactggctgcagccagacaactgcagtcattcggtatggatgttactctgttggaagctagagatcgcgtgggcgggcgggtggcaaccttccggaaggggaactacgtggcagacctaggcgcaatggtcgttactggactcgggggcaaccccatggccgtcgtgtctaaacaggtgaacatggagctagccaagattaaacaaaagtgcccactgtatgaggctaatggccaggccgagcggattatcgtccccaaagaaaaggatgagatggtggagcaggagtttaaccggcttttagaagctactagctacctgagccaccagctcgactttaatgtgctgaataacaaacccgtgagtttgggccaggcgttggaagtagtaatccaactacaagaaaaacacgtaaaagatgaacagattgaacattggaagaaaattgtgaagactcaagaggagctcaaggaactgttgaataagatggtcaaccttaaggagaaaattaaggagttgcaccagcaatacaaggaggccagtgaggttaaaccacctcgagatattactgctgagttccttgttaagagcaaacatagggacctgactgcattgtgcaaggagtacgatgagcttgctgaaacccaggggaaattagaagagaaacttcaagaacttgaggccaaccccccaagcgacgtctatctctcctctagggatcgccagatactggattggcatttcgcaaacctggagttcgcaaatgccaccccactcagtaccctcagcttgaaacattgggaccaggacgacgatttcgagttcactggatctcatctcactgttcggaacggctattcctgcgttcctgtcgctttagctgagggtctggacatcaagttgaacactgccgtccggcaggtgcggtatactgctagtggctgcgaggtcatcgctgtgaacacccggtctacttctcagacttttatctacaagtgcgacgccgtgctgtgcaccctgcccctgggcgtgcttaagcaacagccgcctgcagttcagtttgtcccacctcttccggagtggaagacaagtgcggtgcagcgtatggggttcggcaatctcaacaaagtggtgctctgctttgatcgcgtgttctgggatccgagcgtgaatctctttggtcacgtgggctcaacaaccgcctcacgcggcgagttgttcctgttctggaacctctacaaggcaccgatactgctggctttggtggccggagaggccgctggaatcatggaaaacattagcgacgatgtgatagttggccgctgtctcgctattctgaaggggatatttggttcaagtgcggtgccccaaccaaaagagacagttgtctccagatggcgagccgacccttgggctagaggcagctattcctacgtagccgcaggctccagcgggaacgactacgacttgatggcacagcccattacacctggcccatctattcccggcgctccccagcccattccccgcttgtttttcgccggcgagcacactatcagaaactaccccgctaccgtccacggcgcactgctctctggcctccgggaggcagggaggatcgccgatcaattcttaggtgcaatgtatacgctgccacgccaggcaactccaggggtgcccgcacagcagtccccatcaatgtag

SEQ ID NO: 193658 - DNA, 2631 bp, synthetic construct
  misc_feature 1..2631: note = Description of Artificial Sequence: Synthetic coding sequence
  source 1..2631: mol_type = other DNA
atgctgagcggcaagaaggccgccgccgccgccgccgccgccgccgctgccgcaacggggaccgaggctggaccagggactgccggaggatccgagaacgggtctgaagttgctgcgcagcctgcagggctttccggtcctgctgaggtaggaccgggcgccgtgggggaacggacccctaggaaaaaggagccacccagagcctccccccccggggggctggccgagcccccaggttccgctggtcctcaggccgggcccactgttgtgcctggcagcgctacacctatggagacaggcatcgctgagactccagaaggtcggcggacatctcgccggaaacgggctaaggtggaatatcgagagatggacgagagcctcgctaatctgagtgaggatgagtactattctgaggaggagcgcaatgctaaagccgagaaggaaaagaagctcccacctccccccccccaagcgccacctgaagaggagaatgaaagcgaacccgaagaaccctcaggccaagccggaggcctgcaggacgactcttctgggggctacggggatggacaggcctccggggtggagggggctgcatttcagagtaggttaccgcacgatcggatgaccagtcaggaggctgcctgtttccctgatataataagcggcccacagcagacccagaaagtgtttctgtttatcaggaatcggaccctgcagctgtggctggataaccccaaaatacaactgacattcgaggctacacttcaacagcttgaagccccatataacagcgacaccgtccttgtccacagagtgcatagctacctagagaggcacggattgataaattttggaatttacaagcggatcaagccgctgccgaccaagaagaccgggaaagtcatcatcataggctcgggcgtgtctggcctggccgcagccaggcagctgcaatcattcggtatggatgtaactctcctggaagctcgcgaccgagtggggggccgcgttgccactttcagaaaaggtaactacgtggccgatctcggagccatggtagtcacagggctcggggggaatcctatggcagtggtgagtaaacaggtgaacatggaactcgcgaaaataaaacagaaatgcccgctttatgaggcaaatggtcaagctgacactgtcaaagtgccaaaggagaaggatgagatggtcgagcaggaatttaacaggctcctagaggctaccagctacctctcccaccagctagactttaatgtgctgaacaacaaacctgtgagtctgggtcaggctctggaggtcgtaatacaactgcaggagaagcacgttaaggacgaacagattgagcattggaaaaaaattgtcaagacccaggaggagctgaaggagctcttgaacaaaatggtgaatctcaaagagaagatcaaagaactccaccagcagtacaaggaggcgtcagaggttaaaccaccacgggacatcacagcagagttcttggttaaaagtaagcaccgagacctgacagcactatgtaaggagtatgatgaactggccgagacacagggcaagctagaagagaaattacaggaactggaggcaaacccaccgagtgatgtttatctttcaagtcgggatcggcagattctagactggcacttcgccaacctggagttcgccaacgccactccccttagtaccttgagtttaaagcattgggatcaggatgacgatttcgaattcacgggaagtcatctaaccgtgagaaatgggtactcttgcgtaccggtagctctggctgagggtcttgacattaagctcaataccgccgtgaggcaggtaaggtacacagcgagcggctgtgaggtaattgctgtgaacacacggtctactagccagaccttcatctataagtgcgacgcagtgttgtgtacgctacctcttggcgtgttaaaacagcagcctccagcggtccagttcgtgccccccctgccagaatggaagacttccgccgtgcagcgcatgggttttggcaatctcaacaaagtggtgctatgcttcgatcgggtgttctgggatccctccgtcaacttatttggccacgttgggagtactaccgccagccgaggagagctgttcttgttttggaacctgtataaagccccaatcttactggccctggtggctggagaagctgccggcatcatggagaatatctccgatgacgtgatagtcggaaggtgtctcgcgattcttaagggcatcttcggcagcagcgcggtcccccagcctaaagagaccgtggtgtcccgatggagggctgacccgtgggctcggggatcctatagctacgttgcagcagggtcgtctggcaatgattatgatttgatggcccagccgattactccaggcccatctatccccggtgccccacagcctatcccgagattgttcttcgcaggggagcacactattagaaactatcccgctaccgtccacggagctcttctgtccggcctgcgtgaggccgggcggatagccgaccagtttctaggggcaatgtatacattacctagacaagctaccccaggcgttccggcccagcagtctccgtctatgtag

SEQ ID NO: 193659 - DNA, 1773 bp, synthetic construct
  misc_feature 1..1773: note = Description of Artificial Sequence: Synthetic coding sequence
  source 1..1773: mol_type = other DNA
atggccaccccccggggccggaccaagaagaaggccagcttcgaccattccccggactcgctccctcttcggagcagcgggcgccaggctaagaagaaagcaaccgagactacggacgaggacgaggatggggggagtgaaaagaaatacagaaagtgtgaaaaggctgggtgtaccgctacctgcccggtctgtttcgcctcagcctcagagagatgcgctaagaacggctatacctcccgttggtatcatctcagctgcggggaacacttttgtaacgagtgtttcgaccactattatcgtagtcataaggacggatacgacaagtatactacctggaagaagatttggacttccaatgggaagacagaaccctctcccaaggctttcatggcagatcaacaactgccatattgggtgcagtgcactaagccagagtgcaggaagtggaggcagctcaccaaagaaattcaactcactcctcagatcgcgaaaacatatcggtgcgggatgaaaccgaataccgccattaaacctgagaccagcgaccattgttctttaccagaagacctcgaggcgctcacacctcagaagtgtattccacacatcattgttcgcgggcttgtgcggattcggtgtgttcaagaggtcgagagaatcctgtacttcatgactaggaaaggtttgattaacaccggagtgctgagcgtgggggccgatcaatatctactacccaaggattatcacaacaagagcgtgattatcattggagcaggacccgccgggctggccgccgcccgccagctgcataattttggtatcaaggtgaccgtcctggaggccaaagaccggatcgggggcagagtatgggatgataaatcctttaaaggagttacggtgggtcgaggcgcacaaatcgtaaacggatgcattaataaccctgttgcgctcatgtgtgagcaggtgagtgcccggtcgtgggatcataatgaatttttcgcgcagtttgcaggtgatcacacccttctgacccccggctattcagtcatcatagagaagctggctgagggcttagacattcagttgaagtccccagtccagtgcatcgattactccggcgatgaagtgcaggtgaccaccacagacggcactggctatagtgcccaaaaagtgctggtgaccgtgcccctggcacttctgcaaaaaggcgcaatacagttcaacccccctttgagtgaaaagaaaatgaaagcaatcaacagtctgggggccgggattattgagaagatcgccctccagtttccctacagattttgggactccaaagtgcaaggggccgacttttttggccacgtccccccctccgccagcaaacggggactttttgcagtcttttatgacatggacccccagaagaagcatagcgtattgatgtccgttattgctggcgaggccgtggcaagcgttcgcacgctcgatgataaacaggtactccaacagtgcatggctactctgagagaacttttcaaagaacaggaggtgcccgacccaacaaagtactttgtgacgcggtggagcaccgatccttggattcagatggcttactccttcgtgaagaccggaggttcaggcgaagcatacgatattattgctgaagacattcagggtacagtctttttcgccggggaagctactaaccgccattttccccagacggtgaccggtgcctacttgtctggggtgcgggaggcctcaaagatcgccgctttttag

SEQ ID NO: 193660 - DNA, 2463 bp, synthetic construct
  misc_feature 1..2463: note = Description of Artificial Sequence: Synthetic coding sequence
  source 1..2463: mol_type = other DNA
atggccaccccccggggccggaccaagaagaaggccagcttcgaccacagccccgattctctacctctacgaagctccggcaggcaagcaaagaagaaagctacagaaactactgatgaagacgaggacggggggagtgagaaaaagtaccgcaagtgcgaaaaggccggctgtacagcaacgtgtcctgtatgttttgctagtgcctctgaaaggtgcgccaagaatggctatacaagccgttggtatcacctatcctgcggggagcacttctgcaacgaatgttttgaccactactacaggagtcacaaggacggctatgataagtacaccacttggaaaaagatctggacatcaaacgggaagactgaaccaagtcccaaagcattcatggcagaccaacaactgccttactgggtgcagtgcacaaagccagaatgccgaaagtggaggcaacttacaaaagaaattcagctgacaccccagattgcaaaaacttacagatgtgggatgaagccgaacactgctataaagccagagacctcggaccattgcagtctgccagaggacctccgtgtactggaagtgtccaatcattggtggtattcaatgctaattctgccacctctcctcaaggactccgtagccgcccctttgctgtctgcctattatccagattgcgttggcatgagcccttcctgtacgtcgacaaaccgcgcagctgccaccggtaacgcatcccccggcaaattggaacatagcaaggccgccttatccgtccacgtgccgggcatgaaccgatacttccagcccttttaccagccgaacgagtgcggtaaggcactatgtgtaaggccagacgtcatggagctggacgagttatacgagtttccagaatacagccgggaccccacgatgtacctcgctctgcgcaatctaatccttgccctgtggtacacgaattgtaaagaagctctaacgcctcagaagtgcataccccacataatcgtgaggggcctggttcggatccgttgtgtgcaggaagtggaaagaattctctacttcatgacgagaaagggcctgatcaacaccggcgtgctctcagtgggagcagaccagtaccttttgcccaaggactatcacaacaagtctgtgatcatcattggagctggtcctgctggcctggccgccgccagacagctgcacaatttcggaatcaaagtcacagttctggaagcgaaggaccggatcgggggcagggtgtgggatgataagagtttcaagggagtgacagtggggcggggcgcccaaattgtcaatggttgtattaataaccccgtggcattgatgtgcgaacaactggggatctccatgcacaaatttggtgagagatgtgacctgattcaggaaggaggacggataacagaccctactatcgataagcgaatggattttcacttcaacgcgctcctagatgtggtatctgagtggcgaaaagacaagactcagctgcaggatgttcctcttggagagaagatcgaagagatctataaagcctttatcaaagaatccggaatccaattcagcgagctggagggccaagtgctccaatttcacctttccaacctggagtatgcatgtgggagtaaccttcaccaggtgtctgcaaggagctgggatcacaatgagtttttcgcccagtttgctggagaccacacccttttgaccccagggtatagtgtcattattgagaaacttgcggaaggcctcgatattcagctgaaaagccccgtgcagtgcattgactactccggggatgaggtgcaggtgacaaccacagatggaacaggctatagcgctcagaaggtcctggtgacagttcctctggcgcttctgcaaaaaggcgctatccaattcaatccaccgctcagcgaaaagaagatgaaagctatcaattcccttggggccggcatcatagaaaagatcgccctgcagtttccgtacagattttgggacagcaaagtacagggtgcggacttctttggccacgtccctccctcagctagcaaacggggactgttcgctgttttctacgacatggaccctcagcacagtgtgttgatgagcgttatagccggtgaagcggttgcaagcgttcgaactctcgatgacaagcaggtgctacagcagtgcatggccacactgcgggaattattcaaagaacaggaggttcctgatcccaccaaatatttcgtcacccggtggagtacagacccgtggattcagatggcttactcattcgtcaaaaccggaggttccggcgaagcctacgacattatcgccgaagatattcagggcacggtgtttttcgcgggcgaagccacgaatcggcactttccccagaccgtaaccggagcgtacctgtctggggtccgagaagccagcaaaattgccgccttttag

SEQ ID NO: 193661 - DNA, 2472 bp, synthetic construct
  misc_feature 1..2472: note = Description of Artificial Sequence: Synthetic coding sequence
  source 1..2472: mol_type = other DNA
atggccaccccccggggccggaccaagaagaaggccagcttcgaccactcacccgactccctgccgctgcgctccagcggccgccaggctaaaaaaaaggccacagagactaccgacgaagacgaggatggtggatctgaaaagaaataccgaaagtgcgagaaggccggctgcaccgcaacttgtccagtgtgttttgcttcggccagcgagaggtgtgcaaagaacggctacacttctaggtggtaccacctctcttgtggagaacacttctgtaacgaatgttttgatcattactatcggagccataaagatggctatgataagtataccacttggaagaaaatctggacaagtaacggaaagacagaaccttcaccaaaggcttttatggccgaccagcagctgccctattgggtgcagtgcactaaaccagaatgtagaaagtggagacagttgacaaaagagatccaactgacacctcagatagctaagacctaccggtgcggaatgaaacccaatacagcaatcaagcctgaaacttccgatcattgctccctgcctgaggacttgagggtgctggaggtctccaaccattggtggtactcaatgttgattcttcccccgttgctgaaggactcagtggcagcaccgctgctgtcggcgtattaccctgactgtgtagggatgtcccctagctgcacatctaccaatagagcggcagccaccgggaacgcgtcacccggaaagcttgaacattcaaaggccgccctgtctgtgcatgtgcccgggatgaatagatatttccagccattctaccagcccaacgagtgcggcaaagcactctgcgttaggcctgacgtgatggagttggatgaattgtatgaatttccagaatacagtagagaccctactatgtacctggccctccggaacctcatactggccctgtggtacaccaactgtaaggaggccctgacaccccagaaatgcatcccgcatattatcgtgcgaggcctggtgcgcatccgctgcgtgcaggaggttgaacgcatcctgtactttatgactcgtaaggggcttataaacaccggggtactatctgtcggcgccgatcaatatctactgccaaaggactaccacaataaatccgtgattatcatcggcgccggtcccgccggtctggccgctgctagacaactgcacaattttgggatcaaagtgactgtgctcgaagcaaaagatcgaataggtggcagagtgtgggatgataagtcctttaagggtgtgaccgtcggaaggggagcccagatagtcaatgggtgtataaataacccagtggcactcatgtgcgagcagctgggcataagcatgcacaagttcggggaaagatgcgacctcattcaggagggcggaagaatcaccgatcccaccatcgacaagagaatggattttcacttcaacgcgttgttggacgtggtgtccgaatggaggaaggacaaaactcaactgcaggacgtaccgctgggtgaaaagatcgaagaaatctataaagctttcatcaaagagtcagggatacagttcagcgaactcgagggtcaggttctgcagttccacttgagcaaccttgagtatgcatgcgggagtaatcttcaccaagtgagcgctagatcatgggaccataacgagttcttcgcccagttcgcaggcgaccacacccttttaacgcctgggtactccgtcattatcgaaaagttggcagaaggcctagatatccagctgaagtccccacaagttcagtgcattgactacagtggagatgaagtgcaagtgactacaacggacggcaccggctatagcgcacagaaagtcttagtgacggtgccgcttgctctgctgcaaaagggcgctatacaattcaacccaccattgagtgagaagaagatgaaagccattaacagtttgggagccggaattattgagaagattgcactgcagtttccatacaggttctgggacagtaaagtccaaggggccgatttcttcgggcacgtccctccttccgctagtaagaggggtctctttgctgtgttttatgatatggatccccagaagaaacattccgtcctgatgagcgttatcgccggagaagccgtcgcgtccgtacgaactctggatgacaagcaggtcctccaacaatgcatggccaccctgcgcgagctcttcaaagaacaagaggtcccagaccccacgaagtactttgtcaccaggtggtctacagacccttggatccaaatggcctactctttcgtgaagaccggtggctcaggggaggcttatgacattatcgcggaagacatacaggggacggtctttttcgctggagaggcaaccaacaggcactttccccagaccgttaccggagcatatctctcaggggtgcgggaggcctcaaaaatcgccgctttttag

SEQ ID NO: 193662 - DNA, 1776 bp, synthetic construct
  misc_feature 1..1776: note = Description of Artificial Sequence: Synthetic coding sequence
  source 1..1776: mol_type = other DNA
atggccaccccccggggccggaccaagaagaaggccagcttcgaccatagtcccgattccctaccacttcgtagttctggacgtcaggccaagaagaaagcaaccgagacaaccgacgaagacgaagacgggggcagtgagaagaagtacagaaagtgcgaaaaggcaggctgcaccgccacctgtcccgtctgctttgcgtctgcgtccgaaagatgtgctaagaacggctataccagccgatggtatcatctgtcgtgcggtgagcacttctgtaacgagtgcttcgaccattattatcgcagccataaggacggttatgacaagtacacaacatggaaaaagatctggaccagtaacggtaaaacggaaccatcacccaaggccttcatggctgatcagcaactgccgtattgggtgcagtgcactaaacctgaatgtcgcaagtggcgtcagttaacaaaagagatacagctgacgccccaaatcgccaagacctaccggtgcggaatgaagcctaacactgccatcaaaccagagacttctgaccactgcagtctgccagaggacctggaggctcttactcctcaaaagtgcattccccacattatcgtcagaggtcttgtacggattcggtgtgttcaagaggtcgagcgaatcctgtacttcatgaccaggaagggactcataaacaccggagtcttatccgtgggcgcagatcagtatctgctacccaaggattatcacaacaagagcgtcataatcatcggggctggccctgcagggttggccgctgctaggcagttgcacaactttggaatcaaagttactgtgctcgaggccaaagaccgcataggcggcagagtgtgggatgataagagttttaaaggtgtgaccgtgggaaggggcgcccagatcgtcaatggatgcattaataacccagtcgctctgatgtgcgagcaggtttcagccagaagctgggatcacaatgagtttttcgcccagtttgcaggcgatcacaccttgctgacccctgggtattcagtgattatagagaagcttgctgaaggcctggatattcagctcaagagccctcaagtacagtgcatagactactcaggagacgaagtgcaggtgactactaccgatggtactggctatagcgcccagaaagtgcttgtgactgtgcccctcgctcttctacagaagggtgccatacagtttaatccccctctgagcgaaaagaagatgaaggcaatcaactctttgggcgctggaattatcgaaaagatcgccctgcagtttccatacaggttctgggatagcaaggtgcagggagctgatttcttcgggcacgtccctccgtctgcctcaaaacgggggttgttcgctgtcttctacgatatggatccccagaagaagcattcggttcttatgtcagtgatagctggggaagccgtcgcatccgtgcggactctcgacgacaagcaggtattacaacagtgtatggctaccttgcgcgagctgttcaaggagcaggaggtgccagatcctacaaaatatttcgtgacgcggtggagtaccgatccctggattcagatggcctatagtttcgtgaaaaccgggggttccggagaagcatacgacatcattgccgaggatatacaaggcaccgtcttctttgcgggagaagcaactaataggcattttccccaaacggtcacaggcgcttacttgtctggggtccgcgaagcttcaaagatcgccgcgttctag

SEQ ID NO: 193663 - DNA, 1923 bp, synthetic construct
  misc_feature 1..1923: note = Description of Artificial Sequence: Synthetic coding sequence
  source 1..1923: mol_type = other DNA
tgatgcagcctgcccgaggacctgcgggtgctggaggtgagcaaccactggtggtatagcatgctaatactcccaccattgctgaaggatagtgttgccgctccgttgctgtccgcctattatccagattgcgtgggaatgtccccgtcgtgtactagtacgaatcgggccgcagcaaccggtaacgcgtcacctgggaaacttgaacactctaaggcagccttatcagttcacgtgcctgggatgaatagatacttccagccattttaccagcctaacgagtgtggtaaagcattgtgtgtgcgccctgacgtgatggaactcgacgaactgtacgagtttcccgagtactctcgcgaccccactatgtacctagccctgcgcaacctgatattagcgctgtggtacaccaattgtaaggaagccctaacaccgcaaaaatgtatacctcacattattgtgcggggtctggtgcgtatccgatgcgtgcaggaggtcgagcgaatcctgtactttatgactcgtaaaggtctcatcaacactggagtgctctccgttggggccgatcagtacttactgcccaaggattatcataacaagagcgtgatcatcattggggctggaccagccgggctggccgccgctcgccagctgcacaacttcgggataaaggttaccgtcctcgaggccaaggacaggattgggggccgggtctgggatgacaagtcattcaaaggggtgacagtaggacggggcgcgcagatcgtcaatgggtgcattaacaaccccgttgccctgatgtgcgagcagttaggcatctctatgcataaatttggagagcgctgcgacctgatccaggagggagggcggattaccgatcctacaatagataagcgaatggactttcattttaatgctcttctagacgttgtgtctgagtggcggaaagataaaacccagcttcaggatgtccccctgggggagaaaatcgaagagatctataaggctttcattaaggaaagcggtatccagttttcagagctggaaggccaggtccttcagttccatttgagcaatctggaatacgcttgtggctcgaacctccaccaggtgtcggccagatcctgggatcataacgagttcttcgctcaattcgcaggagaccacactctccttacccccggctattctgttatcatcgagaagctagccgagggtttagacattcagctgaagtctccccaagtgcagtgcatagactattcaggggatgaggtacaggtaacgaccacagacggaaccgggtatagcgcccagaaggtgcttgtgacagtcccactggcgctccttcagaagggggcgatacagttcaacccacccctgagtgaaaagaaaatgaaagccataaacagcctaggtgctgggattatcgagaaaatagccttgcaatttccataccgattttgggatagtaaggtccagggcgccgatttcttcggtcatgttccaccatctgccagtaaacgcggattatttgccgtgttttacgatatggacccacagaaaaaacacagcgttctaatgagcgtgatcgcaggtgaagccgtggccagcgttagaacgctggacgataagcaggtgcttcagcagtgcatggctaccctgagggaattattcaaggagcaggaagttcctgacccaacaaagtatttcgtgacacgctggagtacagacccttggatccagatggcctactctttcgtgaaaacagggggatctggagaagcttatgatattatcgccgaagacattcaggggacagtttttttcgccggcgaggccaccaaccgccatttcccccaaaccgtaaccggtgcctacctcagcggggtaagagaggcaagtaagattgccgcgttctag

SEQ ID NO: 193664 - DNA, 342 bp, synthetic construct
  misc_feature 1..342: note = Description of Artificial Sequence: Synthetic coding sequence
  source 1..342: mol_type = other DNA
atgagcgtgatcgccggcgaggccgtggccagcgtgcggaccctggatgataagcaggttctgcagcagtgcatggccactctgcgcgaactttttaaagaacaggaggtacctgaccccactaagtatttcgtgacgcgttggtccaccgacccatggattcaaatggcatattccttcgtgaaaaccggcggcagtggtgaggcctatgatatcatagccgaggatattcagggaactgtttttttcgccggcgaggcgaccaacaggcattttccacagaccgtgacaggagcttatctgagtggagttcgcgaggcatccaagatcgctgctttttag

SEQ ID NO: 193665 - DNA, 3966 bp, synthetic construct
  misc_feature 1..3966: note = Description of Artificial Sequence: Synthetic coding sequence
  source 1..3966: mol_type = other DNA
atggtgctgaccctgggcgagagctggcccgtgctggtgggccggaggttcctgtcgctgtcagccgccgatgggtctgacggtagccatgactcatgggatgtggaaagggtagcagaatggccctggctatctggaaccatcagggcagtttcacacaccgacgttactaaaaaggatctgaaggtctgcgtcgagtttgacggggagtcttggcggaagaggcgctggatcgaagtgtattccctgttacgtcgcgcgttccttgtcgagcacaaccttgtactcgccgagcgcaagtcaccagaaatctctgagagaatagtgcagtggccggccatcacctataagcccctccttgacaaggcaggccttgggtctatcacttcagtccggtttctgggcgatcagcagagagtctttcttagcaaggacctcctcaagcctatccaggacgtcaattcgctccgcttgagccttacggacaatcagattgtatccaaagagtttcaagctttgatcgtgaagcacctcgacgagagtcacctgctcaagggagacaagaatttggtcggctcagaggttaagatatacagcctcgacccttccactcaatggttttcagccactgttataaacggaaatccggcaagtaagactttacaggtgaactgcgaggaaataccagctctcaagattgtggatcctagtctgattcacgttgaggtggtgcacgacaatctggttacatgcggcaactcagccaggatcggggccgtaaagaggaagagctcggaaaataacggtactctcgtgtccaagcaagccaaatcttgctctgaggcttctccatccatgtgccctgtccaatccgtgcctacaactgtgttcaaggagattctgcttggctgcacagctgccactccaccaagcaaggatccccgtcaacaaagtaccccacaggctgcaaactctccaccaaatttgggggccaaaatcccccaggggtgccacaaacagtctctccctgaagagatctctagctgcctgaataccaaatccgaagctttgaggactaaacccgacgtttgcaaagccggcttactgtcgaaaagcagtcaaataggcaccggtgacctgaagattttaacggaaccaaagggaagttgcactcagccaaagactaacaccgaccaggaaaatagactagagtcagtacctcaggcactgactgggctcccaaaagaatgtctccccacaaaggcttcttccaaagctgaacttgaaatagcaaaccccccggagctccaaaagcatctggagcacgctcccagcccttcagatgtgtctaatgcacccgaggtcaaagctggcgtaaatagcgactctcccaacaattgctccggtaaaaaggtcgagccaagcgccttagcttgcaggagccagaacttaaaagaatcctccgttaaggtggacaatgagagctgctgtagccgcagtaataataagatacagaacgcgcctagcaggaaaagcgttctaacagaccctgctaagcttaagaagttacagcaatctggggaggcttttgtgcaggacgactcatgtgtgaacattgtagcccagctgccaaagtgccgagagtgtcggctggacagtctcagaaaagataaggagcaacagaaggacagcccggtattctgtcgattttttcatttcaggagactgcagttcaataaacacggagtcctgagggtggagggatttctgacgccaaacaaatatgacaacgaagccatcggtttgtggttgccgctcacgaagaatgtcgtcggcatcgacctggatactgccaagtatatcctagccaatatcggggaccatttctgtcagatggttatttctgaaaaagaggccatgtctacaattgaaccacacagacaagtggcatggaaacgggcagttaaaggtgtcagagagatgtgcgacgtttgcgatactacaatatttaacctgcactgggtgtgtccccgttgtggattcggtgtgtgcgtagactgttaccggatgaaacgaaaaaattgtcaacaaggcgccgcgtataagacattctcctggctgaaatgtgtgaaatcccagatccatgagccagagaatttaatgccaactcaaattataccaggcaaagccctgtatgacgttggcgatatcgttcactccgtacgcgcaaagtggggcatcaaagccaattgtccttgttccaaccgccaatttaaactattctccaagcctgcgagtaaggaggacctcaagcagaccagcctggcaggcgaaaaacccactcttggtgccgtcttgcagcagaacccctctgtcctagaacctgctgccgttgggggcgaggctgcaagcaagcccgcgggcagtatgaagccagcctgcccagcgtccacctctccactgaactggttggccgatctaacttctggtaatgtcaacaaggagaacaaggagaaacagccaaccatgcccatcttgaaaaatgagattaaatgtctcccccccctgcccccgctctccaagtctagtactgtcctccacaccttcaattcaacaatccttaccccggtatccaataataactcaggatttctgcggaatttgctaaattctagtaccggtaagactgagaacggtctgaaaaacacacccaaaattttggatgacatcttcgccagcctggtgcagaataagaccacctctgatttgtctaaacgacctcagggcctgacaatcaaaccttcaatccttggatttgacacaccacactattggctctgtgacaacagactgttatgcctgcaggatcccaataataaatccaactggaatgtctttcgcgaatgttggaagcaagggcagcctgtcatggtgagcggcgtccaccataaactgaatagcgagctttggaagcctgaatcctttagaaaagagttcggcgagcaggaggtcgatctcgtgaattgtaggacaaacgagatcattacaggtgctacagttggagatttttgggacgggttcgaagatgtgcctaatcgcctgaagaacgagaaagaacccatggtgttgaaacttaaggactggcctccaggcgaggattttagggacatgatgccctcccggttcgacgatctcatggcaaatatccctctgcccgaatatacgcgccgcgatggaaagctcaatcttgccagtcgtctccctaactatttcgtgagacctgatctgggacctaaaatgtacaacgcttatgggcttatcactccggaagaccgcaaatacggcactacaaacctccatttggacgtgtcagacgccgccaatgttatggtttatgtgggaatacccaaaggtcagtgcgaacaggaggaagaggtactcaagacaatacaggatggtgatagcgacgagcttaccatcaagcgcttcatagaggggaaggaaaagccaggcgcactctggcatatctatgctgctaaggataccgagaagatcagggagtttctgaaaaaagtttccgaggagcaggggcaagagaatccagctgatcatgacccgatacacgatcagtcatggtatcttgacagatcactgagaaaacggttacaccaggagtacggtgtgcagggctgggcaattgtgcaattccttggcgacgtagtgttcatccctgcgggggcaccccatcaggtgcacaatttgtattcctgcattaaggtcgccgaggactttgtttctcccgagcacgtgaaacactgcttttggctgacccaggagtttcgttatttatcacaaacccacactaatcacgaggacaaactccaggtcaagaatgtcatctaccacgctgtgaaagatgctgtcgccatgctgaaagctagcgagtcatcattcgggaaaccctag

SEQ ID NO: 193666 - DNA, 3966 bp, synthetic construct
  misc_feature 1..3966: note = Description of Artificial Sequence: Synthetic coding sequence
  source 1..3966: mol_type = other DNA
atggtgctgaccctgggcgagagctggcccgtgctggtgggccggcggtttctgtccctgagtgccgcagacggttccgatgggagtcacgattcatgggatgtagagagggtggctgaatggccttggctcagtggtactatcagagcagtgtcacatacagacgtcactaagaaggatctcaaggtttgcgttgaatttgacggggaatcatggcggaaaagaagatggatagaggtttacagcctcctgaggagggcatttctggttgagcataatttagtcctggccgagcgcaaaagccccgagatttccgagcgcattgtccaatggccagccattacatacaaaccgcttctggacaaggctgggctcggctccatcaccagtgtccgcttcttgggagaccagcaacgggtgtttctctccaaagatttgttgaagccaattcaagacgtgaattccctcagactgtccctaacagataaccaaatcgtgagcaaagagtttcaggccctgattgtgaaacacttagacgagagccatctgcttaaaggagacaaaaaccttgtgggcagcgaagtcaaaatttactcactcgacccctccacgcagtggttctcagccaccgtgattaatggtaatccagccagcaaaaccttgcaagttaattgcgaggagattcctgccctaaagatcgtggaccccagtttaatacatgtcgaggttgtgcatgataacctggttacttgtggcaacagcgccaggatcggagcggtgaagcggaagtcgagtgaaaacaatgggacgctggttagtaaacaggctaagagctgtagcgaggccagtccttccatgtgcccggttcagtctgtgcctacgacggtgtttaaggagatcctgctgggatgcactgccgcgacccccccttccaaggacccacgccaacagagcactccccaggccgcaaactcgccccccaacctgggcgctaagattccccagggctgtcataaacaaagcttgcccgaagagatatccagctgtctgaacactaagtcagaagctttgaggacaaaacccgacgtctgcaaagccggtttgctcagcaagagttcacagatcggcactggtgacctgaagattctgaccgagcccaagggaagctgtactcaaccgaaaactaatactgaccaagagaaccgactggaatctgtcccgcaggccttaactggactgcccaaggaatgcctgcccacgaaagctagtagtaaggcagagttagagatcgctaacccacccgagttacaaaagcacctcgaacatgctccgagccctagcgatgtgagcaacgcccctgaggtgaaagctggcgtgaactctgattcaccaaataattgttcgggcaaaaaggtggagcctagcgccctagcttgcaggtcccagaacctcaaggaatcctccgtgaaagtggataacgagtcatgctgttcacgcagtaacaacaagatccagaatgctccatcaagaaaaagtgttctaaccgatccagccaaactgaagaagctgcaacagtctggcgaggcgtttgtccaggacgatagctgtgttaacatagtggctcaactgccaaagtgtcgagagtgcagactagactcactgcgcaaggacaaggaacagcaaaaggactccccggttttctgcaggttttttcatttccgcagactgcaatttaacaaacacggggtcctgcgagtggaggggtttttgacacctaacaagtatgacaatgaagctataggactgtggctcccgctgacgaagaacgttgtcggaatcgacctggacactgctaaatatatcctggccaatattggggatcacttttgccagatggtgatctctgagaaggaagccatgagtacgatcgagccacatcggcaggtggcttggaagcgagcagtgaagggagtgcgcgagatgtgtgatgtctgcgacacgacaatttttaacctgcattgggtctgcccgcgttgtggatttggagtctgcgttgattgctacagaatgaagaggaagaattgccagcagggggctgcttacaaaacttttagctggttaaagtgcgtaaaatctcagatccatgaacctgagaatctgatgcccacccagatcatccctggtaaagccctatacgacgtaggcgacattgttcatagtgtccgtgccaaatggggcattaaggctaactgcccctgctctaatcggcagttcaaactcttcagtaaaccagcttccaaggaggatcttaaacagacatctctggcaggagaaaagcctaccttgggcgccgtactacaacagaaccctagcgtgctggagcctgccgcggtcggcggcgaggcagccagtaaacccgccggatctatgaaaccagcatgcccagctagcacttccccgctgaactggctagccgacctcacttccggaaatgtgaacaaggagaacaaggagaaacaacccaccatgccaattctgaaaaatgagatcaagtgtctgcccccactgcctcctctgtcaaagagctctacagtgctccacacctttaactctacgatcctgacccctgtgagcaataacaatagcgggttcctcaggaacctactgaattcttctaccggcaaaacagaaaacggactcaagaacacacctaaaattttggacgatatattcgcctcacttgtacagaacaaaaccacttcagatctctctaagcggccccaaggccttacaatcaagccatcaattttgggattcgatacgccacattactggctgtgcgacaacaggcttttatgtctgcaggacccaaataacaagagcaactggaacgtgttccgagagtgctggaaacagggtcagcccgtgatggttagtggcgtccaccataagctgaactccgagctgtggaagcccgagagctttaggaaggagtttggcgagcaggaggtcgatttggtgaactgcaggacgaatgaaatcattaccggcgctaccgtcggggacttctgggacggattcgaagatgttcccaatcgacttaagaatgagaaggagccaatggtgttgaagctgaaagactggcccccgggtgaggatttccgggatatgatgccatctcgttttgacgatctgatggctaacatccccttgccagagtatactcgcagagacgggaaattgaacctggccagcagactgcctaactacttcgtgcgaccggacctcggaccaaaaatgtacaacgcatatggccttatcacccctgaggatcggaagtacggcacaactaatcttcacctcgacgttagcgacgcagcaaatgttatggtctatgtcgggatcccgaaaggccagtgtgaacaggaagaagaggtactgaagacaatacaggacggagatagtgacgaactgacgattaaaaggtttatcgaaggaaaagaaaagcctggcgcgctttggcatatttatgctgccaaggatactgaaaagattagagaattcttgaaaaaggtcagcgaggaacaaggtcaagagaaccctgctgatcatgatcctatccacgatcaatcttggtacctggaccggtctttaagaaagaggctgcaccaggagtacggagtacaggggtgggctatagttcagttcttaggcgacgtagtatttatcccggctggggcaccccaccaggtgcataatctgtatagctgcatcaaagtggccgaggacttcgtgtcaccagagcacgtcaaacattgcttctggctgacacaggaattccggtatctatcccaaacacatacgaaccacgaggacaaactgcaggttaagaatgtcatataccatgccgtgaaagacgccgttgccatgcttaaagccagcgagagctcctttggtaagccctag

SEQ ID NO: 193667 - DNA, 3966 bp, synthetic construct
  misc_feature 1..3966: note = Description of Artificial Sequence: Synthetic coding sequence
  source 1..3966: mol_type = other DNA
atggtgctgaccctgggcgagagctggcccgtgctggtgggccggaggtttctcagtctcagtgccgctgacggcagtgacggatctcatgatagctgggacgtcgaaagagtggcagagtggccttggttgtccggtacgatcagagctgtgtcccacaccgatgtcaccaagaaggacctcaaggtgtgtgttgaattcgacggtgagtcatggaggaagcgaaggtggatagaggtatactccctgctaaggcgagcttttttggtggagcataacttagtgctagccgaacggaaatcaccggagatatcagaacgtatcgtgcagtggccagcaatcacatacaagcctctgttggacaaggcagggctggggtcaatcacgtctgtgcgtttcctaggagaccagcagcgcgtgttcctgagtaaggaccttctaaagccaatccaagatgtcaatagtttacgtctcagtctcaccgacaatcaaattgtgtccaaagagtttcaggcacttatcgtgaagcaccttgacgagtcccatttgcttaaaggagacaaaaacctagtaggaagtgaggtgaagatttactccttagacccaagcacacagtggttttctgcgaccgtgatcaatgggaatccagcctcaaagaccctccaggtgaattgcgaggagatcccggcgctgaagatagtcgatcctagcctcattcacgtcgaggtcgtccatgacaatttggtcacatgtggaaatagcgcacggatcggggcagttaagagaaaatcctccgaaaataacggaaccctggttagtaagcaggccaagagttgctcagaggccagcccatctatgtgcccggtgcagtcggtgcctaccacggtttttaaggagatattacttgggtgcacagctgcgacaccaccttccaaagaccctaggcagcagtccaccccacaggctgcaaacagcccaccaaatttgggagctaagattccccaggggtgccataagcagtcactgccagaagaaatctcatcctgcctaaacaccaagtcagaggcgcttcggacgaagccagacgtttgtaaagcagggctgctgagtaaaagctcccagattgggactggagatctgaagatcttaaccgaaccgaaagggtcatgtacccaacccaaaaccaatacggatcaggagaaccgcttggagtcagtaccacaggcccttacagggctgcctaaagagtgcctccccaccaaggcttcgtctaaagccgaactggagatagctaatccccccgaactgcaaaagcacctagaacatgcaccttcaccgtccgatgtgtcaaacgcaccagaagttaaagcgggggtgaactcagatagccctaataattgctccggcaaaaaggttgaaccttcagccctggcctgccggtctcagaacttaaaagagagctctgtgaaagtggataacgaaagttgttgctcaagatcaaataataagattcagaacgcccctagtcgcaaatccgtcctgaccgaccccgctaagctgaagaagctgcaacagagtggagaagcctttgtgcaggatgactcatgcgttaatattgttgcccagttgcctaagtgccgggagtgtcgccttgacagtctgcgtaaggacaaggaacaacagaaagattctcctgttttttgcagattttttcacttcagacgcctgcagtttaacaaacacggagtccttcgtgtcgaggggtttctgacacccaacaaatacgacaacgaggccattggattgtggctgcccctgaccaagaatgttgtcggaatagacctggatactgctaagtatatcctggctaacatcggtgatcatttttgccaaatggtcatctctgaaaaggaggccatgagtaccattgagccccacaggcaggttgcctggaagagagccgtgaagggcgtacgggagatgtgcgatgtgtgtgacaccaccatcttcaacttacactgggtgtgtccccgatgtggctttggagtttgtgttgattgttaccgcatgaaacgcaagaattgccagcagggggccgcctacaagaccttcagctggttgaagtgtgtgaagagtcagattcatgagcccgagaaccttatgccgacccaaatcatccctggcaaagccttatatgatgtcggggacatagtgcattccgtgcgcgcgaagtggggaatcaaggctaattgtccctgttccaaccgccagtttaagcttttcagcaaacccgccagcaaggaagacctgaaacaaacaagcctcgccggggaaaaacccacattaggcgccgtcctgcagcagaatccttcagtcctggagcccgccgctgttgggggggaagcagccagcaaacccgctggttctatgaagccagcctgtcctgcttccacttccccgctgaattggttggcagacctgacttccggaaatgttaataaggaaaacaaggagaaacagcctacgatgccgattcttaagaacgagatcaagtgcttaccccccctgcccccgttgtctaagtccagtactgtcctgcacactttcaacagtactattttgacgcctgtgtccaataacaattccggctttttgcgcaatcttctcaattctagtaccggtaagactgagaatggtttgaagaacacccccaagatacttgatgatatcttcgcttccctcgttcagaataaaacaaccagcgatttgtccaaacggccccagggactaaccatcaagccatccatccttgggttcgacaccccacactactggctttgcgataacaggctgttatgtctgcaagatccaaataataaatccaactggaatgtttttagggagtgctggaagcagggtcagccagttatggtgagtggcgtacaccataaattaaattcagagctgtggaaacccgagagctttcggaaggaatttggtgagcaggaagtcgatctcgtcaattgccggactaacgagataatcacaggggccaccgtcggtgatttttgggacggattcgaggacgttccaaacagactgaagaatgaaaaagagccaatggttctcaaacttaaggactggccgccgggcgaggatttccgcgacatgatgccaagccggttcgacgaccttatggcaaatatccccctccctgagtacacccgacgtgatgggaaactgaacctggctagtcggctccctaattatttcgtgcgacctgacctgggacccaaaatgtataatgcatacggactgattaccccagaagaccgcaaatacggcaccacaaacctgcacctggatgttagcgacgctgctaacgtgatggtgtatgttggcatacctaaagggcaatgtgaacaggaggaggaagttttgaaaacgattcaagatggggactccgatgaactgaccattaagcggttcatagaaggcaaagagaaaccaggggcactatggcatatttatgctgctaaggacaccgagaaaatcagagagtttctgaagaaagtgagtgaggagcagggacaagagaacccagctgaccatgaccccatccacgatcaatcctggtaccttgaccggtctctgcggaaacgtctccaccaggaatacggggtgcaagggtgggcaattgtgcagttcctcggtgacgtcgtcttcatacccgccggggctccacatcaggtacacaacctgtatagctgtattaaagtggccgaagacttcgtcagccccgagcacgttaaacactgtttttggctgacccaggaattccgctacctgagtcagactcacactaaccatgaggacaagctccaagtcaagaacgtgatttatcacgccgtgaaggatgcagtcgcaatgctgaaggctagcgaatcatccttcggcaagccttag

SEQ ID NO: 193668 - DNA, 513 bp, synthetic construct
  misc_feature 1..513: note = Description of Artificial Sequence: Synthetic coding sequence
  source 1..513: mol_type = other DNA
atggtgctgaccctgggcgagagctggcccgtgctggtgggccggaggttcctgagtctttctgcagctgatgggtcagacggatcacatgacagctgggacgtggagagagtcgcggagtggccgtggctgagtggaacaataagagctgtaagtcacacagacgtgactaagaaagaccttaaagtgtgtgtggagtttgacggggaatcctggagaaaacggcggtggattgaggtctacagcctcttgcgaagggctttcttggttgaacacaaccttgtgctggctgagagaaaaagccctgagatatcggagagaattgtccagtggcccgcaattacttacaagcctctcctcgataaggctggtctcggcagcataacttcggtccgctttcttggtgatcagcagagagtgttcctgtcaaaagatctgctgaagcctattcaggacgtgaactctctccgcctcagccttacggacaaccagatcgtatcgaaagaattctag

SEQ ID NO: 193669 - DNA, 2136 bp, synthetic construct
  misc_feature 1..2136: note = Description of Artificial Sequence: Synthetic coding sequence
  source 1..2136: mol_type = other DNA
atggtgctgaccctgggcgagagctggcccgtgctggtgggccggcggttccttagcctgagtgccgcagacggctccgacggctctcatgatagctgggatgtcgagcgcgtagccgagtggccttggcttagcggtacgataagggcagtctctcacacagatgtaacgaaaaaggacctgaaagtttgtgtggagttcgacggtgaaagctggcgtaaacgccggtggattgaagtatacagtctactccgcagggcattcttagtcgagcacaatttagtcctagctgaacggaagagccccgagatctccgaaagaatcgtgcaatggcccgctatcacctacaaacctttgctggacaaggcgggactaggaagtatcaccagcgttagatttctgggagaccaacagcgggtgttcctgagcaaagatctcctcaagcctattcaggacgtgaacagtcttcgtctgtccctcactgataatcagatcgtgtccaaggagtttcaggccctcatcgtcaagcacttagacgagagtcatctactcaagggggataaaaatctggtcgggagcgaggtgaagatctacagcctcgacccttccacacagtggttcagcgccactgttattaatgggaatcccgccagcaaaacactccaagtaaactgcgaggaaatcccagcacttaaaattgttgacccgagtttaatccatgtggaggttgtgcacgacaacctcgtaacttgcgggaatagtgcgagaattggggcagttaagcgaaaatcctcagagaataatgggaccctggtcagcaaacaggcaaagagctgctccgaggcatccccgagtatgtgccccgtacagtccgtaccgacgacggtgtttaaggagatcctgctgggctgcacggcagccaccccacctagtaaggatccccggcagcagtccacaccacaggctgccaattcaccccccaacctgggggccaagattccccagggctgccataaacaaagccttcccgaagaaatctcgagctgcctcaacacaaaaagtgaggccctgagaacaaagccagacgtgtgtaaagcgggactgctcagcaaaagctcccagatcgggacaggagatctaaaaatcctgacagagcctaagggctcatgcacacagcccaaaacaaacacagatcaagagaacagactcgaaagtgttccacaggcgctcacaggactccccaaggaatgcttgcctacaaaggcatctagcaaggccgaattagagatcgccaaccctcccgaactgcagaaacatctcgagcatgcacctagtccatccgacgtttcaaatgctcccgaggtgaaggctggggtgaacagcgatagccccaataactgctccgggaagaaagttgagcctagtgccttggcctgccgtagccagaatctgaaagaatccagcgtgaaagttgacaatgagtcatgctgcagtcgcagtaacaacaagattcagaatgcgccttcgcgcaaatccgttctcacagatcccgctaagctgaagaaacttcagcagtcaggggaagcctttgtgcaggatgatagttgtgttaacatcgtagcccagcttcctaagtgtcgtgagtgccggttggacagcttgcggaaggataaggagcaacaaaaggatagtcctgtattctgcagatttttccacttcaggcggctgcaatttaacaagcacggggttttgcgggtcgagggcttccttacccccaacaagtacgataacgaggctattggcttgtggctccctctgacaaagaatgtggtagggatcgacctggataccgccaagtatatcttggccaacatcggtgaccacttctgtcaaatggtgatttctgaaaaagaggcaatgtccacaattgaacctcataggcaggtggcatggaagcgcgccgtcaagggcgtgcgtgagatgtgcgatgtctgtgatacaactatttttaatttacactgggtctgtccgaggtgcgggtttggggtgtgtgtggattgctaccgaatgaagcgcaaaaactgtcagcagggagagaaccggtttgactcaccacctgcaccgcttcactcctag

SEQ ID NO: 193670 - DNA, 366 bp, synthetic construct
  misc_feature 1..366: note = Description of Artificial Sequence: Synthetic coding sequence
  source 1..366: mol_type = other DNA
atggtgctgaccctgggcgagagctggcccgtgctggtgggccggaggtttctttctttgagcgcagcggacggcagcgacgggtctcatgattcttgggatgtagaaagggtggcagagtggccctggctcagtgggaccatccgtgccgtatcacacacagatgtcactaagaaggatctgaaagtgtgtgtcgagttcgatggcgaatcctggagaaaacggagatggattgaggtgtatagcctgctgcgacgcgcctttttggtcgaacacaatctagtgctcgcagagcgaaagagcccagaaatatctgaaaggatcgttcaatggcctgcaattacatataaaccactcctcgactag

SEQ ID NO: 193671 - DNA, 3984 bp, synthetic construct
  misc_feature 1..3984: note = Description of Artificial Sequence: Synthetic coding sequence
  source 1..3984: mol_type = other DNA
atggtgctgaccctgggcgagagctggcccgtgctggtgggccggcgctttctcagcttgagcgcagctgatggcagtgatggtagtcatgactcctgggatgttgaaagagtcgctgagtggccttggttgtccggcacaattcgggccgtctcacacactgacgtcactaaaaaagatctgaaagtgtgcgtggagttcgacggcgaatcatggcggaagcgccgttggatagaggtctatagcctgttgcgcagagcatttcttgttgaacacaatttggtgctggctgagaggaaatcacctgaaataagcgaaaggattgtgcagtggcccgcaattacatacaagcccctgctcgataaggcaggccttggcagtataacatccgtccgcttcctcggcgatcagcaacgcgtctttctgtcaaaggatctcctgaagccaatacaagatgtaaactccttacggttaagtctcacagacaatcagattgtgtccaaggagtttcaggcgttgatcgtgaaacacctagatgaatcacatctgttaaaaggagataaaaatctagttggctcagaggttaaaatctattcactggatccctccacgcagtggttttccgccactgtgatcaacggtaacccagccagcaagacactccaagtgaactgtgaggagattcctgcacttaagattgtggatcccagtctgatccacgtggaagtggtacacgacaatctcgtaacatgcggcaatagcgcgcgcatcggggcggtcaagcgcaaatcttcagagaacaatggaacactagtttctaaacaggccaaatcatgttcggaggccagtcctagcatgtgtcctgtgcagtcggtgcctactaccgtgtttaaggagatcctccttgggtgcacagctgctacccctccatcaaaggacccgagacagcagagcacccctcaggccgctaactcgcccccaaacctgggagccaaaatccctcaggggtgtcacaaacaatctctgccggaggaaatttcaagttgtctgaacaccaagtccgaagccctacgtacaaagcccgatgtctgtaaagcaggcttactgagtaaatcatctcagattgggactggcgatctgaagatcttaacagagcctaaggggtcatgtactcagccaaagaccaacacagaccaagagaacaggttggaaagcgtgccccaggcactaacaggactccccaaggaatgcttgcccactaaggcttcctcaaaggccgagctagaaatcgcaaatccacctgaactccagaaacacctggaacacgccccaagcccctctgatgtgagtaacgcacctgaagtgaaagccggagtgaattctgacagcccgaacaactgctccggtaagaaggtggaaccatccgctctcgcttgtagatcacagaatttgaaagagtctagcgtgaaagttgacaatgaatcatgctgttcaaggtccaataacaagattcagaacgcaccttcacgcaagtccgtcttgaccgaccctgccaaactgaagaaactgcagcagagtggcgaggcattcgtgcaggacgattcttgcgtcaatattgtggctcagctgcctaagtgccgggagtgcaggttggattccttgcgcaaagacaaggagcaacagaaagactctcccgtgttttgtcgattctttcattttagaaggctccagtttaataagcatggggtccttagggtggaaggatttctgacaccgaataaatatgacaacgaagccattggattgtggctgcccctcacaaaaaatgttgtgggtatcgatctcgacacagctaagtacattctagcaaatattggcgatcacttctgccagatggtaatctcagaaaaagaggcgatgtcgaccatcgaaccccaccggcaggtggcgtggaagagggctgtgaagggtgtacgtgaaatgtgtgatgtgtgtgacaccactatctttaatctacactgggtctgtccccgctgtgggttcggagtgtgcgtcgattgttatcgcatgaagaggaagaattgtcagcaaggcgcagcatacaaaactttttcctggcttaaatgcgtgaagagccagattcatgagccagagaaccttatgccaactcaaataattccaggaaaggccctgtacgacgtgggcgatattgtccattcagtgagagccaagtggggcatcaaagctaactgtccttgctcaaatcgccagttcaagttgttctcaaagcctgctagtaaagaggatcttaagcaaacctccctcgccggggagaaacctaccctgggggctgtcctccagcagaacccttccgtgctcgaaccagccgccgtcgggggagaagcagccagtaagcccgcgggctccatgaaaccagcctgtccagcaagtacttctcccttgaactggttggccgatctgaccagtggcaacgtaaacaaggaaaacaaagaaaaacaaccaacaatgccaatcctcaagaatgaaattaaatgcctcccacctcttcctcctctgtccaagtcctctactgtgcttcacacctttaattcaacgatcttgacccccgtgagcaacaataacagcgggtttctcaggaatctcctgaactcttctacgggtaagacggagaatggcttgaagaacacaccgaagattctcgatgacattttcgctagcctggtgcagaacaaaacgacttccgatctcagcaaacgaccacaaggattgacaatcaaaccaagcatcctgggatttgatacacctcactactggctatgcgacaaccgcttattgtgtcttcaagaccccaacaacaagagcaattggaacgtctttcgggagtgttggaaacagggccaacccgtgatggtgtccggcgtccatcacaaactgaatagcgaactttggaaaccagagagcttcaggaaagagttcggcgaacaggaagtcgatctggtgaactgccgcaccaacgagatcatcacgggtgctacagtcggggatttctgggacgggtttgaggatgtcccgaatcgtctaaagaatgaaaaggagccaatggtactcaaattgaaagactggcccccaggggaggatttccgggatatgatgccgagtaggttcgacgatctgatggccaatatcccactacctgagtacaccagaagagatgggaagttgaatctggcatcaaggttgcccaattacttcgtgcggccagacctcggccccaaaatgtacaacgcctacggtctgatcacacctgaagaccgcaagtacggcaccacaaatttgcacctggatgttagcgacgccgccaacgtgatggtttatgtaggcatacccaagggccagtgtgagcaggaggaagaagtgctgaagaccatccaggacggagactccgacgagctcacgataaagcgtttcatcgagggcaaggaaaagccaggggccctttggcacatctacgcagctaaggacaccgagaagatcagagagttcttaaagaaggtgtcagaagaacagggacaggagaatccagcagatcatgacccgatccacgatcagtcatggtaccttgacaggtccctgcgcaaacggctgcaccaagagtatggggtgcagggatgggccattgtccagtttcttggcgatgtggtgtttatccctgccggggcaccgcaccaagtgcacaacctgtatagctgtataaaggtggcggaggattttgttagcccagagcatgtgaagcactgtttttggcttacccaggaattcagatacctgagtcagacccataccaatcacgaggataaacttcaagtgaaaaatgtgatataccacgccgtgaaagacgccgtcgccatgttgaaagtaaatccggtactggccaacctcaacttgccagcccactggaagtag

SEQ ID NO: 193672 - DNA, 3810 bp, synthetic construct
  misc_feature 1..3810: note = Description of Artificial Sequence: Synthetic coding sequence
  source 1..3810: mol_type = other DNA
atggtgctgaccctgggcgagagctggcccgtgctggtgggccggagattcctgtccctttcagccgccgacgggtctgatgggagccacgacagttgggacgtcgagcgagtcgccgagtggccctggctttctgggaccatacgagcggtcagtcatactgatgtcaccaagaaagacctaaagacctacaagcctctgctggacaaggccgggctggggagcattacttccgtccggttcctgggcgaccagcagagggtatttctttcaaaagacctgctgaagccaatccaggatgttaattccctgaggctctccctgactgataatcagatagtcagtaaagaatttcaggcactgatagtgaaacaccttgacgaatcccacttgttgaaaggtgacaaaaacctggtgggctccgaggtgaaaatttactcactggacccatcaactcagtggttcagtgctactgttattaatggcaatccggccagcaaaacactacaagtgaactgcgaggaaatcccggctctcaagatagtcgatcccagcctgatacacgtcgaggtggtccatgacaatttggtgacttgcggaaacagtgctcggattggcgcggtcaagcggaagtcgagtgagaacaatggtacgctggtgagcaaacaggccaaatcctgttccgaggccagtccctctatgtgtccagtgcagtccgtgcccaccaccgtgtttaaagaaatattgctcggatgtactgccgcaacaccaccttcaaaagatccaaggcaacagtccactccccaggctgcgaacagcccacctaacttaggcgccaagatcccccagggatgccataagcagtcacttcccgaggaaatcagctcctgcctgaacactaaatccgaagccttaaggactaagcctgacgtttgcaaagctgggctactcagcaagtccagccagattggaacaggagatttgaagatcctaaccgagccaaagggaagttgtacccagcccaagacaaatactgatcaggaaaataggctcgaatctgtgccccaggctcttacgggtctaccaaaggaatgtttgcctacaaaggcgtcttccaaagccgagctcgagattgcaaatccccccgaactccagaagcatcttgaacacgctccctcaccaagcgacgtaagtaatgcccccgaagtgaaagcaggggtcaacagtgatagtcccaacaactgctccggcaaaaaagtggagccttctgctctggcttgccgctcgcaaaacctgaaagagtcgagcgtcaaggtggataatgagagctgctgctccagatcgaacaacaagatccagaatgccccttcacgaaagagtgtactgacggatcccgcaaagcttaaaaaacttcagcagtcaggagaagccttcgtgcaggatgacagctgcgtaaatatcgtcgctcagctgcccaaatgcagagaatgccggctggattcactccggaaggacaaggaacagcagaaggactcaccagttttttgcagattttttcacttcagacgactgcagtttaataagcacggcgtcttacgggtggaaggcttccttacccctaataagtacgataatgaagcaatcggcctgtggttgcccctcacgaagaacgtggtcggaatcgatttagacacagccaagtatatattggcaaatatcggggaccacttctgccaaatggtaatctcagagaaagaagcgatgagtactattgagccacacagacaggtggcatggaaaagggcagtgaagggagtccgcgagatgtgcgacgtctgtgacacaaccatcttcaatcttcactgggtatgccctagatgtggatttggagtatgtgtggactgctatagaatgaaacgcaagaattgtcagcagggcgcagcctataaaacctttagttggctgaagtgcgtcaaaagccagattcatgaacctgaaaatctgatgcccacccagatcatcccagggaaagccctttacgacgtgggcgatattgttcacagcgtgagagcaaagtgggggatcaaggctaactgtccctgcagcaaccgccagtttaagctattctccaagcccgcttccaaagaggatctgaaacagacatcgctggccggcgagaagccaactcttggtgcagtgctgcaacagaatccgtcggttctggaacctgccgcggtaggaggggaagcagcatcaaaaccagctggcagcatgaaacccgcatgtccggcttctacttcaccattgaattggcttgccgatctgaccagtggtaacgtcaacaaagagaataaggaaaagcagccgaccatgcctattctaaagaacgagatcaagtgcctgcctccactccctcctctttcaaagtcatctaccgtcctccatacctttaactcgacaatactgacgcccgtgtctaacaataactctggatttctgagaaacctactaaattcttctactggcaaaacagagaacggacttaaaaacactccgaagatcttggacgacatcttcgccagcctcgtccagaacaagaccacctccgatctgagcaagaggcctcaggggctaaccatcaaaccgtccatcctcgggtttgatacacctcattattggttgtgtgataatcgactgctatgcctccaggacccaaataacaagagtaactggaatgtgttcagagagtgctggaagcaagggcaacccgtgatggtcagcggcgtgcatcataagttaaactctgaactgtggaagcccgagagcttcagaaaagagttcggcgaacaggaagtcgacctggtgaattgtcgtacaaacgagataattacaggggccacggtgggcgatttttgggacggttttgaggatgtccctaataggttaaagaacgagaaagaacccatggttctgaaactgaaggactggccccccggggaggactttcgggatatgatgccatcccgatttgatgatcttatggcgaatattccactgccggaatacactagacgcgatgggaaattgaacctagctagtcgactgcccaattattttgtgaggcccgatctcgggcctaaaatgtacaatgcatacggcctcataactcctgaagatagaaagtatggcaccaccaacttgcatctggacgtgagcgacgctgctaacgtgatggtgtatgtgggcatccccaaaggccaatgcgagcaagaggaagaagtgctaaagacaatacaggacggcgatagcgacgagcttaccattaaacggttcatcgaggggaaagagaaacctggcgccctgtggcacatatacgccgcaaaggacactgagaaaattcgcgaatttctgaaaaaggtcagtgaggagcagggacaggaaaatcccgctgaccacgaccctattcatgaccaaagctggtacttggatcgctctctcagaaagaggctccatcaagaatacggggtgcagggttgggctatcgtccagttccttggggacgtggtatttatccccgcgggtgccccccaccaggttcataacttgtactcgtgcatcaaggtggccgaggactttgtgtctccagaacacgtgaagcactgcttctggcttacacaggagtttaggtacctcagccagactcacaccaaccatgaggataaactccaagtgaagaatgtgatttatcatgccgtgaaggatgcagtagcaatgttgaaagcctccgagtccagtttcggtaagccatag

SEQ ID NO: 193673 - DNA, 5286 bp, synthetic construct
  misc_feature 1..5286: note = Description of Artificial Sequence: Synthetic coding sequence
  source 1..5286: mol_type = other DNA
atggccgacgccgccgccagccccgtgggcaagcggctgctgctgttatttgccgacacagctgcctcagcttccgccagtgcgcccgctgccgccgccgcaagtggcgatcctgggccagctttgcggactcgggcctggagagctggcacggtgagagcaatgtccggagcagtgccccaagacctggccatcttcgtggaatttgacggctgcaattggaagcagcactcttgggtgaaggttcacgcagaggaagtcattgtgctactcctggagggatccctggtgtgggcccctcgcgaagaccccgtgctgttacagggtatccgtgtaagcatcgcacagtggcctgccctcacatttactccactggtggacaagttaggtttgggatcagtggttcccgtggagtatctgctagatagggagttacgcttcctaagtgacgccaatgggctgcacttattccaaatgggtactgatagccagaatcagatcctgctggagcacgctgccctgcgggagacggtgaatgccctgatctcagatcagaagcttcaggagatcttctctcgcgggccttattccgtgcaggggcatcgggtgaagatttatcagccagaaggggaagaaggttggctgtacggagtggtcagccaccaggattccattacacgtttaatggaggtatccgtgactgaatctggggagatcaaatcggtggacccccgcttgatccatgtgatgttaatggacaactccgccccccagtccgagggcggcaccctgaaggctgtgaaaagcagcaaaggaaaaaaaaaacgcgagagcattgagggcaaggatgggagacggcgtaaatcggccagcgatagcgggtgcgacccagcatcaaaaaaactgaaaggagataggggcgaggttgatagtaatgggtctgacggaggagaggcctcaagggggccctggaagggcgggaatgcctcaggggaacccggactagaccaacgcgccaaacagcctccatccacattcgttcctcagataaacagaaatattcgtttcgcgacctacaccaaggaaaatggtcggactctagttgtgcaagatgaaccagtggggggcgacaccccggcttccttcaccccatactctacagcaaccggtcaaacaccactggcccctgaggtgggtggagcagagaacaaagaggcagggaagaccctcgaacaggtggggcagggcatcgttgccagcgccgcagtggttaccactgcgagcagcactcccaatacagtccggattagcgacactggcttggcagcaggtactgtcccggaaaagcagaaaggcagcaggtcccaggccagtggcgaaaacagcaggaactcaattctcgctagtagcggattcggggctccactcccttcttctagtcagcctttgacattcggaagcggcagatcgcagtcgaatggtgtgttggcaacagagaataaacccttggggttcagctttggctgctcttccgcccaagaagctcagaaagatactgacttaagtaaaaatctgttcttccaatgcatgagtcagaccctgcccacctctaattattttacaaccgtgtccgaatctctcgcagatgattcatcctcacgagattcttttaaacagtccctcgaatcattgtcgagcggactctgcaaagggagatcagtactcggcacggacacaaagcccggctctaaggccgggtccagtgtggatagaaaagtcccagccgagtctatgccaactctaacccccgcttttcccagaagcctcctgaatgcccgcacacctgagaatcatgagaacctcttcctccagcctcctaaactcagtagggaggaaccatccaaccctttcttggcatttgtggagaaggttgagcactcacctttctcatcattcgcttctcaggcctcagggtcctccagctctgccacaactgtcacctctaaggtcgccccgtcttggcccgaatcacattcttctgccgactctgccagtcttgctaaaaagaaaccactttttattactaccgactcaagcaaactggtgtcaggggtgctgggcagcgccttaacatccggtggccccagcttgagtgccatgggcaatgggaggagctcctctccaacttcttcattgacccaacccatcgagatgccaacactgtcttccagcccaacagaggagcggcccaccgtgggaccaggtcagcaggataacccactgctgaaaacattctctaacgtctttggccgccactctggcggctttctaagctctcccgccgatttttctcaggaaaacaaagccccttttgaggcagtaaagcgtttctcactggatgagcgctccctggcctgccggcaggatagtgactctagcacgaattcggacctgtcggatctctctgactccgaggaacagctacaagctaaaaccgggctgaaggggattcctgagcatctgatgggcaaactggggcccaatggtgagcgctctgcggaacttcttctgggcaaaagcaagggaaagcaggcaccgaagggccggccccgcacggcgcctcttaaggtcggccagtccgtgctgaaagacgtcagcaaggtcaaaaaattgaaacaatccggagagccattcctgcaggacggctcttgcattaacgtggcaccccatctgcataagtgtagggagtgcagattggaaaggtacaggaagttcaaagagcaggagcaggacgacagtacagtcgcatgccgcttttttcattttcgccggctcatttttacgcgaaagggggttcttcgagtcgagggatttctgagcccccagcaatcagatcccgacgccatgaatctgtggatcccctctagtagcctcgcagaaggcatagacctggagacttccaaatacattctcgccaatgtcggcgaccagttctgtcagctggtgatgagcgagaaggaagccatgatgatggtggaacctcaccaaaaagtggcctggaaaagggcagtgcgaggtgttcgggagatgtgcgatgtctgcgaaaccacgctctttaatatacactgggtttgccggaaatgcggcttcggcgtatgcctggactgttatcgcctgcggaagtctaggcccagaagcgaaactgaggagatgggggatgaggaggtgttttcctggctgaaatgtgctaaaggccagagtcatgagcccgagaacctgatgcccacacagattatcccgggaaccgctctttataatattggcgatatggtgcatgccgctcgaggcaagtggggcattaaagccaactgcccatgtatctctaggcagaataaaagcgtgctcagacctgcagttactaacggcatgtcacagctgcctagcattaatccatcagcatcgtcaggaaacgaaacgaccttcagtgggggaggcggcccggctcccgtgaccacacccgaaccagaccacgttcccaaagctgattccactgatatacggagtgaggaaccactaaagaccgatagcagtgcctcaaattccaactctgagctcaaagccattaggcccccttgccccgatacagcaccaccttccagtgcgcttcattggcttgcagacctcgcaacccagaaggctaaggaggagacaaaggaagctggctcactgcgcagtgttctgaataaggaatcccacagtccattcggactcgactccttcaacagcactgccaaggtgtccccactgaccccaaaactgtttaattcattgttgctgggcccaacagcatctaataacaaaactgaggggtctagcttaagggatcttcttcacagcggtcccggcaagctgccccagactccattggataccgggatcccttttcctccagtttttagtacatcttccgccggggttaagtcaaaggcttctctgcccaatttcctagaccacataattgccagtgtggtggagaacaaaaaaactagcgacgcttctaagcgggcttgcaatctgacagacacccagaaggaggtcaaggagatggtgatgggattgaatgtacttgatcctcataccagccatagctggctctgcgatggcagacttctgtgccttcacgacccctctaacaaaaacaactggaagatctttagagaatgttggaaacagggtcaacccgtcttggtctctggggtgcacaagaagctcaagagcgaactgtggaaaccagaggcattctctcaagagttcggcgaccaagacgtcgacttagtcaactgccgcaattgtgctatcatctctgatgtgaaggtacgcgatttctgggatgggttcgagatcatttgcaagcgcttacggtccgaagacgggcaacctatggtgctcaaactcaaggactggcccccgggcgaggacttccgagacatgatgcctacgcggttcgaggatctgatggagaacctgcctctacctgagtatacgaagcgagacggtcggcttaacttggcaagccggctgccaagttactttgtgcgacccgatctgggacccaagatgtacaacgcttatggtctgataacggctgaggatcgtcgcgtcggaactaccaatctgcatctcgacgttagtgacgcagtaaatgtgatggtatacgttggcattccaattggtgagggcgcacatgatgaggaagtgcttaagacaatagatgaaggggacgccgacgaagtgactaagcaaagaattcacgacgggaaggagaaaccgggcgctttgtggcatatctacgcggctaaggacgccgaaaaaatacgcgagctactgcgcaaagttggtgaagagcagggccaggagaatccgcctgatcacgacccaatccatgaccagtcatggtatcttgatcagacactgcgaaagaggctctacgaagaatacggtgtgcagggatgggccatcgtgcagttcctgggagacgccgtctttatcccggctggcgccccccaccaagtccacaacctctactcgtgtatcaaggtggcagaggattttgttagccccgagcatgtcaagcactgcttccggctcacccaggaatttcggcatctgtctaatactcataccaaccacgaggataaactccaggtgaaaaacatcatttatcacgctgtcaaggacgccgtgggtactctgaaggcacatgagagcaaacttgccaggtcctag

SEQ ID NO: 193674 - DNA, 4254 bp, synthetic construct
  misc_feature 1..4254: note = Description of Artificial Sequence: Synthetic coding sequence
  source 1..4254: mol_type = other DNA
atgggcgccatggagatcaaccggaacatccggttcgccacctacactaaagaaaacggcagaacactcgtggtccaggacgagcccgttggaggcgatactccagccagttttaccccttactccaccgcgacggggcagactcctttggcaccggaggtgggaggcgccgagaataaggaagccggtaaaactcttgaacaagttgggcaagggatagtggctagtgcggctgtggtgactacagcgagttccacccccaatacagttaggatttctgacacagggctagctgctggtacagtgcctgagaaacagaagggttcccgaagccaggcaagtggtgaaaatagccgcaactccatcctggcttcaagtggcttcggcgcaccgttgccctcctcatcgcagcccctcaccttcggttccggacgtagccagagcaacggagtccttgccacggagaacaaacccctcggtttctcatttgggtgttcatctgcacaggaagcacaaaaagacactgatttgagtaaaaatctcttctttcagtgcatgtcacagaccctacccactagtaactatttcacaactgtgtcagaatcattagctgatgattcctcatctcgggacagctttaagcaatccctggaatctttgtctagtgggctgtgcaaaggaaggagcgtgctcggcacggataccaagcccgggtccaaggccggctccagcgtcgaccggaaggttcctgcagagagcatgccgactctcactcctgcctttcctaggagcctgctcaacgcccgcactccggaaaaccatgaaaatctgttcctacaaccacccaaactctctcgggaggagccatctaatcccttcctcgcctttgtggagaaggtagagcattcaccctttagcagctttgcttctcaagcctcaggctctagtagtagcgcaactaccgtgacctccaaggtcgcccccagctggcctgagtcacattcttccgccgattcagctagcttggccaagaaaaagcctctgttcatcaccaccgacagttcaaagctggtgtccggagtgctgggctcagccctaacatctgggggcccatctctgtccgccatggggaatggcaggagttcctcccccactagctcactgacccagccaatcgagatgccaactttaagttcttctcccaccgaggaacggcctacggtcggtcccggccaacaagacaatcccctacttaagacgtttagtaatgtgttcggcaggcatagtggagggttcttgagttctcccgctgacttcagtcaggagaacaaggccccgtttgaggcagtaaagaggttttcacttgatgaaagatctcttgcttgtcggcaggatagcgattcgtctactaattctgacctcagtgacttaagtgattcagaggaacaattgcaggccaaaaccgggcttaagggcatccctgagcacctaatgggcaaacttggccctaatggcgagaggtcagccgaattgctgctgggaaaatctaagggcaaacaggctccgaagggtcgccctagaacggctccactgaaggtcggccagtctgtgttaaaagacgttagtaaagttaaaaagctgaagcagtccggtgagccgtttctgcaagacggctcctgcataaatgttgctccacatctccataagtgtagggagtgtcgcctagagcgataccgcaagttcaaggaacaggaacaggatgactccactgtggcgtgtagattttttcacttcaggcggctgatttttacaaggaagggcgtattgagagtcgaggggtttttgtccccacaacaatccgaccctgacgcgatgaacctctggatccctagctcatctttggccgagggcattgatctggaaacttccaagtacatcctggctaatgtgggagaccagttttgtcagttggtgatgtcggaaaaggaggctatgatgatggttgagccccaccaaaaagtggcatggaagagggcagtgagaggcgtcagagagatgtgtgacgtgtgcgaaacgactctgtttaacatccactgggtctgtaggaagtgtggattcggagtgtgcctggactgctataggctgagaaagtcccgccccagatccgaaacagaagaaatgggggatgaggaggtcttctcctggctgaaatgcgctaaaggacaaagccacgagccagagaacctcatgccgactcagataatccctggaactgctctgtacaatatcggagacatggtgcatgccgcaagaggaaaatggggcattaaagcgaattgcccttgtatctcccggcaaaacaaaagcgttttgcgcccagcggtgaccaatgggatgtctcaactgcctagcataaatccatctgcctccagtggtaatgaaaccacattttcaggtgggggagggcctgcacccgtgacaacacctgagccagatcatgttccaaaggcagacagcacagatatacgttctgaagagccactgaagaccgactcgtccgcaagtaattcaaacagcgagctcaaggctattcggccaccatgccctgacaccgccccacctagctctgctctgcactggctggcagatctagccacacagaaggcgaaggaagagaccaaggaggcgggatctcttagatctgtgttgaacaaggagtctcattctcccttcggactggactcctttaattcaacagccaaggtgagccccctcacaccaaagttgttcaactctctgctgctgggacccacagcatcgaacaacaagacggagggcagttccctgcgtgacctgttacactcggggccgggaaagctgccacagacacctctggataccgggatcccattcccccctgtttttagtacttcctctgcaggcgttaagtctaaggccagtctgcctaacttcttagaccacattatcgccagtgtcgttgagaataaaaagacatccgatgccagtaagagagcatgcaatctcacagacacacagaaggaagtcaaggagatggtgatgggcctcaatgtgttggatccccatacatctcattcatggctgtgtgacggtaggttactttgcttgcatgatcccagtaacaagaataactggaagatctttcgcgagtgctggaagcaggggcaaccggtcctggtgtccggcgtacacaaaaaattgaaaagtgagttgtggaagccagaggcgtttagtcaagagtttggagatcaggatgtcgacctcgtaaactgtaggaactgcgctattataagcgacgttaaggttcgggacttttgggacggatttgagatcatctgcaagcgattgagatccgaagatgggcagcccatggtgttgaagttgaaggattggccgcccggcgaggacttccgggatatgatgccgacccgcttcgaggaccttatggagaacctgcccctgccggagtatacaaaaagggacggccgattaaatctggcctcacgattgccttcctacttcgtgaggccagatctggggcccaagatgtacaatgcctacggcctaatcacggctgaggataggcgcgtgggtaccaccaacctccatttagacgtgtccgacgctgtcaacgtgatggtgtatgtcgggatccctataggcgagggcgcccatgacgaggaggttttgaagactattgatgagggagacgcagatgaggtgaccaagcaacgaatccatgatggaaaggagaagcctggagccctgtggcacatttatgccgcgaaggacgcagaaaagatcagggaactgctgagaaaagtaggggaggaacaaggacaggaaaatccacctgatcacgacccaatccacgaccaatcctggtacctggaccaaaccctgcgaaagcgcttatacgaggaatatggtgtgcagggctgggcaatagtgcaattcttgggagatgcagttttcatccccgccggagccccccaccaggttcataacctgtatagctgcatcaaagtagcagaggacttcgtatcccctgagcatgtcaagcattgcttccgccttacacaggagttccgacatctgtcaaacacccacacgaatcacgaagataagctccaagtcaagaacataatttaccacgcagtaaaggacgcagttggcaccttaaaagcccacgaatccaaactggccagatcgtag

SEQ ID NO: 193675 - DNA, 2382 bp, synthetic construct
  misc_feature 1..2382: note = Description of Artificial Sequence: Synthetic coding sequence
  source 1..2382: mol_type = other DNA
atgaacctgtggatccccagcagcagcctggccgagggcatcgacttagagaccagcaagtacattttggcgaacgtcggagatcagttctgtcagctggtcatgtctgaaaaggaggccatgatgatggttgagccccatcagaaagttgcatggaaaagagcggtaagaggcgttagagagatgtgcgatgtgtgtgaaacaaccctctttaacattcactgggtgtgcaggaagtgtggctttggagtgtgtctcgattgctatagattacgaaaatctaggccaagatccgagacggaagaaatgggggatgaggaggttttctcttggctgaaatgtgcgaaaggacagtctcatgagcccgagaatctgatgcccacacagattattcccgggacggcactgtataacattggagacatggtgcacgccgcccgtggaaaatggggcattaaggctaactgtccctgcatctcacgtcagaacaagagtgtgctgcggccagccgtcacaaacggaatgtctcaactcccctccataaacccctctgcttcgtctggtaatgagacaaccttttccggaggtggcggccctgcacctgttaccactccagagcccgatcacgtccccaaagctgactcgacagatattaggagcgaggagccactgaagaccgattccagtgcctccaactccaactccgaactgaaagccatcagacccccgtgcccagatacagctccaccctcgtctgccctccactggttggctgaccttgctacacaaaaggccaaggaggaaaccaaagaagcaggcagtttgagatctgttttaaataaagagagtcattctccgttcggtctcgattccttcaattccacggccaaggtttctccactcactcctaaattgttcaactctttactccttggtcccaccgctagtaataataagacagagggcagctcattacgcgatctactgcattctgggcccggaaagctgccacaaacgccactggacaccggaatcccattccctcccgttttctctacgagtagtgccggcgtgaagtccaaggcatccctgcccaactttctggaccacattattgcgagtgttgtggagaacaaaaagacctctgacgcaagcaagagggcctgtaacttgacagacacccagaaggaagtaaaggagatggtgatgggattgaacgttctggacccacacacctcacattcttggctgtgcgacggcaggctgctgtgcttgcatgatccatcaaacaagaataactggaaaatttttagagagtgctggaaacaaggacagcctgtccttgtgtctggtgtccataagaaactcaagtcagagctgtggaagccggaagcctttagtcaagaattcggagatcaagatgtcgacttagtgaactgtcggaactgcgctattatcagtgacgtcaaggtccgggatttctgggacggatttgagatcatctgcaaacggctgcgctctgaggacgggcagcccatggttctcaaactgaaggactggccaccgggagaggatttccgtgacatgatgcccacccggtttgaggacttgatggagaacttgccactgcctgagtacactaaacgtgacggccgtcttaatctagcctctagactgccatcctacttcgttagacctgatctcggcccaaagatgtataacgcttacggcctgatcaccgccgaggaccgcagagttggtaccactaatctccatctggatgtttcagatgccgttaatgtcatggtgtatgtcggcatacccatcggggagggtgcccacgatgaggaggtactgaaaacaatcgatgagggcgatgccgacgaggtcaccaagcagaggattcacgatggtaaggagaagccaggcgcactttggcatatatacgccgccaaagacgccgaaaagatcagggagttactcaggaaggtaggcgaggaacaagggcaagaaaatccccccgaccacgaccccattcatgatcagtcatggtacctggatcaaactcttaggaagcgtctttatgaggagtacggcgtgcaaggatgggcgatcgtccagttcctgggtgacgccgtgttcatcccggccggagcgccccatcaggtacataatctctactcttgcataaaagtggctgaggatttcgtgtccccggagcacgtgaagcattgctttagactcacacaggaatttcgccacctgtccaatacgcatactaaccatgaggacaagctgcaggtgaaaaatataatttaccacgccgtaaaagacgccgtgggtactctaaaagcccatgagtctaaattagctcgaagctag

SEQ ID NO: 193676 - DNA, 4656 bp, synthetic construct
  misc_feature 1..4656: note = Description of Artificial Sequence: Synthetic coding sequence
  source 1..4656: mol_type = other DNA
ggctggcggtggctgtacggcgtggtgagccaccaggacagcatcacaaggttgatggaagtgtctgttacagagagcggtgaaattaagagcgtcgacccgcgactcatccatgtgatgcttatggataactcggcgccacagagtgagggcggcaccctgaaagctgtcaagagtagtaaaggcaagaagaagcgtgagagcattgaggggaaggatggaaggcgacggaagtccgcaagtgactcaggctgtgaccctgcctccaagaagctgaaaggggatcgaggcgaagtggacagcaacggttccgacggcggtgaggcctcacgcgggccatggaaaggaggaaacgcttctggcgaaccaggcttagaccagagagccaagcagcctccaagtacattcgttccccaaatcaaccgaaatataaggttcgcaacgtacactaaggagaacgggagaacactggtggtgcaggatgaacccgtcggaggcgatacacctgccagtttcacaccttattccacagcaactgggcagaccccgctggccccggaagtgggaggtgccgaaaataaggaggcagggaaaactttggagcaggtggggcagggcatcgtagctagtgccgccgtggtaaccacagcgtcctccacccccaataccgttcgcatttccgatactgggttggctgcaggaaccgtgcccgagaagcaaaaggggtcacgttcccaggctagcggcgaaaactctagaaacagcatcctggcgagcagcggttttggcgcacccctgccgtccagctcgcagccactaacgtttggctccggccgcagtcagagcaatggggtgctcgccaccgagaataagcctttaggttttagcttcgggtgcagtagcgcccaggaggcccaaaaagatacggacctgagtaagaaccttttcttccagtgcatgagccagactcttccaacatctaattactttacaactgtatcggagagcctggcagatgatagcagtagtcgcgactcctttaagcaaagtctggagtcactgtccagtggcctatgcaaggggcgcagcgttctggggactgacacaaaaccgggcagcaaggctggaagcagtgtcgaccgtaaggttccggccgaatccatgcccaccctgacaccagccttccctcgctcccttttgaacgcccggacacccgagaatcacgagaacctcttcctgcagccaccaaagctgagccgcgaagagccttctaacccatttctagccttcgttgagaaagttgaacattccccctttagctccttcgcaagccaggcttccggttccagctctagcgccacaacggtgaccagcaaggttgccccctcctggcccgagagccactcctccgccgatagtgcatcactggctaaaaagaagcccctattcattactacggacagcagcaagctcgtgagtggggtcctggggtcagcgttgactagcggcgggcctagtcttagtgcaatgggtaacggcaggtcctcttctcccacctcatctctgacccagcctatagagatgcccactctcagcagctccccaaccgaagagcggcccacagtggggcctgggcaacaggacaatccacttctcaagaccttttctaatgtctttggccggcactctggcggatttctatcctccccggccgacttctcccaagagaataaggccccttttgaagctgtaaaacgtttttctttagacgagcgatccctcgcgtgcagacaagacagtgattcttctaccaatagcgacctgtcagatctgtcagatagtgaggagcaactgcaggcaaaaacaggcctaaaggggatcccagagcacctgatggggaaactgggcccaaatggggaaaggtccgccgagctgttgttgggaaagagtaaaggcaagcaggcgccaaagggaagacctcggactgcgccgcttaaagtgggacagtcggtgctgaaggatgtgtcaaaagtcaagaagctcaagcagtcaggagaaccttttcttcaagatggcagttgtatcaatgttgctcctcacctgcacaaatgccgcgaatgtcggctagagaggtaccgcaaattcaaagagcaggagcaagacgactccaccgtggcctgtcggttttttcactttcgcaggctgatattcactaggaaaggggtcctccgggtagagggctttctgagcccccaacagtctgatccggatgctatgaatctttggataccgagcagctccctggcggaaggtattgaccttgagacgtctaagtatatcctagcaaatgtaggcgatcagttttgtcagctggttatgagtgaaaaagaagccatgatgatggtggagccgcaccagaaagtggcctggaagagagcagttcggggggtgcgggaaatgtgcgacgtctgcgaaaccacccttttcaacatccactgggtgtgccgcaaatgtgggtttggtgtttgtcttgattgttatcggctcaggaagtcccgaccacgtagcgagaccgaggagatgggcgacgaggaggtgttttcctggttgaaatgtgccaaaggccagtcacacgaacccgaaaatctcatgcccactcagatcattccgggcactgcattgtacaatattggcgatatggtccatgcggcccgtgggaaatgggggataaaggccaactgcccctgcatttccaggcagaacaaatccgtccttagacctgctgtcaccaacgggatgtcacagctgcctagcatcaacccctctgccagtagcggaaacgaaacaacgttctctggagggggcggtccagcccctgttacgacacctgagcctgaccacgtgccaaaggctgattctacagatatccggtcggaagaaccattgaagactgactcatctgcttcaaatagcaacagtgagctaaaggccatccgacctccttgtccggatactgccccgccaagtagcgcactgcactggctggccgaccttgccacccagaaagccaaagaagagacgaaggaagccggctcccttagaagcgtgctcaataaagaaagccacagtccattcggtttggatagcttcaattctacggcaaaggtaagtccactcacccctaaactttttaatagcctgctcctcggccctacggcctcaaataacaaaactgaagggtcatcgctccgcgacctattgcacagtggtccaggcaagctgccccaaacacctttggatacagggattcctttccctccggtgttttccactagcagtgccggagtgaaaagcaaggcttcacttcccaattttcttgaccatataatcgcttccgtcgtggagaataaaaagacttctgatgcttccaagcgcgcctgcaacctcactgacacccagaaggaggtgaaggaaatggtgatgggactgaacgtcttagatccacacacatcccactcatggctatgcgatggtcgcttgttatgcctgcacgacccgagcaacaaaaataattggaagatctttagggagtgctggaaacaaggtcaacctgttctggtttctggagtgcacaagaaactcaagtccgaactttggaagccagaagcgttctctcaagaattcggcgaccaagatgtggacctggtgaattgtcgtaactgcgcgatcattagcgatgtcaaggttagagacttctgggacggatttgagatcatctgcaagcgcctccgcagcgaagacggacagccaatggttctaaagctaaaggattggcccccaggggaagatttcagagatatgatgccaaccaggtttgaggatctcatggagaacctgcccctgcctgagtatactaaaagagatggacgtctcaatttggcgagccgccttccgagttactttgtgagacctgacctgggaccgaaaatgtataacgcttatggattaatcactgcagaagatcgaagagtgggcaccactaacctgcaccttgacgtatccgacgctgttaatgtcatggtgtacgtgggcataccaatcggggaaggcgcgcacgacgaagaggtgctgaaaaccatcgatgagggggacgcggacgaagtcacaaagcagcggatacatgacgggaaggagaaaccaggtgcgttatggcatatctatgccgccaaggatgccgagaaaattcgggagctgctgcgcaaagtcggagaagaacaaggacaggagaatccaccagatcacgatcccatccacgatcagagctggtatttagaccagactttgcggaaacgactctacgaggagtatggagtgcagggatgggcaatcgtccagtttctgggagatgccgtgttcattcctgcaggcgcaccccaccaggttcataacctgtactcctgtattaaggtggccgaggacttcgtgtcccctgaacatgtcaagcattgcttcagattgactcaggagttcaggcacctgtccaatactcacaccaaccatgaggacaagcttcaggtgaaaaatatcatttaccacgcggtgaaggacgcagtcggaactctgaaagctcacgaaagtaaactggctagatcttag

SEQ ID NO: 193677 - DNA, 2148 bp, synthetic construct
  misc_feature 1..2148: note = Description of Artificial Sequence: Synthetic coding sequence
  source 1..2148: mol_type = other DNA
atggccggcgtgggccccggcggctacgccgccgagttcgtgccccctccggaatgcccagtgttcgagccatcttgggaggaattcactgatcctctgtcattcatcggccgtatccgccctttggcagagaaaacggggatttgcaagatcaggcctcccaaggagtatgcactgagtggctggaatcttaacaacatgccagtgctcgaacagagcgtgctagcccatattaatgtggacatttccggaatgaaagtcccctggctatacgtgggcatgtgtttctcctcattctgttggcacattgaggatcactggtcgtacagcataaactatcttcactggggcgaaccaaagacttggtatggtgtcccttcccacgctgcggaacaacttgaggaagtaatgcgagagctcgctcccgagctttttgaatcgcaacctgaccttctgcatcagctggtgactattatgaacccaaacgtgttgatggagcatggagtgccagtgtacagaacaaatcagtgcgccggggagtttgttgtaacattcccgagagcctatcacagcggtttcaaccaaggttacaactttgccgaggctgtgaatttctgcacggctgactggctccctatcggtcgtcagtgtgtgaatcactaccgacgactcaggaggcactgtgtattctctcacgaggaactgatatttaaaatggctgctgacccggagtgccttgatgttgggctcgctgccatggtgtgcaaggagttaacccttatgacagaagaagagactaggctgcgagagtctgtggtgcaaatgggcgtcctgatgtccgaggaggaagtctttgagctcgttcctgacgacgaaaggcagtgtagcgcgtgccgcacgacctgcttcctgtcagccctcacctgcagttgcaatcccgaacgcctcgtttgtttgtaccacccaaccgacctatgcccctgtccaatgcagaagaagtgtctgcgatacaggtatcccttggaggacctgccatctctgctgtatggcgtcaaagtgagggcgcagagctatgatacctgggtatcaagagtgacagaggccctttcggcaaactttaaccataagaaagacttgatagagttgcgggtaatgcttgaggacgctgaggaccggaaatatccagaaaacgatctcttcagaaaactgcgtgatgcagtgaaggaggccgagacatgtgccagcgtggcccaactgctgctcagcaagaagcagaagcacaggcagtcccctgactccggaaggacacgtaccaagctgacagtggaggagctgaaagcttttgtgcagcagctcttcagcctgccttgcgtcatttctcaggcaagacaagtcaagaatcttctggatgacgtagaggagttccatgagagggcccaggaagccatgatggatgagacgcccgactctagtaaattacaaatgctcatcgacatgggaagcagtctgtacgttgagctgcccgaattgcccagattaaagcaggaattgcaacaggcacgctggctagatgaagttcgccttaccctgtctgaccctcaacaagtcacattggatgtcatgaaaaagttaatcgacagcggggtgggtctggcacctcatcacgctgtggaaaaagccatggcagagctgcaagagctccttaccgtttccgagagatgggaagagaaagccaaggtctgtttgcaggcccgaccccgccattctgtggcgtctcttgaatctatcgtaaacgaagccaagaacattcctgcatttctgccaaatgtcctcagcctcaaggaagctctgcagaaggcacgagaatggaccgccaaggtggaggcaatacaatcaggtagcaactatgcctacctagaacagttagaatccctttccgccaaaggcaggcccattccagtcaggctcgaagcgctaccgcaggtcgaatcccaggtggccgccgcaagagcatggcgcgaacgcacagggcgtactttcctcaaaaaaaattccagccatactctcctgcaagtgctcagccctcgcacagatatcggagtttatggctccggaaaaaacaggcgcaagaaagttaaggagctgtag

SEQ ID NO: 193678 - DNA, 4911 bp, synthetic construct
  misc_feature 1..4911: note = Description of Artificial Sequence: Synthetic coding sequence
  source 1..4911: mol_type = other DNA
atggccggcgtgggccccggcggctacgccgccgagttcgtgccccctccagagtgcccagtttttgagccgtcttgggaggaatttacagatcctctctcattcattgggcgaatcaggccccttgccgaaaaaacagggatctgtaaaatccggcctccaaaggattggcagcctccttttgcttgtgaagtcaagtcgttcagatttactcccagggtgcagagattaaacgagctggaggccatgactagagtgagattagacttcttggatcaactggctaaattctgggagctccaggggtccacgttgaagattcccgtggtagagcgcaagatcctggacttgtacgctctaagcaagatcgtggcgagtaagggcggatttgaaatggtaacaaaagagaagaaatggagcaaggtgggttctagactaggctatttgccaggtaaaggtacgggaagcctgctgaagagccactacgaaaggattctgtacccatacgagctatttcagagtggcgtctctttgatgggcgtgcagatgccaaatctcgacctgaaggaaaaagtcgagcctgaggttctgagtaccgatacccaaaccagcccggaaccaggcacccggatgaacatcttacccaagcggacaagaagggtcaagacgcagagcgagtccggcgatgtgtcccggaacactgaactaaaaaaactgcagatttttggggcaggaccaaaagtagtgggtcttgcgatgggcacaaaagacaaagaagatgaggtcacacgcagacgcaaagtcaccaatagaagcgacgctttcaatatgcagatgcgccagagaaagggaacgctgtcagtgaatttcgtggatctgtacgtgtgtatgttttgtggccgcggcaacaacgaggacaaactgttgctctgtgacggatgcgatgattcctatcatactttttgtctgataccccctctccccgatgttccaaagggcgattggcgttgcccgaaatgtgtggccgaggagtgctccaagccccgcgaagccttcgggttcgaacaggcagtcagggaatataccctgcagtcctttggggaaatggccgataatttcaagtcggactacttcaacatgcctgtccatatggttcctaccgagttagttgaaaaagaattctggaggcttgtcagcagcatcgaggaggatgtgatcgttgagtacggggccgatatctcgtctaaggactttggcagcggattccccgtgaaggacgggaggaggaaaatcctgcccgaggaggaggagtacgccctgagcggctggaatctcaacaacatgccagttttggagcagtctgttctggcgcacattaacgtagatatcagcggaatgaaggttccctggctgtacgtcggaatgtgcttctcgtccttctgctggcacatcgaggaccactggtcgtattccattaattacctgcactggggagagcctaaaacctggtacggggttccatcccatgctgcagaacagctggaagaagtcatgcgggagctggccccggagttgttcgaaagtcagccagatctgctgcatcaactggtgactataatgaatcccaatgtattaatggaacatggagtgccagtataccgcactaatcagtgcgctggcgaatttgtggtgacattccctcgggcatatcactccggattcaaccaaggatacaattttgccgaggccgtcaacttttgtaccgctgactggctgcccattggccgccagtgcgtcaatcattaccggagactacgccggcactgcgtgttttcccacgaagagctgattttcaagatggctgctgaccctgagtgtcttgatgtcgggttggcggccatggtttgtaaggagttgacactgatgactgaggaggaaactcgcttgagagagtcagtcgtgcagatgggagtactgatgagcgaagaagaggtgtttgagctggtccccgatgacgaacgccagtgctcggcatgcaggactacgtgcttcttgtccgcactcacatgctcatgtaatcccgaacgcttagtctgcctatatcacccaaccgacttgtgcccttgccctatgcagaaaaaatgtttgcggtaccgctatccattggaagacctgccttccctgctttatggcgtgaaggtgcgtgctcagtcttacgacacctgggtttcccgagtgacagaagccttgtctgccaactttaatcataagaaggatctaatcgagcttcgcgtgatgctcgaggacgctgaagatcggaaatatccagaaaatgatctgtttcggaagctgagggatgctgtgaaggaagccgaaacctgtgcatccgtggctcaattgctcttgagcaagaagcaaaagcacagacaatcaccagactcgggccgcacccgtactaagctgacagttgaggagctaaaggcatttgtacagcaattgttcagtttaccctgtgtcattagtcaggctcggcaggtgaagaatctactggacgacgtggaagagttccacgagagggcccaggaggctatgatggacgagacccctgactcctctaagcttcaaatgctgattgacatgggcagttcattgtacgtcgaactgccagagttaccacggttgaagcaggaattgcagcaggctagatggctcgatgaagtgcgcctgactctgtccgatccacaacaagtgactctggatgttatgaaaaagctaattgacagtggcgtggggctggccccccaccacgccgtggagaaggcgatggcagagctccaagaactgcttaccgtctctgagagatgggaagaaaaagctaaggtttgccttcaggctcgccctaggcactcagtggcctccctggagtcgattgtgaacgaggcgaaaaacatccccgcctttctgccgaacgtgctgagtctgaaagaagctctacagaaggcaagagagtggaccgccaaggtagaggccatacagagcggctcgaattatgcttatttggaacagctggaatccttgtcggctaaggggcgccccatcccggttcgattggaggccctgccccaggtcgagagtcaggtagcagcggccagagcatggcgggagcgcacgggccggacctttctcaagaagaactcttcccacaccctgctgcaggtgctgtccccaaggacagacattggtgtatacggatctggtaagaatagacggaagaaagtaaaagagctgattgagaaagaaaaagagaaagatctggacctggaaccactctccgatctggaggaaggcctggaggagacgcgcgacacagcaatggtagtggcggtttttaaggaaagagaacagaaggagatcgaggcgatgcatagcctcagagctgctaacttagcgaaaatgaccatggtcgatcggatagaggaggtcaagttttgtatctgtaggaagaccgccagcgggttcatgcttcagtgtgagttatgcaaagattggttccataatagctgcgtgcctttgcccaagagctctagtcagaaaaaaggaagctcatggcaggccaaggaagttaagtttctgtgtcctctgtgtatgaggtcacggagacccaggctggaaaccatcctgagcttgctggtcagcctccaaaagcttcctgtgaggctgcccgagggcgaggccttgcagtgcctgacagagagagccatgagctggcaggacagagcccgtcaggcactggcaactgatgagctctcctctgctttggccaagctttcagtgctcagccagaggatggtcgagcaggcagcccgcgagaagactgagaagatcatctccgctgaattacagaaggccgccgccaatcctgacctccaggggcacttgccttccttccagcaatcagcattcaacagagtggtctccagcgtcagttcgtccccccgacagacaatggactatgacgatgaggagacagactccgacgaagatattcgggagacatatgggtatgatatgaaggatacggccagtgtgaagtcaagtagctctttagaacctaatctgttctgtgacgaagagattccgataaaaagcgaggaagtggtgacgcacatgtggactgcaccaagcttttgcgcagagcacgcctacagtagtgcctcaaagagttgtagccaggggtcctcaacgcctcggaagcaacccagaaagagccctttggtaccacggtcattggagccccccgttctggagctgtccccgggagcaaaggctcagctggaagaacttatgatggtgggagatcttctggaggtttccctcgatgagacacagcacatttggaggattcttcaggccacccatccgcccagcgaagatcgttttctgcacatcatggaggacgatagcatggaggaaaagcccctgaaagtgaaaggaaaagattccagcgagaagaagcgcaagaggaaactcgagaaggtcgaacagctattcggggaggggaagcagaaaagcaaagagctcaagaagatggacaaaccacgaaaaaagaagttgaagctaggagccgacaaatcgaaggaattgaataagttggcaaagaaactggccaaagaggaggagcggaagaaaaaaaaggaaaaagctgccgcagcaaaggtggagctcgtgaaagagtcaactgagaagaagcgggagaagaaagtcctggacatcccctcaaaatacgactggtccggagccgaggagagtgatgacgaaaacgccgtgtgcgccgcgcagaactgccagcgaccatgcaaggacaagggcgtggtgttcgtgactgaggaagagaagaacaaaaaatattag

SEQ ID NO: 193679 - DNA, 3150 bp, synthetic construct
  misc_feature 1..3150: note = Description of Artificial Sequence: Synthetic coding sequence
  source 1..3150: mol_type = other DNA
atggccggcgtgggccccggcggctacgccgccgagttcgtgccccctcccgagtgtccggtgttcgaaccttcctgggaggaatttaccgacccactaagcttcatcggtaggattagaccgctggcagaaaagactgggatctgcaagatcaggccccccaaagattggcagccaccttttgcctgcgaagtcaaatctttcaggttcactcctcgcgtgcagcgcctgaacgagctggagattgtggcgtccaagggaggctttgaaatggttacaaaggaaaagaagtggtccaaggttgggtctagacttggatacctgcctggaaaaggaacaggatcactcctcaagtctcactatgagaggatcctctatccctatgagctcttccagtctggagtgtccctgatgggcgtacagatgcccaacctagatctcaaagagaaagtggagcccgaggttttgtcaactgacacacagacctcgcctgaacccggcacccgaatgaatatcctcccaaagcgtacaagacgggttaagacacagtccgagagcggagacgtctctaggaacacagagctgaaaaagttgcagatatttggtgccggcccaaaggtggtcggactggcgatgggtaccaaagacaaagaagacgaagtgacccggcggcggaaggttaccaaccggagcgacgcgttcaacatgcagatgcgccagaggaagggtactctgtctgtcaattttgtagacctgtatgtgtgcatgttttgtgggcgcggaaataacgaggacaagttgcttttgtgcgatggctgtgacgattcttaccataccttctgcctgatccctccccttccagacgttccaaagggggactggcgatgtcccaagtgcgtggccgaggaatgtagcaagccacgggaagccttcggatttgagcaggccgtgcgtgagtacactttgcaatcgttcggagaaatggccgacaattttaagagcgactactttaatatgcccgtgcacatggttcccactgaactagttgaaaaggaattctggcggctggtcagctctatcgaagaagacgtgatagtcgagtacggcgctgacatatcttcaaaggactttggtagcgggtttcctgtaaaagatggtaggcggaagattctgccggaggaggaggaatacgcactgagtggatggaacttgaataatatgcccgtactggagcagagcgttctggcccacatcaacgtggacatcagcggcatgaaagttccctggctttacgtgggaatgtgctttagttctttttgctggcacatagaagatcactggagttacagtatcaactacctccattggggagagccaaagacttggtatggagtgcccagccacgcggctgagcaattggaagaagtgatgcgtgagttagcacccgaactcttcgagagccaacccgatctcctgcaccagctggttaccattatgaacccaaacgtcctgatggagcacggcgtgccggtttataggactaatcagtgcgctggtgaatttgtggtcacttttcctagagcctaccacagcgggtttaatcagggctacaatttcgccgaagcagtgaacttttgcacagctgactggctccctatcggccgccagtgcgttaaccactatcgccgtttacgacgccattgtgtgttcagtcacgaggaattaatttttaaaatggcagccgatcccgagtgtctcgacgtcggactggcagctatggtctgtaaagaattgaccctgatgaccgaggaagaaacccgtctgagagagtccgtggtccagatgggagttctgatgagtgaggaagaggttttcgagctggtgcctgacgacgaacggcagtgtagcgcttgtagaaccacatgcttcctctcagccctaacatgttcttgcaatcccgaacgcctggtgtgcctttatcacccgacagacctgtgtccttgtcctatgcaaaaaaagtgtcttcgctaccgctatccgttggaggaccttccctccctgctctatggagtcaaagttagagcccagtcctacgacacctgggtatcgagggtgactgaagccctgtcagccaacttcaaccataagaaggatctgatcgaactaagagttatgctggaggatgcagaggaccggaaatatccagaaaacgatctttttcggaaacttagggacgctgtaaaagaggcagagacctgtgctagcgtcgcccagcttttactaagtaagaaacagaaacatcggcagagccctgactctggccggaccaggacaaagcttaccgtggaggaactgaaggcatttgtccagcaactattttcgttaccttgcgtcattagtcaagccagacaggtcaaaaatctgctggacgacgtggaggaatttcatgaacgggcccaggaggcgatgatggacgagactccagactcgtctaaactgcagatgttaatagacatgggctcttcattgtatgtggaactgccagaactgccccgcctgaagcaggaactacagcaagcaagatggctggatgaggttagactgaccctgtctgatccgcagcaggtcaccctagatgtgatgaagaaacttatcgactccggcgtgggactggccccacaccacgccgtggagaaagccatggctgaactccaggaactactcaccgtcagcgaaaggtgggaggagaaagctaaggtttgtctccaggcacgtccgcggcacagcgtggctagtttggagtcaatagtgaacgaggctaaaaatatcccagcgtttctgccaaacgttctcagtctcaaagaggccctccagaaggcgcgcgagtggacagcaaaagtggaggccattcagtccggatctaattatgcatatctggaacagctggaatctctttccgccaagggcagacccattcccgttcgactcgaagcgctccctcaagttgagtctcaggttgccgccgcacgcgcttggcgcgaacggaccggcagaacatttcttaagaaaaattcgagccacactctcctgcaggtcctttctccaaggacggacataggggtgtacggatcgggtaaaaatagacgctag

SEQ ID NO: 193680 - DNA, 5073 bp, synthetic construct
  misc_feature 1..5073: note = Description of Artificial Sequence: Synthetic coding sequence
  source 1..5073: mol_type = other DNA
atggccggcgtgggccccggcggctacgccgccgagttcgtgcccccaccagagtgtcctgtatttgagccttcctgggaggagtttaccgatccactatctttcataggcaggattagaccactggcagaaaagaccggaatatgtaagattcgaccccctaaggactggcaaccgccctttgcatgcgaggtgaagtcatttcgctttactccacgggtccagcggctaaacgagctcgaagcaatgacaagagtcagactcgatttcctcgatcagctggccaagttctgggagctgcaagggtctactctgaagatcccagtggtggagcgtaagatcttggacctctatgccctgtcaaaaattgttgcctcaaagggaggatttgagatggtgaccaaggaaaagaagtggagcaaagtcggctcacgattggggtacctgccaggaaagggaaccggctccctgctgaagtcccactacgagcgcatcctgtacccttacgaattgtttcagtccggcgtctccctgatgggcgtgcagatgccaaatctcgatcttaaggaaaaggttgaacctgaagtgctctccactgatacacaaacaagccctgagccggggacacgcatgaacatcctgccaaagcggacacggcgtgtgaaaactcagtctgagagcggggacgtgtccagaaacacggaactgaagaaactccagatcttcggggcggggcctaaagtcgtgggattagcaatgggcacgaaggataaagaagatgaggtgacccggaggaggaaggtaacgaacaggtcggacgcattcaatatgcagatgcgtcagaggaaagggaccctatcagttaacttcgttgacctgtacgtgtgtatgttttgtggccgaggaaataacgaggataaactgctgctttgcgatggctgtgacgatagttaccacacgttctgcctcatcccccccttgccagacgtccctaaaggggactggaggtgccctaagtgtgtggccgaggaatgctctaaaccacgtgaagccttcggcttcgagcaggccgttcgggaatacaccctgcagtctttcggggaaatggctgataattttaagtcagactactttaatatgccagtgcacatggtgcctaccgagctggtcgaaaaggaattttggcgtctcgtgtccagcattgaggaggacgtgatcgtcgagtacggagctgatatctcaagtaaggattttggcagtgggttccccgtgaaggacgggcgaagaaagatactgcctgaagaagaagagtatgccctgagtgggtggaacctgaataatatgccagtcctcgagcagagtgttctggctcacataaacgttgacatcagcggaatgaaggtcccctggctttacgtggggatgtgcttctcctcgttctgctggcacattgaagaccattggagctacagtatcaattacctgcactggggggagccaaaaacatggtatggggtcccatcacacgctgccgagcaactggaagaagtgatgcgagagctggcacctgagctctttgaaagccagccagacttgctacatcagctcgtgacaatcatgaaccctaacgtactgatggaacatggcgtcccagtgtacaggacaaatcaatgcgcgggcgagttcgtcgtcaccttcccacgagcatatcacagtggctttaaccagggctataatttcgctgaggccgtgaacttctgtactgccgactggctgcccattggccggcagtgtgtgaatcattaccggcggctgcgccggcactgtgtgttctctcacgaggagcttatcttcaaaatggcagccgaccctgagtgcctggacgtgggactggcagccatggtgtgcaaggagctaaccctgatgactgaggaggaaacccgattgagagagagcgtggttcagatgggtgtgctgatgtctgaggaagaagtgttcgaactggttccagacgatgaacgacagtgtagcgcgtgtaggaccacctgtttcctgtccgccctgacatgtagttgcaaccccgaacgtctggtctgtctctatcatccaacggatctctgcccgtgtccaatgcagaagaagtgtctgcggtatagataccccctcgaagacctgccctcactgctctacggagtcaaagtgcgagcacaatcttatgacacctgggtgagcagggttacagaagctctgtcagccaactttaaccacaagaaggacttgattgaattaagagtaatgttagaggacgctgaagatcgcaagtatcctgagaacgacctgttccggaagctgcgcgacgctgttaaggaggctgaaacttgcgcctctgttgcccagttactactatccaagaaacaaaagcataggcagtccccagacagcggacggacaaggaccaaactaacagtggaggagctgaaagcctttgtccagcagctgttcagcttgccatgtgtgatcagtcaggcacggcaggttaagaatttgttagatgacgtggaggaattccacgagagagctcaggaagcaatgatggatgaaacccccgacagttctaaactgcagatgctcattgacatgggcagctccctgtacgtggaactacctgagctcccccggctgaagcaggaactccagcaggcgaggtggctggacgaggtgagactgactctgtctgacccccagcaagtgaccctagacgtgatgaaaaaacttatcgactctggcgtcggtctcgccccccatcatgctgtcgaaaaggctatggccgaactgcaggagttgctaaccgtatctgagaggtgggaggagaaggcaaaggtatgcctgcaagctagacctcggcattctgtggcaagcctcgaatctatagtaaatgaggcgaagaacataccagcctttcttcctaatgtcctgagtcttaaagaagcccttcaaaaagcgcgagaatggactgccaaagtggaggctatacagtccggaagcaattatgcgtacctagagcagctagaaagcctaagtgctaaggggaggcccattcccgtgcgcttggaagctctgccgcaagttgaaagccaggtggccgcggcgcgagcttggcgggaacgcacggggcgcacctttctgaaaaagaattcctctcacaccctgctccaggttttatccccaaggactgacatcggggtgtatggcagtggcaaaaacaggcgcaaaaaagtcaaagagctgattgagaaggagaaggagaaggatctggacttggaacctctgtcggacctcgaggaaggactggaggaaactcgagataccgccatggtggttgcagtttttaaggagcgggagcagaaagagatcgaagctatgcatagcctgcgggctgctaatcttgcaaagatgaccatggtggataggattgaagaagtgaaattttgtatctgcaggaaaactgccagtggatttatgctgcaatgcgagctgtgtaaggattggttccacaattcgtgtgtaccccttcctaagagctcatctcagaaaaagggcagcagttggcaggctaaagaagtgaaattcttgtgtccactttgtatgagaagcagacgcccacgcctggaaactattttatccctgcttgtttctttgcagaagcttcccgttcggttgcctgagggcgaggccctgcaatgcttgaccgagagggccatgagctggcaggaccgcgcgcgtcaggcattagccacagatgagctttcatcagcattggccaagctgtcagtgttgtctcagaggatggttgaacaggccgcccgggagaagacggaaaagataatttctgccgagttgcagaaggcagcagctaacccagacctacaagggcatttacccagcttccaacagtcagccttcaatcgggtagttagctccgtgtccagctcacctagacagaccatggactacgacgatgaagaaaccgattccgatgaggatatcagggagacctatggctatgatatgaaagacaccgctagcgtaaaaagtagctcatctctggagcctaatctattctgcgatgaagagattcctatcaaatcagaagaggtggtgactcatatgtggaccgctccaagcttctgcgctgagcatgcatactccagtgcttctaaatcatgcagtcaaggttcttccaccccacgaaaacaaccccgcaaatctccactcgtcccgagaagcttagagccacccgtactggaactctcgcccggcgctaaggcgcagcttgaggaactcatgatggtgggcgatctgctggaggtctcgcttgatgagacacagcacatttggcggatcctacaggcaactcacccgccatcagaagatcgctttctgcatatcatggaggatgattctatggaggagaaaccgttgaaggtaaaagggaaggattcttcggagaaaaaacgaaaaaggaaactcgagaaagtcgagcagctattcggggagggcaagcagaagtcaaaggagctgaagaagatggataaaccccgaaagaaaaagttgaaacttggagctgacaagagtaaggagctgaataagctggccaagaagctggctaaagaggaagaaaggaaaaagaaaaaggaaaaggccgccgcagctaaggtggagcttgttaaggaatccaccgagaagaagagagaaaagaaagtgctggatattcctagtaagtatgactggtctggagctgaggagtcagacgatgaaaacgcggtgtgtgccgctcaaaactgccagagaccttgcaaggataaggtagattgggtccagtgtgatggcggatgcgatgaatggtttcatcaagtgtgcgtaggggtttctcctgagatggctgaaaatgaggactatatttgcattaactgtgccaaaaagcagggcccggtttcgcctggtcccgctcctcctccctcattcataatgagctataaattgcctatggaggacctcaaggaaaccagctag

SEQ ID NO: 193681 - DNA, 3828 bp, synthetic construct
  misc_feature 1..3828: note = Description of Artificial Sequence: Synthetic coding sequence
  source 1..3828: mol_type = other DNA
atgggcttcgcccccggcaaggccgtgggcagccacatccggggccattatgagaggatcttgaatccatacaatctgttcctgtcaggagatagtctgaggtgtttacagaaacccaacctcaccaccgatactaaggacaaggaatataaaccacacgacatacctcaacgccagtccgtgcagcctagcgaaacctgtccaccggcacgaagggctaagagaatgcgggccgaggcgatgaatatcaagatcgagcctgaggagacaacggaagcccggactcacaatctgcgacgccgtatgggatgccccacccccaagtgtgagaacgagaaggaaatgaagtcttcaatcaaacaagagccaatcgagcggaaggactatatcgttgagaacgaaaaggaaaaaccgaagtcgaggagcaaaaaagccactaatgcagtggatctttatgtttgtctgctgtgcggctccggaaacgatgaggatagattgcttctgtgtgatggctgcgatgattcttatcacacattttgccttattcctcctttgcatgacgtccccaaaggcgattggagatgcccgaaatgcttggcacaggagtgttctaaacctcaggaagcgtttgggttcgaacaggctgccagagattacacccttcgcaccttcggcgagatggcggacgccttcaagtctgactatttcaacatgcctgtgcatatggtgcctactgaactggtagagaaagagttctggaggctggtcagtactatcgaggaagacgttaccgtggaatatggggctgatatcgcctcaaaggagttcggaagtggcttccccgtccgtgacggaaaaatcaagttatcacctgaggaagaagagtatcttgatagcggatggaatcttaataacatgcccgtgatggagcagtctgtcctcgcccacatcaccgcggatatttgtgggatgaaactgccttggctctatgtgggcatgtgtttcagcagtttttgttggcacatagaggatcattggagctacagtataaattatctgcattggggcgagccaaagacttggtacggagtgccgggctacgccgccgagcaattagagaatgtcatgaagaagttggcccccgagctgttcgtctctcagccagatctgctccatcaactggttacaatcatgaaccctaacactctgatgacccacgaggttcctgtgtatagaacgaatcagtgcgccggcgagttcgtgatcacattcccaagagcctaccactctggttttaaccagggcttcaacttcgctgaggcagttaacttttgtacagtcgattggctgccactgggaaggcagtgcgtggagcattatagactgctgcaccgatactgtgttttcagccacgatgagatgatttgtaagatggcatctaaagcggatgtgctggatgtggtggtggctagcaccgtccagaaggatatggccattatgatcgaagatgaaaaggcacttagagagactgtgcgtaaactaggcgttatagatagcgagcgaatggactttgaattactccctgatgatgagaggcagtgcgttaaatgtaagaccacctgttttatgagtgccatcagctgcagctgcaagcccggcctcctcgtatgcttgcaccatgtaaaggagctctgctcctgccctccctataagtacaagctgcggtatcgttatacattggacgacctgtatccaatgatgaatgcattgaagctgcgcgcagagagctacaatgaatgggctttgaacgttaatgaggccctggaggccaaaattaacaagaagaagtccctcgtgagcttcaaggccctgattgaagagtccgaaatgaagaagttccctgacaacgacctgctgcgtcacctcagacttgtcacacaggatgctgagaaatgtgctagcgtcgcacagcaactgctcaacggcaagcgtcagacaagatatcgatctgggggtggaaagtcccagaatcagctgaccgttaatgagctacgacagttcgtcacccagctgtacgctctgccctgcgtgctcagccaaaccccgttactgaaggacttgttgaaccgagtggaggactttcagcaacactctcaaaaacttctttcagaggaaacaccgtcagccgctgaacttcaggatctgctggacgtgtctttcgagttcgatgtcgaacttccacaactcgcagagatgcgcattcggcttgaacaggctaggtggctggaggaggtccagcaagcctgcctagatcctagctccctcacacttgacgacatgaggcggttgattgatctcggtgtcggactggccccttacagcgccgtagagaaggcgatggctcgtctgcaggagctgctcactgtgagcgaacattgggatgacaaggccaaaagtcttctcaaagctagacctaggcattccctaaatagtttggccaccgccgtgaaagagatcgaagagattccagcgtacttgccaaacggagccgcacttaaggacagcgtccagagggctcgcgactggttacaagatgttgaaggcctacaggcgggtggacgcgtcccagtgttggacactctaattgaactcgtgacgaggggcaggagtatcccagtgcatctgaacagccttcctcggctagagaccctggttgccgaagtccaggcatggaaggagtgtgccgttaacacctttctcacagaaaactcaccgtattccctgctggaggtcttatgccctcggtgcgatataggcctgctgggcctgaaacggaaacagaggaagctcaaggagccactgcccaacgggaaaaaaaagtctactaaactggagtctctgtctgacttggaaagggcacttactgagagcaaggaaaccgcctctgcaatggcaacgctcggcgaggcccgactcagggaaatggaggccctgcagtccctccgcttggcaaacgagggcaagctcttgtcccctctccaggatgtagatatcaagatatgtttgtgccagaaggcaccggccgccccgatgattcagtgtgaactgtgccgagacgcattccacaccagttgcgtcgccgtcccaagcatctcccagggcctaagaatctggctctgcccacactgtcggcgctcggagaaacccccactcgagaaaattttaccgttgctcgcctcattgcagagaatcagggtcagattgccagaaggagatgccctgaggtacatgatcgagcggacagtaaactggcagcatagggcccagcagcttctgtccagcgggaatcttaagtttgtacaagatcgcgtggggagtgggctcctgtactccaggtggcaagccagcgcagggcaggtcagcgatacgaacaaagtcagccagccccccggaacaacttctttctcactgcccgatgattgggataatcgaaccagttacctgcactcccccttttcgacaggtagaagctgcattcccctgcacggggtttccccagaagtcaatgagttactgatggaggcccagctcctgcaggtatcactgccagaaatccaggagctctaccagaccttactggccaagccttcccccgcccagcaaaccgaccgaagctcacctgtacgcccatctagtgagaaaaacgattgctgtcgtggcaagcgcgacggtattaattcattagagaggaagctgaagagaagattggagcgcgagggcttgagctctgaacgctgggaaagagtgaagaaaatgcgtactccctag

SEQ ID NO: 193682 - DNA, 4743 bp, synthetic construct
  misc_feature 1..4743: note = Description of Artificial Sequence: Synthetic coding sequence
  source 1..4743: mol_type = other DNA
atggaggccgccaccaccctgcaccccggcccccggcccgccctgcctctcggcgggcctgggccgctcggagagtttctaccaccacccgagtgccctgtgtttgagcctagttgggaggaatttgcagacccatttgccttcatccataaaatcagaccaatagccgagcagacgggtatctgcaaagttaggccgccacccgattggcagccaccgttcgcttgtgacgtggacaagttacattttacaccccgtatccaacgtctgaatgagcttgaggctcagacacgcgtcaagctgaacttcttagatcagattgctaagtactgggagttacaaggctccacactgaaaattccccacgttgaacgtaaaatccttgatctgtttcagctcaataagctagtggccgaagaaggtggcttcgctgtggtatgcaaagacaggaagtggactaaaattgccacaaagatgggattcgcaccggggaaggccgtgggttcacacatccgtggccattatgagcgtatcctgaacccctacaacctttttcttagcggggacagtctgcgctgcctccagaagccaaatctcacgacggatactaaagataaggaatacaaacctcacgacatacctcaacggcagagtgtccagccatcagagacttgtccccccgctagaagagcaaaacggatgcgcgcagaaagacagagcctggctgtactccctcgcctggagtgctccggcgcgattctggcccactgtaaccttagactgctggactcttccaattcttcggcatcagcctctcaagctatgaatataaaaattgaacccgaggagactaccgaggcaaggactcacaacctccgaagacgtatgggctgtcctactcccaagtgcgagaatgagaaagagatgaaatccagcataaaacaggagccgattgaaaggaaagattatatagtggagaacgaaaaggaaaagcctaaatcacggtcgaagaaagcaactaatgctgtcgatctctatgtttgcctgttatgtggtagcggcaatgatgaagacagactgttgttgtgcgacggctgtgacgattcataccacactttctgcttgataccacccctgcacgacgtgcctaaaggggactggcgatgtcctaagtgtctggcccaggagtgttccaagccccaggaggccttcggcttcgagcaagccgcaagagactatactctccgaacttttggggagatggcagacgcctttaagtcagactacttcaacatgcccgtacacatggtccccaccgaactggtggagaaagagttctggaggctggtgagcactatcgaggaagacgttacggtggagtacggcgcggatatcgcgtcgaaggagtttggcagcgggttcccggtcagggatggtaaaatcaagttaagccccgaggaggaggagtacctggactccggttggaacttaaacaacatgcctgtaatggagcagagtgtcctggctcatataacagccgatatctgtggtatgaaactgccctggctttacgtgggaatgtgctttagttccttctgttggcacatagaagaccattggtcatacagcatcaactatcttcactggggggagcccaagacctggtatggcgtgcccgggtatgcagccgagcagctcgagaatgtgatgaaaaagcttgctcccgaactgttcgtctctcagccagatttgctccaccagctcgtgacaatcatgaatcctaacacactgatgacccacgaggtccctgtctacagaactaatcagtgtgctggcgagttcgtgatcacatttccccgggcttatcacagtggttttaatcagggttttaatttcgccgaagccgtaaatttctgcacagtggactggctgcccctggggcggcagtgtgtggagcactataggctgctgcaccgctactgcgtattcagccatgacgaaatgatatgtaagatggcgagcaaagctgacgtcctggacgtcgtcgtcgcatcaacagtgcagaaagacatggccataatgatcgaggatgagaaggctctcagggaaacagttagaaagctcggagtgatcgacagcgagcgtatggacttcgagttgctccccgacgacgaacgacagtgcgtcaagtgcaaaactacctgttttatgagcgccatctcctgctcttgcaaacctggcttgctggtctgcctacaccacgtgaaagagctgtgcagctgccctccatataagtacaaactcaggtatcggtacacgctggatgacctgtacccgatgatgaacgccttgaaactgagagcagagtcctacaacgagtgggcccttaacgtgaacgaggccctggaggctaagattaataagaagaaatctctggtttcctttaaagcattaattgaagaaagcgaaatgaagaagtttcctgacaatgatctgctgcggcatctgcggttagtgacccaggatgccgagaaatgcgcatctgtggcccagcagctacttaacggaaagcggcagactaggtaccgaagcggcggtggaaagtcccagaaccaactcacagtcaatgagctccgacaatttgttacacagctttatgcactgccttgcgtgttgagccagacccctctgctgaaggatcttctgaacagagtcgaggatttccagcagcactcacagaagcttctctctgaggagacaccttccgcggccgaactgcaggatctgctggatgtctcgtttgaatttgatgtggagctgccacagcttgcggagatgaggatacgcttagagcaggctcgatggttggaagaagttcaacaggcatgtctcgatccctcatcactgaccctcgacgacatgagacgactgatcgacctaggagtaggactcgccccttatagtgcagtcgaaaaagccatggcgcgactacaggagctgttgactgtgtccgagcactgggacgataaagccaaatctctgcttaaagctcggccccgtcacagtctcaacagccttgccacggccgtgaaggagatcgaagaaatccccgcctaccttcctaacggggccgcattgaaggacagcgttcagcgagcacgcgactggcttcaggatgtggagggactgcaggccggcgggagagtgcccgtgctggatacgcttatcgagttggtgacccgcgggcggagcataccagtgcacctgaatagtctacctcgcctcgagacgctggtggcggaagtgcaggcttggaaggagtgtgcagtgaacacttttctgactgagaattctccctacagcctgctagaggtgctgtgtccacgctgtgacattggtctgctggggctaaaacggaagcagcggaagctgaaggaacctctccccaatggaaaaaagaaatccactaagctggaatcgttatctgacttagagcgagctctgactgagagtaaagagaccgcctctgccatggctaccttgggggaagctcggctgagggaaatggaagccctgcagtcactgcgcctcgccaatgagggtaaactgttgtctccattgcaggacgttgatatcaagatatgtttgtgccaaaaagcccctgccgctcccatgatacaatgcgaactgtgcagggacgcattccacacctcttgtgtcgccgtgccctccatcagccaggggctgcgaatctggctctgtccacattgtcgtaggagcgagaaacctccactcgaaaagatcctgcccctgctcgcatccctccagagaatccgcgtaaggcttcccgaaggcgatgctctccggtacatgatagaaagaacggtaaattggcagcacagggcccagcaactgctgtcttccgggaacctcaagttcgttcaggacagagtcggctccggcctcctatatagccgctggcaagctagcgctgggcaagtgagcgacacaaacaaagtatcccagccccctggaaccaccagcttctccctgccagatgactgggacaaccgcaccagctacctgcattctccattcagcaccggtaggagctgtatccccctccacggcgtttccccagaggtcaatgagctgctcatggaagctcagctgttgcaagtgtcattgcccgagattcaggagctctaccagaccctgctcgccaagccttcccctgcacagcagaccgataggtcgagccctgtccgaccctccagcgaaaagaacgactgctgtaggggcaagagagatggtataaactctctggaacgaaaacttaagcggaggcttgaaagggagggactgtctagtgagcggtgggagagggtaaaaaagatgcggactccaaaaaagaagaagataaagctcagtcacccaaaggacatgaataacttcaaactcgagcgcgagcgcagctatgagcttgtgagaagcgcagagactcatagcttgccaagcgatactagctactcggaacaggaagacagcgaggacgaagacgccatctgtcctgcagtgagttgtctgcagcccgagggcgacgaggtcgattgggttcagtgtgacggatcatgtaatcagtggttccatcaggtgtgcgtgggtgtatcccccgaaatggctgaaaaagaggactacatctgcgtgcgctgcacagtaaaggacgcacccagcaggaagtag

SEQ ID NO: 193683 - DNA, 4635 bp, synthetic construct
  misc_feature 1..4635: note = Description of Artificial Sequence: Synthetic coding sequence
  source 1..4635: mol_type = other DNA
atggaggccgccaccaccctgcaccccggcccccggcccgccctgccattaggaggccctggcccactaggagagtttctaccgccacctgagtgtcccgtctttgaaccttcttgggaggaattcgcagatccctttgcatttattcataagatcagaccaattgctgagcagacaggtatatgcaaagtgcgtccgcctccggattggcagccccccttcgcatgcgacgtcgacaaactgcattttaccccccgcattcagcggcttaacgagctggaagcgcagactcgcgttaaattgaatttccttgaccagattgcaaagtattgggaactgcagggaagtaccctcaaaatcccacacgtggagcgcaagatcctggacctgttccagctcaacaaattagtggcggaggaagggggtttcgctgtcgtgtgcaaagaccgcaaatggaccaagattgctaccaagatggggtttgcccccgggaaggccgtcggatcacacatccggggtcattatgagcgcattctgaacccctacaacttgtttctgtcaggggacagcctgcggtgcctacagaagccaaatctaacaacagacaccaaagacaaagagtataaacctcacgacatccctcagaggcagtcagttcagccaagcgagacctgcccgccagctaggagagcaaagcggatgagggctgaggcaatgaacatcaaaattgaaccggaggaaaccaccgaggccagaacgcataacctccgccggaggatgggctgtccaactccaaaatgcgaaaatgagaaagagatgaaatctagcattaaacaggaacccatagaacgtaaagattatatcgtggaaaacgagaaggagaagcccaagtcgaggagcaagaaagctacaaatgcagtggacctttacgtatgcctcctttgcggcagtggcaatgatgaagacaggctgctgctgtgcgatgggtgtgacgatagttatcacactttctgcctgattcccccgttacacgatgtgccgaagggcgactggcggtgccccaagtgtctcgcacaggagtgtagtaaaccgcaagaagccttcggctttgaacaggctgcacgggattatactctgagaacttttggggagatggccgacgcctttaagagtgactacttcaatatgcccgtgcatatggtgcccaccgagctcgttgaaaaagagttctggagactggtgtctacaatagaggaagatgtaaccgttgagtatggtgcggacatcgcttcgaaggaatttggctccggctttccggtgcgggatggcaaaatcaagctatcccctgaggaggaagagtatctggattctggctggaacctgaacaacatgccagtgatggaacagtccgttctcgcccacattacagcggacatttgcggcatgaaactcccctggctgtatgtcgggatgtgcttctcctcattttgctggcatatcgaggatcattggtcttattccattaattatctgcattggggtgaaccaaagacctggtacggggtcccgggttacgcggccgagcaactggaaaacgtgatgaaaaagttggcacccgaactttttgtgtcccagccggatcttttacaccagttagtaaccattatgaacccaaacaccctgatgacccatgaggtgccagtctataggacaaaccagtgcgctggagagtttgttatcacctttccccgggcctatcactctgggtttaaccaaggttttaattttgctgaggcagttaatttttgtaccgttgactggctgccactagggcgccaatgtgttgagcattaccgactcctacacagatattgtgttttttctcacgacgaaatgatttgcaagatggcatctaaggccgacgtcctcgacgtggtcgtggcctccactgtgcagaaggatatggccattatgattgaagacgagaaagccctgcgcgagaccgtgagaaagttgggggtaatcgattccgagcgaatggacttcgagttactccccgatgatgaacgtcagtgcgtcaagtgcaaaacgacgtgctttatgtctgcaatctcctgttcctgtaagcctggtttgctggtctgcctgcaccacgtaaaggagctatgttcctgtccaccttacaagtacaaactacgttacaggtatactcttgacgacttatacccgatgatgaacgcgctgaagttgcgtgcggaatcctataatgaatgggctctcaacgtgaatgaggccctcgaagctaagataaacaagaagaagtcactcgtgtcattcaaggcgcttattgaggaatcggagatgaagaaatttccagataacgacctgcttagacacctcagattggtaactcaagatgctgagaagtgcgcgagcgtggcccagcagttgctgaatggcaagcgccagacaagatatcgaagcggcggcgggaagtcccagaaccagctcactgttaacgaactgaggcaatttgtcacacagttatatgcgctcccatgtgtacttagccagactcccctccttaaggacctcctgaacagagtggaagacttccaacagcactcacaaaagttgcttagcgaagagactccttctgctgctgagctgcaggatctactcgatgtctccttcgagttcgacgtggagctccctcagctggccgaaatgcggatccgcctcgagcaggcccggtggcttgaggaagtccaacaagcatgtctggatccctcaagcttgacattggatgatatgcgtaggttaatcgacctgggtgttggtcttgctccctatagtgccgtagaaaaggctatggcccggctccaggaactgctaacagtgagcgagcattgggatgacaaggcgaaatctctacttaaagcaagaccccggcattctctcaacagtctggcaacagctgtaaaggaaattgaggagatcccggcatacttacccaatggcgcagcactgaaagacagcgttcagagagctcgggactggttgcaggacgtagagggcctgcaggccggtggccgggtacctgtgctggataccctcattgagcttgtgacgaggggccggtccattcctgtgcatcttaactctctacctaggttggaaaccctggtggctgaggtccaagcgtggaaagaatgtgccgtgaatacctttttaactgaaaactctccatattcactgctcgaagtgctgtgtcctaggtgcgatattgggcttctcggactcaaaagaaagcaaaggaaactgaaagagccactccccaatggtaaaaagaaatccaccaaactcgagtctctgagcgatcttgagagggcgttaacagaatcaaaagaaaccgcctctgccatggcaaccctaggagaggctagactgagagaaatggaagccttgcagtctctccggctggccaatgaagggaagctgctctccccgctccaggacgtggatatcaagatttgtctctgtcagaaagccccggccgctccaatgatccagtgtgagctgtgccgcgacgcatttcacacttcttgcgtcgccgtacctagcatatcccagggcttgagaatatggctgtgcccacactgcagacgctctgagaaaccccctcttgaaaagatcctacctctgttggcatcactccagcggatccgggtcagactcccggagggcgacgcactccggtacatgatagagcgcacagtcaattggcagcacagagctcaacagcttctttccagcggaaacctcaagtttgtgcaggaccgggtgggatctggcctgctgtactccagatggcaagctagtgctgggcaggtcagtgatacgaataaagtgtcccaacccccagggactaccagctttagtctgcccgacgactgggataaccgcacgagctacttgcattcccccttctcaacgggaaggagctgcatccctctgcacggcgtgagccccgaagtgaatgaactgctgatggaggcccagctgctgcaggtgtccttaccagagatacaggagctctatcaaactctgttggcaaagccatcaccggctcaacagaccgatcgctcttcacccgtcagaccctcttccgagaagaacgattgttgtcgcggtaagcgggacggcatcaattctctggaacggaaactcaagcgccggctggagagagaggggctttcaagcgagcgatgggaacgtgtcaaaaagatgcggacccccaagaagaaaaagatcaagctatcccaccctaaggacatgaacaacttcaaacttgaacgggaaaggagctacgaactggtgcgctccgctgaaacccacagtctcccatctgatacgagctacagcgaacaggaggacagcgaggatgaggacgcaatctgccctgctgtgagctgtctacaacctgaaggcgacgaagtggattgggtgcagtgcgacggatcctgcaaccaatggtttcaccaggtgtgcgtgggcgtgagtcccgaaatggccgagaaggaagactatatttgcgtgcggtgcaccgttaaggatgcaccctccagaaagtag

SEQ ID NO: 193684 - DNA, 4161 bp, synthetic construct
  misc_feature 1..4161: note = Description of Artificial Sequence: Synthetic coding sequence
  source 1..4161: mol_type = other DNA
atgggcttcgcccccggcaaggccgtgggcagccacatccggggccactatgagcgcatactgaatccatataacttatttctgtctggggattccctcaggtgcctgcagaagccaaatcttactacagacaccaaggataaggaatataagccgcacgatattcctcaacgccagtccgttcagccatccgaaacatgtccacccgcccgtcgggccaagcgaatgcgcgcggaagccatgaacattaaaatcgagcctgaggagaccacggaggcgaggacccataacctccggcgaagaatgggttgccccacccctaagtgcgaaaatgagaaggaaatgaaatcctcaataaagcaagagccaatcgagcgcaaagactacatcgtggagaacgagaaggagaaacccaaatccagatcaaaaaaggccacaaacgcggtggatctctacgtgtgcctactgtgcggatcaggcaatgacgaagatcgtctgctgctctgcgacggttgcgacgacagctatcatacgttttgtcttattcctcccctgcacgatgtgcctaagggggactggcgatgccctaagtgcctcgcccaagaatgtagtaaaccccaagaggcatttggatttgagcaggctgcaagagattacaccctcagaacgttcggagagatggcggacgcttttaagagcgactactttaacatgcccgtgcatatggtccccactgagcttgtggaaaaggagttctggagactggtgagcacaatcgaggaagacgtcacagtggagtatggagcggacatcgcctcaaaagagtttggatccgggtttcctgtgcgagacggcaaaatcaaactaagtccggaggaagaggagtatctggattctggctggaaccttaataacatgccggtgatggagcaaagtgttttggcgcacattacagctgatatctgtggcatgaagctcccttggctgtatgtgggcatgtgtttctcctcgttctgttggcacatcgaagaccactggtcctattccataaactacctgcactggggcgaacctaaaacgtggtacggcgtcccagggtatgctgccgagcaactggagaatgttatgaaaaaactcgcccctgagctgtttgtgtcacaacccgatctgctgcatcagctggttacaatcatgaacccaaatactctcatgacacatgaggtgcctgtgtaccggaccaaccagtgcgcgggagagttcgtaatcacatttccaagagcctaccattctgggtttaaccagggctttaatttcgccgaagctgtcaacttctgcaccgtggactggctgcccctgggcaggcagtgtgtggaacattatagacttctgcatagatactgcgttttcagccacgacgagatgatctgcaagatggctagtaaagcagatgtgctggatgtggtcgttgcctcgaccgtccagaaagatatggccatcatgatcgaagacgagaaagcgctccgagagacagttcggaaattgggagtcattgattcggaaaggatggattttgagcttctaccggacgatgagcggcagtgcgttaaatgcaagaccacgtgttttatgagcgctatttcttgttcttgtaaaccaggactgctcgtctgcttgcatcacgtgaaagaactttgcagttgccctccatacaagtataagctgcggtatcggtatacgcttgacgatctgtatcccatgatgaatgccctcaagctgcgcgcagagtcctacaacgagtgggctcttaatgtgaacgaggcattggaggcaaagatcaacaagaagaagtctttggtctctttcaaggccctcattgaggaatcagagatgaagaagtttccagacaatgatctgctgcgccacctcaggctggttacccaagatgctgagaaatgtgcgagtgtcgcccaacagctgctcaacggtaaaaggcagaccaggtacagaagcggtggaggaaagtcacagaaccagctgacagtgaacgaactacgccagtttgtgacacagctctacgccctcccatgcgtcttatcccagaccccactgttgaaggatctactcaatcgtgtcgaggatttccagcaacactcacagaaactgctgtcggaagagactccttccgcggccgagctccaagatctgctggatgtcagcttcgagttcgatgtggagctccctcagctagcagagatgagaatcagactcgagcaggccagatggctcgaggaggtacaacaggcatgtctcgatccatcgtctctcacccttgatgacatgagacggctcattgacttgggagtaggcttagcaccatactctgccgtggagaaagcgatggctcggctccaggaactgctgacagtttcggagcattgggacgataaggccaagtccctgctgaaagcccggccccggcattcccttaattctcttgcgacagccgttaaagagattgaagagatccccgcctacctgcctaatggcgcagctctcaaggacagcgtgcagcgggcccgagattggctgcaggacgttgaaggccttcaggccggcggacgggtgcctgtcttggacacactgatcgagctcgtgacacggggacggagtattcctgtacacttgaatagcctgccgcgtctcgagaccttggtggccgaagttcaagcttggaaggaatgtgccgtgaacacatttctaacagaaaatagcccctatagcctgttggaagtcctttgcccacgctgcgatattgggcttctgggactgaaaaggaaacagcggaaactcaaagaaccactgccaaatggtaaaaaaaaaagcacaaagctggaatcattgtccgatctggaacgtgcgctgaccgagtctaaagagaccgcctccgctatggctacactgggtgaggcccgcctacgggagatggaagcattgcagtccctgaggctcgcgaacgaaggcaagctcctatcccctctccaggacgtggacatcaaaatctgcttatgtcagaaggccccagctgcacctatgattcagtgcgaattgtgcagagacgctttccatacatcctgcgtagcagttcccagtatttcccaggggctccgaatctggctgtgtccacattgccgtcgtagcgagaagccaccactcgagaaaatacttcctctgctggcgagccttcagagaataagagtaaggcttcccgaaggagacgctctacgctacatgattgaacggacagtgaactggcaacaccgggcccaacagctgctctcttccggcaatctgaagttcgtgcaagaccgcgtgggttccgggctactctacagccggtggcaggccagcgctggccaggtcagtgatacaaataaggtttctcagccgccaggaacaacatcatttagcctccctgacgattgggataacaggactagttacctacattctcccttttccacaggacgaagttgtatacccctccacggagtgagcccggaagtgaatgaactgctgatggaagcccagcttttgcaagtgtctcttcccgaaattcaggagctataccagaccttactcgcgaaaccaagtcccgctcagcagacagataggagctcgccagtgcgcccctcatcagagaaaaatgactgttgccgcgggaagagggatggcattaattcactcgaacgaaaactgaaaaggcggctggagcgagagggcctcagtagcgaacggtgggaacgggtgaagaagatgaggactccaaagaaaaagaaaataaagctgtcccaccccaaagacatgaacaatttcaagcttgaacgcgagaggagttatgagctagtgcgatctgctgagacccacagtctcccaagtgacacgtcatactccgaacaggaggactccgaggacgaggatgctatatgtccggcggtaagctgcctgcagcctgaaggcgacgaggttgattgggtgcagtgtgacgggagctgcaatcagtggttccaccaggtgtgcgtgggtgtgtcacctgagatggccgagaaagaggactatatttgtgtcagatgcacggtgaaggacgccccatccaggaagtag

SEQ ID NO: 193685 - DNA, 933 bp, synthetic construct
  misc_feature 1..933: note = Description of Artificial Sequence: Synthetic coding sequence
  source 1..933: mol_type = other DNA
atgatctgcaagatggccagcaaggccgacgtgctggacgtggtggtggcttccacggtgcagaaggatatggcaataatgatcgaggacgagaaagcgctccgggagactgtgaggaagttaggagtcatcgacagcgagagaatggatttcgagcttttgcctgatgacgagcgacagtgcgtgaagtgcaagaccacatgttttatgtcagctatttcctgcagttgtaagcctggactgcttgtgtgcctccaccacgtcaaggaattatgctcctgtcccccttacaaatataaactgaggtaccggtatactcttgatgacttgtatcctatgatgaatgcactgaagttaagagctgaatcttacaacgagtgggccctcaacgtgaatgaggctctggaggccaagatcaataagaaaaaatctctggttagcttcaaggcactgattgaagaaagcgagatgaagaagttccccgataatgatctcctgcgccacctgcgactggtaacccaggatgctgaaaagtgcgcgtctgtggctcagcaactgctaaatggaaaacgacaaaccaggtataggagtggtggagggaagtctcagaatcagctgactgtgaacgaacttcggcagtttgtaacacagctgtatgctcttccatgtgtcctgagtcagaccccgcttttaaaggatctcctgaaccgggtcgaagattttcagcagcactcccagaaactgctgtccgaggagacgcccagtgccgcggagctgcaagacctgctggatgtgtctttcgagttcgatgtggaactgccacaactggccgaaatgaggattcgacttgagcaagcccgctggctggaagaggtgcagcaggcttgcctagatccgtcaagcttgacactggacgacatgcgcgtcagctag

SEQ ID NO: 193686 - DNA, 4674 bp, synthetic construct
  misc_feature 1..4674: note = Description of Artificial Sequence: Synthetic coding sequence
  source 1..4674: mol_type = other DNA
atggagcccggcagcgacgacttcctgcccccccccgagtgccccgttttcgaaccgagctgggccgaattcagggaccccctggggtatattgctaaaattcgtcctattgccgagaaatccggtatttgtaaaattcgacctcccgctgactggcaaccaccctttgccgtagaggttgataattttagatttaccccacggatacagcggctgaacgagctggaagcacagacacgggttaaactgaattatttggatcaaattgccaagttttgggaaattcaggggtcatctttgaaaatccctaatgttgagcggagaatcctcgacttgtattctctcagcaagatagttgtagaggagggaggttatgaggccatctgcaaggatcggaggtgggctagggtcgcacagagactgaactaccctcccggaaagaacatcggctccctactcaggtctcattatgagcggattgtttacccctacgagatgtaccaaagcggcgctaacctggtgcagtgcaatacgaggccattcgataacgaggagaaagacaaagaatataaacctcactcaatcccacttcgccagtcagtacagccgagtaaattcaacagctacggccgcagggcaaaacgcctccagcctgaccctgaacctacagaagaagacattgagaaaaaccccgagctcaagaaactccagatttatggcgctgggcctaagatgatgggcctgggactcatggccaaagacaagacgctgcgaaaaaaggacaaagagggacccgaatgccctccaaccgttgttgtgaaggaggagttgggtggggatgtaaaagtcgaaagtacctctcccaaaacgtttctcgagtccaaggaagaactctctcattccccagagccctgtactaagatgacaatgcgcttgagacgcaaccacagtaacgcccaattcatcgagtcgtacgtgtgccgcatgtgttccaggggtgatgaggatgataaactcctcctgtgcgacggatgtgatgacaactatcacattttctgccttctgccccccctacctgagattccaaagggagtgtggagatgccccaaatgtgtgatggccgagtgcaagcgacctcccgaagcctttggattcgagcaagctacacgcgaatacactttacagtcgtttggcgagatggcagattcttttaaggcggattatttcaatatgcccgtgcacatggtacctaccgaattggtcgagaaggaattctggcggttggtgaacagtatcgaggaggacgtcaccgtggaatacggagctgacattcactcaaaggagttcgggagcggcttccctgtgtcggactctaagaggcacctgacacccgaggaggaagagtatgctaccagtggatggaacttgaacgtaatgcctgtgcttgagcagagcgttctctgccacatcaacgccgacattagtggaatgaaggtgccttggttatatgttggcatggtgttctccgccttttgctggcacatagaggatcattggagctactctataaactatctacactggggcgagcccaaaacatggtatggtgtgcctagccttgcagctgaacacctggaagaagtcatgaaaaaattaacgcctgaactttttgacagccaacctgacctgttgcaccagctggtgactctcatgaaccccaacaccctaatgagccacggggtgccagttgttcggacaaaccaatgcgcgggggaattcgttatcaccttccctagagcgtaccacagtggctttaatcagggatataatttcgccgaagcagtaaatttttgcacagcagattggcttcccgcagggcgccagtgtatcgagcactatagacgcctccgcaggtattgtgtcttctcacacgaggagctgatttgtaagatggctgcctgtcccgaaaaattggaccttaatttggccgcagccgtgcacaaggagatgttcataatggttcaagaggaaaggcggctgaggaaagcgctgctggagaagggcattacagaggctgagagggaggctttcgagctcttgccagacgatgaacgccaatgcatcaagtgtaagaccacctgctttttgtccgccttggcatgctatgattgtccagacggtctcgtttgtttgtcacatatcaatgacttgtgtaaatgctcatcctcccgacagtatctccgctaccgctatacactggacgaactgcccgccatgcttcacaaactcaaggtgagagccgagtcgtttgacacctgggctaataaggttagagtggccttggaggttgaggatggcagaaagcgtagtctcgaggagctgagagccctcgagtctgaagccagggagcgacgattcccaaatagtgagctgctccagcagctaaaaaattgcctctccgaagccgaggcttgcgtgtctcgcgccctcgggctcgtatcagggcaggaggctggcccccatcgcgtggccggcctacagatgacactgactgaacttagagcattcctagatcaaatgaacaacctgccatgtgccatgcaccagatcggtgacgtgaagggcgtcctggaacaggtcgaggcataccaggcagaagcaagggaggccctggcatccttgccttctagtcccggtttgttgcagagcttgttggaacgagggaggcagcttggagtggaggtccctgaggcccagcaactgcagcgacaagtggaacaagctcggtggctcgacgaggtgaaacgaaccctcgcaccttccgctcggagagggaccctagccgtgatgagaggtctgttggttgctggagctagcgtggccccaagccccgcagtggacaaggcccaagccgagctgcaggagttactgacaatcgccgagcggtgggaggagaaggctcatttgtgtctggaagctcggcagaaacatcccccagctactctggaagctatcattagggaggccgagaacattcccgtgcatctgcccaacatccaggccctcaaagaagcactggcaaaggcacgcgcctggatcgcagacgtggatgaaattcagaatggggaccactacccctgcttggatgacctagaggggctggtagcagtgggtcgtgacctgcctgtgggcctggaggagctgagacagctagagctgcaagttctcacagctcattcgtggcgcgagaaggcatctaaaacattcctgaagaagaactcttgttatactctgctggaggtgctgtgcccatgtgctgacgccggaagtgatagtaccaaacgcagcagatggatggagaaagagctcgggctttacaaatctgataccgaactcctgggtctcagcgcccaagatctgagggaccctgggagtgtcatagttgcattcaaagagggagagcagaaagagaaggaggggattttacagctccgacgcactaactctgccaagccaagccctttggccagctctagtacagccagtagtactacttctatatgcgtttgtggtcaggttcttgccggcgccggcgccctgcagtgcgatctctgccaggattggttccacgggcggtgcgtgagcgtgccccgcttgttaagctcacccagaccaaaccccaccagcagcccactgctggcttggtgggaatgggatactaaattcctctgtcccctatgtatgcgctcccggcggccccggctggaaaccatccttgcactactggtggcgctgcagcgtttgcccgtgcgactccctgagggagaagctctacagtgcctgactgaaagagccatcagctggcaggggagggctagacaagccctggcctctgaagatgtgaccgccctcctcgggcgcctagcagagctaagacaacgtctccaggccgagcctagaccagaagagcctcccaactacccagctgctcctgcctctgaccccttgagggaaggtagtggaaaggatatgcctaaagtccagggccttctcgagaacggcgactcagttacttccccagagaaagtggctccagaggagggttctgatctggagctcctgtctagcctcctaccacagctgacaggtcctgtgctcgagctccccgaggctacacgcgcaccgctcgaagagctcatgatggagggtgaccttcttgaagtcactttagatgaaaatcacagcatctggcagctgctgcaggccggccaaccccccgacctggagcgtatccggaccctgctcgaactcgaaaaggctgagcggcacggaagtcgggctcgtggaagggctctcgaaagacgacgacggcgtaaagttgaccgcggtggtgaaggggatgatcccgctcgggaggagctggaaccaaagcgagtccgctccagcgggccagaggccgaagaggtacaggaggaggaggagcttgaggaggagaccggcggcgagggaccgccagctcctatccctactaccggcagtccttccacccaagagaatcagaatggcctcgagccagcggaggggaccactagcggaccttccgccccgttttcaaccctgacacccaggctgcacctgccctgcccccaacagcccccacaacagcagttatag

SEQ ID NO: 193687 - DNA, 4551 bp, synthetic construct
  misc_feature 1..4551: note = Description of Artificial Sequence: Synthetic coding sequence
  source 1..4551: mol_type = other DNA
atggagcccggcagcgacgacttcctgcccccccccgagtgccccgtttttgagcctagttgggccgaattccgcgatcctctggggtacattgccaagattagacccatcgctgagaagagcggcatctgcaagattaggccccctgctgattggcagccgcctttcgccgtggaagtggacaattttcggtttactccacgcatacagcgcctcaatgagctggagatcgtggtggaggaaggcggttacgaggcaatctgtaaggatcgtcggtgggcccgcgtggcccagaggttaaactatccccctggtaagaatatcgggtctctcctgaggtcacactacgagcggattgtgtatccttatgaaatgtatcagtccggagccaacctcgtgcagtgtaacacccgccccttcgataatgaagagaaagacaaggaatacaaaccgcattccatacctctgagacaatctgtccagcccagtaagtttaactcttacggccgacgcgcaaagcggctgcaacctgatcccgagcctactgaagaggatatcgagaaaaacccagaactgaaaaagctacagatttatggggcgggtccaaaaatgatgggcttaggtctcatggctaaggataaaactctgaggaaaaaggataaggaaggccctgagtgcccgccaacggtggtcgtgaaagaagaactgggaggggacgtcaaagttgagagtacaagccccaaaaccttcctggagagcaaggaagagttaagtcactctccggaaccgtgcaccaaaatgaccatgagactccggagaaatcactcaaacgctcagttcatcgagagttacgtatgtcggatgtgtagtcggggtgatgaggacgacaaactgctgctatgcgatggctgtgacgacaactaccacatcttctgcctgctccctccactgccagaaattcctaagggcgtgtggcgctgccctaagtgcgtcatggccgagtgcaaaaggccaccagaagcttttggctttgaacaagctacgcgcgagtacaccctgcagagtttcggcgaaatggctgactcattcaaggctgactatttcaatatgccggtccatatggtccctaccgagcttgtcgagaaggaattttggcggcttgtgaattccattgaagaagacgtgactgtggagtatggagccgacattcactcaaaagagtttggcagcggtttccctgtgtctgactcaaagcgtcacctaactcccgaggaagaggagtacgctacaagcggatggaatctgaatgtgatgcctgtgctggaacagagtgtcctttgtcacattaatgccgatattagcggcatgaaggttccatggctatatgtgggaatggttttctcagctttttgctggcatatcgaggatcactggagctattcaattaattacctccactggggcgaacccaaaacatggtacggtgtgccttctttagccgcagagcatctcgaggaggttatgaagaagcttacccccgagttatttgatagccagcccgaccttctgcaccagcttgtgactttaatgaatccaaacacactgatgtcacacggggtgccagttgtgcgtaccaaccagtgcgccggggaattcgtcatcacattcccacgggcttaccactcaggtttcaaccagggttacaattttgccgaagctgttaacttctgtaccgccgactggctccccgctggtcggcagtgtattgagcattatcgccggctgaggagatactgcgtgttttcacatgaagaactgatttgcaaaatggctgcctgccctgagaaactagatctgaatctggccgcagccgttcataaggaaatgtttatcatggtgcaagaggagagaaggcttaggaaggctttgctggagaaaggtattactgaggccgaacgggaagccttcgaactcctccccgacgatgagagacaatgcatcaaatgtaagactacctgtttcctgtccgccctggcatgttatgattgtcccgatggactggtctgcctcagtcatattaatgatttgtgcaagtgctccagctctcgccagtacctgcggtaccgatacaccttggacgaactgcccgctatgttgcacaagctgaaggtgcgggccgaaagcttcgatacttgggcaaacaaggttagggtggccctcgaggttgaagatggacggaaacgctccctggaggagctccgggccttggagtctgaggctcgcgaaaggaggtttcctaattcagagttgctgcagcagcttaagaattgcttgagcgaagccgaagcgtgcgtcagccgtgcactgggcctggtcagcgggcaggaggccgggccgcacagagtggccggactccaaatgactctgacggagcttcgcgctttcttagaccagatgaataatctcccgtgcgccatgcaccaaatcggagacgtgaagggggtgttagaacaggtggaggcataccaagcggaggctagagaggcgttagccagcctacctagttcccccgggttgctgcagagtcttctcgagcggggacgacagctaggcgtcgaagttccagaggcacaacagctgcagagacaggtcgaacaggctcggtggctggatgaggtaaagcggactttagcaccatcagcacgaaggggcactctggccgtaatgaggggacttctggtggcaggtgcaagtgtggcccctagcccggcggtggataaggcgcaggcagaactgcaggagctcttgacgatcgccgaaagatgggaagagaaggcacatctgtgtcttgaagcgaggcagaaacatcccccagccaccctcgaggccattatccgagaggcagagaatattcccgtgcatttgcctaatatccaggccctgaaggaggccctcgcaaaagcccgcgcatggatcgcagatgtggacgaaattcagaatggggaccactacccctgtctggatgacctggaggggttggtagccgttgggagggacctgcccgtgggcctggaggaacttaggcaactggagttacaggtgctcaccgcccattcctggagggagaaggcatcaaaaacttttctaaaaaagaacagctgttataccctgctggaagtcctatgtccctgtgccgacgccggcagcgacagtaccaaaaggagtaggtggatggagaaagagctggggctttacaaatcagataccgagctgctagggctgtcagctcaggatctgcgagacccgggaagcgttatcgtagcttttaaggagggcgagcagaaggagaaggaggggattttacagcttaggaggaccaactcagcaaagcccagcccactggccagtagctctacggccagttcgacaacatccatctgcgtctgtggccaggttctggccggtgcaggagccctgcagtgcgacctgtgtcaggattggttccacggccggtgtgtgtctgttccaagactgctgagctctcctagaccaaatcccaccagttcgcctttactcgcctggtgggagtgggacacgaaatttctttgccccctgtgtatgcgtagtaggcgccctcgactggagactatcctggcgctgctggtcgccctccagcgtctgcctgttcgcctccctgagggcgaagccctccagtgtctcacggagcgcgcgatttcttggcagggccgcgcccggcaggcactggcaagcgaggacgtgaccgctctgttgggccgtctcgctgagctgagacaacggctgcaagcggagccgcgcccagaggaaccccccaattacccggcagcacccgcctctgatcctctgcgcgagggttcgggcaaagacatgcccaaagtccaggggctacttgaaaatggcgatagtgtgactagccccgaaaaagtggcacccgaggaggggagcgaccttgagctgctttccagcctgctgcctcagctgaccggccctgtacttgagttgcctgaagccacccgggccccattggaggaactaatgatggagggcgacctgcttgaggtgacgctcgatgaaaaccatagtatctggcagctgcttcaggccggtcagccccccgatctggagcgcatccgaaccctgctagagcttgagaaagcagagagacacgggagccgggcgaggggacgagctctggaacggagaagacgccgcaaggtggataggggcggtgagggagatgaccccgctcgcgaagagctggagcctaaaagggtgcggtctagcgggcctgaggccgaagaggtacaggaagaggaagaattggaagaggaaaccggtggtgagggcccacctgcacccattcccaccaccggctcgccctcaacacaggagaaccagaatggtctcgaaccagcggaaggaactacatcgggaccgagcgcgcctttttccacactgacaccccggctgcatctgccttgcccccagcaaccacctcagcaacagttatag

SEQ ID NO: 193688 - DNA, 4683 bp, synthetic construct
  misc_feature 1..4683: note = Description of Artificial Sequence: Synthetic coding sequence
  source 1..4683: mol_type = other DNA
atggagcccggcagcgacgacttcctgcccccccccgagtgccccgtgtttgaaccttcctgggcagagtttcgcgaccccctggggtatatcgccaagatcagacctatcgctgagaaatccggcatatgcaagatcaggccccccgccgattggcagccgcccttcgccgtggaggttgacaacttcagattcacccctaggattcagcgcctcaacgaactcgaggcccagaccagagtcaagttgaactacctcgaccagattgccaagttctgggaaatccagggcagctcactaaagatcccaaatgtcgaaagacggatcctggatctctattctctttccaagatcgttgtcgaggagggggggtatgaagctatctgcaaagacagaagatgggcacgcgtggcccagaggctgaactatcctccgggaaagaacattgggagcctgctgcggtcacactatgagaggattgtttacccttacgaaatgtaccagagcggagcaaacctggttcaatgcaacacccgcccctttgacaatgaagagaaggacaaagaatacaaaccccattcaatccctctcagacagagcgtacagccctctaaattcaactcctacgggagacgagcgaaacgattgcaacctgatccagagcctacagaagaggacatcgagaaaaacccagagttgaagaagctgcagatttacggcgctgggcccaaaatgatgggcctcggccttatggctaaggacaagactttgaggaagaaagataaggagggcccggaatgcccacccactgttgtggtaaaagaggaactgggtggcgacgtgaaagtcgaatcgacctcccctaagacctttttggaatcaaaggaggagctctcccattcccccgagccttgcactaagatgaccatgcgcctgcggaggaaccacagcaatgctcagtttatagagtcttacgtatgcagaatgtgttcccgtggtgatgaagacgacaagcttctgctgtgcgacgggtgcgatgataattatcacattttctgtctgttgccccctctgcccgaaatccctaagggggtgtggagatgccctaagtgcgtcatggctgaatgcaaacgcccaccggaagcattcggtttcgagcaggctacacgcgagtataccttgcaaagttttggggaaatggctgacagcttcaaggcagactacttcaatatgcccgtgcatatggtcccaacggagctcgttgagaaggaattttggcgtcttgttaattccatagaggaagacgtgactgtggaatatggggctgatatccattccaaggagttcggatccggttttcccgtttccgacagcaagcgccacttaacccctgaggaagaagagtacgccaccagcgggtggaacttgaacgtgatgcctgtgctcgagcaatccgtattgtgtcatataaacgccgatatctcaggcatgaaggtaccttggttgtatgtcgggatggtatttagcgccttctgctggcatatcgaagatcactggtcctatagcattaactacctccactggggggagccgaaaacatggtatggcgtaccctcgctcgcggccgagcatctcgaggaggttatgaagaagctcaccccagagctttttgacagtcagcccgatttgctacatcaactggtcacactaatgaatcccaatacgttgatgtcccatggcgtgcctgtggtgcgaaccaatcagtgtgccggggaatttgtgatcacctttcctagagcctaccattctggcttcaatcagggctacaactttgcagaagccgtcaacttttgcaccgcggactggctccccgctggcaggcagtgcattgaacactaccggcgcctgagacgctactgtgtgttttcccatgaagaactgatttgtaagatggccgcatgccccgaaaagctcgacctcaatttagcggctgcggtgcacaaagaaatgtttattatggtgcaagaagagaggaggttacgaaaagccttgctggagaagggcattaccgaggccgagagggaggccttcgaactgctacctgacgatgagaggcagtgtatcaagtgtaagaccacttgttttcttagcgctcttgcctgttatgactgtcccgatggtctcgtttgtcttagtcatatcaatgacttgtgtaagtgtagcagttcccggcagtatctgaggtacaggtacaccctcgatgagctgcctgccatgctgcataaattgaaagttcgcgccgagtcattcgatacctgggccaataaggttcgcgtggcactagaagtggaagacggaagaaagcgctcgctcgaggagcttcgggcattggaaagcgaggccagggagcgacgatttccaaacagcgagctgcttcaacagctcaagaactgcctgtctgaggctgaggcgtgcgtgagcagggcactcggactggtctcaggccaggaggccgggccccatagggtagctggtctgcaaatgactcttacagaacttagggcttttctcgatcagatgaataacctcccctgcgctatgcaccagattggagatgtgaaaggagtgttggagcaagtggaggcttaccaggccgaggcccgggaagccctagcctcactgcccagcagtcctggtttactgcagagtttgttagagagaggccggcagttgggggtggaagtgccagaggcacagcaattgcagcgccaggtggaacaggcccgatggctggacgaggtcaagcggactctggctccatccgcacgccggggaaccctcgcagtgatgaggggcctgttggttgctggggccagcgtagctccgagccccgcagttgacaaggctcaagcggagcttcaggagcttcttactatcgccgaacgatgggaggaaaaggctcacctgtgcctggaggcacggcagaaacacccaccagcgactctcgaagccataattcgcgaggcggagaatattcctgtgcacctgccaaacatccaggccttgaaggaggccctggccaaggcccgggcctggatcgctgatgttgatgagatccaaaacggcgaccactatccttgccttgacgacctagaagggctggtagcagtgggacgggacctgcctgttggcctggaggagctccgccagctggagctccaggtgctgacagcacacagctggagagagaaggccagcaagactttcctaaagaagaattcatgttacaccctgctagaagtgttatgtccttgtgctgacgctggcagcgattctactaagcgctcacgctggatggagaaggagctcggtctgtacaagagcgacacagagttactagggctgtcagcccaggatttgcgtgaccctggtagtgtaatagtggcgttcaaggaaggcgagcaaaaagaaaaggagggaatactgcagttgcggcgcacaaactccgctaaacccagcccactggcctcctccagcaccgcctcgtcaaccacttcaatttgtgtgtgtggccaggtactagcaggagcaggcgctctgcagtgtgacctatgtcaagattggtttcatggacgctgtgtgtctgtgcccagacttcttagcagccctagaccgaatcccacatccagtccattgcttgcttggtgggagtgggacactaagttcctgtgccctctctgtatgcgaagtcggcgacctcgcctcgaaactatactcgcccttttagtggccttgcagagattgcccgtcagactgcctgagggtgaagccttgcagtgcctcactgagagggccattagctggcaggggcgggccagacaggcactggctagcgaggacgtgactgccctgcttggacgactcgccgaactgcgacagagactgcaggccgaacccaggcccgaagagcctcctaattatcccgctgctccagctagcgatccgctccgagaaggctccggaaaggatatgccaaaagtgcagggactcttagaaaacggagatagcgtcacaagccccgagaaggttgcgcccgaggagggctcaggcaagagagacttggagttgctgtcaagcttgctcccacaacttacagggcctgtgctggaactccccgaggccactagggctccgcttgaggagctgatgatggagggtgatttgctggaggtgacactggacgaaaatcacagtatctggcagcttcttcaggccggccagcccccagacctagaacgtatccgaaccttgctcgagctggagaaagcagaaaggcacggttcccgggccaggggacgagcactggagcgccgcaggcgcagaaaagttgatcgcggcggtgaaggagatgacccagctagggaagagctggaaccaaagcgggtgagatcctccggcccggaagccgaagaagtccaagaggaagaggaactagaagaagagaccggaggcgaggggccgcctgccccaataccaactacgggcagtccctcaacacaagagaaccagaatgggctcgaaccagctgaagggactacatcaggcccttcagcccctttctccaccctgacaccacgcctgcacctaccatgtccccaacagccaccacaacaacagctgtag

SEQ ID NO: 193689 - DNA, 4680 bp, synthetic construct
  misc_feature 1..4680: note = Description of Artificial Sequence: Synthetic coding sequence
  source 1..4680: mol_type = other DNA
atggagcccggcagcgacgacttcctgcccccccccgagtgccccgtgttcgagccaagctgggctgagttcagggatcctctaggctacattgccaagatccggcctatagcagagaagtctggcatctgcaagatccgccctccggctgattggcagcctccattcgccgtggaagtggacaacttccgtttcacaccccgtatccagcgcttaaatgaacttgaggctcaaaccagagtcaagctgaattatcttgaccagattgctaagttctgggagattcaagggtctagcctcaaaattcctaacgtagagcggcgtattctggacttgtacagcctgagcaaaatcgtggtagaggagggaggatatgaagctatatgtaaggacaggagatgggcacgagtcgcccagcggctcaactaccctcccggcaagaacatcggctctctcctccgcagccattatgagagaattgtgtacccctacgagatgtatcaatcaggagctaacctggtctgtaacacccggccctttgacaacgaggagaaagacaaagagtacaaaccacactccatcccccttcggcaatccgtgcagccctctaagtttaatagttacggacgtagggcaaagcggctccagcctgaccccgagcccacagaagaagacatagaaaagaatcccgagctcaaaaagctgcagatctacggtgctggcccaaagatgatgggcctggggttaatggctaaggataagaccttgagaaaaaaagataaggaaggccccgagtgcccgcccacagtggtggtgaaagaggagttaggtggggacgttaaagttgaatcaactagtccaaagaccttccttgaaagcaaggaggagctgtcacactctcctgagccgtgtactaaaatgactatgcgcctaaggaggaaccatagcaatgcccagttcatagagtcctatgtgtgccggatgtgttcaagaggggacgaggacgataagctactcctttgcgatggctgtgacgacaactatcacatcttttgtcttttgcccccactccccgaaatccccaagggcgtatggcggtgtcccaaatgcgtaatggcggagtgtaaacgaccgccggaggcctttggatttgagcaggccaccagagagtacacactgcagtcctttggtgagatggctgactctttcaaagcggattattttaacatgccagttcacatggtgcccaccgagcttgtggaaaaagaattctggaggctggtgaatagcattgaagaagatgtcactgtcgagtacggagccgatattcattccaaggaattcggatcggggtttcctgtgtctgattccaaaagacatcttactcctgaggaggaagaatatgccacctccggctggaacctcaatgtgatgccagtgctggagcaatctgttctctgccatatcaatgctgacatctccggcatgaaggtcccttggctttatgtgggaatggtcttctctgctttttgttggcatatcgaggatcattggagttattcaattaactacttgcattggggcgaacccaaaacttggtatggtgtacctagcttagccgccgagcatctcgaagaggttatgaaaaagctcacccccgagcttttcgatagccaacctgatctcctccaccagctagtgaccctgatgaatcctaataccttgatgagccatggtgtgcctgttgtgcgcacgaaccagtgcgccggagagttcgtgattacttttcctcgggcttaccactctgggttcaaccaggggtacaactttgctgaggcagtgaacttctgcaccgccgattggctgccggccggacggcaatgcatagagcactataggaggctgcgtaggtattgtgtgttctcccatgaggagctgatctgtaagatggcagcctgcccagagaaactcgacctcaacctggccgctgcagtacataaggagatgttcataatggttcaggaggaacgcagactccgcaaggccttgcttgaaaaaggcattacagaggcagaaagggaggcattcgagttgcttcctgacgatgagcgccagtgtatcaagtgcaaaacaacgtgtttcctgagtgctctcgcgtgctacgactgtccagacggacttgtctgtctgtctcatatcaatgatctgtgtaaatgcagctctagcagacagtacttgcgctaccggtatacacttgacgagctgcccgccatgctacacaagctgaaagtcagagccgagtccttcgacacatgggccaacaaggttcgtgtggcgctggaggttgaggacggaaggaaacgctccctggaggagctcagagcgctggaatccgaggctagagagcgtaggtttcctaactccgagttgctgcagcagctgaaaaactgtctttctgaggcggaagcctgcgtaagtcgggctctgggtctggtgagtggacaggaggcaggaccacatagagtggcaggtttgcaaatgacgctgactgagttgagagccttcctggatcaaatgaataacctcccatgcgctatgcaccaaatcggcgatgttaagggagtgctcgaacaggtggaagcttaccaggcagaggcacgggaagccctagcaagtctcccaagttcacccggcctgctacagtctcttttagagaggggtcgccagctgggagtggaagtgcccgaggcacagcaattgcagagacaggtagagcaagctcgatggctcgatgaggtgaagcgcacactggctcccagcgcacgcagaggaacacttgccgtgatgcgcggactcctggtggccggggccagtgtggctcccagtcctgcggtggacaaggcccaggctgagcttcaggaactcctgactattgcagagagatgggaggaaaaggcccacctctgtttggaggcgaggcaaaaacacccccccgcaactctggaagccattatcagggaggcagaaaatatccctgtccacctccctaacatacaagctctcaaagaagctctagcaaaggcacgagcctggattgccgacgtggatgaaattcaaaacggcgatcattatccctgtctggacgacctggagggcctggtggccgtagggcgggacctgcctgtgggactcgaggagttgaggcagctggagctccaggtgctgacggcccactcctggcgcgagaaagcctcaaagactttccttaagaaaaactcatgctacacacttctagaggttctgtgcccatgcgcggatgcgggttctgacagcaccaagaggtcaaggtggatggaaaaggaactcgggctgtataagtcagacacggaactgctggggctgtccgcacaagatctccgtgatccaggaagcgtaattgtggcctttaaggagggtgaacaaaaagaaaaagagggtatacttcagctacgccgcacaaactctgctaagcctagcccactcgcctcatccagcactgcgtcatcgaccactagcatctgtgtctgcgggcaggtattagccggagctggcgccctgcagtgtgacctctgccaggactggttccacgggcgttgtgtgtctgtaccacgactgctgtcaagcccacgaccaaaccctacctcctctcctctgctggcctggtgggaatgggatactaagttcctgtgccccctttgtatgagatcgagacggccaagattagaaaccattctggcactgctggtggctttgcaacgcttgcccgtgcggttgcctgagggggaggccctgcagtgcttaaccgaacgggcaatctcgtggcagggcagagcaagacaagcactggcaagcgaagatgtaactgccctgctgggccggctcgcagagctacgccagcgactccaggccgagcctaggccagaggagccaccgaattatcccgctgcgcctgccagcgatcctctgcgcgagggatcgggtaaggacatgcctaaggtacaggggctattggaaaatggcgattctgtcactagtccagagaaggtggcccccgaggagggcagtgggaagagggacctggagctactgagtagtttactgccgcagttgacagggccggtgctggagctcccggaagctaccagggctcccctcgaagagcttatgatggagggagacctgctggaggtgacccttgacgaaaatcactctatctggcagttactgcaggcggggcagcctcctgaccttgagcggatccggactttgctcgaactcgaaaaggccgagagacacggctcaagagcacggggtagagcacttgaaagacgccggaggagaaaagtggataggggaggagaaggcgatgacccagcacgcgaagagctcgagccaaagagggtgagaagttctggaccagaggccgaggaggtacaagaagaggaagaactagaagaagagaccggtggcgaggggccgcctgcaccaattcccacaaccggatcacccagcacacaggagaatcaaaatggcttggagccagctgaagggacaaccagcggaccaagcgccccattttcaacactgactccacgtctccatcttccctgccctcagcaacctccccagcagcagctgtag

SEQ ID NO: 193690 - DNA, 4140 bp, synthetic construct
  misc_feature 1..4140: note = Description of Artificial Sequence: Synthetic coding sequence
  source 1..4140: mol_type = other DNA
atggagcccggcagcgacgacttcctgcccccccccgagtgccccgtgtttgagccttcgtgggccgaattccgtgatccattaggttacatagcaaaaatccggccaatagccgaaaagtccggcatctgtaagattagacccccagccatcgtggtggaggaggggggatatgaggccatctgtaaagacagacggtgggcacgggtcgcccagcggctcaactaccctccagggaagaacataggaagcttgcttcgatcccactacgagaggatagtgtacccatatgaaatgtaccagagcggagccaaccttgttcagtgtaataccagaccatttgacaatgaggagaaggataaagagtacaaacctcatagcataccactaaggcagtcggttcagccgtccaagttcaactcctatggcagacgcgctaaaagactgcagccagatccagagccgactgaggaagatatcgagaaaaaccctgagctgaaaaagctccagatttacggtgccggacccaaaatgatgggcttgggtctaatggccaaagacaaaacattgcggaagaaggacaaagagggtccagagtgtccacctaccgtggtcgttaaagaagagctggggggtgacgtgaaagttgagtccacctcacccaagacctttctggagagcaaagaagaactatctcattcgccggaaccttgtacgaaaatgaccatgcgactaagaaggaatcacagcaatgcccagttcatagaaagctacgtgtgcaggatgtgcagccggggtgatgaggacgacaagctcctgctgtgcgacggatgcgatgacaattaccacattttctgcttgcttccacctctgccagaaatccccaaaggtgtgtggcgctgccctaagtgtgtgatggccgagtgcaaaaggcctccggaggcatttgggtttgaacaagctacacgcgaatatacactccagagcttcggggaaatggccgacagcttcaaggcagattactttaacatgccagttcatatggttcccacggaattagtggaaaaagaattttggagattggtcaactccatcgaagaagacgtgaccgtcgagtatggcgcagatatccattctaaggaatttggcagtgggttccccgtgtccgactctaaacggcacctgacacccgaggaggaagagtatgccacaagcggctggaatctcaatgtgatgcccgtcctggagcagagcgtcttatgccatatcaacgccgatatttctgggatgaaagtcccatggctgtacgtgggaatggtgttcagtgctttttgttggcacattgaagaccattggtcatattctattaattacctgcactggggcgaacccaaaacatggtacggcgtgccatctctggctgccgagcacctggaggaggttatgaagaagttgacgcctgaactttttgattcgcagccagacttgctccaccagctggtcaccctcatgaaccccaacaccctgatgtcacatggcgttcctgttgtgagaactaatcaatgcgcaggtgaattcgtcatcacgttcccccgggcttaccacagcggcttcaaccaaggctataactttgccgaagccgttaacttttgcactgctgattggctacccgcgggccgccagtgcattgaacattaccgcagactccgccggtactgtgtgttcagccacgaagaactgatttgtaagatggccgcctgcccagaaaaactagatttgaacctggccgccgccgtgcataaagaaatgtttattatggtccaagaggaacgacgtctccgcaaggccctgctggaaaaggggattaccgaggcggaacgggaagcctttgagctccttcctgatgacgaaaggcagtgtatcaaatgcaagaccacctgcttcctgagcgcattagcctgttacgactgtcctgatggtctggtgtgtctgtcccacattaatgatctatgcaagtgcagctcttccaggcaatatttaagatatcggtatacactggacgaactccctgcaatgctccataagctcaaagtccgggccgagagcttcgacacatgggccaacaaggttcgcgtcgcgctggaggtggaagacggtagaaaaaggagtctggaggagctgagagctttggagtccgaagcacgggagcgacgttttccaaactcggaattacttcagcagcttaaaaattgtttgtcagaggccgaggcctgcgtgtcccgggcgctgggactggtgagtggccaggaggcaggcccccatagagtcgccggactccaaatgacgttgactgaattaagagcctttctggaccagatgaacaatctgccatgcgcaatgcaccagatcggagatgtcaaaggtgtgttggaacaggtcgaagcttaccaggcggaggcacgcgaggccctggcatccctgccttcctccccagggctccttcagtctcttctggagagaggtcgccaactgggcgtcgaggtaccggaggcgcagcagctccagaggcaggtcgagcaagcccggtggctggatgaagtcaaaagaactcttgccccgagtgctcgaagggggacccttgcggtcatgcgcggacttctcgttgctggggccagtgtcgcaccaagccccgccgtcgacaaagcgcaggccgaactgcaagagctgctgacaatcgctgaaagatgggaggaaaaggcccacctttgcctggaagcccgtcaaaagcacccccccgcgacccttgaggctatcattagagaagccgaaaatataccagtgcatctccccaatatacaggctcttaaggaagcactcgctaaagcacgcgcatggatcgccgacgtggacgagatacaaaatggcgatcattacccgtgtttggacgaccttgaaggtctcgtggccgttggtagggacctccccgtggggcttgaagaattgcggcaattggagctgcaagtgctgactgcacattcttggagagaaaaagcttcaaagactttcctgaagaagaattcgtgctacacactgctggaagtgctgtgcccatgtgccgacgctgggtccgactccactaaaagaagccggtggatggagaaagagctgggcctgtataagagtgacactgagctcctggggctgtctgctcaagatctgagggaccctggctccgttatagttgcctttaaggagggcgagcaaaaggagaaggagggcattcttcagctgaggagaaccaactccgcaaagccgtcgcccctggcttcatcctccacggcctcaagtacaacctcaatatgtgtgtgcgggcaggtcctggcaggggcgggagcccttcaatgcgatctgtgccaggactggttccatgggaggtgcgtttccgtgcccagactgcttagttcgccaaggccaaacccaacctcttctcctctgctggcttggtgggaatgggacacaaaatttctttgccctctttgtatgcggtctcgaaggccaaggttagaaaccattttggcattgctcgtcgccctccagcggctgcctgtccggcttccagagggggaagctctgcaatgtttgactgagagagcaatctcttggcaagggcgtgcccggcaggcattggccagtgaagatgttacggcacttttaggacggttagccgagctgagacaaaggttgcaggctgagcccagaccggaagagcctccaaactacccggcagcgcccgcctcagatcccctgcgagagggttctggaaaagacatgcccaaggttcaagggctgttggaaaacggagacagtgtcacttctccagagaaggtggcccctgaagagggttcagacttggagctcttatcttccctgctgcctcaactcaccggccctgttttggaactccctgaggccacaagagccccactggaggaactcatgatggagggggatttgctggaggtcaccttagatgaaaatcactctatccccgagagcctggacttctgtatattgacccctcggtactgctcagacctgtccagttggggccccgcaccaggtgtcttccctccttggtag

SEQ ID NO: 193691 - DNA, 4620 bp, synthetic construct
  misc_feature 1..4620: note = Description of Artificial Sequence: Synthetic coding sequence
  source 1..4620: mol_type = other DNA
atggagcccggctgcgacgagttcctgcccccccccgagtgccccgtgttcgagccatcatgggccgagtttcaagacccactcggatatatagcaaagattcggccaatcgctgaaaagtccgggatctgtaagatccgccccccagctgattggcagccccctttcgcggttgaagtcgacaacttccggttcaccccgcgcgtccagagactgaatgaacttgaagcacagacacgtgtgaaacttaactacctcgatcaaatcgctaagttctgggagatccagggaagttccctcaagattccaaacgttgaaaggaagatattggatctgtattctctttctaaaatagtcatagaggaaggcggttacgaggccatctgtaaggataggagatgggccagggtggcccagagactccattacccaccaggcaagaacataggcagtctgctgcggtcccactatgaacgtattatttatccttatgaaatgttccagtccggggctaaccacgtgcaatgcaatacccaccctttcgacaatgaagtcaaagacaaagagtacaaaccccacagcattcccctgaggcagtccgttcaaccatccaagttctcatcttattcaaggagagctaagcgcctccaacccgacccagagcccaccgaagaggatatcgagaagcaccccgaactgaagaaactgcagatctatgggcctggacccaaaatgatgggtctgggcctgatggctaaagataaagacaagaccgtacacaagaaggtaacttgcccccctacagtgactgtcaaggacgagcagagcggggggggcaatgtcagcagtactctgctgaaacaacatttgagcctcgagccatgcactaagacaacgatgcagcttcgtaaaaaccacagttccgcacaattcatcgattcctacatctgtcaggtctgttctcggggcgatgaggacgataaactgctcttttgcgatgggtgcgacgacaactaccacatcttttgtctcctaccaccactccctgaaatcccccgtggtatctggcggtgtcccaagtgtattctggctgagtgtaaacagcctccggaggcattcggctttgagcaggccactcaagagtattcgttacagagctttggcgagatggctgactcttttaagtcagactatttcaatatgcccgtgcacatggtaccgaccgaacttgtggagaaagagttttggaggttggtttcaagtatcgaagaggatgtaacggttgagtacggggccgatatccacagcaaggaattcggctcagggtttcccgtctctaactccaagcagaacctgtctcccgaggaaaaggaatatgcaacgagtggatggaacttgaacgtgatgccagtgcttgatcagtcagtcctttgtcacattaacgcagacatctccggcatgaaggtaccctggttgtatgtcgggatggtgttctccgccttctgctggcacattgaagatcactggtcctatagcatcaactaccttcactggggggaacccaagacctggtatggggtgccttcgctggctgccgaacatctggaagaggtcatgaaaatgctgactccggagctgtttgacagccaacccgacttattgcaccaacttgtgactctgatgaatcccaataccttaatgagtcatggcgtgcctgtggtacgcacaaatcagtgcgccggtgaattcgtaattacctttcccagagcctaccacagcgggtttaatcagggctacaacttcgctgaggctgtcaacttctgtactgctgactggttacctgcgggccgccagtgcatcgagcattatcgaaggttgaggcgttattgcgtattcagtcacgaggagctcatttgcaaaatggcggccttcccagaaacgcttgatctgaaccttgctgtggcggtacacaaggagatgttcataatggtccaggaggaacgtaggctgcgaaaggccttgctggaaaagggcgttacagaggcagaaagagaggcgtttgaactgttgcctgacgatgagcgtcagtgcatcaagtgcaagacaacatgtttcctctccgccctagcttgctatgactgcccggacggactggtgtgtctcagccatattaatgacctctgcaagtgcagttcatccaggcagtatctgagatacaggtataccctcgatgagctgccaaccatgctgcacaagctgaaaattcgcgccgagtcttttgacacgtgggccaacaaggtcagagtggccctcgaggtagaggacgggaggaagcggagctttgaggaactgcgggccttggaatcggaggcccgggagagacgcttccctaactctgaactgctccagcgtctcaaaaactgcttaagtgaggtggaggcttgtatagcacaagtactggggctggttagcgggcaggtggcacgcatggatacgcctcagctgactctcaccgaactcagggtgctcctcgagcagatgggttcgttaccctgtgcaatgcaccagattggagatgtcaaggacgtgctggaacaagttgaggcgtatcaggcggaagcccgggaagccctggcaacactaccatcttctccagggctgttgcggagtttactggagcgcgggcaacagttaggcgttgaggtgcccgaggctcaccagctgcagcaacaggtcgagcaggcgcaatggctggatgaagttaagcaggcccttgccccatccgcacatcggggttcattggttattatgcaggggctgctcgtcatgggagcaaagatcgcatcctcacctagtgtggataaggccagagcggaactccaggaacttctcaccatagcagagcgttgggaggagaaagcccatttctgccttgaggcaaggcaaaaacatccgccggccaccctagaagccatcatcagagagactgagaatatccctgtgcatctgccaaatatccaggcactgaaggaggctttgactaaagcgcaggcctggatcgctgatgttgatgagattcaaaacggtgaccactacccttgtcttgacgacctggagggtttggtagccgtcggaagagacctgcctgtcgggcttgaggagctgcgccaactggagctccaggtgcttactgcacacagttggagggagaaagcctcaaaaacctttctcaagaaaaattcctgctatacactgctagaggtgctctgcccttgtgctgacgccggatccgacagcactaaacgaagtcggtggatggagaaggctttgggcctctaccagtgcgacaccgagctgctggggctttctgcacaagacctgagagaccccggctcggtgattgtggccttcaaggagggggaacagaaggaaaaggaaggcatacttcaactgaggagaactaattctgctaaacctagcccactagccccctcactcatggcctcttcacccacctccatatgcgtgtgcgggcaagtccccgccggcgttggcgtgctgcagtgcgacttgtgccaggactggtttcacggtcagtgcgtcagtgtgccacacttactcaccagtcctaagccctcactgactagtagcccactgctggcttggtgggaatgggatactaaattcctgtgccccctttgcatgcgcagtcgccgtccacgattggaaactattctggccctgctggtagccctgcagaggctacctgttcgcctgccggagggcgaagcgttacaatgcttgactgaaagagccataggctggcaggatcgggcccgaaaggctctcgcgagcgaggatgtcaccgctttgttacgccagttggcggaactgcgtcaacagctccaggctaaaccccggcctgaagaggccagcgtctacacttctgccaccgcttgcgatccaatcagagaaggctctggaaacaacattagtaaggtccaaggcttgctggagaatggcgattccgtgacgtcccccgaaaatatggcccccgggaaaggctctgatctggagctcctgagcagcctcctccctcagctaacgggtcctgttctcgagttgcctgaggccatcagggcccccctggaagagctcatgatggagggcgaccttcttgaagtgactctcgatgaaaatcacagcatttggcagctgttacaggctggacaacctcccgatcttgacaggattcgaaccctgttggagctggaaaaattcgagcatcaggggagccgcacccggtctcgcgctctggagcgtaggcgccgccgccagaaagtggatcagggaaggaatgtagagaacttggtacaacaggagctgcagagcaagcgagctcggagttctggcattatgagccaagtgggcagagaagaggagcactaccaagagaaagccgacagggaaaacatgttcctgactccttccacagaccactcccctttcttgaaaggtaatcaaaacagcttgcagcacaaagatagcggtagctcagctgcctgccctagtctgatgccacttctacagctgtcctactccgatgagcagcagttatag

SEQ ID NO: 193692 - DNA, 4449 bp, synthetic construct
  misc_feature 1..4449: note = Description of Artificial Sequence: Synthetic coding sequence
  source 1..4449: mol_type = other DNA
atggagcccggctgcgacgagttcctgcccccccccgagtgccccgtcttcgaaccttcatgggctgagttccaggatccacttggatatattgccaaaatccggcctatagccgaaaagagcggcatttgcaaaatacggccacctgctgactggcagcctcctttcgctgtagaagtggacaactttagatttaccccacgggttcagagactaaatgaactagaggcccagactagggttaagttgaactacttggatcagattgccaaattttgggagatccaagggtcctccctgaagatccctaatgtggagcgcaagatcctcgacttatactccctgagtaagcagtgtaacactcacccattcgacaatgaagtgaaggataaagaatacaagccccattccatcccgctccgccagtcagtacagccctcgaaattcagttcctattcaaggcgggcaaagcgcctgcagcccgatccagagcctactgaagaagatatcgaaaaacatcccgagctgaagaagctccagatttacgggcccggtcccaagatgatgggacttggactcatggctaaggataaggataagacagtccataagaaggtgacttgccccccgacagtcaccgtcaaggatgagcagtcaggcggggggaacgtttcctccacgctgctgaaacagcacctgtccctggagccttgtactaaaactacaatgcagcttcgcaaaaatcacagttcggcccagtttatcgacagctacatctgtcaggtgtgctctagaggcgacgaagatgataagctccttttctgcgatggttgtgatgataactaccacattttctgtctgctgcctccactgccggagattccccgcgggatttggagatgtccaaaatgcatcctggccgaatgtaagcaaccccccgaagccttcgggtttgagcaggccacccaagaatattccctgcagagcttcggagaaatggcggattccttcaagagcgactacttcaatatgcccgtgcatatggtccccaccgagctggttgagaaggagttttggcgcttagtttcgagcatcgaagaggatgtcaccgtcgaatatggagctgacatccattcgaaagagtttggttcaggtttcccagtttccaattctaagcagaacctgtccccggaagagaaggaatatgccacgagtggttggaacttgaacgtgatgcccgtgttggatcagtccgttttgtgtcatatcaacgccgacatttccggaatgaaggttccttggttatatgtgggtatggtgttcagcgctttctgctggcacattgaagaccattggtcctattctattaactatctgcactggggggagccgaagacttggtatggcgtgccttctcttgccgcggagcatctggaggaggttatgaaaatgctaacacctgagctgtttgacagccagcctgacctacttcaccaactggtaaccctcatgaatccgaataccctgatgagtcacggggtacccgtggtgcggacaaatcaatgcgccggcgagtttgtgatcacattcccccgagcctatcatagtgggtttaaccagggttataattttgccgaagcagtgaacttctgtactgctgactggctgccagcagggcggcagtgtatagaacactaccgtaggttgcggcgctattgcgtattctcgcatgaagagctgatttgcaagatggctgctttccccgagacccttgatctgaatctcgctgtggcggttcacaaggaaatgttcattatggttcaggaagaacggcgacttagaaaagctcttctcgaaaaaggcgtaacagaagccgaaagagaggcgttcgaattgctgccagatgatgagcgacaatgcattaaatgcaagacaacatgctttctcagtgcccttgcatgctacgattgtcccgacgggctggtttgccttagccacatcaacgacctctgcaagtgctctagtagtcgccagtaccttcggtatcgatacaccttagatgagctgccaactatgcttcacaaactgaagatacgcgcagagtcgttcgacacttgggcgaacaaagttagagtggcgctggaggtggaagatggaagaaaaaggagctttgaggaacttcgagctttagaatctgaggctcgagagcgcaggtttcccaactcagagcttttgcagcggctgaagaactgtctgagtgaggtggaagcctgtattgctcaagtactcggactggtcagcggccaggtggcacggatggatacgccacagctgacgcttactgaactgcgggtcctgctggaacagatgggatctctgccatgcgcaatgcaccagattggggatgtaaaggatgtgctcgagcaggtcgaagcatatcaggctgaggctcgagaagcattggcgaccttaccttcttccccagggctgctacggagtcttctggagaggggacagcagctgggtgtagaagtgcccgaagctcaccagctgcagcagcaggtcgagcaggcgcagtggctcgatgaggtgaagcaagctctagctccttctgctcacagaggttccctcgtgataatgcagggcctgctggtcatgggagcgaaaattgccagctccccctccgtggataaagccagagctgagctgcaggaactacttactatagctgaacgctgggaggaaaaagcccatttttgcttagaggcccgccagaagcacccccctgctacacttgaagccattatccgagagacagagaatatccccgtacatttaccaaatattcaggcattgaaggaagctctcaccaaagcgcaggcctggatcgccgacgtggacgagatccagaacggcgaccattatccgtgcctcgacgatttggaggggctagtagccgtgggacgggacctgcctgtcgggttggaggaactgcggcaactggagctgcaggtgctgacagcccattcttggcgggaaaaggctagtaaaacctttctgaaaaaaaacagttgttacactttgttagaggtgctgtgcccctgcgctgatgcgggatccgactccacaaagaggtctagatggatggaaaaggccctcggcctgtaccagtgcgatactgagctgctcggattgagtgcacaggacctgagggacccgggctccgtgatcgtagcattcaaggagggggaacagaaggagaaggagggaattcttcagttgagacgaactaacagcgccaagcccagtccactcgccccttcgttaatggcgtcgagccctaccagcatttgcgtgtgcggccaagtgccggccggggtcggagtgctgcagtgcgacctgtgtcaagactggttccatggccagtgcgtgagtgtgccccacctcctgacatcacccaaaccaagtttgacctcaagtcccttgctcgcttggtgggagtgggatactaaattcctctgtcctctctgcatgcgctctagacgtcccaggttggaaaccatcctggctttgctcgttgcccttcagagactccctgttcgtctcccagagggagaggccctgcagtgcctgaccgagagggccatcgggtggcaggaccgcgccaggaaggctctggcaagcgaggatgtgaccgccctgctgaggcagctggccgagctgcgtcaacagttacaggccaaaccccggcctgaggaggccagcgtgtatacaagcgccacagcttgtgatcctatcagagaaggatcaggaaataatatctcaaaggtccagggtctgctcgagaatggagatagcgtgactagtccggagaatatggctcccgggaaggggagcgatcttgagttattatcctcattgctgccgcagctgactgggccagtgctagagctcccagaagctatccgcgccccactggaggagttgatgatggagggggacctcttggaggttactctggacgagaaccactctatatggcagctgctgcaggctggtcagccacccgacctggaccggatccggacactgctggaactcgaaaagtttgagcaccaggggagccggactcgttcacgagctttagagagacgtcggcgtagacagaaggttgatcaggggcgaaatgtggaaaacttggtgcaacaggagctgcagtccaagagagccagatcctctggtataatgagtcaggtgggtcgcgaggaagagcattaccaagagaaggccgaccgggaaaatatgttcctgaccccttctaccgaccactcaccgtttcttaaaggaaaccagaactcattgcaacataaagactcaggaagttcagctgcgtgcccttcacttatgcccctgctgcagctctcttacagtgacgaacagcagctgtag

SEQ ID NO: 193693 - DNA, 882 bp, synthetic construct
  misc_feature 1..882: note = Description of Artificial Sequence: Synthetic coding sequence
  source 1..882: mol_type = other DNA
ctgcccaacatccaggccctgaaggaggccctgaccaaggcccaggcctggatcgctgacgtggacgagattcagaatggcgatcattacccctgccttgatgatctggaggggctggtggcggtgggtagagaccttcccgtaggactagaagagctgagacagctcgaactacaggtgctttgcccctgcgccgatgctggatccgactcgaccaagaggagcaggtggatggagaaggcacttggactgtaccaatgcgatacagagctgctgggactgagcgcccaggatctgcgcgacccagggagtgtgatcgtcgctttcaaagaaggggagcaaaaagagaaggaagggatcttacagctccgccgcacaaattcggcgaagccatcccccctggctcctagcctcatggcctccagtccaacatctatctgcgtgtgcggacaggtgccagctggagttggcgtcttgcagtgcgacctatgccaggactggttccacggccagtgcgtgtctgttcctcacctcttaacatcacctaagccgtcccttacgtcatccccactcttggcgtggtgggagtgggatacaaaattcctttgtcctctttgtatgaggtcaagacgtcccaggctcgagaccatcctggctctactggtcgctcttcagcgtctgccagtgagattgcccgagggcgaagcactgcagtgtctgactgagcgcgccattgggtggcaggatagagccaggaaggcactcgcctctgaagacgtgactgctctccttcggcagctcgcagaattgaggcaacagctacaagcgaaaccccggcccgaggaagctagtgtgtacacctccgcgaccgcatgcgattag

SEQ ID NO: 193694 - DNA, 4431 bp, synthetic construct
  misc_feature 1..4431: note = Description of Artificial Sequence: Synthetic coding sequence
  source 1..4431: mol_type = other DNA
atggagcccggctgcgacgagttcctgcccccccccgagtgccccgtgttcgaaccatcttgggccgagtttcaggacccactcggatacatagctaaaatccggccaatagccgagaaatctgggatttgtaagatccgccctccggccgactggcagccgcccttcgctgtggaggttgataatttccgatttacaccaagggtgcaacgccttaatgaactggagattgttatcgaggaagggggctatgaagccatctgcaaagacagaagatgggcgagagtggctcaaagactgcattacccccctgggaagaacatcggtagcctcctcaggtcccactacgagcgcatcatttacccctatgaaatgttccagtccggggccaaccatgtgcagtgcaacacacatccttttgataacgaggttaaagacaaagaatataagccacactcaatacccttgaggcagagtgtccaaccctccaaattcagcagctatagcagacgtgctaagagactgcaacccgaccctgaacctactgaggaagatatcgagaaacatcctgagctgaaaaagttacagatctatggtcccggccccaagatgatgggtttggggctcatggccaaggacaaagacaagaccgttcacaaaaaagtgacatgccctcctaccgtgaccgtcaaggacgagcagagcgggggtggaaatgtttcctctaccctcttgaaacaacacctgagcctagaaccttgcacaaagacaactatgcagctgaggaagaaccactcttcagcccagtttatcgattcctatatctgtcaggtctgtagtagaggcgatgaagacgataaactcctgttctgtgatgggtgcgacgataactaccacattttctgcctactgccacctctacctgagatcccacggggtatctggaggtgcccaaagtgtatactggctgagtgcaagcaacctcccgaggcctttgggtttgaacaggcgacacaggaatactcattacagagcttcggggagatggccgattcattcaagagcgattacttcaacatgcccgttcatatggtgccaaccgagctggtggagaaagaattttggcggctagtttccagtattgaggaagatgtgactgtggaatatggagcagatattcactctaaggaattcggaagcggctttccagtaagcaattccaagcagaatcttagtccagaggaaaaggagtatgccacctcaggctggaatctaaacgtcatgccagtgttggaccagagcgttctctgtcatatcaacgccgatatttctggaatgaaggtcccttggctgtatgtggggatggtgttctcagccttttgctggcatattgaggatcattggtcttacagtattaattacctgcactggggggagccaaagacctggtacggcgtgcccagcctggctgcagagcacctggaagaagtgatgaagatgcttacccctgagctgtttgacagtcaacccgaccttctccatcaactggttacgctgatgaaccctaataccctgatgagtcacggggtgccagtcgtccgcacaaatcagtgcgctggcgagttcgtgattacgttccctcgtgcttaccatagcgggttcaatcagggctacaacttcgcggaggccgtgaatttctgtacggctgattggttgcctgccggacgacagtgcatagagcactaccggcgcctgcggcggtactgcgtcttcagccatgaagagcttatttgtaagatggcagccttccccgagactttagatcttaatctggccgttgctgtccacaaggagatgttcatcatggtacaagaagaacgcagactgcggaaagcactcttggaaaagggagttacggaagcagagcgggaagcctttgaactgttacccgatgacgaacggcaatgtatcaaatgcaagactacttgtttcctgagtgctctagcctgttatgactgtcctgacggactggtgtgcctcagccacattaacgacctttgcaaatgttcgagttcccgtcaatatctccgataccgctatacattagatgagcttccaactatgctacataagctgaaaatcagggccgaatccttcgatacgtgggcaaataaagttcgagtggctctcgaagttgaagacggacggaaaaggagcttcgaggagctcagagccctagaatcagaggctagggagcgcagattccccaactctgagctcctgcaaagacttaaaaactgccttagtgaagtcgaggcgtgtattgcgcaggtcctgggcctggtgtcgggccaggtagctcgcatggataccccccagttaaccttgacggagcttcgggtactgttggagcagatgggaagcttgccttgtgccatgcatcaaataggggatgtgaaagatgtcctggaacaggtggaagcctaccaggcagaagccagagaggcattagccactctcccttccagtccaggtttactacggagcttgctggagcggggacagcaattgggcgtggaagtgcctgaggcacatcaattgcagcagcaggtggagcaggctcaatggctggacgaggttaagcaggccctggcccccagtgcccatagaggctcccttgtgattatgcaaggcctgctggtcatgggtgcaaaaattgccagctctccttccgtggacaaggctcgggccgaactgcaggagttgttgaccatcgcagaacgctgggaggagaaggcacatttctgcctggaagccaggcaaaagcatccgccagcaactctcgaggccattataagagagaccgagaacattcccgtgcatctaccgaacatacaagcgcttaaggaggctctgaccaaggcccaagcctggattgccgacgtagacgaaattcagaatggagaccattatccctgcctcgatgacttggagggcttagtggccgttggtagggacttgcctgtcggtctcgaggagttgcggcagttagaactgcaggtcctgacggctcacagctggcgggaaaaagcatccaaaacgttcctcaagaagaattcatgttacaccttacttgaggtgctctgtccttgcgcagacgcaggctccgattccacaaaacgctcgcgttggatggagaaggcactcgggttatatcagtgcgacacggagctgctcgggctgtccgcccaggatctgcgcgaccctggatcagtaattgtggcatttaaggagggggaacagaaagagaaggaggggatcctccagttgagaagaacaaacagcgctaagccgtctcccctcgcccctagcctgatggcttcttctccaacttctatctgcgtgtgtggccaggtcccggctggggtcggggtccttcagtgtgacttgtgtcaggattggttccatgggcagtgcgtgagtgtgccacacctcctgacaagtcctaagcctagcctaactagtagccctctactcgcttggtgggaatgggatacaaaattcctatgccccctgtgtatgaggtcacggcgaccaagactcgaaactatcctcgccttgcttgtggcattgcagagactgcctgtacgcctgcctgagggggaagctctacagtgcctcactgagagggcaatcgggtggcaagacagggcgaggaaagctcttgcgagcgaggatgtgactgcgttactgagacagttggccgagctccggcagcaattgcaagcaaagcctagacccgaggaggcctctgtttatacctctgcaactgcttgtgacccaatacgggaggggtctggcaacaacatctctaaggtccagggactgctggaaaacggtgatagcgtcacgtcccccgaaaacatggctcccggcaaaggtagtgatttagagcttctgtcctccctgctacctcagctcaccggcccagtcttggagctccccgaggccatccgggcgccactggaagaactcatgatggagggagatttgctagaggttactctggacgaaaatcacagcatctggcaactgctgcaggcagggcaaccacccgacctcgaccgaatccggacactgcttgagctggagaaattcgagcaccagggcagccggacccgcagcagggcactggagaggaggcgccgtaggcagaaagtagatcaaggacgcaatgttgagaatctcgtccaacaggagctccagagcaaaagggccagatcgagtgggataatgagtcaggttggtcgcgaagaggaacactaccaggaaaaggccgatagagagaatatgttcctgacaccttctacagatcattcaccttttctcaagggaaatcagaactcgcttcagcacaaagacagtggttag

SEQ ID NO: 193695 - DNA, 1278 bp, synthetic construct
  misc_feature 1..1278: note = Description of Artificial Sequence: Synthetic coding sequence
  source 1..1278: mol_type = other DNA
atggagcccggctgcgacgagttcctgcccccccccgagtgccccgttttcgagccatcgtgggcagagttccaggacccactgggttatatcgcaaagatccgaccgatagccgagaagtctggcatctgtaaaatccgcccaccagcagactggcagccaccattcgccgtggaagttgacaatttcagatttacgccacgtgtgcaacgcctgaatgagctggaagctcagacccgggtgaagctcaactaccttgatcaaattgccaagttctgggagatccaaggctcctctctcaagatacccaatgtggagaggaaaattctagatctgtacagtctctctaaaatcgtcatcgaagagggcggctacgaggctatctgtaaagacagacgctgggcccgggtggcacagcggctgcattaccctcccggaaagaatatcggaagtctcctgcgcagccactatgaaagaattatatacccctatgagatgtttcagtccggcgcaaaccatgtgccagagccaacagaggaggacatcgaaaagcatcccgagcttaagaagttgcagatttatggacctggaccgaagatgatgggcctgggcctgatggctaaggataaggataagaccgttcataagaaagtcacctgcccgcccaccgtgactgtgaaagatgaacagagcggtggcggcaatgtgtcgtccaccctcttaaagcaacacctcagcctggagccttgcacaaaaaccaccatgcagctgcgaaagaaccatagctcggcccagtttatagactcatatatctgccaggtatgctcccgcggcgatgaagacgataagttgctcttttgtgacgggtgtgacgacaattaccatattttctgccttctgccgcccctaccggagatcccccggggcatctggcgatgtcctaaatgcatcctcgctgaatgcaaacaacccccggaagccttcggattcgaacaggcaacccaggagtatagtttgcagagcttcggtgagatggctgatagcttcaaatcagactactttaacatgccagtgcacatggtccctaccgaactcgtggaaaaggagttctggcgactcgtcagctcaatcgaagaagacgtcactgtggaatatggggccgacatccatagtaaggagttcggctctggctttccggtgtccaatagtaagcagaacttgtcccctgaggaaaaggaatacgccaccagtggctggaatcttaacgttatgccatag

SEQ ID NO: 193696 - DNA, 2667 bp, synthetic construct
  misc_feature 1..2667: note = Description of Artificial Sequence: Synthetic coding sequence
  source 1..2667: mol_type = other DNA
atggagcccggctgcgacgagttcctgcccccccccgagtgccccgtctttgaacctagctgggccgagttccaggacccacttggctatatagccaagatcaggcccatcgcggagaagtcaggcatctgtaaaatcagacccccagccgattggcagccacctttcgccgtcgaggttgataactttcgtttcacgcctcgggttcagcgacttaacgagcttgaagcgcagacgcgggtgaaattgaactatctagaccagattgccaagttctgggaaattcaggggtctagtctgaaaatcccaaacgtcgaacgcaagattcttgatctttattccctgtcaaaaatcgtgatcgaggagggcggctacgaagccatttgtaaggacagacggtgggcccgtgttgcccaaagactgcattacccccctggtaaaaacattgggagtttgctgagatcacactacgaacggatcatttacccatacgaaatgttccaatccggggctaaccacgtgcaatgtaacacacacccttttgacaatgaggtgaaggataaggaatataagcctcatagtataccccttcgccagtcggttcaaccttcaaaatttagctcatattctaggcgcgctaaaaggttgcaacccgacccggaacctacagaagaggacattgagaagcaccctgaattgaaaaagctgcagatttacggcccaggacctaaaatgatgggtttgggcctcatggcaaaggataaggataaaactgtccacaagaaagttacctgtccgcccacagtgaccgtcaaggacgaacagagtggcggagggaacgtaagttctacactgctcaagcagcatctgtccctagagccatgcacgaaaacaaccatgcagcttagaaagaaccattctagcgcccagtttatagactcttatatctgtcaggtgtgtagtagaggggacgaggacgataagttgctgttttgcgatgggtgtgacgataactatcacatcttttgtctgctgccccctctaccagaaattccaaggggtatttggagatgtccgaagtgcatcctagcagaatgcaagcagcccccagaagctttcggtttcgaacaggctacacaggaatactcactgcagagcttcggcgagatggctgattcttttaagagcgattatttcaatatgccagtgcatatggtacctactgagctagtggagaaggagttttggaggttagtgtcatcaatagaggaagacgtgaccgtggaatacggggcagatatccattctaaagaattcggctctggattcccagtttctaactccaaacagaatctgagtcccgaagaaaaagagtatgctactagtggctggaatctgaacgtgatgccagtgctggaccagtctgtcctgtgtcatataaatgctgatatttcgggcatgaaagttccatggctttatgtgggcatggttttcagtgctttttgctggcacatagaggatcactggtcatatagtatcaattaccttcattggggagagcctaaaacatggtatggtgtgccctctctggctgctgaacatctggaggaggtcatgaagatgttaacacccgagctgttcgacagtcagcccgatttgttacaccagctggttaccctgatgaacccaaataccctaatgagccacggcgtccctgttgtgcggacaaaccagtgcgctggggagtttgtgataacattcccacgagcctaccactctggatttaaccagggttacaattttgcagaagcggtcaacttttgtaccgctgactggctgcccgctggtcgacagtgcatcgagcactatcgaaggctccggagatattgcgtgttctcccatgaggagctcatatgtaagatggctgccttccccgagacgctggatctgaatctggccgtggcagtgcacaaagagatgttcatcatggttcaggaagaacggcgcttgcgcaaggccctcctggagaagggcgtgaccgaggctgaacgtgaggcattcgaactgctccctgatgatgaacggcagtgcattaaatgtaagacaacatgcttcctttctgcgctggcgtgctatgactgtcccgacggcctagtgtgcttgagtcacatcaatgacctctgcaagtgcagtagctccaggcaataccttcgttaccggtacaccctggacgaactgccgactatgctgcataaactgaagatacgggccgagtcattcgacacctgggccaacaaggtccgcgtagctctggaggtcgaggatggccggaagcgcagcttcgaggaactgcgtgcattggagagcgaggcacgggagcgcaggtttcctaacagcgagctgcttcaaagattaaaaaactgcctttcggaagtagaggcctgtattgcacaggtactgggcttggtttctggccaagtagcgagaatggacactccgcagctcaccttaaccgagctgcgggtgcttttggaacagatggggtccctgccctgtgcgatgcatcagatcggagatgtgaaagtgctgtcatggaaatggcgccggtatgtcttcccctatcacttatgcgtttacagcatgcagggaaacatcttacccgattag

SEQ ID NO: 193697 - DNA, 4713 bp, synthetic construct
  misc_feature 1..4713: note = Description of Artificial Sequence: Synthetic coding sequence
  source 1..4713: mol_type = other DNA
atggagcccggctgcgacgagttcctgcccccccccgagtgccccgtcttcgagccctcttgggccgagttccaggaccctttaggctacatagcaaaaattcggcctatcgccgaaaaatctggtatatgcaagattagacctccagcagactggcaaccccccttcgcagttgaggtggacaactttagatttacacctagagtgcagagactgaacgagctggaagcccagacacgggtgaagttgaattatctggaccaaatcgccaaattctgggagatccaaggttcatccttgaaaattcctaatgttgagagaaaaattctagacctgtactccctgtcaaaaattgttatagaagaaggagggtatgaagcaatttgtaaggatcgtcggtgggccagagtggcgcagaggctccattatcccccaggcaaaaacattggatctctgctccgctctcattatgaacgtataatctacccatacgagatgtttcaatccggagccaatcatgtccagtgtaatacgcacccatttgacaatgaggtcaaagacaaggaatacaagccccactcaattccattaaggcaatcagttcagccatccaaattttcctcttacagccggcgagccaagagactgcaacctgaccctgaaccaaccgaggaagatatcgaaaagcatcccgagctcaaaaagcttcagatctacggccctgggcctaaaatgatgggcttgggattaatggccaaggacaaggataaaaccgtgcacaaaaaggttacatgtccccccacggtaaccgtgaaggatgagcaaagcgggggaggcaacgtttcatccacactgctgaaacagcacctatcccttgaaccatgcaccaagaccacaatgcagctcaggaagaaccattcgtccgcccagttcattgactcttacatatgccaggtctgtagtagaggcgatgaagatgacaagttactcttctgtgatgggtgtgatgacaactaccacatcttctgcctgctgccgccgttacccgagatcccgagagggatatggaggtgcccaaaatgcatcctcgccgaatgcaaacagcctccagaggcctttggatttgagcaggccacacaggagtacagccttcagagcttcggcgaaatggctgattcttttaagtctgattactttaacatgcctgtccacatggtacccactgagctggtggagaaagagttctggaggctggtgagttcaattgaagaggacgtgaccgtagagtacggcgcggatatccattccaaagagttcggctccgggttccctgtatcgaacagtaaacaaaacctcagccccgaagagaagcggcagagtcttactgttctgacacggctgatatcatctttttgggcacaagcagttctaccgccctggcctccaaaagtgctgggattacaagaatacgccacttctgggtggaacctgaatgttatgcccgtactcgatcagtcggtcttgtgccacataaacgccgatatcagcggcatgaaagtcccctggctctatgtaggcatggttttctctgccttttgttggcacatcgaggatcattggtcttatagtatcaactatttacactggggggagcctaagacctggtacggcgttcccagtctggctgctgaacatctggaagaggtaatgaagatgctcacccctgagcttttcgacagccagccagacctgctgcaccagctagtaactctgatgaatccaaataccctgatgtctcatggcgtgcctgtcgtgagaaccaaccagtgtgctggggagttcgtgattacatttccacgggcatatcatagtgggttcaaccagggctacaattttgccgaggctgtgaacttctgtacggctgactggctgcctgcaggcaggcagtgtatcgagcattatcgtagattgagacgctactgtgtgtttagtcatgaggagttaatctgtaagatggcagcatttcccgagacactagacctcaatctggccgtggctgtccacaaagagatgttcattatggttcaagaagagcggagactgcgtaaggcactgctagagaagggagttacggaagccgaaagggaggcctttgaactccttcctgatgacgagagacagtgcattaaatgtaaaactacatgtttcctgtctgccctggcgtgttatgattgtcccgacggcttggtttgcctttcccatattaatgacctgtgcaagtgctcttccagcaggcagtacctgagatacagatacactctggatgagttgccaacaatgttgcacaaattgaagatcagggcagagtcattcgacacatgggcaaacaaggtccgcgtagctctcgaagtggaagacggtagaaagagatcattcgaggaactgcgggcactcgagagcgaggcccgtgaacgacgttttccaaactcagaactgttgcaaaggctcaaaaattgcttgtccgaggtcgaagcatgcatcgcccaggtgctcggactggtgagcggccaggtggctcgaatggacaccccacagctcacgctgacagagcttagagtgctgctagaacagatggggtctctgccatgcgctatgcaccaaatcggggacgtgaaagatgtattagaacaggtagaggcttatcaagctgaagcccgcgaagcgctggccacactcccgagcagtcccgggctgctcagaagcctccttgagaggggccagcaactgggtgttgaagtccccgaagcccatcagctgcagcagcaggtggaacaggcacagtggctggatgaagtcaaacaagctcttgcgcctagcgcgcaccgcggaagtctcgtcatcatgcaaggcctcctagtcatgggggctaagattgcctcctcacccagcgtggacaaagcccgggccgagctacaagagctactcactatagccgaaagatgggaagaaaaagcccacttttgtttagaagccaggcagaagcatccgccagcaaccctcgaggccatcattcgagagacggaaaacatccctgttcacctgccaaacatccaagctctgaaagaggcactcactaaagcccaggcctggatcgcagacgtggacgaaattcagaatggagaccactacccctgcctagacgatttggaggggcttgtggcggtgggccgcgacctcccagtgggattggaggagctccgccaactcgagctgcaggtccttaccgcacattcttggagggagaaggcatcgaagacgtttctgaaaaaaaactcttgttacaccctgttggaggtcctatgcccttgcgcggatgccggtagcgacagcaccaagagaagccgatggatggagaaagcccttggtttataccaatgcgatactgagctgctaggtctaagtgcccaggacctccgggatccaggcagcgtgattgtcgcctttaaggaaggcgaacagaaagagaaggagggaattcttcagctcagacggacaaattcagcaaagccctctcccttggccccttcactgatggccagcagccccactagtatctgcgtgtgcggccaagtcccagctggtgtcggggttctgcagtgcgacctgtgtcaggactggtttcatgggcaatgtgtgtctgtgccccacctcctgacgtccccaaagccctctctcaccagttcccccctgctcgcatggtgggaatgggataccaagttcttgtgtcccctctgcatgaggtctaggcggcctagattagaaactattttggccctcctggttgccctgcaacgcctgcccgttcgcttaccggaaggagaggccctgcagtgtttgactgagagagcgatagggtggcaggatagggcacgcaaggcacttgcttcggaggatgtgaccgctctgctgcgacaacttgctgagctgcgtcaacagctgcaagccaagccaaggcctgaggaagcatccgtgtacactagcgccacagcttgcgacccgatccgagaggggtcgggcaacaacatatccaaagttcagggattactagaaaacggagactccgtaacatccccagagaacatggcaccggggaagggatcagacctcgaattgctttcctccctactgccacagctgacgggccctgtgctagagctcccagaagctattcgagctcctcttgaggaacttatgatggagggggatttactcgaagtaacactcgatgaaaatcattcgatttggcagctactgcaagcaggacagccacccgacctggatcgcatccggacattactcgagcttgaaaaattcgagcaccaagggtctcggacacgctcaagggccctggagagacggcgccgaagacagaaggtagaccagggaaggaatgtggaaaatttggtacagcaggagttacagagtaagcgggcccgctctagcggcataatgtcacaggttgggagggaagaagagcattaccaggaaaaagctgatcgggaaaatatgttcttaacccccagtacggaccacagtcctttcttgaagggcaaccaaaactcactccagcataaggattcaggatcctccgctgcatgcccatcattaatgccgctcctgcagctctcatatagcgatgaacagcagctgtag

SEQ ID NO: 193698 - DNA, 3297 bp, synthetic construct
  misc_feature 1..3297: note = Description of Artificial Sequence: Synthetic coding sequence
  source 1..3297: mol_type = other DNA
atggacctgggcaccctgtacgagagctgcaaccagccccaggacgcaatcaagtgctatcttaacgcaactagaagcaagtcatgttcgaacacttccgccctcgccgccagaataaaatacctgcaggcccagctgtgcaatctaccgcagggatccctgcagaacaagacaaaactgcttccgagcatcgaagaggcgtggtccctgcccataccagctgaactgacctctaggcaaggtgccatgaacacagctcaacaggcctgtaagccacatcaccccaacacggaacccgtcctgggactgagccagaccccaatctcccagcagagcctccctctgcacatgataccgagctctcaagtggatgacttgtcttccccggcaaagcgcaaacgtacttccagccctaccaaaaacaccagcgataactggtcaggggggcatgcggtgtcccacccacccgtccaacagcaggcccacagctggtgcttgaccccccagaagctgcaacatctcgagcagctcagagcaaaccgcaataacctgaaccccgcccagaagttgatgctggaacagctggagtcccagtttgtgctgatgcagcaacaccaaatgcggccaactggggtggctcaagttcgttcaactggaattccgaatggccccaccgctgattcgtccctacctaccaacagcgtgtccgggcagcaacctcaactcgccttgacaagagtgcctagtgtgtcccaacccggagtgagacccgcatgccctggccaacctctggcaaacggtccgttttccgcgggacacgtgccctgcagcacctcacgcaccctcggaagcacagataccatactcattggaaacaatcacatcactggatctgggagcaacggtaacgtgccgtacctgcaaaggaatgccttgacgctccctcacaatcgaacaaaccttacttcttctgccgaagagccttggaagaaccagctgtcaaacagtacacaggggttgcacaaagggcagagttctcatagcgcaggccccaatggggaacggcctctttccagcaccggtccctctcagcatctgcaagctgcaggatctggaatccagaaccagaacggacacccgaccctgcccagtaattctgtgacccagggagccgctttgaatcacctatcaagccatacagctacatccggcggccagcagggtattacactgactaaggaaagtaagccgtccggaaatatactcaccgttccggaaactagtagacacacaggtgaaacccccaacagcaccgcctcggtagagggtctgcccaaccatgttcatcaaatgactgccgacgctgtctgctcgccctcacacggagattcaaagagccctgggctactgagttcggataatccacagttgagcgctctcctcatggggaaggccaacaacaatgttggaactgggacctgcgataaagtcaacaacatccaccctgcagtacacaccaagactgacaactctgttgcgagctcacccagctccgctattagtaccgcaaccccgtcccccaagagtaccgagcaaaccaccaccaactccgtaacctctctaaatagtccgcactctggcctccacaccataaatggagaaggcatggaagagagtcagtcccccatgaaaacagatctgcttcttgtcaaccataagccctcgccccaaataattccaagtatgtctgttagtatctatccgtcctcggccgaggtgctgaaggcatgcagaaacttaggaaaaaacggactgagcaacagcagcattctgctggataaatgtccacctccccgaccaccttcttcgccttatccccccttgccaaaggataagctcaacccgccaactccttctatttatctggaaaataaaagagatgcctttttccctccgctccaccagttttgcactaatcccaataaccccgtgacagtaattcgcgggctagctggcgcattgaagctcgacctcggcctgttcagcaccaaaactctggtggaggcaaacaatgaacatatggtagaagtgaggactcaattgctccaacccgccgacgagaattgggatcctaccggaactaaaaagatctggcattgtgagtctaaccggagccacacaaccatcgctaagtatgcccaatatcaagcatcctcatttcaagagagtctgagggaggagaacgaaaaacggagccatcataaagatcatagtgactctgagagcacaagttctgacaattccggtcggcgcagaaaggggcctttcaaaactatcaaatttggaaccaatattgatctctcagatgataagaagtggaagctccaactacacgagctgacaaagctgcccgcgttcgtgagggtcgtgtcagccggtaacctgctctcccacgttggtcatacaatcctaggaatgaacactgtccaactttatatgaaagtaccggggagtcgtacgcccggccatcaggagaacaacaacttttgttcagtcaacattaatatagggcctggggattgcgagtggttcgtggtgccggaaggatattggggcgtgctcaatgatttctgtgagaagaataacctcaatttcctgatgggcagttggtggcctaacctggaggacctatatgaggcaaatgtgccagtatatcgctttattcagcgccctggggatcttgtctggattaacgcagggaccgtacactgggtgcaagctatcggatggtgcaacaacatcgcttggaacgtgggtcctctgacagcctgccaatataaacttgccgtggaacgttacgaatggaacaaactgcagagtgtcaaatctattgttcccatggtgcacctttcttggaacatggcacgaaacattaaggtgagcgacccaaagctctttgagatgattaaatactgcctcctgcggaccctgaaacagtgtcagaccctgagggaggcccttatcgcagcaggcaaagaaattatctggcacggtaggaccaaggaggagccagctcattactgttctatctgtgaagtcgaggtctttgaccttctattcgtgaccaacgagtccaattcgcgcaaaacatacattgttcattgccaagattgcgcgcggaaaacaagcgggaacctagagaactttgttgtgctcgagcagtacaagatggaagatctgatgcaggtttacgatcagttcacgctcgccccgccactcccatcggctagctcatag

SEQ ID NO: 193699 - DNA, 4206 bp, synthetic construct
  misc_feature 1..4206: note = Description of Artificial Sequence: Synthetic coding sequence
  source 1..4206: mol_type = other DNA
atgaagagctgcggcgtgagcctggccaccgccgccgccgccgccgccgccttcggtgatgaggagaagaaaatggcggcaggcaaggccagcggggaaagcgaagaggcttcgccttcactgaccgccgaagagagagaagccctgggaggcttggatagccggctgttcggatttgtgaggtttcacgaagacggcgcccgcaccaaggccctgcttgggaaggctgtaagatgttatgagagtctgatccttaaggccgaaggtaaagttgagagcgactttttctgccaactgggtcacttcaatctgttgctagaggattatccaaaagccctctctgcctatcagcggtattactcactgcaaagtgactactggaaaaatgcggcctttctgtacgggctaggccttgtctacttccactacaacgccttccaatgggctatcaaggcgtttcaagaagtcctatacgtagatccctcattttgtagggctaaagaaatacacctgcggctcggcctcatgtttaaggtgaacaccgattacgagagtagtcttaagcattttcagctggccctggtcgactgcaacccctgtacattgagtaatgcggaaattcagtttcacattgctcatttatacgaaacacaacgtaaatatcactcggcaaaggaagcatatgagcagttactgcagactgagaacctgagcgcgcaggtcaaagctactgttctgcaacagctgggatggatgcaccacacagtcgatctgctgggagacaaagcaaccaaagaatcctatgccattcagtatcttcagaagagcctggaggccgacccaaactctggccagtcttggtacttcctcggtcgatgttattcctcaataggcaaagtgcaggacgcttttatcagttacaggcagtctattgataagagtgaagcatccgctgatacctggtgttcaattggagtgctttaccagcagcagaaccagcccatggatgctctccaggcgtatatttgcgcagtacaactggaccacggccacgccgccgcgtggatggatcttggcacgctatatgaaagctgtaaccaaccacaggatgccataaaatgttacttaaacgccaccagatccaagtcatgctccaatacaagtgcattggcagcacggatcaagtacctgcaagcgcaactgtgtaatctgcctcagggatccctgcaaaacaagactaagctgctaccatctatagaagaggcctggtccctgcctataccagctgagttgaccagccgccaaggtgccatgaacacagcccaacaaaacacctcagacaactggagtggaggccatgcagtgtcccacccccctgttcaacagcaggcccacagttggtgtctgacaccacagaaactacagcacctcgaacagctccgtgctaataggaataatctaaacccggcgcagaagctgatgttggagcaattggagtctcaattcgtcctgatgcagcagcaccagatgcgccccacaggggtagcacaggttaggagcacaggtattcccaatggacccaccgcagacagctcacttcctaccaattccgtgtcaggccaacagcctcagctggccttaactcgagtaccctccgtcagtcagccgggtgtgagaccagcatgcccgggccagcctctggctaatggccccttctctgccggccatgtgccatgctctacaagccgcaccctcggcagcactgataccatactgataggtaacaatcacattacaggttccggcagcaatggtaacgttccctacctacagagaaatgccctcactttgccacataacaggactaatctgacgtctagcgctgaggaaccatggaaaaatcaattgagcaattcaactcaaggcctgcataaggggcaatcatcccatagcgccggcccaaatggcgaaaggccattgtcgtctacaggaccttcccagcatctgcaagcagctgggtccgggatccagaaccaaaatgggcatccaactttaccttccaatagcgtgacacagggcgccgcgctcaatcatttgtcatcccataccgctacaagtggaggccaacagggaatcacactcaccaaagaaagtaaaccatccggcaatatcctcaccgttcccgaaacgagccgacacactggggagactccaaatagtactgcaagcgtggaaggcttgcccaaccatgtgcaccagatgactgctgacgccgtctgctctcccagccacggtgacagtaaaagccctggactgttgagtagcgacaaccctcagctttcagctttattgatgggaaaagcaaataacaatgtcggaaccggtacttgtgacaaagtgaacaacattcatccggctgtgcacactaaaacggacaattctgtggcctccagcccttctagcgcaatatcaaccgccaccccctctcctaagagcaccgagcagaccactacaaatagcgtgaccagcctcaatagcccgcactccggactgcacacgatcaatggagagggcatggaggagtctcaaagtccgatgaagactgacctattgcttgtgaatcacaagcctagccctcagatcatcccttctatgtccgtgagcatttatccaagttccgcagaagtactaaaggcatgtagaaatctgggcaaaaatggccttagcaacagctctattctcctagacaaatgccctcccccacggcctccctctagcccttacccaccacttcctaaggataagctcaatcccccgacaccgtctatctacctcgagaacaaacgcgacgctttcttccctcccctgcatcaattctgcacaaaccctaacaatccagtcacggtgattcgggggttggccggagccctgaaactggatctgggtctgttcagtacaaagactctggttgaggcaaataatgagcacatggtcgaagtacgtacccagctgctccagcccgccgatgaaaactgggatcccactggaacaaaaaagatctggcattgcgaaagtaatcgaagccacactacaatagccaaatacgcccagtatcaagccagcagtttccaggagagcttgcgcgaagagaacgaaaagcgcagccatcacaaggaccattccgactcagaatccactagtagcgacaattcagggcgcagaagaaagggaccattcaaaacaattaagtttggaacgaatatcgaccttagtgatgacaagaaatggaaactacagttacacgaactgacgaaacttccagcgttcgtgcgggtggtttctgctggaaatttgctatcccacgtggggcacacgatattgggaatgaacacagtgcagttatatatgaaggtgcccggatctcgcacacccggccaccaagaaaataacaacttttgttccgtgaacatcaatatcggcccaggtgattgtgagtggtttgtggtccctgaggggtactggggagtgcttaacgatttctgcgaaaagaataacctgaattttctcatgggatcttggtggccaaatttggaggacctgtatgaggcaaacgtgccggtgtacaggtttatccagagaccaggagaccttgtgtggataaacgcaggcaccgtgcactgggtgcaagcaattggctggtgtaataatatcgcatggaacgttgggcccctgaccgcctgtcagtataagctggcggtcgagcgttatgaatggaacaagctgcagagcgtcaaatctatcgttccaatggttcaccttagctggaatatggctcgtaacatcaaggtttctgatcccaaactatttgagatgataaaatattgtcttctcagaacgctgaaacaatgtcagacattgagagaggccttgatcgcggccggcaaggagatcatctggcacgggaggacgaaggaagagcctgcgcactattgttcaatttgcgaggtcgaggtttttgacctgctgtttgtaactaacgagtcgaatagtcggaaaacctatatcgttcactgtcaagactgcgcacggaagacaagcggaaacctggagaattttgtggtcctggaacagtataagatggaggatctgatgcaagtgtacgaccaattcacgctcgccccgccactgccgtcggccagtagctag

SEQ ID NO: 193700 - DNA, 4227 bp, synthetic construct
  misc_feature 1..4227: note = Description of Artificial Sequence: Synthetic coding sequence
  source 1..4227: mol_type = other DNA
atgaagagctgcggcgtgagcctggccaccgccgccgccgccgccgccgcttttggagacgaggagaagaagatggcagctgggaaggcctcgggggagagtgaagaagccagtccgagcctgactgccgaggagcgggaggctcttggcggtctggatagccgcctctttggatttgtgagatttcacgaggatggcgcgaggaccaaggccttgctggggaaagccgttaggtgctacgagtccctaattctgaaagctgaagggaaagtcgagagtgacttcttttgtcagctgggacatttcaacctgttgctcgaggattaccccaaagccctgagcgcttatcagaggtattacagcctgcagtcagactactggaagaacgctgcgtttctctacgggttaggcttggtgtacttccattacaatgctttccagtgggcgattaaagcgttccaggaagttctgtatgtggatcctagcttctgtcgagcaaaagagatccatcttcggttggggcttatgttcaaggttaatactgattacgaatcctcgctcaagcatttccaactggctttggtcgattgcaacccgtgcaccctgtctaatgcagaaattcaattccacatagcacatttatatgaaacccaaagaaaataccattctgccaaagaggcatacgaacaattgctccagaccgagaatctctctgcgcaggtgaaagccacagtcctccaacagctgggctggatgcaccatactgtcgatttgttaggagacaaggctactaaggagtcgtacgctatccagtacctgcaaaaatccctggaggcggaccctaattccggacagtcatggtatttcctgggccgctgctacagctctatcggtaaggttcaggacgcatttatctcgtaccggcagtcaatagataagtctgaggcctccgcagatacctggtgtagtataggcgtactctaccagcagcagaatcagcccatggacgcgcttcaggcctatatttgcgctgttcagctggaccacggtcacgcggctgcatggatggacctcggaactctctacgaaagctgcaatcagcctcaggatgctataaaatgctatctgaacgcgactaggtctaagtcctgctcaaacacttcggctctggcagccagaatcaaatacctgcaagcctgtaaaccccatcacccgaacaccgaaccagtgctggggctctcccagacaccaatatctcaacaaagccttcccctccatatgattccatcatcccaggtggacgatttgtcatctcccgcaaagcgtaaacggacaagctcccctacaaagaacacctccgataactggtccggggggcacgccgttagtcacccacccgtccaacagcaggcccactcctggtgcctcacccctcaaaagcttcagcatctggagcagttgcgagctaataggaataatttaaatcccgcccagaagctcatgctggagcagctcgagagtcagttcgtgctgatgcaacagcaccagatgaggcccactggggttgcacaagttaggtccaccggcattcccaatggtccgactgctgatagctccctcccaacaaactccgtgtccgggcagcagccccagcttgccctgacgcgcgtcccatctgtttctcagccaggagtccgaccggcttgccccggacagcctctggcaaatggaccctttagcgccggccatgttccgtgctccacctccagaaccttgggatctactgataccatccttatcggaaacaatcacatcacaggctccgggtccaatgggaacgtgccgtatctgcagagaaatgccctaacactgccccacaaccgcacaaacctcaccagcagtgcggaggaaccttggaaaaatcagctgtctaactctacccaagggctgcacaaaggacagagtagccactcagcaggccccaatggcgagagaccgcttagttcaactggcccaagtcagcatcttcaggcagccgggtctgggatacagaatcagaacgggcacccgacactcccaagcaatagcgttacgcagggcgctgctctcaaccatctaagcagccatacagccaccagtggcgggcaacaaggcattaccctgacaaaggaatctaagccttccgggaacatcctgactgtgcctgaaaccagtcggcacaccggagagacccccaacagtaccgcatcggtggagggattgcctaaccatgtccaccagatgacagcggatgcggtctgcagcccaagtcatggcgacagcaaatcgcccgggctgctatcttctgacaacccccagctgagcgcattattgatgggtaaggctaataataacgtgggcactggaacatgcgataaggtgaataatattcaccctgccgtccatactaagaccgacaactcggtagcaagcagtccaagctccgcaataagtacagccacgccaagcccaaaatccactgaacagacgactaccaatagcgtcacctccctgaattcaccacattccggtctgcacaccatcaacggagagggaatggaggagagccagagcccaatgaagaccgatcttctgttagtgaaccataaaccaagcccccaaattatccccagcatgtctgtctccatatacccctctagtgctgaagtccttaaggcgtgcagaaacctgggtaagaacgggttgagtaactcctctatcctcctggacaaatgcccccctccccgtcctccttcttctccatacccacccctgccgaaggataagctgaaccctccaactccctcaatctacttggaaaataaaagggatgcgttctttccgcccctgcaccagttctgcacaaaccctaacaaccccgtcaccgttatcagaggccttgctggcgccctcaagctggacttgggattattctctacaaaaaccctcgtcgaagccaataacgagcacatggtggaggtgcgcacgcagctgctccagcccgcggatgagaattgggatcctacgggtacaaagaaaatatggcactgtgagtccaaccggagccacacaaccattgctaaatacgcacaataccaagcctctagcttccaggagtctctgagggaagaaaatgaaaaacgatctcaccataaggaccattctgactcagagtcaaccagctcggataattcagggagacgcaggaagggccccttcaaaacaattaaattcggcaccaatattgacttgagcgacgataaaaagtggaagctgcagctgcacgagctcactaaactccctgccttcgttagggtagtctcagctggcaacttactgagtcatgtaggccacacgatcctgggtatgaacaccgtgcaactatatatgaaagtccccggctcgagaacccccggccatcaggaaaataataacttctgctcggtaaatataaacatcggccctggcgattgcgaatggttcgtcgtgcctgaggggtactggggtgtgctgaacgatttctgcgaaaagaacaacctcaactttctgatgggaagctggtggccgaacctggaggacctctacgaggctaatgtaccggtctacaggtttattcagcgcccaggggacctggtgtggatcaatgcagggacagtgcactgggtgcaggctataggctggtgtaacaacatcgcatggaatgtcggcccactgactgcttgtcagtacaaactggctgttgagaggtatgaatggaataagcttcagtccgtgaaatccatcgtgcccatggtgcatttgtcttggaacatggccaggaatattaaggtctcagacccaaagttgttcgaaatgattaaatactgcttgctgaggactctgaaacagtgccagacattacgcgaggccctgattgccgcaggaaaggagattatatggcacggccgtaccaaggaggaaccggctcattattgtagcatctgcgaggtggaagtcttcgaccttttattcgtaactaatgaaagcaatagtcggaagacttatattgtacattgtcaggactgtgctaggaaaacttccgggaatttggaaaatttcgttgttctggagcagtataaaatggaagacctgatgcaggtgtatgatcaattcacacttgcacctccactgccatccgccagtagttag

SEQ ID NO: 193701 - DNA, 3000 bp, synthetic construct
  misc_feature 1..3000: note = Description of Artificial Sequence: Synthetic coding sequence
  source 1..3000: mol_type = other DNA
tgaggcaccctgtacgagagctgcaaccagccccaggacgccatcaagtgctaccttaacgcaactcgctccaagtcttgttctaatacatccgcactggcagcaagaatcaaataccttcagaatacctcggacaattggtccggggggcacgctgtctcccaccccccagtccaacagcaggcccactcatggtgcctgactcctcagaagctacaacaccttgagcagttgagggctaacagaaataatcttaatcccgcccagaagctgatgctggagcaactggaaagccagttcgtgttgatgcaacaacaccagatgcgcccgacaggcgtcgcccaagtcagaagtaccgggatccctaacggccctaccgccgactcaagcctcccaacaaattcagtgagcggacaacagccccagctggcactgacacgagtgccgtctgtgtcccaacccggtgtgagacctgcctgtcccggacaacccttagccaacggacctttctcagcaggtcatgtgccctgtagcactagcaggacactcgggtcaactgatacaatcctaatcggcaataaccacatcaccggctccgggagcaacggcaatgtgccgtatctccagcgcaacgctctcactctccctcataaccggactaatttgacgagctcggcggaagaaccctggaagaaccaactgagtaattccacccaggggctgcataaaggccagtccagtcacagcgctggacccaatggagagcggccgcttagctccacaggcccatctcagcatctgcaagctgcgggtagtgggatccagaatcagaacggacacccaaccctaccatccaattccgtcacccaaggcgccgccctcaatcacctgtcttcccacacggcgacctccggcgggcagcagggtattaccctgaccaaggagtcaaagccttccgggaacatcctgaccgtgcccgagacatccaggcataccggggagactcctaatagcacagcttccgtcgaaggcctgcctaaccacgtccatcagatgacagcggacgctgtttgttctcccagtcacggggattctaaatcaccggggctccttagctctgataacccacagctaagcgccctcctgatgggaaaagcaaataacaatgtcggaacagggacttgcgacaaggttaacaacattcatcccgcagttcataccaaaacggacaactccgtggcatcaagcccttcttccgcgatcagcactgcaactccaagccccaagagtactgagcagactaccacaaactcagtcacgagcctcaattctccccactctggtctgcacacaatcaacggggagggaatggaggaatctcagtctccaatgaagaccgacttattgctggtgaatcataagccatccccacaaatcattccctctatgtctgtcagcatttacccaagcagtgccgaggtactgaaagcctgtaggaatttagggaaaaatggactgtccaacagctctattctcctggacaagtgtccacctcccaggccaccgagttccccctaccccccacttcccaaagacaagctgaatcctcccactccctccatttatcttgaaaataaacgggatgctttcttccctcccttacaccagttctgcacgaaccctaacaacccggtcaccgtcattcgggggcttgctggcgcacttaaattggatttaggcctctttagtaccaagaccctggtggaggctaacaacgagcacatggtggaagttcggacccagctcctccagcccgcagatgaaaattgggatcccaccggcactaaaaagatatggcattgtgagtctaacagatctcacacaacaatcgcaaagtatgcccagtatcaggccagcagctttcaggaatcactgagggaagaaaacgagaaacgctctcatcacaaggaccactctgactccgaatcaacatcctctgacaatagcgggaggcggcgtaagggcccattcaagaccatcaagttcggtaccaatatcgatttatccgatgataagaaatggaaacttcagttgcacgagctcaccaagctaccggccttcgtcagggtcgtgtcagccgggaaccttttaagccatgttggtcatactatcttgggtatgaacaccgtacagctatacatgaaggttcccggtagcagaacccctggccaccaagagaataacaatttctgtagcgtgaacattaacatcgggccaggggattgcgaatggttcgtcgtgcctgagggttactggggcgtgctcaatgatttctgtgagaagaacaatctgaacttcctcatgggctcatggtggcccaatcttgaggatctgtacgaggctaacgtgcctgtttacaggttcatccagcggcccggagacttagtctggatcaatgcggggactgtgcactgggtgcaggcaatcggatggtgtaacaacatagcctggaacgtggggccgctgacagcgtgtcaatataaactcgctgtggagcgctacgaatggaataaactgcagagcgttaagtctatagttccaatggtgcatctgtcttggaacatggcccgcaacataaaagtgtccgatcccaaactatttgagatgatcaagtattgcctcttacgtaccctgaagcagtgtcagacacttagagaagccctgattgctgccggaaaggagatcatctggcacggtcgcacaaaggaggagcctgcacactactgcagtatctgcgaggtggaagtgttcgatttactattcgttacaaatgagtctaattcaagaaagacatatatagtccactgccaagattgtgccagaaaaacatccgggaatctggaaaatttcgtagtgctagagcagtacaaaatggaagacctgatgcaggtttatgaccagttcaccctcgctccacctttgccaagcgcgtcgtcctag

SEQ ID NO: 193702 - DNA, 486 bp, synthetic construct
  misc_feature 1..486: note = Description of Artificial Sequence: Synthetic coding sequence
  source 1..486: mol_type = other DNA
tgagcccggaacatcaaggtgagcgaccccaagctgttcgagatgatcaaaatattttccctgtctccgaatttccgcgccgaaaagtgcttaagggatcacttagtccaaccactcagatccaatggcgaaccagagccgctcaggtttactggcgaatattgtttgctgaggaccctgaagcagtgccaaaccttgagagaagccctcatcgctgcagggaaggaaatcatatggcatggcagaactaaggaagagcccgcccattattgctcaatctgtgaggttgaggtgttcgacttgcttttcgtgactaacgaatccaattctcgcaagacttacatcgtccactgtcaggactgtgcaagaaagacttctggaaatctggagaatttcgtggttttagagcagtataagatggaggacttgatgcaggtgtacgatcagtttacactcgctccccccttgccatcagcctcttcatag

SEQ ID NO: 193703 - DNA, 3135 bp, synthetic construct
  misc_feature 1..3135: note = Description of Artificial Sequence: Synthetic coding sequence
  source 1..3135: mol_type = other DNA
tgaaacaagaccaagctgctgcccagcatcgaggaggcctggagcctgcccattcccgccgagctcaccagccggcaaggcgcaatgaacaccgctcagcaagcttgcaagccccatcaccccaataccgagcccgtgttaggcctgagccaaactcctataagccagcagtctctgccgctgcatatgattccctcatcccaagtggatgatctaagctcccctgcaaaacggaagagaacctcatcaccaactaagaacacaagtgacaattggagcggagggcacgccgtgtctcatccgcccgtgcagcagcaggcccactcttggtgtctgacccctcagaagttacagcatttagagcagctgcgggcaaatcgtaacaatctgaatccagcgcagaagcttatgttggagcagctggagagccaatttgtgttaatgcagcagcaccaaatgcggcctaccggcgtcgcccaggtcagatcgacaggcattcctaatggacccactgcggactcgtcgttgccaactaactctgtgtctggccagcaaccccaactcgccctgaccagggtcccctcagtgagtcagcctggtgtgagacccgcctgccctggacagccgcttgcaaatggaccttttagtgccgggcatgtcccctgctctacaagcagaaccctgggatcaacagatacaatcctgattggcaataaccatataaccggatccggcagcaatgggaatgtgccttacttgcagcgcaatgctttgactctgcctcataatcggaccaacctgacatcctctgctgaggaaccgtggaagaaccagctgtctaattctacgcagggactacataaggggcagagttcacactcggctgggcccaacggcgagcggcccctttcctccaccggcccttctcaacatctgcaggccgctggatccgggatccaaaaccagaatggtcacccaacgcttcctagcaatagcgttacacaaggcgccgccctaaaccacctgagtagtcacaccgcgacctctggtgggcagcagggtattaccctgacgaaagagtccaaaccttccggaaacatcctaacagtgccagaaacgtcccgccacaccggggagacacctaattctacagcatcggtggaagggcttcccaaccacgtgcaccagatgactgccgatgccgtttgctcaccatcacatggggatagtaaaagcccggggctgctctctagtgacaatccccagctcagcgccctcctcatgggtaaggccaataacaacgtcgggaccggcacatgtgataaagtgaataatatccatccagcggtacatacgaagaccgacaactctgtcgcttcaagcccttccagcgcaatttctacagctacccctagccctaaatctacggaacagaccacaactaattctgttacttccctcaatagcccacattcgggcctgcatacaatcaacggagaaggtatggaggaatctcagagtcctatgaagacagatcttctgctggttaaccacaagccctctccacaaattatcccgtccatgagcgttagcatttacccgagtagtgctgaagttctaaaagcctgtagaaacctgggaaagaacggactctccaacagttcaatcctgttagataaatgcccaccgccgcgaccaccaagctccccctatcccccattgccaaaggacaaactaaatccaccaacaccctcgatatatctcgaaaataaaagagatgctttttttcccccgcttcaccaattttgtacaaaccctaataatcctgtgactgtcatccggggattagcaggggctctgaaactggacctgggcctgttttccacaaagacactggtagaggccaacaacgaacacatggtcgaggtcaggacgcagcttctccagcctgccgatgaaaactgggacccgaccggtacaaagaagatatggcactgtgaaagtaaccggagtcacaccacgatcgctaagtacgcacagtaccaagcctcatctttccaggagagcctacgtgaggaaaacgaaaaacgatctcaccataaagaccactcggactcagaaagcacttcatcagacaatagtggaaggagaaggaagggcccctttaagaccatcaaatttggcaccaacattgacctgtcagatgataagaaatggaagctccaactgcacgagttaactaagctccccgcattcgtgcgagtcgttagtgccggaaatctgctctctcatgtggggcacactattctcgggatgaacacggttcaactgtacatgaaggtgcctggttcgcggacccctggccatcaggagaacaataatttctgttcagtgaacatcaacattggtcccggcgactgtgaatggtttgtggtgccggagggctactggggcgtgctaaacgacttttgtgagaagaataatttaaacttcctgatgggttcctggtggccaaatctcgaagacctttacgaggccaatgtacctgtctacaggtttatccagcgacccggtgacctagtctggataaacgccggcactgtccactgggttcaggcgatcggatggtgtaataatatcgcctggaatgtggggccactcacggcttgtcagtataaactagcagtggaaaggtatgaatggaataagctacagtcagtcaaaagtattgtgccaatggttcacctgtcctggaatatggctcgcaacattaaggtctctgacccaaagctgttcgagatgatcaaatattgtctgctgagaactctcaagcaatgtcagactctgcgcgaagcgcttatcgctgccggcaaggagatcatctggcacggcaggacaaaagaagagcctgcccactactgcagcatctgcgaggttgaggtctttgatctcctttttgttactaacgagtcaaatagccgtaagacttatattgtgcattgtcaagactgtgcacgaaagacctccggcaacctggagaatttcgtggtccttgagcagtacaagatggaggacctgatgcaagtgtacgaccaatttactttggcgcctccattgccttccgcttcatcgtag

SEQ ID NO: 193704 - DNA, 675 bp, synthetic construct
  misc_feature 1..675: note = Description of Artificial Sequence: Synthetic coding sequence
  source 1..675: mol_type = other DNA
tgactgcaggcctacatctgcgccgtgcagctggaccacggccacgctgccgcctggatggatctgggaaccctgtacgaatcatgcaatcaacctcaggatgcgatcaagtgctacttaaatgctaccagaagcaaaagttgtagtaatacttctgccctggcagcaagaattaaatacctgcaggcccagctgtgcaacctgccccagggttctctgcagaataaaacgaaactgcttccaagcatcgaagaggcctggtcattacccattccggcggaactcacaagtcggcagggcgcaatgaataccgcacagcagaacacaagcgataactggtctggcggtcatgctgtgtcccatcccccagttcagcagcaggcccacagttggtgcctcacaccacagaagttgcagatgcggcctacgggcgtggcccaagtgagatccacgggaattcccaatggtccaacagccgactcaagcctccccaccaacagcgtgagtggccagcagccccagctggctctgactcgggtgccctctgtgagccagccgggcgtgagaccggcatgtccagggcagcctctggctaacgggccatttagtgccggccacgtgccgtgctcaacctcacggaccctgggctccaccgacacaatactgattggctag

SEQ ID NO: 193705 - DNA, 516 bp, synthetic construct
  misc_feature 1..516: note = Description of Artificial Sequence: Synthetic coding sequence
  source 1..516: mol_type = other DNA
agcctgcagaacaagaccaagctgctgcccagcatcgaggaggcctggagcttgcccataccagctgaacttacaagtaggcagggagccatgaatacagctcagcagaacacttcagacaattggagcggaggtcatgctgtaagccaccctccagttcaacagcaggcacacagctggtgtctgacaccccaaaaactgcagcacctcgagcaactgcgggctaatcggaacaaccttaatccagcccaaaagctcatgctcgaacagttagaatcacagtttgtgctgatgcagcaacatcagatgcgccccacaggggtcgcgcaggtgagatcaactgggatcccaaacggtcctaccgcagactcttcgctccccactaacagcgtgtctgggcagcagccccagctagccttaaccagagtcccatccgtgagtcagccaggcgtgcgtcctgcttgtccagggcaacctttggcaaatgggcccttctgtagaccctgcagtctttag

SEQ ID NO: 193706 - DNA, 4071 bp, synthetic construct
  misc_feature 1..4071: note = Description of Artificial Sequence: Synthetic coding sequence
  source 1..4071: mol_type = other DNA
atgaagagctgcggcgtgagcctggccaccgccgccgccgccgccgcggcgttcggtgacgaggaaaaaaagatggcagcaggaaaagcttctggggagagcgaagaggcttctccttcccttacagctgaggagcgagaggcactaggagggttagattcaagactgttcggttttgtccggttccacgaggacggtgcgcggacgaaggcactgctggggaaggccgtgaggtgttatgagagcctcatcctcaaggctgaagggaaggttgaaagcgactttttctgtcaactcgggcattttaatttgttgctagaagattatcccaaggcactaagcgcttaccagagatattacagtctccagagtgattattggaaaaatgccgccttcttatacggattaggtctggtgtactttcactataatgccttccagtgggctatcaaggccttccaagaggtgttgtacgttgacccctcattctgcagagctaaggaaattcatctccgcctagggctcatgtttaaggtgaatacagattacgaatcctctctcaaacatttccaattggctctggtagactgcaacccgtgcacactgagcaatgccgagatacagttccatattgctcatctatatgagacacagcgtaagtaccactctgctaaggaggcatatgaacagctcctgcagacagagaatcttagtgcacaggtcaaagcgacagtgctccaacaactcggttggatgcaccacacagtagacctcttgggggacaaagccactaaggagagctatgctatccagtatcttcagaagtcactcgaggccgatccaaattcaggccagtcatggtacttcctgggaaggtgttactcaagcattggcaaggtccaggatgcgtttattagctaccgccagagcatcgataagagcgaagccagcgccgacacatggtgctcaatcggggtgttgtatcaacagcagaaccagcctatggatgccctccaagcgtacatttgcgctgttcagcttgaccacgggcacgccgctgcttggatggacctggggaccctgtatgaaagctgcaatcagcctcaggatgcgattaagtgctacctcaatgctacccgctcaaaatcctgctctaacaccagcgccttggccgcccggatcaagtatttgcagaacaccagcgataattggagcggggggcatgccgtgagccacccccccgtgcaacagcaagcccactcctggtgtttaaccccccagaagctccaacacttggaacagctcagagccaaccggaataatctcaatccagcccagaaacttatgctcgagcagcttgaatctcaattcgtactcatgcaacagcatcagatgcggcctaccggtgtggcacaggtgaggagcaccggcatccccaacggaccgaccgccgatagctccttacccactaactctgtttctgggcaacaaccacagctggcactgacacgggtcccttcagtgtctcagcccggagtacgacccgcgtgtcctgggcagccgctggctaatggaccgttctccgcaggacatgtcccctgcagcaccagccggactctgggaagcaccgataccatcttgattggaaataatcatattactgggtctggctcgaatggaaacgtcccatacctgcagaggaacgccctaactctgccgcataacagaacaaatctcaccagctcagctgaagagccctggaagaaccagttgtcgaacagcacacaggggctgcacaaagggcaaagcagccatagcgctggcccaaatggcgagcggccactgtcttctaccggcccttcacagcacttacaagcggcaggaagcggcattcaaaaccaaaatgggcatccgacgctgccttcgaatagcgtgacacagggggccgcccttaaccatttaagtagccacaccgctacttcgggcggacagcagggcataacactgaccaaagagtccaaaccttccggcaacattctcacagtgcccgagacttctaggcacacaggcgagaccccaaactcgaccgctagcgtcgagggcctgccaaaccacgtgcatcagatgacggccgacgcggtatgcagcccttcccacggggattcaaaaagtcctggcctcctgagcagcgacaatcctcagctctccgccctgctgatgggaaaggctaataacaatgtgggaacgggcacttgcgacaaggtgaataacattcacccagctgtgcatacaaaaaccgataattcagtggctagctccccatcatccgccattagcacggccaccccgagtccaaagtccacagaacagacaacgacaaactcggtcacttcactgaactctccccatagtggcctccatacaatcaatggggaaggcatggaagaatctcaaagtccaatgaaaacagacttactcttggtcaatcacaaaccttcaccccagattatcccttcaatgagtgtgtctatatatccttcgagtgcagaggtcctgaaggcttgtagaaatttgggaaagaatggacttagtaactcttcaattcttctcgataagtgccccccaccacgccccccatcttctccttatccgcctctacccaaagataaactgaatccacctacaccctcgatctacttagaaaataaacgggacgccttcttcccccctctgcatcaattctgcaccaaccccaataaccccgtcacagtgatccgggggctggctggagcactgaagcttgacctaggtctgtttagtaccaaaacactggtggaagccaacaacgagcacatggtggaggtgagaactcagctgctgcaaccggcagacgagaactgggacccgaccggaaccaagaagatatggcattgcgagtctaaccgcagtcataccactattgccaagtatgcgcagtatcaggcctcttcctttcaggagtctctccgcgaggagaatgagaaaaggtctcaccataaggatcattctgactcggagagcactagcagtgataacagcggcaggaggagaaaaggccctttcaagacaatcaaatttggaacgaatatagacctgtccgatgataagaagtggaagcttcagctccatgagttgacaaagctccctgcttttgtccgtgtcgttagcgcagggaaccttctcagtcatgtaggtcatacaattcttggcatgaacacagtccaactttacatgaaagtgcctgggagccgcacaccaggtcaccaggaaaataacaacttctgttccgtaaacataaacatcgggcccggggattgcgagtggttcgtggtgccagagggctactggggagtgctgaacgatttttgtgagaagaataacctcaactttctcatggggtcatggtggcccaacctggaagacctctatgaggctaatgtccctgtatatcggtttattcagagaccaggggacctggtgtggattaatgccggcacagtgcactgggtgcaggccattggatggtgcaacaatatcgcctggaatgtcggtcccctgaccgcatgtcagtataagcttgcagtggagcgctatgaatggaacaagctgcagagcgttaagagcatcgtaccaatggtccacctgagctggaacatggctagaaacattaaagtgtccgatccgaagctttttgaaatgatcaaatattgtctcctcagaacactgaaacagtgtcaaacccttcgggaagccctgattgctgccggcaaggagatcatctggcacggaaggaccaaggaggaaccggctcactactgctccatctgcgaagtagaggtgtttgacctcctgttcgtgacaaacgaatcgaactccagaaaaacctacatcgtgcattgccaggattgtgcccgaaaaacaagcggtaacctggagaacttcgttgtgctggaacaatacaagatggaagatctgatgcaagtttatgatcagtttactctagctcccccgctcccatctgcatcatcatag

SEQ ID NO: 193707 - DNA, 675 bp, synthetic construct
  misc_feature 1..675: note = Description of Artificial Sequence: Synthetic coding sequence
  source 1..675: mol_type = other DNA
atgaagagctgcggcgtgagcctggccaccgccgccgccgccgccgcagccttcggtgatgaagagaagaagatggccgccggaaaggcctccggagagtctgaggaagcgagcccttccctgaccgccgaagaacgcgaggccctaggaggactagattcacggctgtttggatttgtgcgctttcatgaggatggagctcgcacgaaggcacttcttggaaaagctgtccgctgctacgagtctctcattctgaaagcagagggaaaggtggaatcagactttttttgccaattaggacatttcaatctgcttttggaggactacccaaaggccctatcagcctaccagcgatattatagtctccagtccgattattggaagaatgccgcctttttatacgggctgggactggtgtattttcactataatgccttccagtgggccataaaggcatttcaagaagttctgtacgtggatccctctttctgcagggcgaaggaaattcacctgaggttggggctcatgtttaaggtgaatacagactacgaaagtagcctgaaacattttcagctagccctggtagactgtaatccctgtactctcagtaatgcagagattcagtttcatatcgcacacctttatgagacccaggtcggttgcataacactctag

SEQ ID NO: 193708 - DNA, 3969 bp, synthetic construct
  misc_feature 1..3969: note = Description of Artificial Sequence: Synthetic coding sequence
  source 1..3969: mol_type = other DNA
atgaagagctgcggcgtgagcctggccaccgccgccgccgccgccgccgcgtttggggatgaagaaaagaagatggccgcaggaaaggcctctggagaatcagaagaagccagtcccagtctgacggctgaggagagggaggcactcggaggtctggactctagattgttcggcttcgtcaggttccatgaggacggagcgagaacaaaagcgctgctggggaaagcggtgcgatgttacgagtctctaattctcaaggcagagggcaaagtcgaatcagactttttctgccagttaggtcattttaatctcctgctggaagactatcccaaagctctgtccgcgtaccagcgatactactccctccagagcgactactggaagaacgcagcatttctgtacggcctgggactcgtgtatttccactataacgcattccagtgggccattaaggccttccaggaggttttgtacgtagacccctccttctgtcgtgccaaggaaattcacctgcgtttgggattaatgttcaaggtaaatactgactacgagtctagcctcaagcactttcagctggccctagtcgactgcaatccctgcacactgagtaatgccgagattcagtttcacatcgcccatttgtacgaaacacaacgcaagtaccatagcgccaaggaagcctacgagcagctcctacagactgagaatctctctgcgcaagtgaaagcaaccgtgctgcaacagctcggttggatgcatcataccgtggatttgctgggggacaaggcgacaaaggagtcctatgccatccaatacttacaaaaaagcctcgaggccgacccaaactccggacagtcatggtatttcctcggcagatgttattccagtataggcaaggtgcaggatgcttttattagttatcgtcagtccattgacaagtcagaagctagcgccgacacctggtgttcaattggagttctttatcagcagcagaaccagccgatggacgctctacaggcctacatctgtgccgttcaactggaccatggccacgccgccgcatggatggatctgggaaccttatatgagtcctgtaaccagccccaggatgcgatcaagtgctatttgaacgcaacacggagtaagagctgtagcaacacctcagccctagcggcaaggatcaagtatttgcagaatactagtgacaattggtccggaggacatgcagtaagtcacccacctgtgcagcagcaggcccactcttggtgcctcactccacaaaagttgcagatgagacccactggcgtcgcccaagtgcggagcacaggaatccctaacggacctacagccgatagctctctgcccaccaatagtgtatctggccagcagccacagttagcacttaccagggtgccctctgtatcacagccaggcgttcgtcctgcctgtcccggtcaacctttggcaaacggacccttttctgctgggcacgtgccgtgttccacgagccggacgctcgggagtacagacacaatcttgatagggaacaatcacatcactggtagcggcagtaacggtaacgtgccatatctgcaaaggaacgcgctgacactgccccataaccgtaccaacctgaccagtagcgcggaggaaccatggaaaaaccagcttagtaactctacacagggcctccacaaagggcaatcctctcactctgcagggccaaacggggagcggcccttgtcttcaactggcccttctcagcacctgcaggctgcgggctccggcattcagaaccaaaacggtcaccctacgcttcctagcaactctgtgacacagggggctgccttaaaccatctgtcctcacacactgcgacgagcggtgggcagcaaggcattacattaaccaaagagagcaaaccgtcgggaaacattctcacagttcccgaaacatcacgacacaccggagaaacaccaaactccactgctagcgttgagggcctcccgaaccatgtacaccagatgaccgctgacgctgtgtgtagtccatctcatggcgactccaagagtccaggactgctttcctctgacaacccccaactttcggctcttctgatggggaaagctaataataacgtcggcactggcacttgcgataaagtcaacaacatccatcccgctgtccacacaaaaaccgataactcagtagcgtccagtccctctagtgccatcagcacggcaacaccttcaccaaaatcaaccgagcagacaactactaacagcgtgacctccctgaatagtccacattcaggcctgcacacaatcaacggcgaagggatggaggaatcccagtcccccatgaaaacagacttgctgctggttaaccacaagccgtctccacagattataccctcaatgagtgtctcgatctatccgagctcagccgaggtgctaaaggcctgtcgtaatcttgggaagaatggcctcagcaattcatcaattttgctggacaagtgtccccctccgcggccgccatctagcccttatccgcccctgccgaaagacaagctgaatccccccaccccctcaatctacctcgaaaataagcgggatgccttcttcccgcccctgcaccagttttgtactaatccaaacaatccagtgacagtgattcgtggcttggccggcgccctcaaattagacctggggcttttctcaaccaagaccctggtggaagcaaataacgaacatatggttgaagtacgcacccaactgctgcagcctgccgacgaaaactgggacccaactggaaccaaaaagatctggcattgtgagagcaatcgcagccacactactattgcaaagtacgcccagtatcaagcatcttcgttccaggaaagtttaagggaggaaaacgaaaaacgctcacatcataaggatcactcagatagcgaatcgacatcttccgacaatagtgggagacgccgtaaggggccctttaagactatcaagtttggcacaaacattgatctgtccgacgataagaaatggaagcttcagctgcacgagctgactaaactgcccgcctttgtccgcgtcgtgtccgccgggaaccttctgtcccacgtcgggcatacaatccttggcatgaataccgtgcagctgtacatgaaggtcccggggtctagaaccccaggccaccaggaaaataacaatttttgctccgttaatatcaatattggtcccggggactgcgaatggttcgtcgttccggaggggtactggggcgtgcttaatgacttctgtgagaaaaacaatctcaatttccttatggggagctggtggcccaacctggaggacctttacgaggccaacgttcccgtatatcgcttcatccagaggccgggtgatctggtctggatcaatgccgggactgtgcactgggtgcaggctataggatggtgcaataatatcgcctggaacgttggccctctcacggcttgccagtacaaactcgcggtggaacggtacgagtggaataaactgcagtccgttaagagtatcgttcctatggtacatctgagctggaacatggccagaaacataaaagtgagcgatcccaaactttttgaaatgatcaaatactgcctattaaggactttgaagcaatgccaaacattacgggaagcattgattgccgcagggaaggagatcatttggcatggccggactaaggaagaacccgcgcactattgcagcatctgtgaagtggaggttttcgacctcctgttcgtgacgaatgaaagtaactcccgcaaaacttatatagttcactgtcaggattgtgcgagaaaaacctccgggaatctggaaaactttgtggtgctggagcagtacaaaatggaagatctcatgcaagtctacgaccagtttacattagcaccccctctcccatccgcctcttcctag

SEQ ID NO: 193709 - DNA, 5049 bp, synthetic construct
  misc_feature 1..5049: note = Description of Artificial Sequence: Synthetic coding sequence
  source 1..5049: mol_type = other DNA
atgcaccgggccgtggacccccccggcgcccgggccgcccgggaggcctttgctctgggaggcctcagctgcgctggagcctggtcctcatgcccaccccaccctccacccaggtctgcctggctgcccggcggacgatgtagtgcttcgatcgggcaaccccctcttcccgctccactgccaccttcacacggttcttcatccggccacccgagtaaaccctattatgctccaggtgcccccacacccaggccacttcatggaaagcttgaatcactccatggttgtgtgcaggccctgctgcgcgagcctgcccagcccggcctgtgggaacaactgggtcagctctatgaaagcgagcacgattcagaagaagcaactcgctgctatcactcagccctgaggtacgggggtagtttcgccgaactggggccaaggattgggagattgcagcaggcccagctttggaatttccacacagggagttgtcagcaccgcgccaaggtgttacctcctctggaacaagtgtggaatctgcttcatctcgagcataaacggaactatggagctaagcggggcggaccccctgttaaaagggccgcagaacctccagttgtgcagcctgtgcccccagccgctcttagcggccctagtggcgaggaaggactatctccaggcgggaagcggagaaggggttgcaattccgaacagactgggctaccccctggactcccactcccacctcctcctctaccccccccacccccacccccccccccgccaccaccaccactccctgggctcgctacatccccaccattccagctgacaaaaccggggctttggagtactcttcacggcgacgcttggggaccagagaggaaggggagtgccccaccggaacgccaggagcagcggcactctctcccccatccctatccctacccggccccagcctacaccgcacatccaccagggcatcgccttgtaccagccgcccctcctggcccaggcccccgccctccaggcgccgaatcccacggatgcctgcctgccacccggccgccagggtcggatttgcgtgagagccgtgttcagcgatcacgcatggactccagcgtgtcccccgcggctaccaccgcatgcgttccctatgcaccatcgcgaccaccggggctgcccggcactacaacgtctagttctagctccagctcctctaatacggggctgaggggcgtcgagccaaatcccggcatccccggcgctgaccactatcagaccccagccttggaagtgtcccaccacggtcgcctcgggccatcagctcattccagccggaagccattcctgggtgcccctgccgccacccctcacctttcgttgcccccaggaccctcctctcccccccctcctccatgtcccaggttgttacgtcctcctcccccccccgcttggctgaaagggcccgcgtgtcgagcagcaagagaggatggcgaaatcctggaggaactgttcttcggaaccgagggcccgcctagacccgcccctccaccccttccccaccgtgagggatttttgggtccaccagccagtagatttagcgtggggacccaggattctcatacaccgcccacgccccctactccaacaacctccagcagcaatagtaacagcggatcgcactcaagtagcccagccggcccagtgtccttcccaccccccccctatcttgcacgtagcatagaccctctgccgcgtccaccctctcccgcccagaacccacaggatccaccacttgtgccactgactctggcactcccgcctgccccgccttcatcttgccatcagaacaccagtggctctttcagacgccctgaatctccccgtccgagggtctcattccccaaaacgcccgaggtgggccctgggccaccccctggccccctttccaaggctccccagccggtgccaccaggagtcggcgagctgcccgcacgcggcccaagactcttcgacttcccgcctaccccactcgaggaccagtttgaggaacctgccgaatttaaaatcctgcctgacggcttagccaatatcatgaaaatgttggacgagtccatccgaaaggaagaggagcaacagcagcacgaggctggcgtggccccacaacctcccttaaaggagcctttcgcctcgctgcagtcgccgtttcctactgatacggccccaacaactaccgctcccgccgtagcagtcaccactacaaccactacgaccactacaaccacagctacacaggaagaagaaaagaaacctcctcccgctcttccccctcctcctcccttagccaagttccctccaccaagtcagcctcaacctcctccaccgcctccacctagccccgccagcctcctcaaatctttggcctcggtcctagagggccagaaatattgctatcgcggaacaggggctgccgtctccacaagaccaggcccattgcctacgacccagtactcacctggaccaccctccggagccactgctctacctcctacatctgcagcccccagcgcgcagggctcaccccagccgtctgcctcatcaagcagtcaattcagtacttccggtgggccttgggcccgtgagagaagagccggagaggagcccgtgcccggcccgatgacaccaacccagcccccaccgccattgagccttcctccagctcggagcgaaagcgaggttctagaggagatcagccgagcctgtgagacactcgttgaaagggtgggaagatctgccactgaccccgcagatcccgtagataccgccgaacccgctgactctgggaccgagagactcttacctccggcacaagctaaggaagaagctggcggggtggccgctgtctccggaagctgcaaacgcaggcaaaaagaacatcaaaaggaacatagacggcaccggcgcgcctgcaaagatagtgttggcagaagaccaagggagggtcgggctaaagctaaagcaaaggtgcccaaagagaaaagtaggagggttctgggtaatctagatttgcagagcgaggagatacagggccgggaaaagagccggccagatctagggggagccagcaaggccaagcctccgaccgctccggcgcccccatccgctcctgcccctagtgcccaaccaaccccgccaagcgccagcgtacccggcaaaaaggccagagaggaagcacccggcccccccggggtgagtcgggctgatatgctgaagctacggtcactttccgagggacccccaaaggagctcaagattcgactcattaaggtagagagcggtgacaaggagacatttattgctagcgaggttgaagagcggagattgagaatggccgacctgacaatctctcactgcgccgctgatgtcgttcgcgcaagccggaacgccaaggttaaggggaaatttcgagaaagctacctgtcacctgcacagtccgtgaaaccaaaaataaacacggaggagaagctgcccagagagaaactgaaccctccaaccccctccatctatctcgaatccaaaagagatgcattttcgcctgtccttctgcagttctgcactgaccccaggaatcctattactgtaattcgggggctcgccggcagtttacgattaaatctgggcttattctcaactaaaaccctcgtggaggccagcggtgagcacacggtggaggttaggacccaagtgcagcagccctctgacgaaaattgggatctgactggaaccaggcagatctggccctgtgaaagcagtcggtcgcatacgacaattgccaaatatgcccaataccaggctagctcgttccaagaatctctgcaagaggaaaaggagagcgaggatgaagagtcagaggagccggacagcactaccggaacccctccgagtagcgctcccgatcccaaaaatcaccacatcatcaagttcggtaccaacattgacttgtccgacgcaaaacggtggaaacctcagcttcaggaactgctcaagctgccagcctttatgcgcgtcacaagcaccggtaacatgctgagccatgtaggccacactatactcggaatgaacaccgttcagttgtacatgaaagtccccggatcacggaccccaggccaccaggagaataacaatttctgcagtgtgaacataaatattggaccaggcgattgtgagtggttcgccgtgcatgagcattactgggaaacaattagtgcattctgtgatcggcatggagtggactaccttaccggctcatggtggcccattctcgacgatctctatgcctctaacatccccgtctatcgtttcgtgcagaggccaggggatctggtgtggattaacgccggtactgtccattgggtgcaggcgactggatggtgtaacaatatagcttggaatgtggggccactgaccgcttaccaataccagctcgcactcgagcgctatgagtggaacgaggtgaagaatgtgaagtctatcgttcctatgatccatgtttcatggaatgtggcccgtacagtgaagatcagcgaccctgacttattcaaaatgatcaagttctgccttctacagagcatgaagcactgccaagtgcagagagaatctctggtccgcgctggcaagaagatcgcatatcagggtcgggtgaaggatgagcccgcctactactgcaatgagtgtgatgtagaagtcttcaatattctgttcgtcacgagcgaaaacggcagtcgcaacacatatctcgtgcactgcgagggatgtgcccggcgccggtccgccggcctccagggggtggtggtactggagcaataccgcacggaggaattagcccaagcctacgacgcattcaccctcgtgcgggcccggagggctcgtggacagcgaagaagagcattgggtcaggccgcagggacgggcttcggttcaccggccgcgccctttcctgagccaccaccggcattctctccgcaggcgccagcctcaaccagtaggtag

SEQ ID NO: 193710 - DNA, 4932 bp, synthetic construct
  misc_feature 1..4932: note = Description of Artificial Sequence: Synthetic coding sequence
  source 1..4932: mol_type = other DNA
atgcaccgggccgtggacccccccggcgcccgggccgcccgggaggctttcgctcttggtggcttgtcatgtgcgggcgcatggagcagttgtccacctcacccaccgccacgaagcgcgtggctgcctggtggccgctgcagtgccagtattgggcagcctccgcttccagcccccctgccaccctcccacggctcgagctctgggcaccctagtaagccttattacgcacccggagctcctacacctcgccccctccacggaaaactggagagcctccatggttgcgtccaggcgctgcttcgagagcctgcccagccaggcttgtgggaacagctcggtcaactctacgagagcgaacatgatagtgaggaggcgactcgatgctaccacagcgctctgcgctatgggggctctttcgcagagttagggccccgaattggaagattgcagcaggcccagctttggaatttccatactggcagctgccagcaccgggcaaaggttctccctcccctggagcaggtgtggaatctactacatctcgaacacaagaggaactacggagcaaaaagaggggggccgcccgttaaacgggccgctgaaccgcctgtggttcagcccgtcccacctgccgccctgagcggcccttcgggcgaggagggcttatccccaggaggcaagcgccgccggggctgcaacagcgagcagaccggtttgccccccggtcttcctctcccacctccccctctgccgccacctcctccaccacccccccctccgccccccccattgcccgggctggctacctctccacccttccagcttacaaaacctggcctctggagcacgttacacggcgatgcatggggcccggagagaaagggcagtgcacctcctgagcgccaagaacagcggcatagtttgcctcatccgtacccctatcctgctcctgcatacacagctcacccgccaggccaccggcttgtgccagcagccccacctgggccgggtcctagacctcctggtgcagagagtcatggctgcctacctgcgacccgcccccccggaagcgatctgcgggagtcacgagtgcaaaggtccaggatggattctagtgtcagtccagcggccacaactgcctgcgtcccctatgcgccctcacgcccgcctgggctgccgggaaccaccacttcaagctcttcaagctctagtagtaacactggattgcggggcgtcgaacccaatcccggcataccaggcgccgatcattaccagactcccgctctcgaggtgtcccatcacggccgactagggccttccgcccactctagcaggaagcccttcctcggtgccccagccgcaaccccccacctcagcctcccacccgggccatcctccccaccgccccccccatgtccccggcttttgcggcctccgccacccccggcctggctgaaggggcccgcgtgccgggccgcccgcgaggacggcgagatccttgaggaactcttttttgggaccgagggaccaccccggcccgctccaccccccttgccccatagagaaggctttctgggccctcctgcctcgagattctccgtcgggacacaagattcccatacccccccaacccctcccacaccgaccacaagttccagcaactccaactcagggagccactcgtcctcacctgcgggccctgtgtccttccctcctccgccctatctggccaggtcaatcgaccccttacccaggcctccatctcccgcacaaaacccccaagatccacccttggtgcccttgaccctcgccctcccaccagcacccccgagcagctgtcatcagaacacctccggaagttttcgcagacccgagtccccaaggccccgagtgtcatttcccaagactccagaggtgggcccaggcccaccacccggtccgctctcaaaagcaccccagcccgtaccccctggggtgggcgagctgcctgcaagaggacctcggctctttgatttccctccgactccccttgaggaccaatttgaagaaccagcggagtttaagatcttaccagatgggctggcaaacatcatgaagatgctggatgaaagtattcggaaggaagaggagcagcaacagcatgaagctggcgtcgccccccagcctcccttaaaggagccattcgcttctctgcaatccccattccccaccgataccgcccccactacgacggccccggccgtagctgttactacaaccactacgaccaccacaactaccaccgccacccaggaagaagagaagaaacctccgcccgccctgccccccccccccccacttgccaagttccctccaccctcacagccacagccgccaccgcctccgccaccatccccagcaagcctattgaaaagtctggcgtctgtcctcgaaggtcagaaatattgctatcgcgggactggagccgcggtcagtactcgacctggacccttaccaacgactcagtactcacctgggccgccttcaggggccacagcactgcctcccacgtccgctgccccctctgcccagggttcaccacagccaagcgcaagcagcagctcccagttttctacctcaggagggccttgggctagggaacgcagagccggcgaggagccagtgccagggcccatgaccccaacacagcccccacccccactgtcactgcctcctgcccggtccgagtccgaagtgctggaagagatttcccgtgcttgcgagacgctcgtggagcgcgtggggcgcagcgctaccgatcccgcggatcctgtggatacagccgaacctgctgacagcggcaccgaacggctgttgccaccagcacaagccaaggaggaggccgggggtgttgctgctgtgtcaggttcctgtaaaagacggcagaaagagcatcagaaggagcatagacgtcaccgcagagcgtgcaaggactcagtcggccgccgtcctcgggaaggtagggccaaagctaaagcgaaagtgcctaaggaaaagagtcgcagggtgcttggaaatctggacttgcagtccgaagaaatccagggacgagagaaatccaggcccgacctcgggggtgcatctaaggctaagccccctaccgcacccgcccccccatccgcgccggctccaagcgcacagcccacacccccgtcagccagtgtacccggcaaaaaggcccgagaggaggcccccggtccacccggtgtgagtcgcgccgatatgctcaagctgagatctctctcagaggggccacccaaggagttgaaaatccggctgattaaggtcgagtctggggacaaggagacatttatcgcgagcgaggtggaggagcgaagactgcgaatggccgaccttacaatttcgcattgcgcggccgatgtggtacgcgcatcaagaaacgctaaagttaagggaaaattccgagaatcgtacctgagcccagctcagtcagttaaacctaagatcaacacagaggagaagttaccgagagagaagctgaacccacctacccctagcatttatctggagagcaagagggacgctttttccccggtcctccttcaattctgtaccgacccaagaaacccaatcacagttatacggggcctcgccggttccttgagactaaacctgggcctgtttagcactaaaacactggttgaggccagtggggagcacactgtggaggtcaggacccaagtgcaacagccctctgatgaaaattgggacctgaccggtacccggcagatctggccctgcgagtcctcaagatctcacacaacaatcgccaagtacgctcaataccaagcaagcagtttccaggagtccttgcaagaggagaaggagagtgaggacgaagaatctgaggagcccgattcgacaacggggactcctccctccagcgcccccgaccccaagaatcatcacatcataaaatttggaaccaacatcgacctgtctgacgccaagcggtggaaaccgcaactgcaggagttgctgaaactgccagcttttatgcgcgtgacaagcacaggcaacatgctctcccatgtgggtcacactatcctgggaatgaacacagtgcagttgtacatgaaggtcccggggtccaggacccctggacaccaggagaacaacaacttctgcagcgtgaacatcaatataggcccgggtgattgcgagtggttcgctgttcatgaacactactgggaaactatctctgccttttgtgacagacatggggtcgactatcttacaggaagttggtggcccatcctggacgacctttatgcttccaatattcccgtatatcggtttgtgcaacgacctggggatttggtgtggataaatgcggggaccgttcattgggtgcaggcaaccggctggtgtaacaatatcgcatggaacgtcgggcctctgactgcataccagtaccagcttgcactggagagatatgagtggaacgaagttaagaacgtgaagtccatagtaccaatgattcacgtgtcttggaatgtcgcccggaccgtgaagatttccgatcccgatctcttcaaaatgataaagttctgcttactgcagagcatgaagcattgccaggttcagcgggagagcctcgtcagagcaggcaaaaaaatcgcttatcaaggaagagtcaaggatgagccagcatattactgcaacgaatgcgatgtagaggtcttcaatattttgtttgtgacctctgaaaatggaagccggaatacttacttggtacattgcgaagggtgcgcaagacgaagatcagccgggttgcagggggttgtcgtgctggaacagtatagaactgaagaacttgcgcaggcctacgatgctttcaccctcgctcccgctagtacctcccggtag

SEQ ID NO: 193711 - DNA, 1245 bp, synthetic construct
  misc_feature 1..1245: note = Description of Artificial Sequence: Synthetic coding sequence
  source 1..1245: mol_type = other DNA
atgcacagccggggccgggagatcgtggtgctgctgaacccctggtctatcaacgaagccgtatcttcctattgcacgtattttattaagcaggacagcaagagcttcggaattatggtttcatggaaggggatctattttatactgactttgttctgggggtcattctttgggtcgatcttcatgctgtcgccgtttctgcctctcatgttcgtgaatccgtcctggtataggtggatcaataatagattggtcgcaacttggttgaccctcccggtggccctcctggaaacaatgttcggtgtcaaggtaatcatcacaggagatgcttttgtccctggcgagcgaagcgtgataatcatgaatcacagaactcgcatggactggatgtttctgtggaattgtctgatgagatattcctacctgcgcctggagaaaatctgtttgaaagcaagccttaagggcgtgcccgggttcggctgggctatgcaggccgcagcgtacattttcatccacagaaaatggaaggatgacaagtcacacttcgaagacatgattgactacttttgtgacatccacgagcccctccaacttctgatcttcccagagggcacggatcttactgagaactcaaaatccagatcaaacgcatttgcagagaagaacggcctacaaaagtatgaatacgtgctgcatcctagaacaactgggtttaccttcgtggtcgatagactgagggagggtaaaaatttggacgctgtgcatgatattaccgtggcgtatcctcacaacatccctcaaagtgagaaacacctcctgcaaggcgactttcccagagaaatccatttccacgtgcaccgctatcccatcgacacgcttccgacatccaaagaagacctgcaactctggtgtcacaaaaggtgggaggagaaggaggagcgactccgctcgttctatcaaggagagaagaacttctactttacaggacagagcgtgatcccaccatgcaagtccgagctgcgcgttctggtagtaaaactcctgtccatcctgtattggactctgttctcccctgctatgtgcctgctcatatatttgtacagtctcgtgaaatggtatttcatcataacaattgtgatttttgtgcttcaagagcgaatcttcgggggactagaaatcatagagttggcttgttatagactcctgcataagcagccccacctgaactccaagaagaacgagtag

SEQ ID NO: 193712 - DNA, 927 bp, synthetic construct
  misc_feature 1..927: note = Description of Artificial Sequence: Synthetic coding sequence
  source 1..927: mol_type = other DNA
atgcacagccggggccgggagatcgtggtgctgctgaacccctggtccattaatgaggcagtctcttcttactgcacatattttattaagcaggactctaagtccttcggcatcatggtgagctggaagggaatttatttcatcctcaccctattttggggatccttcttcggctccatctttatgttgtccccattcttaccgctgatgtttgttaatcctagctggtacagatggatcaacaacaggctggtggcaacgtggctgacactgcccgtggcgctgctcgagaccatgttcggggtcaaggtcatcatcacaggtgatgctttcgtgcctggagaacgaagtgttattataatgaaccacaggacgcgcatggattggatgtttttgtggaactgcctgatgagatacagttacctgcgtttggaaaaaatctgtctgaaggcctctctaaagggagttccaggttttggctgggccatgcaggccgccgcctacattttcatacaccggaaatggaaggacgacaaaagtcactttgaagatatgatcgattatttctgcgacattcatgagccattacagctgctcattttccccgaagggacggatctgactgaaaatagcaagtcaaggtctaacgcctttgccgagaagaacggccttcaaaaatacgagtacgtactccacccacgcaccactggctttacattcgtcgtggatcggctcagggagggccgcaggcagtctgagggcagtaagggtcccctgcagggcgagcttcagattactgcacaggggaaccagcgcggccataaacaaatggaaaagcactctatgctgatggattggaagaaccagtaccgtgagataggacatacggcccagagtaacctacagattcagtgctatagtcactag

SEQ ID NO: 193713 - DNA, 927 bp, synthetic construct
  misc_feature 1..927: note = Description of Artificial Sequence: Synthetic coding sequence
  source 1..927: mol_type = other DNA
atgcacagccggggccgggagatcgtggtgctgctgaacccctggtctatcaacgaggctgtctcctcttactgtacatacttcattaaacaagattctaagagctttgggatcatggttagctggaaagggatctactttatacttacactcttctggggttcgttcttcgggagcatcttcatgcttagtccgtttctgccactgatgttcgtcaacccatcatggtaccggtggattaacaaccgtctggtcgccacatggctcacacttccagttgccctcctagagaccatgttcggtgtgaaagtcatcattacaggggacgcattcgtacccggcgaacgatctgtgatcattatgaatcatcggacccggatggactggatgttcctgtggaattgcctgatgcggtattcttacttaaggctggaaaagatttgcctgaaggcctccctgaaaggtgtgcctgggttcgggtgggcaatgcaagccgccgcatacatttttatccacaggaagtggaaagatgataaaagtcattttgaggacatgattgactatttctgcgacatacacgagcccctccagctcctcatttttcctgaaggtacggacctcaccgagaacagcaagtctagaagtaatgctttcgcagaaaagaacggcctgcagaaatacgagtacgtgcttcatcccagaacaaccgggtttaccttcgtggtggatcggctgagagagggaagacgccagtcagaggggtctaaaggtccacttcagggcgaactgcagatcacggcccagggtaatcagcggggacacaagcaaatggaaaaacatagcatgctgatggactggaagaaccagtacagagaaattgggcacaccgcccagtccaacctgcagatccagtgttactcgcactag

SEQ ID NO: 193714 - DNA, 1131 bp, synthetic construct
  misc_feature 1..1131: note = Description of Artificial Sequence: Synthetic coding sequence
  source 1..1131: mol_type = other DNA
atggtgagctggaagggcatctacttcatcctgaccctgttctggggatccttcttcgggtcaattttcatgctatcgcctttcctgccgctgatgtttgtcaaccctagttggtacagatggattaacaaccgactggtggccacctggctgaccctgcctgtagcactcttagagaccatgttcggagtgaaagttatcattacaggagatgcctttgtacctggggagcgctctgtgattatcatgaaccacagaactcggatggattggatgtttctctggaactgtttgatgcgttactcatatctgcgcctggagaagatttgccttaaagcctctcttaagggcgtgcccggatttgggtgggcaatgcaagctgcagcctatatcttcatccacaggaagtggaaagacgataaatcccattttgaagacatgatagattatttctgcgatattcatgaaccactgcaactcttaattttccctgagggcactgaccttactgagaactccaagagtaggtccaatgctttcgcggaaaaaaatggtctgcagaagtacgagtatgttctgcatcctcgcactacaggattcactttcgtggttgacagactgcgggaaggcaagaatctggacgccgttcacgatatcactgtggcctacccacacaacatcccccaaagcgagaaacatctgcttcagggagactttccccgggaaattcattttcatgtgcatcgctatcctatagacaccctgcccacatcaaaagaggacctccagctgtggtgccacaaacggtgggaagaaaaagaagaacgtctcagaagcttttatcagggagaaaagaatttttattttaccggacagagtgtgatccccccatgcaaatccgagctccgggtgctggtggttaaactcctttccatcctttactggaccctgttttccccagcaatgtgcctgttaatctatctgtactctctggtcaaatggtatttcataatcacgattgttatctttgtgcttcaggaaaggattttcggagggctagagattattgagctggcctgttaccgcctgctccataaacagccacatctgaacagcaagaagaatgaatag

SEQ ID NO: 193715 - DNA, 993 bp, synthetic construct
  misc_feature 1..993: note = Description of Artificial Sequence: Synthetic coding sequence
  source 1..993: mol_type = other DNA
atggtgagctggaagggcatctacttcatcctgaccctgttctggggaagtttcttcggcagcatatttatgctgagcccctttttacccctgatgttcgtgaatcccagctggtacagatggattaacaacaggcttgtggccacctggctaaccctaccagtcgcattgctcgagaccatgttcggcgtcaaggtgattattacaggagacgcatttgtgcctggtgaacgatcagtgatcataatgaatcatcgtacccgcatggactggatgtttctctggaattgcctcatgaggtattcttaccttcgactggagaaaatttgcctgaaagcctctttaaaaggggttcccggattcgggtgggcgatgcaggccgcagcctatatctttatccaccggaagtggaaggatgacaaatcccacttcgaagatatgatagactacttttgcgatatccatgagcctctgcagctccttattttccctgagggcactgatttaacagaaaactctaaaagccgctcgaacgcatttgctgagaaaaatgggcttcagaaatacgagtacgtgttgcatcccaggactactgggtttacctttgttgttgatcgcctgcgcgaggggaaaaacttagatgcagtgcatgacataacagtcgcctacccccataatatcccacagagcgaaaagcaccttctgcagggggactttccacgcgagattcattttcacgtacataggtatccgatcgacactctcccaacttccaaggaagacctgcagttatggtgtcacaagaggtgggaggagaaggaagagaggctacgtagcttttatcagggagagaagaacttttactttactggccagtccgtaattcccccgtgcaagtctgagctcagagtgctcgttgttaaactttataccgtcctagaccccgttcagccctgcaacgttcctactcacatctttgtgcagtcttgctag

SEQ ID NO: 193716 - DNA, 462 bp, synthetic construct
  misc_feature 1..462: note = Description of Artificial Sequence: Synthetic coding sequence
  source 1..462: mol_type = other DNA
atgcacagccggggccgggagatcgtggtgctgctgaacccctggtccatcaacgaagccgtgagtagctattgtacatactttattaagcaggactccaagagcttcggcatcatggtgtcttggaagggaatctatttcatattaactttgttttgggggagttttttcggatctatttttatgctaagccccttcctgccgctgatgtttgtgaatccttcgtggtaccgatggattaacaacaggctggtcgccacatggcttacattgccagtggctcttctagaaacaatgtttggcgtaaaagtgatcattacgggtgatgccttcgtaccgggcgagcgatctgtgatcatcatgaaccacaggacccgaatggactggatgtttctttggaattgcctgatgaggtacagctatcttcggctcgagaagatctgcctgaaggcgagtttgtag

SEQ ID NO: 193717 - DNA, 1131 bp, synthetic construct
  misc_feature 1..1131: note = Description of Artificial Sequence: Synthetic coding sequence
  source 1..1131: mol_type = other DNA
atggtgagctggaagggcatctacttcatcctgaccctgttctggggatcgttttttggcagtatattcatgctctctccttttctcccactgatgttcgtgaacccgagctggtaccgctggattaacaataggttagtggccacatggctcaccctccctgtcgcccttcttgaaacaatgtttggcgttaaagtcattataaccggcgatgcctttgtgccaggcgagaggagcgtgattattatgaaccataggactcggatggactggatgttcctgtggaattgtctgatgcggtatagttatctccgactggaaaaaatctgtttgaaggcatcactcaagggggtgcctggcttcggatgggcaatgcaggccgctgcttatatattcatccacagaaagtggaaggatgataagtctcactttgaagacatgattgattacttctgtgacattcacgagcctttacagcttctgatcttccctgaaggaaccgatttaaccgaaaacagcaagagcaggagtaacgcgtttgcagagaagaatggattgcagaagtacgaatacgtgctgcaccccagaacaacaggcttcacctttgtggtcgataggctgagagagggaaagaatctcgatgcagtccacgatattacagtggcttatccacacaatatacctcagagtgagaagcatctgcttcagggggatttccctagggaaattcacttccatgttcatcggtaccctattgacacactcccgactagcaaggaggatctacagctgtggtgccataaacgctgggaggagaaggaagaaagattgaggtctttctatcagggcgaaaagaatttttactttaccgggcagtccgtaattcccccctgtaagtcagagttgcgggtgctggtggtgaagttactttctatcttatattggacgttattttctcctgcgatgtgcctcctgatctacttgtattcgttagtcaaatggtactttattattaccatagtgatctttgttctccaagagcgcatctttggggggttggagataatcgagttggcttgctacaggttgctgcacaagcagcctcatctcaacagtaagaaaaacgaatag

SEQ ID NO: 193718 - DNA, 1095 bp, synthetic construct
  misc_feature 1..1095: note = Description of Artificial Sequence: Synthetic coding sequence
  source 1..1095: mol_type = other DNA
atggccgccatcagcaccagcatccccgtgatcagccagccccagtttaccgctatgaacgagccacagtgcttttacaacgagtcaatcgcattcttttataacagaagtggcaagcacctggcaactgaatggaacaccgtgagtaagctggtaatggggctagggattaccgtatgcatcttcatcatgctcgcaaatttattggtcatggttgccatttatgtgaataggcgcttccattttcccatttactatctcatggcaaacttagctgccgcggatttttttgcggggctggcttacttttatctcatgttcaacaccggccccaacacccgacgactcacggtgtcaacatggctattgagacagggccttattgatacaagcctgaccgcctctgtggctaatctgctcgctattgcgattgagagacacatcacagtttttcgtatgcagctgcacacccgcatgagcaacagacgcgttgtggtggtgatagtggtcatttggactatggctatcgtcatgggagccataccctcagtcgggtggaattgtatctgtgacatcgagaactgtagcaatatggcaccactgtactctgactcctaccttgtgttttgggcaattttcaacctcgtgacctttgtggtaatggtggtgttgtacgctcacatcttcggttacgtgcgtcagcgcactatgcggatgagccgccattcctccggaccaaggcggaatcgtgatactatgatgtcactactcaaaacagtggtcatcgttttgggtgcctttattatctgctggaccccagggttggtcttgctgctccttgatgtgtgttgccctcagtgtgatgtgctggcatacgagaagttcttcctcctgctcgcggaatttaactctgccatgaaccccattatttactcctacagagataaagaaatgagcgctactttccgacaaatattgtgctgccagcgctcagaaaacccaactggcccgactgagggcagcgatcgctcggcatctagcctgaaccacactattctggctggtgtgcacagtaatgaccactctgtcgtctag

SEQ ID NO: 193719 - DNA, 1095 bp, synthetic construct
  misc_feature 1..1095: note = Description of Artificial Sequence: Synthetic coding sequence
  source 1..1095: mol_type = other DNA
atggccgccatcagcaccagcatccccgtgatcagccagccccagtttactgccatgaatgagcctcagtgtttttataatgagagtattgcctttttttacaaccgatctgggaagcacctggctacggaatggaacaccgtgagtaagttggtcatgggtcttggtataactgtgtgcatcttcataatgttggccaatcttctcgtcatggtagctatctacgtgaatcggaggttccattttcccatttattatctgatggctaacctggctgcagccgatttctttgcaggcctggcctatttctacctgatgttcaacaccggtcccaatacacgcaggctgaccgtcagcacatggctgctgcgccagggcttaatcgacaccagtctaacagctagcgtcgcaaacctgctagctatagccatcgaaagacatattaccgtgtttcgcatgcagctgcacactcggatgtcgaatcggagagtggtcgtcgtgattgtcgtgatttggaccatggcaatagtgatgggagccatcccctcggttgggtggaattgcatctgcgacatcgaaaattgcagtaacatggccccactttattctgactcgtacctggtgttttgggcaatctttaatctggtgaccttcgtcgtaatggttgtgctctatgctcatatatttggctacgtgaggcagagaactatgcgcatgagccggcacagttctggtcctcgtcgaaatagagacaccatgatgtccctgctgaagactgttgtgatcgtcctgggagcttttattatttgctggactcccggcttagtcctcctgctgctcgatgtctgctgtccacagtgtgacgtactagcttacgagaagttcttcctcctgcttgccgaatttaacagtgctatgaaccctattatatactcatatagggataaggagatgagcgctacctttcgccagattctgtgctgtcagaggtcagaaaatccaacaggccctacggaagggagcgaccgtagtgctagcagtttgaaccacaccattttagccggcgtccacagcaacgaccacagcgtagtgtag

SEQ ID NO: 193720 - DNA, 1095 bp, synthetic construct
  misc_feature 1..1095: note = Description of Artificial Sequence: Synthetic coding sequence
  source 1..1095: mol_type = other DNA
atggccgccatcagcaccagcatccccgtgatcagccagccccagtttacggcaatgaacgagccacagtgtttttacaacgagagcatcgccttcttttataaccgatccggaaagcatctggcgaccgaatggaacaccgtctcgaaactggttatgggactgggaatcaccgtttgcatttttataatgctggcaaatctgttagttatggtggctatctatgttaatcggcggttccactttccaatttactatctgatggccaatctggccgccgcagatttttttgcaggactcgcctacttctatttgatgttcaataccggaccaaacactcgtagactgacagtgagcacttggcttctccggcagggtcttatagatacctctttgactgccagtgtggccaacttgctcgcaattgcgattgagaggcatattacagtcttccgcatgcaacttcacaccaggatgtctaaccggcgtgtggttgtcgtgattgtggtcatttggaccatggctattgtcatgggagccatcccgagtgttggttggaactgtatttgtgacatcgaaaattgtagcaatatggcccccttgtacagtgattcctatctcgtgttttgggcaattttcaatctcgtgacattcgttgtgatggtggttctctatgctcacatcttcggatatgtacggcagcgtaccatgcgcatgtcccgacattcatctgggccacgaaggaaccgcgatacgatgatgtccttgctgaaaacagtcgtcatagttctaggtgcatttattatctgctggacccctggcttagtgctgctactcctggacgtgtgctgcccacagtgtgatgtgcttgcatacgagaaattttttctccttctagccgagttcaatagtgctatgaatcctattatctacagctatcgcgataaagagatgtccgctacttttaggcagattctctgttgccagcgtagcgagaaccccaccgggccaactgaggggtcagatagatctgcatcaagcttgaatcacactatcctggcaggagtgcattcaaacgaccactcggtagtatag

SEQ ID NO: 193721 - DNA, 549 bp, synthetic construct
  misc_feature 1..549: note = Description of Artificial Sequence: Synthetic coding sequence
  source 1..549: mol_type = other DNA
atggccgccatcagcaccagcatccccgtgatcagccagccccagttcactgctatgaatgagccgcagtgcttctataacgagagcattgcctttttttataataggtcaggcaagcacctggccacagaatggaacacagtgtccaaactggtcatgggacttggcattactgtctgcatttttataatgttggccaacttgctggtcatggtggcaatctacgtgaacagaaggtttcattttccaatctactacctaatggctaacctggccgcagcggactttttcgccggcttagcttacttttacctcatgttcaacacaggcccaaacacccgcaggctgactgtgtcaacgtggctcctgaggcagggcctcatagacacttccttaaccgcttccgtggccaacttgctggctatcgcaatagaaagacatataacagtgtttcgtatgcaactgcatacgcgcatgtctaatcgtagggtggtcgttgtgatcgtggtgatctggacgatggcgatcgtgatgggcgctattccatag

SEQ ID NO: 193722 - DNA, 1041 bp, synthetic construct
  misc_feature 1..1041: note = Description of Artificial Sequence: Synthetic coding sequence
  source 1..1041: mol_type = other DNA
atgaacgagccccagtgcttctacaacgagagcatcgccttcttctacaaccgtagtgggaagcacctcgctaccgagtggaacacagtctccaagctcgtcatggggctggggattactgtttgtatcttcatcatgctagccaacctgctggttatggtagctatttatgtcaacaggagattccactttcccatatattacctcatggctaatctggccgcggccgatttcttcgccggcctcgcctacttttacctaatgtttaatacagggccgaacacccgaagactgactgtctctacctggttgctccggcaaggtctgatagatacgtccttgactgcgagtgtggccaatttgctcgccattgcaatagaaaggcacataactgtatttagaatgcagctgcacacccggatgtcgaacagaagggtggtggtggttatcgtggtcatttggacaatggcgatcgtgatgggggcaatcccctctgtggggtggaattgcatctgcgatattgagaattgttctaacatggctccgctttattcagacagctacctcgtcttttgggcaattttcaacctggtgacctttgtagtgatggtggtgctctatgctcacatctttgggtacgtgcgacagcgtacgatgaggatgtcccgtcactccagcggtcctcgccgaaatcgggatacaatgatgtcactgcttaaaaccgtggtgatcgtgctgggagcgtttattatatgctggacacctgggttggtgctgctcctgctcgatgtatgctgcccccagtgcgacgtcctcgcctacgaaaagttctttttactgctggcggaattcaattcagcgatgaaccccatcatttactcataccgggacaaagaaatgtcagccacttttcgacagatactgtgttgccagcggtcagagaaccccactggacctaccgaaggatctgacagatctgcctccagtctgaaccataccatcttggctggtgttcactctaacgaccattccgtggtttag

SEQ ID NO: 193723 - DNA, 1098 bp, synthetic construct
  misc_feature 1..1098: note = Description of Artificial Sequence: Synthetic coding sequence
  source 1..1098: mol_type = other DNA
atggaggagggcgcccagcggagcggcgccctgggcgccccccaccagttcaccgccatgaatgaaccccagtgcttttacaacgagtctatcgctttcttttataaccggagcggaaagcacttagccactgaatggaatacagtgagcaagcttgtgatgggcttgggaatcaccgtatgcatcttcattatgcttgcgaatttactggtgatggtggcgatctacgtgaacagacggttccacttccccatctactatctaatggctaacctagccgcagccgattttttcgctggcttggcatatttctacctgatgttcaacacgggacctaacacacggaggctaacagtgtcaacctggctgctgaggcagggactgatcgataccagtttgaccgcttccgtggcgaatctgcttgctatcgctatagaaagacacataaccgttttcaggatgcagctccacactcgcatgtcaaaccgccgggtggtggtggtgattgtagtgatttggacgatggcaattgttatgggcgccatccccagcgttggctggaactgtatctgcgacatcgaaaactgcagcaacatggctcctctttacagtgattcctacttggtattttgggcgatctttaatctagtgacatttgtggtgatggtggttctctacgcacatatctttggctatgtccgtcagaggactatgcgcatgagtcgacattcctccggccccagacgcaacagggacaccatgatgagcctgctgaagacagtagttattgtgttaggagcctttattatttgttggacacctggcctggttctgctgctcctggacgtgtgttgcccgcagtgtgatgtactcgcttatgagaagttcttcctcttgcttgccgagttcaatagcgctatgaatcccattatctattcctatagagataaggaaatgtcagccacttttcggcagattctgtgttgccaacggagtgagaatcctactggaccgaccgagggctctgaccgcagtgcatcgtcactgaaccatacgatattagcaggagttcattctaatgatcactccgttgtgtag

SEQ ID NO: 193724 - DNA, 1098 bp, synthetic construct
  misc_feature 1..1098: note = Description of Artificial Sequence: Synthetic coding sequence
  source 1..1098: mol_type = other DNA
atgctgctgctgctgatccccgcccacagcagcgtgctggagaacgaattcacagccatgaatgaaccccaatgcttctataatgagagcattgcatttttttacaacaggtcaggcaagcacttggcaactgagtggaataccgtttctaagctcgtgatggggctaggcatcacggtttgtatcttcatcatgttggctaacctcttggtaatggtggccatctatgtgaaccgccgcttccattttcccatttactatctgatggcaaatcttgctgccgccgatttcttcgcagggcttgcctatttctatcttatgtttaataccggacctaacacgaggcgcctcaccgtgtccacatggctgctaaggcaaggattaatagacaccagccttacggccagcgtggccaaccttctcgcaattgctatagagcgccacattactgtttttaggatgcaactgcacacgcgaatgtcgaaccggagagtggtggttgttatagtggtgatatggactatggcaattgtgatgggagctatcccaagtgtcggttggaactgtatatgcgacatcgaaaattgtagtaacatggcaccactgtactccgatagctaccttgtgttttgggctatatttaacctggttacttttgttgttatggtagttctgtatgcacacattttcgggtacgtccgtcagagaacaatgcgcatgtcaagacacagttcgggcccgcgaagaaaccgggatacgatgatgtctctgctgaaaaccgtggtcatcgtgctcggcgcgttcattatatgctggacccccggactggtgcttctgctgcttgacgtatgttgcccccagtgcgatgtcctcgcgtacgaaaagttctttcttcttctcgcagaattcaacagtgctatgaatcccattatctactcttacagagacaaggagatgtccgcaaccttcagacaaatattgtgttgtcagcgatctgagaaccctaccggccctacagaggggtcagatagaagcgcatcatcattgaatcacactatcctggccggcgtgcattcaaatgaccatagcgtggtttag

SEQ ID NO: 193725 - DNA, 1056 bp, synthetic construct
  misc_feature 1..1056: note = Description of Artificial Sequence: Synthetic coding sequence
  source 1..1056: mol_type = other DNA
atggtgatcatgggccagtgctactacaacgagaccatcggcttcttctacaataacagtggaaaagagctgtcatcacactggcggcctaaggatgtcgtagttgtggctcttggccttacggtgtccgtcttagtgttgctaacgaatctgctggttatcgctgcaatcgctagcaacaggcgtttccatcagccaatctactacttgctcgggaacctggccgccgcagatctgtttgccggggtagcttacctattcctgatgtttcataccgggcctcgcaccgctcgccttagtttagaggggtggtttctcaggcaaggcctcttagatacatctctaaccgcctcagttgccaccctgttagcgatagccgttgagaggcacaggtctgtgatggctgtgcagctgcactccaggctcccccgcggccgggtggtgatgctcatcgtgggcgtgtgggtcgccgccctcgggctgggccttctgccggcacattcttggcactgtctgtgtgccctcgaccggtgctctaggatggcaccgctactctctcggtcctatctcgccgtgtgggccctgtcaagtctcctggtgttcctgctcatggtggctgtgtacacccggatttttttttacgtgcggcggagggtgcagagaatggccgaacacgtgtcttgccatcccagatacagagagacaacactctccctcgtgaagacagttgtgatcatactcggcgctttcgtggtgtgttggacccccggacaggtcgtgctcctcctcgatgggcttggctgtgaaagctgcaatgtcctagcggttgagaagtatttcttgctcctggccgaggcaaattccttggtgaatgccgccgtttactcgtgtcgagacgctgagatgcgtcggacctttcgcagactgctctgctgtgcttgcctccgacagtccaccagggaatcggttcactatacatcttcagcccaggggggcgctagtacccgcattatgctccccgagaatgggcatcctcttatggattcaacactgtag

SEQ ID NO: 193726 - DNA, 1056 bp, synthetic construct
  misc_feature 1..1056: note = Description of Artificial Sequence: Synthetic coding sequence
  source 1..1056: mol_type = other DNA
atggtgatcatgggccagtgctactacaacgagaccatcggcttcttctataataactccgggaaggagctgtcatcgcattggaggccaaaggatgttgtggttgtcgcgctgggactgactgtgagtgtgctagtcctgcttaccaatcttttagttatcgccgccatcgcatctaatcgtagatttcatcagcccatttattatcttctgggaaacctcgcagccgcagatctgttcgcaggagtggcctacctgttccttatgtttcacacgggacccagaacagcaaggttgagcctcgagggctggttcctccgccaggggctcctcgacacctctctgacagcctcggttgctacgttgttggctattgccgtcgaaagacaccgcagcgtcatggccgtccagctgcatagcagactgcctagggggcgcgttgtgatgctgattgtaggagtgtgggtggctgcacttggcctgggccttctgccagctcactcatggcactgtctgtgcgccctcgatcggtgctcaagaatggccccactactgtcgaggtcgtacttagcagtttgggcacttagctctttactcgtctttctgctgatggttgctgtttacactcgaatatttttctatgttcggcggcgcgttcagcgaatggctgaacacgtcagctgccatcctagatatagggagacaaccttgagcttggttaaaacagtggtgataattcttggcgcctttgtcgtttgctggacgcctggccaggtagtgcttctgttggatggccttggctgtgaatcgtgcaacgttctggcagttgagaagtactttttgctgctcgccgaggctaacagcctcgtgaatgcggcagtgtactcttgcagagacgctgagatgcgccggacatttaggcggctcctatgttgtgcttgcctacggcaatccacccgagagtctgtacattatacctcctccgcccaaggcggtgcatccactcgcatcatgctccccgaaaatgggcatcctcttatggactctacactttag

SEQ ID NO: 193727 - DNA, 1062 bp, synthetic construct
  misc_feature 1..1062: note = Description of Artificial Sequence: Synthetic coding sequence
  source 1..1062: mol_type = other DNA
atgaacgagtgccactacgacaagcacatggacttcttctacaaccgcagcaacaccgatacagtggatgactggaccgggacaaaactggtaatagtgctctgtgtgggtactttcttctgtctgttcatatttttcagcaattctctggtgatcgccgccgttatcaagaaccgtaagtttcacttccctttttattacctcctcgccaatctggctgcggcggatttttttgcagggatcgcttatgtatttctgatgttcaacacagggcctgtttcaaagaccctgaccgtcaaccgttggttccttcgccaaggcctgctggactcttctctgacggcctcgctgaccaatttgctcgtcattgccgtggaacgacacatgtcgattatgcggatgcgagtacatagtaacttgacaaaaaagcgggtcaccctgctcatattgttggtctgggctattgctatctttatgggcgctgtgcctacgcttggttggaattgtttatgcaacatatccgcatgctcatcgcttgcgccgatatactcaagatcttacctcgttttttggaccgtaagcaatttgatggccttcttaataatggtcgtggtgtacctcagaatctacgtgtacgtcaagcgcaagacaaatgtcctgagcccacatacatccgggtccataagtaggcgcaggacccccatgaagctcatgaagacggtgatgaccgtcctgggagcattcgtggtgtgttggacccccggactggttgtgcttctcttggatggactgaactgcagacagtgtggcgtccaacacgtaaaaaggtggtttctgctcctggctttactgaattccgtcgtaaaccctatcatctattcttacaaggacgaggacatgtacgggaccatgaagaaaatgatttgttgcttcagccaggaaaaccccgagcgccgtccaagtagaattccctcgacagtgttgtccaggagcgacacaggaagtcaatatatcgaagactccatcagccaaggtgccgtctgtaataagagtaccagttag

SEQ ID NO: 193728 - DNA, 1062 bp, synthetic construct
  misc_feature 1..1062: note = Description of Artificial Sequence: Synthetic coding sequence
  source 1..1062: mol_type = other DNA
atgaacgagtgccactacgacaagcacatggacttcttctacaaccgcagcaatacggacacagtggacgactggacaggtacgaagctcgttatcgtgctttgcgtgggcactttcttttgtttatttatctttttctctaactctcttgttattgctgccgtcatcaagaatcgcaaatttcattttccgttctattatctgctggccaatctcgccgcagccgacttctttgcgggcattgcctatgtattcctaatgttcaacaccggtccagtgtccaagacactgaccgtaaaccgatggtttctgagacaaggcttgttagactctagtctgacggctagcctaactaacttactggtgattgcagtggagagacatatgagcatcatgaggatgagagttcatagcaacttaacaaaaaagcgggtcaccttgctaattctacttgtgtgggccattgctattttcatgggcgccgtgcccactcttggctggaattgtctgtgcaacatatcagcttgctctagcctggctcctatttacagccgatcctacctagtgttctggacagtttccaacctgatggccttcttaatcatggtggtggtatatcttaggatatacgtatatgtaaagcggaagaccaacgttctctccccacacacttcgggcagcatttccagaagacggactcctatgaagctgatgaaaacagtgatgactgtccttggcgcgtttgtcgtctgttggactcccggactggtggtactgctgctggacggcctaaattgtaggcagtgcggagtgcagcacgtcaagcgatggtttctgctattggcacttttgaattctgtggtcaacccgattatatactcctacaaagatgaagacatgtacggcacgatgaaaaaaatgatatgctgcttctctcaggaaaaccctgagagacggccctccagaattccgtcaaccgtgctatcacggtccgatacaggctcacagtacatcgaggacagtatctcacagggagctgtgtgcaataagagtacgtcctag

SEQ ID NO: 193729 - DNA, 1113 bp, synthetic construct
  misc_feature 1..1113: note = Description of Artificial Sequence: Synthetic coding sequence
  source 1..1113: mol_type = other DNA
atgggcgaccggcggttcatcgacttccagttccaggacagcaactctagcctgaggcccaggctagggaatgcaaccgccaacaacacctgcattgtcgatgattcatttaagtacaacctgaacggagccgtctacagtgtggtgttcatccttggtttaatcacgaatagcgtctctttgtttgtgttttgttttcgaatgaagatgagaagcgagactgccatcttcatcacaaaccttgctgtttccgacctcttgttcgtgtgcactctgccctttaaaatcttttataattttaatcgccactggccatttggagatactctttgtaaaatcagtggaacggcctttctgaccaatatatatggcagcatgctgttcctcacctgcatttctgtggatcgctttctggctatcgtgtacccctttagatcgagaactatcaggacacgaagaaacagtgccatcgtatgtgcaggcgtttggatcttggtgctgagtggcgggatttccgcaagcctgttctccacgaccaacgtgaacaacgctacgacgacatgtttcgagggctttagtaaacgtgtgtggaagacctatctaagtaagatcactatattcatagaggttgtgggctttattattcccctcatactgaatgtgagttgcagtagtgtcgtgttacggactcttcgaaagcctgcaaccttaagccagattggtaccaacaagaaaaaggttcttaagatgatcacagtgcatatggctgtctttgtagtctgttttgtcccatataattctgtgttatttttatacgcgctcgttcgtagccaagcaatcactaactgttttttggaacgatttgcaaagattatgtatccaataaccctgtgtctggctactcttaactgctgctttgaccccttcatatattacttcacgctggaatcctttcaaaagtctttttacattaacgcacacatccgaatggagagtctgttcaaaaccgagaccccattgacaaccaaaccatcattacctgccattcaagaggaagtatctgaccagacaacaaacaatggtggcgaacttatgctcgaatctaccttttag

SEQ ID NO: 193730 - DNA, 1113 bp, synthetic construct
  misc_feature 1..1113: note = Description of Artificial Sequence: Synthetic coding sequence
  source 1..1113: mol_type = other DNA
atgggcgaccggcggttcatcgacttccagttccaggacagcaactcaagccttagacctcggctgggtaatgccacagctaataacacctgcatcgttgacgacagctttaaatataacctgaacggcgcggtgtacagcgtcgtcttcattctggggctgatcacgaactctgtgtctctgtttgtcttctgcttccgaatgaaaatgaggtcagaaacggcaatttttataacgaatctggccgtgtctgacctgctgttcgtttgcacactgcctttcaagatcttttacaactttaaccgtcattggccttttggggatacgctgtgcaagataagcgggactgccttcttgaccaacatttatgggtcaatgctgttcctgacatgtatcagcgtggatagattcctggcgattgtctatccctttcgcagccgcacgattaggactagacgtaactcagccatcgtatgtgccggagtatggatcttggtactgtccggtggtatttcagcatccttgttctctacaacaaatgtgaataacgccaccacgacctgctttgaagggttttctaaacgggtgtggaaaacttacctgtccaagatcactatctttatagaggtggtcggattcataatccccttaattctgaacgttagctgtagctctgtggtgctgcgcacactccgcaaaccggccacactctctcagatagggaccaacaagaaaaaggtgctgaagatgattaccgtccatatggcagtatttgtggtctgctttgtaccctacaattctgtactgtttctttacgctcttgtgcgttcccaggctattacaaattgtttcctcgaacggtttgcaaaaatcatgtatcccattacgctgtgtctcgctacacttaattgctgctttgatccattcatctactatttcactttagaatcgttccaaaagtcgttttacatcaatgctcacattcgcatggagtcactcttcaagacagagactcctctcaccacgaagccgtctttaccggcaattcaggaagaggtgtctgaccagacgaccaacaacggcggtgaactgatgttagagtccacattttag

SEQ ID NO: 193731 - DNA, 1119 bp, synthetic construct
  misc_feature 1..1119: note = Description of Artificial Sequence: Synthetic coding sequence
  source 1..1119: mol_type = other DNA
atgctggccaacagcagcagcaccaacagcagcgtgctgccctgcccggactatagaccaactcatagactgcatctggtggtgtacagtctggttttagccgcggggctgcccctgaacgccctggcactgtgggtgtttttaagggcacttagagtgcactctgtggtcagtgtgtacatgtgcaacctggccgcctcagacctgctcttcacactgagcctgcctgtacggctttcgtactacgcacttcaccattggccatttccagatctgctatgtcaaactactggggccatttttcaaatgaacatgtatggctcttgtattttccttatgttgataaacgtagacaggtacgccgcgattgtgcatcctctgcgtctgcggcacctacggcgcccgagagtagcccgtttactgtgcctgggagtttgggcactgattctggtattcgcagtgccagcagctcgcgtgcatcggcctagtagatgtcggtacagagatttggaggtgagactgtgcttcgaatctttctcagacgagctgtggaagggccgtctactcccactggtcctgttagccgaggcattgggcttcctgttaccgctagccgccgtggtttacagctccggccgggtattttggacgctagcacgacctgacgctacacagagtcagcgcaggaggaagacagtcaggctactgttggccaacctggtcatatttttgctgtgcttcgtgccctacaacagcacgctcgccgtgtatggtctcttacgaagtaagcttgttgcagctagcgtgcctgcgcgagatcgcgtgcggggagtcctgatggtgatggttctcttggccggcgctaactgcgtccttgatcctctggtgtactatttttccgcggaaggctttcggaacactctgcgcggtctcggaaccccccatagagcccgcacaagtgctacaaatggtacgcgggccgccctggcgcagtcggagaggagtgcagttaccaccgatgctacccgaccagacgcagcatcacagggcttgctgcgcccaagtgactcacactccttgtcctcctttacccagtgtccacaggattcagccctttag

SEQ ID NO: 193732 - DNA, 1119 bp, synthetic construct
  misc_feature 1..1119: note = Description of Artificial Sequence: Synthetic coding sequence
  source 1..1119: mol_type = other DNA
atgctggccaacagcagcagcaccaacagcagcgtgctgccctgccccgattatcggcccacgcacaggctgcatttggtagtctactctctagttctagccgcagggcttccattaaatgcactggcactgtgggtgttcctacgtgccctccgggtccacagcgtggtcagcgtatacatgtgcaacttagcagcaagtgatctgctgtttaccttgtcgttgcctgtgcggctgtcctactacgctctgcatcactggccttttccggatctgctgtgccagacaactggagcaatttttcagatgaatatgtacggatcctgtatctttctgatgctcattaatgtggacagatacgcagctatcgtgcacccacttagactgaggcacctcaggcggccgcgtgtggctcgactactgtgcctgggagtctgggcactgatcttggtctttgccgtgcccgccgcacgagtgcatagaccctcacgatgcagatatagagatctcgaagtacgactgtgttttgaatccttttcagacgagctgtggaaaggcagactactccccctggtgctccttgccgaagcgctgggattccttctgcctctcgctgctgtggtttactcctcgggacgcgtattctggacactggctagacctgatgcaacccagagccaacggcggagaaaaacagttcgtctgctgcttgctaatctggtcatatttctcctttgcttcgtcccatataattccacacttgctgtgtacgggctcctgcggtctaagctcgtggccgcttctgtgcctgcacgggacagagtgcgaggagtgctgatggtaatggttctgttggcgggagcaaattgcgttctagatccactggtatactacttctccgcagagggtttccgcaatactctccgcggtctcggaacacctcacagagcgagaacttccgccacaaatggcacaagggcagccttagctcagtctgaacggagcgctgtgacgacagacgcaacacggcccgatgcagccagtcaggggcttttaaggcctagcgactctcatagtctaagcagctttacacagtgtccgcaggatagcgctctttag

SEQ ID NO: 193733 - DNA, 1290 bp, synthetic construct
  misc_feature 1..1290: note = Description of Artificial Sequence: Synthetic coding sequence
  source 1..1290: mol_type = other DNA
atgctggccaacagcagcagcaccaacagcagcgtgctgccctgccctgattatcgccctacccatagattgcacctggttgtttacagcctagtgcttgctgctgggctcccgctgaatgcactggcactgtgggtattcctgcgggcactgagggtgcatagcgttgtgagcgtttatatgtgtaatctggctgctagtgacctcttatttaccttgtcccttccagtcaggctatcgtattacgccctgcatcattggccttttcccgacctgctgtgccagacaaccggggccattttccagatgaatatgtacggctcctgcattttcttgatgctcattaacgtcgatcgctatgcggcaattgtgcacccgttaaggctcaggcatctgaggaggccccgtgtggctcgactcttgtgtctaggtgtgtgggcactcatcctggtgttcgctgtcccggctgcacgggttcaccggccaagtagatgcaggtacagagacctggaagtgcggctttgttttgaaagcttctctgacgaactgtggaaaggcagattgcttcccctggtcctcctagccgaagctctgggttttctactgcctttggcggcagttgtgtattcgtcaggacgggtgttctggaccctggccaggcccgacgcaacccagagccagcggagaagaaagacagtgagactcttgcttgcgaacctggtaatcttcctgctttgctttgtcccctacaacagtaccctggccgtgtatggtctcctgaggagcaagcttgttgcagcatccgtcccggcacgggaccgagttcgtggtgtacttatggtgatggtgctactggcaggagctaattgcgtgttggatccactggtttactatttctctgccgaaggctttcgaaatacattgaggggcctcgggactccccaccgcgcccgcacatccgctaccaatggtacacgtgccgcactagcccaatctgaaagaagtgccgtcacaaccgacgctactcgcccagatgccgccagccagggcttgcttcggcccagtgactcccacagcctctctagtttcactcatgccattgcactgagcgtacctgacagtcaacggttgtccttttgggaagcctatcgggtctacacacaggaggggggccttggaacctggacctttggctggcaattccagctctctaatgccgaggaatacaaggtgtggaagcctgggccccgagagggcagtgccgctggaaatggcttctttaagctgtag

SEQ ID NO: 193734 - DNA, 1605 bp, synthetic construct
  misc_feature 1..1605: note = Description of Artificial Sequence: Synthetic coding sequence
  source 1..1605: mol_type = other DNA
atgcggctgcggggctgcggcccccgggccgcccccgccagcagcgccggtgcttcggacgccaggttgctggcaccccctggccggaacccttttgtccacgagctacgactctctgcactgcaaaaagcacaggtagccttgatgaccctaacattgttcccagttagactcttggtcgcagcagctatgatgcttctcgcatggcccttggcacttgttgcttcccttggctcagcggaaaaggagccggagcaaccacctgctctctggcgcaaggtggtcgactttttgctgaaggcaattatgcgcacaatgtggtttgcagggggctttcaccgggtcgccgtgaagggtcgacaggcactgcctaccgaagcagccattctcaccctggcgccccactcctcctacttcgatgccatccctgtgactatgactatgagctcaatcgtcatgaaggctgagtcaagggatattccgatctgggggacactcattcagtacatcagacctgtcttcgttagccggagcgaccaggactccagaaggaagacagtggaagagataaaacgcagggcccaatccaatggtaaatggccccagatcatgatattcccagagggcacttgcactaacaggacctgtctgatcacctttaaaccgggggccttcatcccaggtgcgcctgtccagcctgtggtactccggtaccccaataaactcgatacgattacttggacctggcaggggcctggtgctctggaaattttgtggcttactctgtgtcagttccataaccaggtggaaattgagtttttgcctgtgtacagcccttctgaggaagagaagcgcaacccagcgctgtatgcctcaaatgtgcggcgcgtgatggccgaagccttgggtgtctccgtcacagattatacttttgaagattgccagttggcactggccgaagggcagctcagacttcctgctgacacttgcctgcttgagttcgcccggctagttcgcgggttgggccttaagcccgagaagctggagaaagatctggaccgatacagtgaacgcgcacgtatgaagggtggagagaagattgggatcgcagagttcgctgcctcattggaggttccagtcagcgacctgctcgaggatatgttcagcctgtttgacgagtccggatccggcgaggtcgacctgcgtgagtgcgtagtggccctgtccgtggtctgtaggcccgctcgtaccctggacacaatccaactggcattcaaaatgtatggcgctcaggaagatggatcagtgggcgaaggagacctgtcatgcattcttaagacagcacttggagtggccgaactgaccgtgactgatttattcagagccatcgaccaggaggaaaaaggaaaaatcaccttcgccgactttcaccgctttgccgaaatgtaccctgcatttgcggaggagtacttgtaccctgaccagacacactttgagtcatgcgccgaaacttcacctgccccaattccaaacgggttctgtgcagatttctccccggagaatagcgatgccgggcgaaaaccagtcagaaagaagctcgattag

SEQ ID NO: 193735 - DNA, 1605 bp, synthetic construct
  misc_feature 1..1605: note = Description of Artificial Sequence: Synthetic coding sequence
  source 1..1605: mol_type = other DNA
atgcggctgcggggctgcggcccccgggccgcccccgccagcagcgctggcgcatctgacgcacgcctgctcgctcctccggggagaaatccatttgtccatgaactgcgactaagtgcactccaaaaagcccaggtggcactcatgactctcactctctttcccgtgcggctgttggtggccgccgctatgatgctgttggcatggcctcttgcactcgtggcctctctcggttccgctgagaaagaaccagagcaaccaccagcgctctggagaaaggtggttgatttcctgctgaaggctatcatgcggacgatgtggtttgcaggaggctttcatagggtggcagtgaagggacgtcaggcattgcccaccgaggctgctattctgacgttagcacctcatagttcctatttcgacgctatccccgtcactatgacaatgtcctcaattgtcatgaaggccgaatcacgggatatcccgatctggggaactcttatccaatacatccggccagtatttgtttcacgctctgaccaggactctaggcggaaaaccgtagaggagattaaacgtagggctcagtcaaatgggaagtggccacagatcatgatatttcccgaaggcacctgtaccaatagaacttgcctgattacatttaagcccggtgcctttatacctggcgctccagtccagcccgtagttctgcgatacccaaacaagctcgacaccatcacctggacgtggcaaggccccggagctctggagatcctctggctaacattgtgccagtttcataaccaggttgaaatagagttcttgcctgtgtattcaccttctgaggaggagaagcgcaatcctgccttgtatgcctccaatgtacgacgcgttatggcggaggccctgggagtatccgtgacggactacactttcgaggactgccaactagccttagctgaaggccagctgcgtctccctgctgacacctgtcttctggagttcgctagactggtaagaggcctgggtctgaagcccgagaagctggagaaagatctcgatcgatactctgagcgggcccgaatgaaaggaggggagaagatcggtatcgcagaatttgctgccagtttggaggtacccgtgtcagatcttcttgaggacatgttctcactgttcgatgaaagtggaagtggcgaagtcgatctgcgcgagtgcgtggtcgcactcagcgtggtctgtcggcccgcccgcacactggacaccattcaactggcctttaagatgtatggggcacaagaagacggaagcgtgggcgagggggacctgagttgcattctgaaaaccgccctgggcgtcgcggagttgacggtgacggatttatttcgcgcaatcgaccaggaggagaaaggcaaaataaccttcgctgacttccatcggtttgctgaaatgtaccctgcatttgctgaagagtacttgtatcccgaccagacccactttgaatcttgcgccgagacatctcccgccccgatcccgaatggcttctgcgctgattttagtcctgagaattcagacgctggacgtaagcctgtccgcaagaagctggactag

SEQ ID NO: 193736 - DNA, 1464 bp, synthetic construct
  misc_feature 1..1464: note = Description of Artificial Sequence: Synthetic coding sequence
  source 1..1464: mol_type = other DNA
atggccagcagcgccgagggcgacgagggcaccgtggtggccctggcaggtgtgctccaatctggatttcaggaactctcgctgaacaaactcgccacatcactgggagctagtgaacaggcactgagattgataatttcaatattcttaggctatccatttgccctgttttaccgacattacctcttttacaaggaaacctacttgattcacctgtttcacaccttcactggcctttccattgcatatttcaattttggtaaccaactctaccatagcttactgtgtattgtgctccaattcctgatcctccgccttatgggccggaccatcactgctgtgctcacgactttctgtttccagatggcttatctgctagcgggatattactatacggccaccggtaactacgacattaagtggacaatgccacactgcgtgctgacgctaaagctgatcggactagctgtggattattttgatggcggtaaggatcagaactccctgagtagcgagcagcagaagtacgctattaggggagtccccagcctgctggaagtagccggattttcttatttttatggtgccttcctcgttggccctcagttttcaatgaaccactatatgaagctagtgcaaggcgaacttattgatattcccggtaaaatacccaatagtattatcccagctctcaagaggcttagcctggggctgttctaccttgtcggctataccttgctcagtcctcatattactgaggactatctgctcacagaggactacgataaccatcctttctggtttcgttgtatgtatatgttgatttggggtaagtttgtgctttacaaatacgtgacgtgttggttagtcaccgaaggtgtctgcatactcactgggctgggatttaatggattcgaggagaagggaaaagccaagtgggatgcttgcgcaaatatgaaggtctggctgtttgagacgaacccgcgcttcacaggcaccattgcctcttttaacattaacactaatgcctgggttgctcggtacattttcaaaaggcttaagttcctgggaaataaagagctgagccagggattgtccctactcttcttggcactgtggcacggcctccatagcgggtacctggtgtgcttccaaatggaatttttgattgtcattgtcgaaagacaggccgccagactgattcaggagtcacctacgctaagtaagttggccgctatcacggtactgcagccattctattatctggtacagcagacaatccattggctgttcatgggctactctatgaccgctttttgtctgttcacctgggacaagtggctgaaggtgtataaatcgatttatttccttgggcatatctttttcctgagtctcctttttatcctgccctacatccacaaagccatggtgcctcgaaaggaaaaactgaagaaaatggagtag

SEQ ID NO: 193737 - DNA, 1575 bp, synthetic construct
  misc_feature 1..1575: note = Description of Artificial Sequence: Synthetic coding sequence
  source 1..1575: mol_type = other DNA
atgagccagggcagccccggcgactgggcccccctggaccccacccctggacctccagccagtccaaaccctttcgtgcatgagctccatttatcacgcctgcaacgtgtaaagttctgtcttttgggggccctgctggcacccatacgagtgttgctggcttttattgtcctgttcctgttatggccattcgcctggctgcaggtggccggcctttcagaggagcaattgcaagaaccaattacagggtggcgtaagacggtgtgccacaatggggtcctgggtctctcccgtcttctcttctttctgcttggctttctgcggattagggtcaggggccagcgcgcaagcaggctgcaagctccagtcctggtggctgctcctcacagcacttttttcgatcccattgtgctcctaccttgtgacttgccaaaggtcgtatccagggcagaaaacctgtctgtgccagtgatcggcgctcttctgcggtttaatcaagcaatcctggtctcaaggcacgaccccgcaagccgcaggcgggtggttgaggaggttcgcagacgcgcgacgagtggcggcaaatggccgcaagtgctcttcttccctgagggcacctgtagtaacaaaaaagctctcctgaagtttaagcccggagcgtttatcgctggtgtcccagtgcagccggtcctgatcaggtatcctaatagcctggataccacaagctgggcatggcggggccccggcgttctcaaggttctctggttaaccgcttctcaaccttgtagtattgtcgacgtggagttcctccctgtgtaccatcccagccccgaggagagtcgggatccaacactgtatgccaacaacgtacagagagttatggcgcaggccctggggattcctgccacagagtgcgaattcgtgggctccttgcccgtcattgtcgtggggcggctgaaggtcgctctcgagcctcagctgtgggaactgggaaaggtcctgcgaaaggcggggctgagtgctgggtacgtcgacgccggagctgagcctggaaggtccaggatgatttcccaagaagagtttgccagacaactgcaactgagcgatccacagacagtagcgggagcctttgggtacttccagcaggataccaagggccttgtggactttcgggacgttgcccttgcactggcggcattggatggaggacgtagcttggaagaactgaccaggctggcattcgagctcttcgcagaggaacaggctgagggccccaaccgtcttctttacaaagacgggttttcaaccattttgcacctcttgctagggagcccacaccctgccgctacagcactacatgccgagctctgtcaggcgggatcttctcaggggctgtccctatgtcagttccaaaacttttcactacatgacccactctatggcaagctcttcagcacttacctgcgcccgcctcataccagccgagggacatcacagactcccaacgcatcctctcctgggaatcccacggcactagccaacggcaccgtgcaggcccctaagcagaagggtgactag

SEQ ID NO: 193738 - DNA, 693 bp, synthetic construct
  misc_feature 1..693: note = Description of Artificial Sequence: Synthetic coding sequence
  source 1..693: mol_type = other DNA
atgtgcggcaacaacatgagcacccccctgcccgccatcgtgcccgccgcaagaaaggcaacggctgcagtgattttcctacacgggctgggtgacacaggacacggatgggcagaggcatttgcgggcatcaggagttcacacattaagtacatttgtccccacgcacccgtgaggcctgtgaccctaaacatgaatgtggctatgccctcatggttcgacataatcgggctctcacccgattcccaagaggatgagtccggaatcaaacaggccgccgaaaacatcaaggcactgatcgatcaagaagtgaaaaatggcattccttccaacaggatcatcctcggcggcttctcacagggaggggcactgtccctctacactgccctgaccacacagcagaagttggccggagtaacagcattgagttgctggctgcccctgcgcgccagctttccccagggtccgattgggggagctaacagggacatttccatcctccagtgccacggagattgcgatcccctggtgcctctgatgttcggcagcctgacagtggaaaagctgaaaaccctggtgaatcctgcgaatgtcacatttaaaacctatgaaggaatgatgcatagtagctgccaacaggagatgatggacgtaaagcagtttatcgacaagctactgcctccgatagattag

SEQ ID NO: 193739 - DNA, 645 bp, synthetic construct
  misc_feature 1..645: note = Description of Artificial Sequence: Synthetic coding sequence
  source 1..645: mol_type = other DNA
atgtgcggcaacaacatgagcacccccctgcccgccatcgtgcccgctgctcggaaggcaaccgccgctgtcatctttctgcacggcctcggagatacaggccatgggtgggccgaagcatttgcagggattcgcagctcacatataaagtacatttgcccccatgcctttgatattatcgggctctctcctgactcccaagaggacgagtctgggatcaagcaagctgccgaaaacattaaggcgctcattgaccaggaggtgaagaacgggatcccctctaaccgcatcattctcgggggatttagccaaggtggggcgctgagcttgtacacggcacttacaactcagcagaaactcgccggcgttacggccttgtcttgttggctgccacttagagcaagttttccccagggtcccattggaggcgccaatagagacatctcaatcctgcagtgccatggtgactgtgacccattggttccactcatgttcgggagtctgaccgtggagaaacttaagaccctggtgaaccctgctaatgtgacattcaaaacatatgagggaatgatgcactcatcatgccagcaggagatgatggacgtcaagcagttcatcgacaaactcctgccacccatcgactag

SEQ ID NO: 193740 - DNA, 1092 bp, synthetic construct
  misc_feature 1..1092: note = Description of Artificial Sequence: Synthetic coding sequence
  source 1..1092: mol_type = other DNA
atggagctgcacgagcggcccgacgagcggcggaaggcccggacctctactcaggggcgcttgggggattggaggcgtgtacacgctgatggctttacccatcgagtttggtccagcagtagctggctcgagcctgcaatgacgagtagaacaagggtcacttggccgagtcccccccggcctctgcctgtgccagccgctgcagctgtggctttcggggcgaagggtaccgatccagcggaggctagaagctcgcgcggaatcgaggaggctggaccacgagcccacggacgggctgggcgggagcccgagaggcgaagatcccggcaacaacgaagagggggtctgcaagccagacgctcaactctccttaaaacctgtgctcgggctagagcgaccgccccgggcgccatgaagatggtggctccatggacccgtttctacagtaattcctgttgcctctgctgtcacgtgcggaccggaactatacttctaggcgtgtggtatctgattataaatgccgtcgtgctgcttattctgctatcagcactggctgatccagatcagtacaacttcagctcttctgagctcgggggggacttcgaattcatggacgatgccaatatgtgtattgcaatcgcgatttcactgctcatgattcttatctgtgccatggccacatacggagcctacaagcagcgtgcagcctggattattccatttttttgttaccagatctttgacttcgcgttgaacatgcttgtggctataaccgtgctgatctaccctaattctatacaggaatacatccggcagctgccacctaactttccatacagggacgatgtgatgtcagtgaacccgacgtgcctggtactcattattctgttattcatttccatcattctgacgtttaagggatacctgatctcctgtgtttggaactgctataggtatatcaacggcagaaacagttcagatgtgctggtgtacgtcacctcaaatgatactacagtgctgcttcccccctatgacgatgccaccgtcaacggagccgctaaagagccccctccgccctacgtgtccgcttag

SEQ ID NO: 193741 - DNA, 954 bp, synthetic construct
  misc_feature 1..954: note = Description of Artificial Sequence: Synthetic coding sequence
  source 1..954: mol_type = other DNA
atgaccagccggacccgggtgacctggcccagccccccccggccccttcccgtccccgcagccgcagccgtggccttcggggctaagggaacagaccccgccgaggctcgcagttccagaggaattgaggaggccggccctagggcacacgggcgcgcaggaagggagcccgaacgacgcagaagcaggcagcagagacgggggggcctgcaggcgaggagatctaccctactcaagacctgcgcacgggccagggcaaccgcaccgggagccatgaaaatggtggccccttggacacggttctattccaattcttgttgtctttgttgtcacgtaagaacgggaacaatattgttgggggtgtggtacctcatcatcaatgcggtcgtcctgctgatccttttatcagccctcgctgatcccgatcagtacaatttctcgtctagtgagctcggcggcgatttcgagttcatggatgacgccaacatgtgtatagcaatagctatctcacttctgatgattctgatttgtgccatggccacatacggggcttacaaacagagggccgcttggattattccatttttttgctaccagatcttcgacttcgcgcttaatatgcttgtggccatcacagtgctcatatatcctaattcaattcaggagtatattaggcagttgccaccaaatttcccttatcgggacgatgtaatgagcgtgaaccccacatgccttgtgctcatcattctgctgtttatatccattattctaaccttcaaaggttacctcatctcctgtgtatggaactgctaccgctatataaacggacggaactcttccgatgtgctcgtctatgtaaccagcaacgacacgaccgttctgcttcctccatatgacgacgctacagtgaacggagctgctaaggagcccccacccccatacgtatctgcttag

SEQ ID NO: 193742 - DNA, 681 bp, synthetic construct
  misc_feature 1..681: note = Description of Artificial Sequence: Synthetic coding sequence
  source 1..681: mol_type = other DNA
atgaagatggtggccccctggacccggttctacagcaacagctgctgcctctgttgtcacgttcgcactggcactatcctacttggcgtgtggtacctgattatcaatgccgtcgtcctgctgattttgctatcagcccttgccgatcctgaccagtataatttttcatcttctgaactgggcggcgatttcgaatttatggacgatgccaatatgtgtatcgcaatcgctattagcctgctgatgatacttatttgcgcgatggccacgtacggagcatacaaacagcgggccgcctggattataccatttttttgttatcaaatcttcgacttcgccttgaacatgctggtggccatcacggtgctgatttacccaaactccatccaggaatatattaggcagctgccgccaaattttccctacagagatgacgtgatgagcgttaatcctacttgcctggtcctgatcatactgctctttatcagtataatcctcacgttcaagggctacctgatatcctgcgtgtggaattgttacaggtatataaacggcagaaactcctctgatgtgctggtttacgtcacctccaatgacaccacggtgcttttacccccctacgacgatgcgaccgtcaatggggcggcaaaggaaccacctcccccatacgtatcagcctag

SEQ ID NO: 193743 - DNA, 789 bp, synthetic construct
  misc_feature 1..789: note = Description of Artificial Sequence: Synthetic coding sequence
  source 1..789: mol_type = other DNA
atggacccccggctgagcaccgtgcggcagacctgctgctgcttcaacgtacggatagcaaccactgccctcgccatttatcatgtgatcatgtctgtccttctattcattgagcactccgtggaggtggctcatggcaaggcgagttgcaaactgtcacagatgggatatctgcggatcgcagaccttatctcctcgtttctgctgatcactatgttgtttataattagcctgtcacttctgatcggggtggtcaagaaccgtgagaaatacctgctgcctttcctgtctttacagatcatggattacctgctgtgccttttaacactgcttggaagttacatcgagttacctgcctacttgaagctcgcgtcccgtagcagagcaagcagttcaaagttcccgctgatgactctgcaactcttggacttttgtctgagcatactgaccctgtgttccagctacatggaagtgcccacgtatctgaactttaagtcaatgaatcacatgaattatttaccttcccaggaggacatgccccataaccagtttattaagatgatgatcatatttagtatcgcattcataactgtgctcatcttcaaggtatacatgttcaagtgcgtttggaggtgctatagactaatcaagtgtatgaattccgtcgaagaaaagcgcaattccaagatgctccagaaagtggtgctcccttcgtacgaagaagcactgtctttgccgtccaagacccctgagggcggcccggctcctccaccgtactccgaagtctag

SEQ ID NO: 193744 - DNA, 873 bp, synthetic construct
  misc_feature 1..873: note = Description of Artificial Sequence: Synthetic coding sequence
  source 1..873: mol_type = other DNA
atggacccccggctgagcaccgtgcggcagacctgctgctgcttcaacgtaagaatcgcgacgaccgccttggcaatataccatgtgataatgagcgtgctcctgttcattgagcatagcgtggaagttgcgcatggcaaagccagttgtaagttgtctcagatgggatatctgagaatagccgatcttatctctagttttctgctgattacaatgctttttatcattagtctcagcttgcttataggagtggtgaagaaccgagagaagtacctgttgcccttcctgtcgctgcagatcatggattatcttctctgcctgctgactctgttgggatcatacatcgaattgccagcctacctgaagttggcttcacgctctagagccagcagttccaagttcccattgatgacattgcagcttctcgacttctgtctctctatattaacactatgttcaagctatatggaggtgccaacatacctgaacttcaaaagcatgaatcacatgaattacctgccatctcaagaagatatgcctcataaccagtttatcaagatgatgataattttttctattgcctttattactgtgttgattttcaaggtttacatgtttaagtgtgtgtggaggtgctaccgccttatcaagtgtatgaatagtgttgaagaaaagaggaatagcaaaatgttgcagaaagtcgtccttccgagttatgaggaggctctgtcccccgctggaccagtgtcatgctcccaattgggccaaaggtttaggctctcacattcctctgggctgagtatcatccagcctaacaatgcctggtttatctccatttctagtgatacctgtctggatgattggccattttag

SEQ ID NO: 193745 - DNA, 11406 bp, synthetic construct
  misc_feature 1..11406: note = Description of Artificial Sequence: Synthetic coding sequence
  source 1..11406: mol_type = other DNA
atgagcaccgacagcaacagcctggcccgggagttcctgaccgacgtgaacaggctttgcaatgctgtggttcagcgggtggaagcgagggaagaggaggaggaagaaacccacatggcaactctgggacagtatctggttcacggccggggttttctgctgctaaccaagctgaacagtattatcgatcaagctttgacctgcagggaggaattgctaaccctgctgctgagcctcttgcccctcgtctggaaaatcccagttcaggaggaaaaggccacagattttaaccttcccctgtcggccgatattattcttaccaaggaaaaaaatagctctagccagaggagcacccaagagaaattgcatcttgagggttcagcactcagcagccaggtgtcagcaaaagtgaacgtcttccggaaaagcaggagacaacgaaagatcacacaccggtacagcgttcgggacgctcgtaagactcagcttagtacttctgatagcgaggccaactctgatgagaaggggattgccatgaataagcacaggagaccccaccttctgcatcacttcttaacatcatttccaaagcaagaccacccgaaggctaaactcgatcggttggcgacaaaagagcagactccgccggatgctatggcattggagaactctcgcgagattatcccaaggcaaggatcaaacaccgacattttatctgaaccagccgccttatccgtgataagtaatatgaataattctcccttcgatctgtgtcacgtgctcctgagtttgttagagaaagtttgtaagtttgatgtaaccttgaatcacaattcgcctctggcagcctcggtggtccccactcttaccgaattccttgcgggctttggggactgctgttctttatcggataaccttgagtcccgggtggtttcggcaggctggactgaggagcctgtggccctgatccagcggatgctgttcagaacagtgctgcatctgctctccgtggatgtcagtacggccgaaatgatgcctgagaatctccgcaaaaatttaaccgagctactgcgggctgcgctgaaaatacgcatctgcctggagaaacagcctgatcctttcgctcctagacagaagaagacactgcaggaagtccaggaagacttcgtgttctctaagtaccgccacagagccctgctgctccccgagctgttggagggcgttcttcaaattttgatttgctgtctgcagtcagccgcctccaacccattttacttctcacaggccatggatcttgtccaggagtttattcagcaccatggctttaacctgtttgaaacagccgttcttcagatggagtggttagtgctccgggatggagtgcccccagaggctagcgagcacctgaaggcactgattaactcagtaatgaaaatcatgtctactgtgaaaaaggttaaatccgagcagctgcaccactctatgtgtaccagaaaacgccatagacgatgcgagtattcacattttatgcatcatcaccgagacctgtctggactcctggtgagcgcctttaaaaaccaggtgagcaagaacccattcgaggaaacagcggatggggatgtttattaccccgaacggtgctgttgcattgcagtttgcgcccaccaatgtctccgcctgctccagcaggcctctttatcttcaacctgcgtccagatcctctcaggcgtgcataatatcgggatttgctgttgcatggaccctaaatccgttattatccctttactccacgcgtttaaactgcccgcattaaaaaatttccagcagcacattctcaacatcttaaataaactaatactcgaccagttgggcggggccgaaatttcacccaaaattaaaaaagccgcctgcaacatttgtacggtagactccgaccagctagctcagctggaagagaccctccagggaaacctgtgtgatgctgagctgagttcctctttgagtagcccctcgtatcgctttcagggcattcttccatcatcaggcagtgaggacctgctgtggaaatgggacgccttgaaggcctaccagaactttgtgtttgaggaagatcgactgcattctattcagattgctaaccacatatgcaacttgatccagaaagggaacatcgtggtgcagtggaagctttataattatattttcaacccggtgctgcagagaggcgtagagctggctcaccactgccagcacctgagcgtgacaagtgctcagtcgcacgtgtgcagccatcacaaccagtgcctacctcaagacgtgctacaaatatatgtcaagactctaccaatccttctgaagagccgcgtcattcgcgatctgttcctctcatgcaacggagtgagccaaatcattgagctgaactgtttaaacggcatccggagtcactcactcaaggctttcgaaaccttgattatctccttaggtgagcagcaaaaagacgccagcgtgccggacattgacggtatcgacattgagcagaaagagctgagttctgtccacgtgggcaccagcttccaccaccagcaggcatatagcgacagcccacagtctctgagtaagttctatgctgggctgaaagaagcctatccgaagaggcgcaaaaccgtcaaccaggacgtccatattaatacaattaacctctttctttgtgtcgctttcctttgcgtatccaaagaagccgagtccgacagagagagcgccaacgactccgaagatacctcaggctatgacagtactgcttcagagcctctgagccacatgttgccgtgtatttcattggaaagtctcgtcctgccctctccagagcatatgcaccaggctgcagatatttggtctatgtgccggtggatctacatgttgagcagcgtgtttcagaaacagttctacaggcttggagggttcagggtttgccataagctcatattcatgatcatccagaaactttttcggagccacaaggaggagcaaggcaagaaggagggggatacaagtgtgaatgagaaccaggacctgaatcgcatctcccaacctaagcgcacaatgaaggaagacctgttgtctctcgcaattaagagtgatcccatcccctcagaattgggctcactgaagaagtcagccgattccctgggtaaattagagctgcagcacatctcttcaatcaacgtagaggaggtctcagcaaccgaggccgcacctgaagaggctaagttgttcacctctcaggaatcggaaactagcctgcaaagtatccgactgctcgaagccctgctagccatctgtctgcatggagcccgcacgtcccagcagaaaatggagctcgagttgcccaatcagaatctctcagtcgagtccatcctgttcgagatgagagaccacctctcccagtctaaagtaatcgagacgcaacttgccaagccgctatttgatgccctcctgagggttgcactgggcaactactcagctgacttcgagcataacgacgcgatgacagaaaagagccatcagtctgcggaagagctgtcaagccagccgggcgatttctccgaggaggctgaagatagccaatgctgctccttcaagctgctggtagaagaggagggctatgaggctgattcagaaagtaatccagaagatggcgaaacacaggacgatggggtggatctgaagagcgagaccgaaggtttttccgcatcctccagtcctaacgatctgctggagaacttaactcagggtgaaataatctaccccgagatttgcatgctcgaactcaatttactgtccgcatcaaaggctaagctggatgtcctggcccacgtgtttgaaagtttcctcaagatcattcgccaaaaggaaaaaaacgtgtttcttctaatgcagcaggggacagtgaagaatctgctgggcggattcctctccattctgactcaggacgatagcgatttccaagcatgtcagagggtactcgtcgatctcctagtgagtctgatgtcctcgaggacctgctccgaagaactcacattgctgctgcgaatctttttagagaagtcaccctgcacaaaaattctcctgctcggcattctgaaaattatcgaatccgatacgaccatgagtccaagtcagtacttgacttttcccctgctccatgctcccaacctttccaatggcgtgtcttcccagaaataccccggcattctgaattccaaggcgatgggcctgctgaggcgcgcacgcgtttcccggtccaaaaaagaagccgaccgggagtccttcccacatcgcctgttatcctcctggcacatcgcgccagtgcatcttccactgcttggccagaactgttggcctcacctgagtgagggctttagtgttagcttatggtttaacgtggaatgcattcacgaggccgaatccactactgaaaaaggcaagaagatcaaaaagcggaacaagagcctgatcctacccgactccagcttcgacggaactgagtctgatcggcccgaaggcgcggagtacatcaaccctggcgaacgtttaatcgaggaaggatgcatccatatcatttctttgggtagcaaggctcttatgatccaggtctgggccgatccccataacgccacactcatttttcgagtatgcatggattccaatgatgatatgaaggctgttctcctcgcccaggtcgaatcccaggagaatatcttccttccatctaagtggcagcacttggtcctgacctacttgcagcagccccaggggaagcgcaggatacacggtaagatttcgatttgggtgagtggccagcgaaagcccgacgtgacacttgacttcatgttaccaaggaagactagtctctccagtgactctaacaagactttctgtatgatcgggcactgcctgtcgtcacaggaagagtttctacaactggctggcaaatgggacctgggcaatctactgctttttaacggcgccaaagttgggtctcaggaggcattctatctctacgcctgtggccctaaccatacaagcgtgatgccttgcaagtacggcaaaccagtgaatgattattctaagtatatcaataaggagatcctccgctgcgagcagatccgcgagctcttcatgactaagaaggatgtggacatcgggctgcttatagaatctctgtctgttgtgtacacaacatactgtccagcccagtatactatctacgaacccgttatcaggctcaagggccagatgaaaacccagttgagccagcgccccttttccagcaaagaagttcagtcaatcctgctggaacctcaccatctgaagaacttgcaacctaccgagtacaaaaccattcaaggcatcctgcacgagattggcggcactggcatcttcgtctttctctttgcccgagttgttgaactctccagctgtgaggaaacccaagcgctcgccctgagagttatactgtcgctaattaagtacaaccagcaacgtgtgcatgagttagaaaattgtaatggattgtccatgatccaccaggtgctcattaagcaaaaatgtattgtgggcttctatattctgaagacgttgttggaaggctgttgtggggaagatattatctacatgaatgaaaacggagaattcaaactcgacgtagacagcaacgccattatccaagatgtgaagctgctcgaagagctgttactcgattggaaaatctggagcaaagcggagcaaggcgtctgggaaacactgctggccgcgttggaggtgcttatcagggctgaccaccaccagcagatgttcaatatcaaacaactgcttaaggcccaggtggttcatcattttctgctgacatgtcaggttctgcaggaatacaaagaggggcaattgacccccatgccgagagaagtctgtcggtcctttgtgaagattatagcagaggtcctgggatcaccgccagatctagagctactgacaatcattttcaatttcctactcgcagtccacccccctactaatacttatgtgtgccataatcctacaaacttctacttctccctccatatcgacggaaagatcttccaggaaaaggtgaggtcaatcatgtacttgcggcattcatcttctggaggcagatccttgatgagtcctggttttatggtgataagtccctccggcttcactgcctcgccgtatgaaggggaaaattcctctaatatcatcccacagcagatggcggcccatatgcttaggtcaaggtccctcccggctttccctacgtcatctttactgacccaatcacagaagctgaccgggtctctggggtgcagcattgacaggctgcagaacatcgctgacacctacgtggcgacccaatccaaaaagcagaattcgctgggttcctccgatacccttaagaagggaaaagaggacgcctttatttcatcctgtgaaagtgcaaaaactgtctgcgagatggaggccgttttgtctgctcaagtgtctgtgtccgatgtgccaaagggcgtgctgggtttcccggtggtgaaggcagaccataaacagctgggggctgagcccaggtccgaagatgattctcccggcgatgagtcatgcccgcgtcgtcctgactatctcaagggcttagccagtttccagcgcagccatagcacaatagccagtcttggcttggcattcccatcccagaacgggtcagctgcagttgggcgctggcccagtctggtggatcgaaatacagatgattgggaaaatttcgcttactccctgggctacgagcccaattataaccgaacagcgtctgcgcatagcgtgacagaagattgcctggttcccatttgttgcggtttgtacgagctgctctccggagttcttcttatactgcccgacgttctcttagaagatgtcatggataaactcatccaagctgatactctcctcgtgctggtgaaccatccatcacctgccatacagcagggtgtgatcaagcttcttgatgcatattttgccagagcctctaaggagcaaaaggataagtttctgaaaaataggggctttagcctgctagccaaccagctgtacttacacagaggtacacaggagctgttggaatgcttcattgagatgttttttgggcgacacatcggactagatgaggagttcgacctggaggacgtgcggaatatgggtctttttcagaagtggtcagttattccaattctcggactcatcgaaaccagcctctatgataatattctcttgcataacgccctgcttcttctgttgcagattcttaattcctgctccaaggtggccgacatgctgctcgacaacgggttactgtacgtcctgtgcaataccgtggctgccctgaatgggctcgagaagaacattcccatgtctgaatacaagctgctggcttgcgacattcagcagctgtttattgcagtgacaatccacgcatgttcctcatccgggagccaatacttccgggttattgaagaccttattgtgatgttaggttatttacagaactctaaaaacaaacgcactcagaacatggctgtagcactgcagctgagagtgttgcaggctgctatggagttcatccgaactaccgccaatcatgacagcgaaaatctgactgactccctccaaagtcccagtgcacctcaccacgccgtggtgcagaaaagaaagtctatcgctggccctcgtaaatttccgctcgcacagaccgagagcctgcttatgaaaatgcggtccgtggcaaacgatgagctgcatgtcatgatgcagaggcgaatgtctcaggaaaatccgagccaggccaccgagaccgaattagctcagagactacaacgtctcacagtgcttgctgttaaccgcattatttatcaggagtttaactcagatatcattgatatccttagaacacccgaaaacgttactcagtccaagacatctgtgtttcagacagaaattagcgaagaaaacatacatcatgagcaatcttcagtcttcaatccattccagaaggaaattttcacctaccttgtcgaggggttcaaggtctccatagggagctctaaagcctccggtagtaaacagcagtggactaagattctgtggagttgtaaggagacttttcgtatgcaattagggcggctgttagtgcatatcctgtctcctgctcacgccgcacaggaacggaagcagatctttgaaatcgttcacgagccgaaccaccaggaaatcctgcgcgattgtctctcaccaagcctacaacacggagctaagttggtgctctatctttctgagctgattcacaatcaccagggggaactgacggaagaagagcttggaaccgcggagttgttgatgaatgcgttgaaattatgtggccacaagtgtattccaccctcagccagtactaaggccgacctgatcaagatgatcaaagaggaacaaaagaaatatgagaccgaggaaggggttaataaagctgcatggcagaagactgtgaataacaaccagcagagcctcttccagagactggactcaaagagtaaggacatcagcaaaattgcagcagatattactcaggcagtgagcctcagtcagggaaacgagcggaaaaaggtgattcagcacataaggggtatgtacaaagtagacttgagcgcatccaggcactggcaagagctgattcaacagctgacccacgacagggccgtttggtatgacccaatctattacccaacatcatggcagctggatcctaccgagggacctaatagagagcggaggaggctccagaggtgttacttgacaatacccaataagtacctgctgcgcgatcgtcagaagtccgaagatgtggtgaagccccccctctcttacctgttcgaagacaaaacccactcctccttcagcagcacagtgaaggataaagccgctagcgaatccattagagtcaataggaggtgtatatccgtggctccatctcgggaaacagcaggggagctgctcctggggaagtgtggcatgtattttgtggaggacaacgcatcagacaccgtggaatcttcttccctccagggtgaacttgaacccgcttctttcagttggacatatgaagaaattaaagaggttcacaagcggtggtggcagttacgggacaatgccgtcgaaatttttctgaccaacggacgtacactgcttctggcattcgacaataccaaagttagagacgacgtgtatcacaacatcctaaccaacaatttaccaaatcttctcgagtacgggaacatcacagctctaactaatctgtggtatactggccagataactaatttcgaatacttaacccacctcaataagcacgcaggcagaagcttcaatgacctaatgcagtaccctgtgttcccctttattctggctgactatgtgtcagaaacgctggatttaaatgacctgctgatttatcgtaacctgagcaagcctattgctgtccaatataaggaaaaggaagaccgctacgtggatacctacaagtatctcgaggaagaatacagaaaaggtgcacgagaggacgatcctatgcctccagtccagccctatcactacggatcccactactcaaacagtggcacagtgctgcacttcctggtgcggatgcctccttttacgaaaatgttcctggcttaccaggaccagagcttcgacatccccgaccgcacatttcactctaccaacactacgtggaggctttcttcgttcgagtccatgactgacgtgaaggagctaattcccgaatttttttatctgcctgagtttctggtgaatcgagaagggttcgattttggcgtgaggcaaaacggggaaagagtgaaccacgtaaaccttccgccatgggccaggaacgatccaaggttgtttatcctaatccaccgtcaggccctggagtctgactatgtgtcacaaaatatctgtcagtggatcgatctcgtcttcgggtataaacaaaagggaaaggcctccgtgcaggcaatcaatgtctttcatccagccacatacttcggcatggacgtgagcgccgtggaagacccagtgcagcgcagggctttagagacaatgatcaagacatacggccagactccgcgacagctgttccacatggcccacgtctcaaggccaggcgccaagttgaacatagagggcgaactgccagcagccgtgggactgctggttcagttcgcgttcagggagactcgcgagcaagtcaaggagattacctatcccagtcccctgtcttggattaaagggctgaagtggggggagtacgttggaagcccttcagcaccagtgccggtagtgtgtttcagtcagccacacggagaacggttcggatcattgcaggcactgccaacccgcgctatctgcggcctgtccagaaacttttgcctcttaatgacctacagcaaggaacaaggtgtgagatctatgaactctacggatattcaatggtcggccatactgtcttgggggtacgccgataatatcctgaggcttaagagcaaacaaagcgagcccccggttaacttcatccagtcctctcagcagtatcaggtgaccagctgtgcttgggtgcccgatagctgtcagttgttcactggcagcaagtgcggtgtgataaccgcctataccaatcgcttcacctcatctacaccatccgagatcgaaatggagacccagattcatttgtatggccatacagaggaaattacgtccctgtttgtatgcaaaccttatagtattttaatctccgtatcacgtgacggcacctgcatcatttgggatttgaacaggctatgttacgtgcaatctctggctggtcacaagagtcctgttacggccgtgtccgcctctgagactagtggcgatatagcaaccgtgtgcgactccgccggcggcggaagcgatctgaggctgtggacagtgaatggcgacctggtcgggcatgtacactgcagggagattatttgcagcgtggcttttagtaatcagccggagggggtctcaatcaacgtgattgcaggtggcctggagaatggaattgttaggttatggtccacctgggatttaaaaccagtgcgagagattacattccctaagtcgaacaagccaattatttccctcacattcagctgtgatggacatcacttgtataccgctaattcagacggcaccgtaatcgcttggtgcagaaaagaccagcagcgtcttaaacaacccatgttttacagttttctcagcagctatgccgcaggttag

SEQ ID NO: 193746 - DNA, 11406 bp, synthetic construct
  misc_feature 1..11406: note = Description of Artificial Sequence: Synthetic coding sequence
  source 1..11406: mol_type = other DNA
atgagcaccgacagcaacagcctggcccgggagttcctgaccgacgtaaatcggttgtgcaacgcggtggtgcagcgcgtggaagctagggaagaggaggaagaagaaacacacatggccacactgggacaatatctggttcacggtcggggattcctgctcctgactaaactgaacagcatcatcgaccaggctctgacctgtcgcgaagagctgctgacactgctgctatctctgctgcctctcgtttggaaaatccccgtgcaagaggaaaaggcaacagatttcaatctaccactgtccgccgacatcattttaacaaaagagaaaaactcatcttcacagaggagcactcaggaaaagcttcatttggaaggaagtgctttgtccagtcaagtatccgctaaggttaacgtttttcgcaagagccggcgccagcgcaagataacccatcgttattccgttcgagacgcgcggaagacccagttgagtacgtcggatagtgaagccaactccgatgagaaaggaattgccatgaataagcaccgcaggcctcacctgctgcaccacttcttaacaagcttcccgaagcaggatcaccctaaggcaaaactggatagactggccacgaaagaacagaccccccccgatgcgatggctctggagaacagtcgcgagattattcctcggcaaggcagcaataccgatattctctcagagcccgctgctctgagtgtgatctcaaatatgaacaactctcccttcgacttgtgccacgtcctgctttccctgctcgaaaaagtttgcaagttcgatgtgactctgaaccacaactccccactggcagcttcagtagtgcccacacttacagaattcctggctggtttcggtgactgctgctccctatctgataatctcgagtcgcgcgtggtctctgccggatggacagaggagcctgtggccttaatccagagaatgctgtttcggactgtgcttcatttgctttcagtcgacgtgagcaccgctgagatgatgccggagaacctgcgcaagaaccttaccgagctgctgagagcagcgctgaaaatcagaatctgcttggaaaagcagcctgacccattcgcacctcgccaaaaaaagaccctgcaggaggttcaagaggacttcgtgtttagcaagtatcgccatcgcgcactgcttctgccagagctgctggagggcgtactgcagatcctgatctgctgcctacagtctgcagcctccaacccattctacttctcccaggccatggaccttgtgcaggagttcattcagcatcacggctttaacttatttgagacagccgtcctgcagatggaatggctcgtcctgcgtgacggggtgcctcccgaagccagcgagcatctgaaggccctgataaacagcgttatgaagattatgtctacagtgaagaaagtcaaatcagagcaactgcatcacagcatgtgtacaaggaaacggcaccggcgctgtgaatactcgcattttatgcaccatcacagggacttgagtggactgttagttagcgcgttcaaaaaccaggtctctaagaacccttttgaggagaccgccgacggggatgtctattaccccgagcgatgctgttgtattgcggtctgcgcccatcaatgtttgcggctgctccagcaggctagtctgtcttctacatgcgtgcagattcttagcggtgtccataatatcggaatttgctgctgcatggacccaaaatctgtgatcatccccctgctgcacgccttcaagttgccagcattgaaaaacttccagcagcacattttgaatatccttaacaaattgattctggaccagcttgggggcgcagagatttctcccaagatcaaaaaagctgcttgtaacatttgtacagtggattctgaccagctggctcagctcgaggagaccctccaggggaatctttgcgatgcggagctgtcttcgagcttgagcagcccttcttaccggtttcagggtatcctcccctcctccggttccgaggatctgctctggaagtgggacgcactgaaggcctatcaaaattttgtcttcgaggaggaccggttgcactccatccagatagccaaccacatctgtaacctcatccaaaaaggcaatatcgtggtgcagtggaaactctataattatatttttaacccagtgttacagaggggcgtcgaactggcacatcactgccaacacttgtccgtgacgagcgcacagagtcacgtgtgctcacaccataaccagtgtctgccccaagatgtcctgcaaatatacgtcaaaacacttccaatcttgctaaaatctcgggttatccgggacctcttcttgtcttgcaacggggtgagtcagattattgagctcaattgtttgaatggcattaggtctcatagtctcaaagccttcgagaccctgatcatatctcttggagaacagcaaaaggatgccagcgttccggatatcgacggaatcgacattgagcaaaaggaactgtcctctgtccatgttggcacttcttttcatcaccaacaagcatattctgacagccctcaaagtctctcgaaattctatgccgggttaaaggaggcctatcccaagcgcaggaagaccgttaaccaggacgtgcacattaacactatcaacctgtttctgtgtgtagccttcctctgcgtctctaaggaagctgaatcagaccgagagagcgcaaatgatagcgaggacacaagtggctacgacagtactgcatctgagcctctgtcccacatgcttccttgcatatcccttgagtccctagtcttgccctcaccagagcacatgcaccaggcagccgacatttggagcatgtgtcgatggatatatatgctttctagcgttttccagaagcaattttataggctggggggatttcgggtgtgtcacaagttgattttcatgatcatacagaaactttttcgctcccacaaagaggagcaggggaaaaaagagggggatacatcggttaatgaaaaccaggatctgaatcggatttctcagccaaagcggactatgaaggaggatctactgagtctcgctataaagagtgatcctattccctctgagctgggcagtctaaagaagtccgctgactccctgggcaagctggaattacaacatatctcttctattaacgtggaggaagtgtcagccaccgaagcagctcccgaggaggcaaagctgttcacctcacaggagtcagaaacaagcctgcaaagcattcgcctgctggaggccctgttggccatctgcttgcacggtgctcggacgtctcaacagaaaatggagttagagcttcctaatcagaacctgagcgtcgagtccattctgtttgaaatgagggatcacttgtctcagtcaaaggtgattgaaactcaattggccaaaccactattcgacgcactactgcgagttgctttaggtaattatagtgctgattttgagcacaatgatgctatgaccgaaaagtctcaccagagcgctgaggagctgagtagccaaccaggtgacttcagcgaagaagccgaggattcccagtgctgtagctttaaactgctggttgaggaagaggggtatgaggctgacagtgagagtaatcccgaagacggcgagactcaggacgatggtgtcgatctgaaaagcgagactgaaggctttagcgcgtcatcaagccctaatgacctcctggagaacctgacccagggcgagataatctatccagagatttgtatgctcgaactgaacctgttgagtgcctcaaaggccaagttagatgtattggcccatgtgtttgaatctttccttaaaatcatacgtcagaaggagaaaaatgtattcttgctcatgcagcagggaaccgtcaagaatctgctcggaggatttttgtccatcctgacccaggatgatagtgattttcaggcttgtcaacgggtacttgtggatttactggtctctctgatgtcctcacgcacttgtagtgaggagctcaccttgctcctgagaatattccttgaaaagagtccatgtaccaaaatactgctgctcggaatcctgaaaatcattgagagcgacaccacaatgagtccaagccagtatctgaccttccctttgctgcatgcccccaatctgtctaatggagtctccagtcagaagtacccaggaatcctgaactccaaagccatggggcttcttaggcgcgcccgggtctcccggtcgaaaaaggaagctgaccgtgagtcattcccacacaggctgcttagctcgtggcacatagcacctgttcaccttccccttctcggacagaactgttggccacatttgagtgaggggttctcggttagcctgtggttcaatgtcgaatgcatccatgaggccgagtctactactgagaagggaaaaaaaatcaagaagagaaataagagcctgatcctccccgacagcagttttgatgggactgagtctgatcgaccagagggggcggagtatattaatcccggcgagagacttatagaggaaggctgcattcacatcatatcactgggttcgaaagcgctcatgatccaggtttgggccgacccacacaacgccaccctaatatttcgagtgtgtatggattctaatgacgatatgaaggccgtgctgcttgcccaagtggagagccaggagaatatcttccttcccagcaagtggcagcatcttgtactgacctatctgcagcagccccagggcaaacggagaattcacggcaaaatcagcatttgggtctctggacaaaggaagcctgacgtgacacttgattttatgctgccacgcaaaacaagcctgagtagcgactccaataaaacattctgtatgatcggtcattgcctcagctcccaggaagaattcttgcagttggcaggcaagtgggacctgggtaatctcctgctgtttaatggagcgaaggtgggatcacaagaagcattctacctttatgcctgcggacccaatcataccagcgtgatgccatgtaagtatggtaagccagtgaatgactactcaaagtacatcaacaaagaaatcctgcggtgtgaacagatccgcgagctgtttatgacgaagaaggacgtagatatcggtctcctgatcgagagtctttctgttgtatataccacctactgtcctgcacagtatacgatctatgagcccgtcatcagacttaagggacagatgaagactcagctgtctcagcggcccttctcttcaaaggaggtccaatctatccttctggaaccacaccacctcaagaatctgcagcctaccgaatacaagaccatccaggggattctacacgagataggaggaacggggatcttcgtgttcctcttcgctcgcgtggtggagctgagctcgtgcgaggaaacacaagcgctagcgctgcgggtgatcctgtccctcatcaaatacaatcaacaaagggtgcatgagctggagaactgcaacggtctttccatgattcatcaggtgctcattaagcaaaaatgtatagtgggtttctatattctgaaaacactgctggaaggctgttgtggcgaagatattatctatatgaatgaaaatggcgaatttaaactggatgtggatagtaatgccataatccaggacgttaagttgctggaagaactacttctcgactggaagatttggagcaaagcggaacagggcgtctgggagacgctcctcgcagcgctggaggtcctaattagagcagaccaccatcagcaaatgtttaacattaaacaactactgaaggcccaggtcgtgcatcatttcctgctcacctgccaggtgctgcaggagtacaaggagggacagctcactcccatgccacgtgaagtctgtcggtcttttgtgaagatcatcgctgaagtgctgggtagcccacccgatttggaattacttacgatcatcttcaatttcctattagctgttcacccccccacgaacacgtacgtatgtcacaacccaacgaacttctacttctccctgcacattgatggcaaaatttttcaagaaaaggtgaggagtatcatgtatctgcgtcactcttccagtgggggccggtcccttatgtccccgggtttcatggtcatttctccctcaggcttcactgcctcaccctatgagggcgaaaacagcagcaacatcatcccacagcaaatggccgctcatatgctgcgctcaagatcgctgccagcctttccaacgagttctctgctgactcagtctcagaagttgaccggctctttgggctgtagtatcgatcgccttcaaaatatcgctgacacctatgtggctacacagtcgaagaagcagaattccctggggtcatcagatacactgaaaaagggcaaggaggacgctttcatctcctcctgcgagtcggccaagacggtgtgcgaaatggaggctgttctgtccgcccaggtctcagtaagcgacgtgcccaaaggcgtgttgggtttccctgtcgtgaaggctgatcataagcagttaggagccgagcctcgctcagaagacgactccccaggggatgagagttgccctcggcgacccgactacctgaaaggtttagcatcttttcaaagaagtcactctactatcgctagcctgggactggcatttcctagccaaaacggatctgccgcggtgggacgctggccatcattggtggaccggaatacggacgattgggaaaattttgcttactcactgggctatgaacctaactacaatcggactgcttctgcacattcggtaaccgaggattgcttggtccccatttgctgcggactatacgagctgctgtccggggttctcctgattcttccagacgtgctcctggaagatgtgatggacaagctcatccaggctgacacacttttggttctggtcaatcatcccagtcctgcgatccagcaaggcgtgatcaagcttctcgacgcctacttcgctcgcgcctccaaggagcaaaaggataaattcttgaagaaccggggtttttccttactggccaatcaattgtatctgcacagagggacacaggagctgttagaatgcttcattgaaatgtttttcgggcgccatattggcctggatgaagagttcgatctggaagatgtgaggaatatgggcctgttccagaaatggtccgtcatccctatcctgggccttatcgagaccagcctatacgacaacatcctgctccacaacgccctcctcctgcttctacagattcttaactcttgtagcaaagtcgctgacatgctcctggataatggtctgctctatgtgctctgtaacaccgtcgcagcattgaatggactcgagaagaacatccccatgagcgagtataagcttctggcctgcgacatccagcaactgtttatcgccgtgactatccacgcctgctcaagttctggctcccaatactttagagttatagaagacctcattgtgatgctgggctacttgcaaaacagtaaaaataaacgaacacagaacatggccgttgccctgcaattgcgagtgttgcaggcagctatggagttcatcagaacaaccgcaaatcacgactctgagaacctgacagacagcttgcagtcaccctcggcccctcaccacgctgtcgtgcaaaaaaggaaatctatcgccggaccgcgcaaatttcctctcgctcagaccgaatctttactgatgaagatgcggagtgtggctaacgacgagcttcacgtgatgatgcaaaggcgaatgtctcaggaaaacccatctcaggctactgagacggagctcgcccaaagactccagcgcttgacagttctggccgtgaatcgcatcatttatcaggagtttaactccgacataatcgacatacttcgtacgccagaaaatgtcacacagagtaagacgagtgtctttcagaccgagatctctgaggagaatatacaccacgagcaaagtagtgtgtttaatccattccagaaggaaatttttacgtatctggtggaaggattcaaggtgagcatcggttcatcaaaagcgtccggaagtaagcagcagtggacgaaaattctatggagctgcaaggagacatttcggatgcagctgggtagactcttggtgcacattctgagccccgcgcacgcggctcaggaaaggaagcaaatcttcgagatcgttcacgaacctaaccatcaagagatactccgggactgcttgagtccctcattacagcatggagccaaactcgtgctatatttaagcgagttgatccacaaccatcagggagaactgacggaggaggagctcggaacagccgaacttcttatgaacgctctgaaactttgcgggcacaaatgtatccccccatcagcctcaaccaaagcagatctgataaagatgatcaaggaggaacaaaaaaagtacgaaacggaagaaggcgttaacaaggctgcgtggcaaaagactgtaaacaataatcaacagagcctcttccagagactggacagcaaaagcaaagacatcagcaagatcgctgctgatattactcaggcagtgtcacttagccagggcaacgaacgcaagaaagttatccagcatataagggggatgtacaaggtggatttaagcgcttcacggcattggcaggagctcattcagcagctcacacatgatcgcgcagtgtggtatgatccaatttattaccctacctcctggcagctcgatcccacagagggcccaaaccgggaacgacgacggctccagaggtgctacctgacaattcctaataaatacctcttacgagacaggcaaaagagtgaagatgtggtcaaaccacctctatcgtatctgtttgaggataagacccattcttcctttagcagtacagtgaaagacaaagcagctagcgagtccatacgcgtgaaccggcgctgtatctccgtcgccccttccagggaaacagccggggagctcctactgggaaagtgcggcatgtatttcgtcgaagataatgctagcgataccgtggaaagttcttcactacagggcgagctcgagcccgcttctttctcgtggacctacgaggagatcaaagaggtccacaagagatggtggcagttgcgggataacgctgtggaaatttttttgacaaacggtcggacactcttactggcattcgataatacaaaagtgagagacgatgtgtatcataatatacttacaaataatctccctaacctgttggagtacggtaatatcacagcccttacgaacctctggtatacagggcaaatcaccaattttgagtatctaactcatttaaataaacacgcaggaaggtctttcaatgatttgatgcagtaccccgtcttcccattcatcctggccgactacgtcagtgagacccttgacctcaatgacttattgatctaccggaatctctccaaacccatagcagtgcagtacaaagagaaggaggacaggtatgttgatacatacaagtatttagaggaggagtatagaaaaggagcccgtgaagacgacccaatgccccctgtacagccctatcactatggctcgcactactccaattccggcaccgtcctacactttcttgtgcggatgcctcccttcaccaagatgttcctggcttatcaagaccaatcattcgacatccctgaccgaacctttcacagtacaaacacgacctggaggctgtcctcatttgagagtatgacagatgtaaaggaattgattccagagtttttctatctgcccgagttcttggtaaatcgagagggattcgattttggggtgcgccagaatggagagcgggttaatcacgtgaatttacctccttgggcccggaacgacccacggttatttatcctcatacaccgccaggctctggaatccgactacgtctctcagaacatttgccaatggatcgatctggtgttcgggtacaaacagaagggaaaggcctccgttcaggccataaatgtttttcatcccgctacctacttcgggatggacgtgtccgctgtggaagatcccgtacagcgcagagccttggaaacaatgatcaagacctacggccagacccccaggcagttgtttcacatggctcacgtttcccgcccaggcgctaagctgaacatcgaaggcgaacttcctgctgctgtcgggctgctcgttcagttcgcctttcgggaaactcgagagcaggtgaaagaaataacttatccctcccctctgagctggataaaaggcctgaagtggggagagtatgtcggtagcccctcagcgcccgttccagtggtgtgtttctcgcagccacatggagaaagatttggctcgctacaggccctcccaacccgggctatatgcggcttgagcagaaacttttgcttgcttatgacctattccaaggaacaaggcgtgaggagcatgaactcaactgacatacaatggagtgctattctgtcctggggctacgccgacaacatactgaggctgaaatctaaacagtccgagcccccagtcaattttatccaatctagccaacagtaccaggtcactagctgcgcatgggtgccagattcctgtcagctgttcacaggctctaaatgcggcgttattaccgcctacacaaacagatttacatcctccactcccagtgagattgaaatggaaacccagattcacttatatggccacacggaagaaataactagtctgtttgtttgtaaaccttacagcattctgatctctgtgtcccgagacggcacctgcatcatttgggacctcaatagactgtgctacgttcaaagcctagccgggcacaaaagtccagtcaccgctgtcagcgcatccgagacctccggcgacatagccacagtgtgcgattctgcagggggaggctccgacctacgactttggaccgtgaacggcgacctcgtggggcatgtgcactgccgtgaaataatttgttccgtcgctttctctaatcagcccgagggagtctccatcaatgtaatcgccgggggcttagaaaacggaatcgtccgcctgtggagcacctgggatcttaagcctgttcgcgagatcacgtttccaaagtccaataaacctattatctcccttactttcagctgcgatgggcatcacctgtatactgcgaacagcgacggtaccgtcatcgcatggtgccgaaaagaccagcaacggctgaagcagccgatgttctactctttcctatcctcttatgcagccgggtag

SEQ ID NO: 193747 - DNA, 4149 bp, synthetic construct
  misc_feature 1..4149: note = Description of Artificial Sequence: Synthetic coding sequence
  source 1..4149: mol_type = other DNA
atgagcaccgacagcaacagcctggcccgggagttcctgaccgacgtcaacaggctgtgcaatgctgtagtgcagcgggtggaggccagggaagaggaggaggaagagacccacatggctactttggggcaatatctggtgcatggcagaggctttctgctgctaactaaactcaatagcattatcgatcaagctttgacctgcagagaggaactgttgactctgctgctgtccttactgccattggtttggaagattcccgtgcaggaggaaaaagccacggacttcaacctccccctgtcagcggatataattcttaccaaggaaaagaactcatcttctcaaaggagcactcaggagaagctgcatctcgagggcagcgcattgagttctcaagtgagtgcaaaggtaaacgtctttaggaagtctcgtcgacaacggaagatcacacacaggtactccgtgagagacgctaggaaaacacagctaagcacctccgactctgaagcaaatagcgatgagaagggaatcgctatgaataaacaccgtcggccacatttgctccatcacttcctgacttcctttccgaagcaagatcatcctaaggccaaactggatcgcttagccacgaaagaacagacacctccggatgcaatggcactggagaacagtcgggaaattatcccccgccaaggaagcaataccgacatcctgagcgaaccggccgcactctcagtgatctccaacatgaacaactcgccttttgacctctgccatgttctcctgtcattgctggagaaggtctgtaagtttgatgtcacactcaaccataacagcccactcgccgcctcggtcgttcctacccttaccgagttccttgcaggcttcggagactgctgtagcctgtccgataacctcgaatctagggtggtcagtgctgggtggaccgaagagcctgtggccttgattcagcggatgctgttcaggacggtcctgcatctcttgtccgttgacgtttctacagcagaaatgatgccggagaacctgcgaaagaaccttaccgaattgttgagggctgccctgaagatccggatctgtctggagaagcagcctgaccccttcgcaccaagacagaaaaagacattgcaggaagtgcaggaggactttgtcttctccaaatacaggcatagggctctccttcttccggaactgcttgaaggagtgctgcaaattctcatttgctgcctccagtccgccgccagtaatcctttctatttctcgcaggcgatggacctggtgcaggaatttatccagcatcatggatttaatctcttcgaaactgccgtgctccagatggagtggcttgtacttagagatggggtgcctcctgaggctagcgagcacctgaaagccctgattaatagcgtcatgaagataatgtcaactgtaaagaaggtgaaaagcgagcagctacatcatagtatgtgcacacggaagaggcatcgccggtgcgaatatagccactttatgcatcaccacagagacttatccgggctgctggtaagcgcttttaaaaaccaggtgagcaaaaacccctttgaagagacagctgacggggacgtctactaccctgaaagatgttgctgcatcgccgtgtgcgcccatcagtgtcttcgtctgctgcagcaagcgagcttgtcctcgacatgtgtccaaattctatccggggtgcacaatatcggcatatgctgttgtatggatccgaaatccgtgatcatacctctgctgcatgcgtttaaactgcctgccttgaagaatttccagcaacacattctgaacatcctgaacaaactgatccttgaccagctggggggggcagaaatctcccctaagatcaaaaaggcggcctgtaatatctgtacagtggactcagaccagcttgcacaacttgaggaaacattgcagggtaatctctgcgacgccgaactctcgtcctcactgtccagtccatcataccgttttcaaggtattctgcctagttcgggctctgaggaccttctgtggaagtgggacgccctgaaggcctatcaaaacttcgtttttgaggaggaccgtctccactccatccaaatcgccaaccatatttgtaatctcattcagaagggaaacatcgtggtacaatggaagctttacaattacattttcaatccagttctccagaggggagtcgagttggcccatcactgtcaacacctgtctgtgactagtgcccagtcgcatgtgtgttcccaccacaatcagtgcctcccccaggacgtcctgcagatttatgtaaaaacactgcctattttgcttaaatcgcgggtgatccgcgacctctttctgtcgtgcaacggggtctcccagattattgaactgaactgcctgaacggaattaggtcacattctctcaaggcttttgagactctgattattagtctgggcgagcagcaaaaggacgcttctgtgccggatattgatggtatcgacatcgagcagaaggaattgagctctgtgcacgtgggcacctcctttcaccaccagcaggcgtatagtgacagcccacagagcctcagtaagttttatgccgggttaaaagaggcctacccaaagcggcggaagactgtcaatcaagatgtgcatattaacaccattaacctcttcttgtgcgttgcatttttatgcgtaagtaaagaggccgagtccgacagagagtcagccaatgacagcgaagatacctctgggtatgactccactgccagcgagcctctgtcacacatgcttccttgtattagtctagaaagcctggtgttgcctagccctgagcacatgcaccaggcggctgatatctggtcaatgtgccgctggatttatatgttgagttctgtgtttcagaagcagttttaccgtttggggggatttcgggtgtgccacaaacttatattcatgatcattcagaaactgtttaggtcccacaaggaagagcagggtaaaaaagaaggtgatactagcgtgaatgaaaaccaggacttgaatcggatctcacaaccgaagaggacaatgaaggaggatcttctctctttagccattaaatctgatccaattcctagcgagctcgggtcccttaagaagagcgcagactcgctcgggaagcttgaattacaacatatatcttcaatcaacgtcgaggaggtgagcgcgacggaagcagctcctgaagaggcgaagctgttcacttctcaggaaagtgaaacctctctgcagtccattagacttttagaggccctgctggccatttgtctgcatggagcaagaacctcacagcaaaagatggagttggagcttcccaatcagaatctgtccgtggagagtatcctgtttgagatgcgagaccatctgagccagagtaaagtcatcgagactcagcttgctaaacctctttttgacgctctcctaagggtggccctgggtaattattcggccgatttcgagcacaacgacgccatgaccgagaagtctcatcaaagtgcagaagagctttcaagccagccaggcgacttctctgaagaggcagaagatagtcagtgctgttcttttaaacttctagtggaggaagagggctatgaggcagatagtgagtcgaaccctgaggacggggagactcaggacgatggtgtcgatctgaaatcggaaaccgaagggtttagtgccagctcgtctcctaatgacctcctcgagaatctcacacagggcgagattatttacccagaaatttgtatgctggaactgaatcttctctctgcatcaaaagctaaactcgacgtgctggcgcatgtgtttgaatccttcctcaaaattatccggcagaaggagaagaatgtctttctgttgatgcagcaggggacagtgaagaatctccttggcggctttctgtccatcctcactcaggacgactcagatttccaagcatgtcaacgagtgcttgtggatcttctcgttagtttgatgtccagccggacctgcagcgaagaactgactctgctgcttcggatatttctcgagaaatctccctgcacccgggccactgatcagaaggtccagtccacttag

SEQ ID NO: 193748 - DNA, 1254 bp, synthetic construct
  misc_feature 1..1254: note = Description of Artificial Sequence: Synthetic coding sequence
  source 1..1254: mol_type = other DNA
atggccgcccccggcagcgcccggcggcccctgctgctgctgctgttgctcttgttgctcggactaatgcactgcgccagcgccgccatgttcatggttaagaacgggaacgggaccgcttgcattatggcgaacttcagcgccgcctttagcgtgaactatgatactaaatcaggccctaagaatatgacatttgatctaccctccgacgcaacagtggttttgaataggtcaagttgcgggaaagaaaatacttcagatcccagcctggtcattgccttcggacggggccacaccctcacactgaacttcacccgcaatgcaacgcgttattccgtgcagctgatgtccttcgtctacaatctctctgacacacatctgtttccaaacgcctccagcaaagaaatcaagactgttgaatcgattacagacatcagggccgacattgataaaaagtacaggtgtgtgtccggcacccaggtacacatgaataacgttactgtgacattgcatgatgcgacaatacaggcttacctgtccaacagcagtttttctagaggcgaaacccggtgcgagcaagacaggccatctcccacaaccgctccacccgcccccccgagtcctagccccagtcctgtaccgaagagcccgtccgtggataagtataatgtgtctggaacaaatgggacatgcttgctggccagcatgggtctccaactgaacctaacttatgagcgtaaggataacacaaccgtgactcgcctcttgaacataaaccccaataaaacctcagcctctggcagctgcggggcccacttggttactctggaactccactctgaagggacaacagtgctccttttccaattcggtatgaatgcctctagcagtcgcttttttcttcagggcattcagttgaatacaatattaccagatgccagagatccagcctttaaagccgcaaacggaagtctgcgagctctacaggctactgttggcaacagctacaagtgtaatgctgaagagcatgtccgagtaactaaggccttctcagtgaacatcttcaaggtatgggttcaggcctttaaagtcgaaggaggacaattcggttccgttgaggaatgtttactcgacgaaaacagtatgcttatccctattgcagtaggaggtgccctcgctggactggtcctgattgtattaattgcatacctcgtcggcagaaagcgctcccatgcgggatatcagactatttag

SEQ ID NO: 193749 - DNA, 1095 bp, synthetic construct
  misc_feature 1..1095: note = Description of Artificial Sequence: Synthetic coding sequence
  source 1..1095: mol_type = other DNA
atggccgcccccggcagcgcccggcggcccctgctgctgctgctgcttctccttctgttgggattgatgcactgcgcttctgccgctatgtttatggtgaaaaacgggaacggcaccgcctgtatcatggcaaacttttccgcggcattttctgtgaactacgacaccaagtcgggcccgaagaatatgacctttgacctgcccagcgacgctacagtggtcctgaaccgatcatcatgcggaaaggagaataccagtgacccaagcctcgtgatcgcgtttgggaggggccacacactcacactgaatttcactagaaacgcgacccgatacagcgtccagctcatgagtttcgtgtacaacctgtctgatactcatctattcccaaacgcctcgagcaaggaaacgaggtgtgaacaggaccgaccaagcccaaccactgctcctcctgcccctccttccccatcacccagccccgtcccaaagtccccttctgtcgacaaatataacgtgagtggtacgaatgggacatgtctgctggcctctatgggccttcagctgaatctgacctatgaaagaaaagataatacaaccgttactagacttttgaacatcaaccccaataaaacttctgcctcaggctcatgcggagcccatctcgtgacactcgagctccacagtgaaggaactactgtcctgctttttcagtttggaatgaatgccagtagttcacgattttttctgcaaggcattcaactcaataccatcctaccggacgcgcgggacccagccttcaaggctgctaatggtagtctgcgggcgttgcaggccactgtaggaaatagctacaagtgtaatgcggaagagcacgtgcgcgtgacgaaagcctttagcgtaaacatttttaaggtgtgggtgcaagccttcaaggtggaagggggccaattcgggtccgtggaggaatgtctcctggacgagaactctatgctgattccaatcgcagtggggggcgcacttgccgggctagtgctaatagtgttaattgcctatctcgtcggccgcaagcggtctcatgcgggatatcagacaatttag

SEQ ID NO: 193750 - DNA, 1233 bp, synthetic construct
  misc_feature 1..1233: note = Description of Artificial Sequence: Synthetic coding sequence
  source 1..1233: mol_type = other DNA
atggtgtgcttccggctgttccccgtgcccggcagcggcctggtgctggtgtgcctggtactgggggccgttcgctcttacgccttggagttaaacctgaccgatagcgaaaatgcaacttgcctttacgccaagtggcagatgaacttcactgtgcgctatgaaaccaccaacaagacatacaaaactgtaaccatctcagatcacggaactgtaacgtataacggctccatctgtggggatgatcagaatggacctaagatagccgtgcagttcgggcctggtttttcatggatcgctaattttaccaaggccgcttccacctattccatcgattccgtcagtttcagctacaacaccggagacaataccacgttccctgatgccgaggataagggtatcctgactgtggatgagctgctcgccatcaggatccccctgaatgacttattccgctgcaattccttaagcacactggagaagaacgacgttgtgcagcattattgggacgtcctggtacaggcctttgtgcagaacgggacagtgagcactaacgaattcctttgtgataaggacaagacatccaccgttgccccaactattcataccacggtgccgagtcccaccactacgcctaccccgaaagagaagccagaggctggcacgtactcagttaataacggaaacgacacctgcctgctggccaccatgggcttgcagttaaacattactcaagataaggtggcctccgtgatcaacataaacccaaatacaacacattcgacgggttcctgccgctcacacacagcattactgcgactcaactcctctacaatcaagtatctcgacttcgtgttcgccgtgaagaatgaaaatagattctacttaaaagaagttaacatttctatgtacctggtcaatgggtccgtgttttcaattgccaacaacaatttgtcttactgggacgctccgctcggaagctcctacatgtgtaataaggaacagactgtgagtgtttccggtgcttttcagattaatacttttgatcttagggtgcagccgttcaacgtgacgcaggggaagtattcgacagcgcaggattgtagtgcggacgacgataattttctggtgccaatcgctgtgggagccgctctggcaggtgttctcattctcgtattgctagcatatttcatcgggctcaaacatcatcatgccggatatgaacagttttag

SEQ ID NO: 193751 - DNA, 1233 bp, synthetic construct
  misc_feature 1..1233: note = Description of Artificial Sequence: Synthetic coding sequence
  source 1..1233: mol_type = other DNA
atggtgtgcttccggctgttccccgtgcccggcagcggcctggtgcttgtttgtctcgtgttgggagccgttcgcagctacgccctagaactgaacctgactgatagcgaaaatgctacctgcctctacgccaaatggcagatgaactttacagtaagatatgagacaactaacaagacatacaaaactgttaccatttccgaccacggaaccgtgacatataacggcagcatttgtggcgacgaccagaatggcccaaagatcgctgttcaattcggaccaggcttttcctggatagctaactttaccaaggcagcatcaacatattcaattgattcagtatcattctcatacaacaccggggataacacaacctttcccgacgcagaagacaaggggatcctgaccgtggacgagctactggccatccgcattcctctcaacgatctgttcaggtgcaattccctcagcaccctcgaaaagaacgacgtggtgcaacactattgggacgtcctcgtgcaggcctttgtgcaaaatggcacagtgtccacaaatgagtttctgtgtgataaagacaagaccagtacagtagcccccaccatccataccactgttcccagccccacaaccacacccactcccaaggagaaaccagaggcaggcacgtattccgtgaataacggcaatgatacctgcttactggcgacaatggggctccaacttaacattacgcaggataaagtggcttcagttattaacattaatccaaacaccacacattcaacagggtcctgccgctcgcataccgcactattaagactgaattcttccaccataaaatacctagatttcgtctttgccgtgaagaacgagaataggttctatctgaaggaggtaaatatcagtatgtatctggtgaatggttccgtcttcagcatcgccaataataatctgtcatactgggacgctcccctgggctcttcctacatgtgcaacaaggaacagacagtcagcgtgagcggcgctttccagattaatacctttgatctgcgggtacagcctttcaatgttacccagggaaaatacagtacagcccaagaatgttcccttgatgatgacacaatcctaattcccatcatagtcggcgccggtctatcaggtctgattatcgtgatcgttatcgcctacgttatcgggaggcgaaagtcttacgcgggctaccagacgctttag

SEQ ID NO: 193752 - DNA, 1236 bp, synthetic construct
  misc_feature 1..1236: note = Description of Artificial Sequence: Synthetic coding sequence
  source 1..1236: mol_type = other DNA
atggtgtgcttccggctgttccccgtgcccggcagcggcctggtgctggtgtgtttggttcttggtgccgtgaggtcttatgctctggagctcaatctgaccgactccgaaaatgccacgtgcctgtatgctaagtggcagatgaatttcacagtcaggtatgaaacgactaataagacctacaagaccgttacaattagtgaccatggaactgtgacttataatggctcaatttgcggcgatgaccagaacggtcccaaaattgcagtgcagtttggaccaggattttcttggattgcaaactttaccaaagccgcctccacatactctatagatagtgtgtctttcagctataataccggtgacaatacaacattcccagacgcagaggataagggtattctgacagtggacgaactgcttgccattaggatacctctcaacgacctattcagatgtaattctttgagcacactggagaagaacgacgtggtgcagcactattgggatgtcctggtccaggcttttgtacagaatggtaccgtctccacaaacgagtttctctgtgataaggataaaacctcaactgtggcacctacaatccacaccacagtcccgagtcccaccacaactcctactcccaaggaaaagccagaggccgggacatactcagtcaataacggaaacgatacatgtctgttggcaactatgggattacagctcaacatcacccaggacaaagtcgcatctgtgatcaatatcaatccaaacacaacgcactctacaggaagttgcaggagccacacagctctgttaaggctgaacagttccaccatcaagtaccttgatttcgtttttgccgtcaaaaacgaaaatcggttctatttgaaagaggtgaacatctctatgtacctggtgaatgggtccgtcttctccattgctaataataatttgtcatactgggacgcgcctcttggctcaagctatatgtgtaataaagagcagactgttagcgtctctggagcgttccagattaacaccttcgatttaagagtgcaaccctttaacgtcacacaggggaaatattctaccgctgaagaatgtagcgctgattctgatctgaacttcctaataccggtagcagtgggcgtcgctctcggatttttaatcatcgttgtctttatctcctacatgatcgggcgcagaaagtccaggactggctaccagagcgtgtag

SEQ ID NO: 193753 - DNA, 903 bp, synthetic construct
  misc_feature 1..903: note = Description of Artificial Sequence: Synthetic coding sequence
  source 1..903: mol_type = other DNA
atggtgtgcttccggctgttccccgtgcccggcagcggcctggtgctcgtttgcctggtcctggggatattgaccgtggacgaactgctcgccataagaattccattaaacgatcttttccggtgtaattccctgagcacacttgagaagaatgacgtggtacagcactactgggatgttttagtccaggcatttgtgcagaacggaaccgtgtctaccaacgaatttctgtgcgacaaagataagacctctaccgtggcacccaccatccacaccaccgtgccttctcccactaccaccccaactccaaaagagaagcccgaggctgggacctattccgtaaacaatggtaatgatacctgtctgctggcaactatgggactccagctgaacatcactcaagataaagtcgcttccgtcattaacatcaatccaaacaccacccactccacagggagttgccgcagtcacaccgccctgctcagacttaactcctcaaccatcaagtatttagactttgtattcgctgtgaagaatgagaatcggttttatctgaaggaagtgaatatttcaatgtatctagtgaacggatcagtgttcagtatagctaataacaacctgagctactgggatgccccactggggtcttcttatatgtgtaataaggagcagactgtgtcagtgtctggagcttttcagattaacacatttgacctgagagtccagcctttcaatgttacacagggcaagtatagcaccgcagaggagtgttccgcagactccgacttgaacttcttgatcccagtggccgtgggagtggctctcggttttctgattattgtggtctttatatcttatatgattggccgccgaaagagtcggacgggctaccaaagcgtgtag

SEQ ID NO: 193754 - DNA, 1092 bp, synthetic construct
  misc_feature 1..1092: note = Description of Artificial Sequence: Synthetic coding sequence
  source 1..1092: mol_type = other DNA
atgaacttcaccgtgcggtacgagaccaccaacaagacctacaagacggtgacaattagcgaccacggcactgttacatacaatggaagcatttgcggagatgaccagaatggtccgaaaattgcagtacaatttggacccggcttttcctggatcgctaatttcactaaggcggcttcaacttattcaattgactccgtttctttcagctataataccggtgataacactacattccccgacgcagaagacaagggtattctgacagtcgacgagctgctggcaatccggatccccttaaacgatctttttcgatgtaacagtctcagcacactggagaaaaatgatgtggtgcaacattattgggacgtgttggtacaggcatttgtgcaaaatgggaccgtgagtacaaatgagtttctgtgcgacaaagataagacttcaaccgttgcccccacaattcatacaacagtcccatccccgaccacaacccctactccgaaggaaaagcctgaggccggaacttacagtgtgaataacggaaacgatacatgcctgcttgctacgatgggcttacagctcaacatcacacaggataaagtggcgagcgtgatcaatattaatcccaatacaacccactccaccggcagctgccgctcgcacactgcactcttacggctgaattccagcactataaagtacttggattttgtatttgcagttaaaaacgagaaccgcttctatttgaaggaggtgaatatttccatgtacctcgtaaatggatccgtgttctcaatcgcgaacaataatctctcctattgggacgctccgctgggatctagctatatgtgcaacaaggaacagacagtcagtgtatcgggagcttttcagatcaacacttttgacttgcgcgtccagcccttcaatgttactcaggggaagtattcaaccgcccaggagtgcagcctggacgatgatactatcttgattcctattatcgtaggagcaggtttgtccggactgatcatcgtcattgtcattgcctatgttattggcagaaggaagagctacgcagggtaccagacattatag

SEQ ID NO: 193755 - DNA, 447 bp, synthetic construct
  misc_feature 1..447: note = Description of Artificial Sequence: Synthetic coding sequence
  source 1..447: mol_type = other DNA
atgaaggccctgatcgtgctgggcctggtgctgctgagcgtgaccgttcagggaaaagtttttgaacggtgtgaattggcccgcacactcaagaggctgggaatggacggatacagaggcatttccctcgccaactggatgtgcctggcgaagtgggagtctgggtataatacacgggctacaaactataacgcgggtgaccgaagtacggactacgggatcttccaaataaactcccgctattggtgtaatgatggaaaaactcctggcgcagtgaacgcctgtcatctatcatgctctgcgctgctgcaagataatattgcagacgccgtcgcttgcgcaaagcgggtggtacgcgaccctcagggcatccgtgcctgggtggcctggcggaacaggtgtcagaatagggatgtgcggcagtatgtgcaggggtgcggcgtctag

SEQ ID NO: 193756 - DNA, 585 bp, synthetic construct
  misc_feature 1..585: note = Description of Artificial Sequence: Synthetic coding sequence
  source 1..585: mol_type = other DNA
atgcaggacgcccccctgagctgcctgagccccaccaagtggagctccgtcagctcagccgactcaacagagaagtccgccagcgcagcaggaacacgcaatctcccgttccagttctgcctccggcaggccctccgaatgaaagcggcaggtatactcaccttgatagggtgcttagtcacaggagctgaatctaaaatctataccagatgtaaactggccaaaatttttagtcgggccgggctcgataactactggggcttcagcctcggcaattggatctgtatggcttactacgaaagtgggtacaacaccacagcgcaaactgtgctcgacgatggttccattgattacggcatctttcagatcaactcctttgcttggtgtagaaggggtaaactgaaggaaaacaatcactgtcatgtggcctgtagcgcgctcgttactgacgatctgaccgacgccatcatatgcgctaaaaaaattgtaaaggagacacagggcatgaactactggcaggggtggaagaaacactgcgaagggcgtgatctcagcgactggaaaaaagactgcgaggtgagctag

SEQ ID NO: 193757 - DNA, 441 bp, synthetic construct
  misc_feature 1..441: note = Description of Artificial Sequence: Synthetic coding sequence
  source 1..441: mol_type = other DNA
atgaaggccagcgtggtgctgagcctgctgggctacctggtggtgccatctggcgcgtatattttgggacggtgcacggttgccaagaaacttcacgacggcggcctggattacttcgagggctacagcctcgagaactgggtgtgtttagcctactttgagagcaaatttaatcctatggccatctacgagaacacacgggagggttacaccggattcggattgttccagatgaggggcagtgattggtgcggggaccatgggcgaaaccgctgccacatgagttgctccgccctcttaaaccctaatctggagaagacgataaaatgcgccaaaactatagtgaaagggaaagaggggatgggagcctggccgacgtggagcagatactgtcaatatagcgacacattagcacgatggcttgatggctgtaaactgtag

SEQ ID NO: 193758 - DNA, 441 bp, synthetic construct
  misc_feature 1..441: note = Description of Artificial Sequence: Synthetic coding sequence
  source 1..441: mol_type = other DNA
atgaaggccagcgtggtgctgagcctgctgggctacctggtggtgcccagtggggcgtacatccttggaagatgcactgtcgccaagaaactgcatgacggaggcctcgattatttcgaaggttatagcctggagaattgggtgtgtctggcttatttcgagagcaaattcaacccaatggccatctatgagaatacaagagaaggttacacgggattcggactctttcagatgcgcggtagcgactggtgtggcgaccacggcagaaaccggtgtcatatgagctgttcggccctgctcaatcccaatctggagaaaaccattaaatgcgccaagaccatcgtgaagggtaaggaaggcatgggggcctggcccacttggagtagatactgtcagtactcagatacacttgcccgctggcttgatgggtgcaaactctag

SEQ ID NO: 193759 - DNA, 447 bp, synthetic construct
  misc_feature 1..447: note = Description of Artificial Sequence: Synthetic coding sequence
  source 1..447: mol_type = other DNA
atgaccaaggccctgctgatctacctggtgagcagcttcctggccctcaatcaggcttcgctaatttctcggtgcgatttggcccaagttttgcagctggaagatctggacggcttcgagggatatagtttgagtgattggctctgtctcgctttcgtggaaagcaaatttaacattagtaaaattaatgagaacgcagacggaagtttcgactacggcctgttccaaataaattcgcactattggtgtaatgattataaatcttacagcgagaacctatgtcacgtggattgccaagacctcctgaacccaaacctccttgcagggatccactgcgccaaacgaattgtgagcggcgccaggggtatgaataactgggttgaatggcgacttcactgtagtggacgccctctgttttactggcttaccggctgtcggctccgctag

SEQ ID NO: 193760 - DNA, 447 bp, synthetic construct
  misc_feature 1..447: note = Description of Artificial Sequence: Synthetic coding sequence
  source 1..447: mol_type = other DNA
atgaccaaggccctgctgatctacctggtgagcagcttcctggcccttaatcaagcgtctctgattagtcgctgcgacctggcccaggtgctccagctggaggatctcgacgggttcgagggctacagcctttccgattggctgtgtctcgcgtttgtggagagtaaatttaacatctccaagatcaatgaaaatgcagacgggagtttcgattatggcctgtttcagattaactcgcattactggtgtaatgactataagtcctatagcgaaaatttgtgccacgttgattgccaggacctcctgaacccaaacctgctggccggcattcattgcgccaagcgtatcgtgtctggtgctcgaggcatgaataactgggtagagtggcgccttcattgcagtgggcgacccctattctactggctgacgggctgtaggctgaggtag

SEQ ID NO: 193761 - DNA, 447 bp, synthetic construct
  misc_feature 1..447: note = Description of Artificial Sequence: Synthetic coding sequence
  source 1..447: mol_type = other DNA
atgaccaaggccctgctgatctacctggtgagcagcttcctggccttgaatcaggcctccttaatcagtagatgcgatctggcacaggttctacagttggaagatttggacggctttgagggatatagcctgtctgactggctctgtctcgcgttcgtcgagtcaaaatttaatatcagcaagatcaatgagaatgccgatgggtcattcgactacgggttgttccagatcaatagccactactggtgcaacgactataaaagctactcagagaatctgtgccatgttgactgccaggatctgttgaacccaaacctgctggcgggaattcattgtgcgaagaggatagtgtccggtgcaagaggtatgaataactgggtggaatggcgattgcattgctcggggagacccctattctactggttgaccggctgtagacttcgatag

SEQ ID NO: 193762 - DNA, 2952 bp, synthetic construct
  misc_feature 1..2952: note = Description of Artificial Sequence: Synthetic coding sequence
  source 1..2952: mol_type = other DNA
atggagatgaagctgcccggccaggagggcttcgaggccagcagcgctccacgaaacatcccctccggcgagctcgattccaatccagaccctggaaccggcccctcccctgacggtccttcagacacagagtctaaggaactgggggtacccaaagaccccttgctgtttatacagcttaacgaacttctcggatggccccaagcgctcgaatggcgtgagacagggtcatcttccgccagtctcctgctcgatatgggcgagatgccgagcattactttgagcacccatttgcatcacaggtgggtgctctttgaggaaaagctggaggttgctgcagggaggtggtccgctccccacgtgcctacgctggcacttccgtcgctccaaaagctgagatcccttcttgctgaagggctcgttctcctcgactgcccggcacagtctctactcgagctagtggagcaagtgacgcgagttgagtctctgagcccggaactcagagggcagttgcaggccctcctgttacagcgcccacagcactataaccaaactactgggacacgaccctgctggggcagcactcacccacggaaggcttccgataatgaggaagctcctttgcgagaacagtgtcagaaccctttgaggcaaaagttacctcccggcgctgaggcaggcacggtgctggccggggagctgggattcctggctcaaccactgggagcattcgtacgtttaaggaaccccgtcgtactggggagtctaactgaggtctcgctaccgtcacgttttttctgcttactgctgggaccgtgcatgctaggcaaaggataccatgagatgggacgggcagccgcagtactgctgtccgacccacaatttcagtggtccgtcagacgggcgagtaacctgcacgatctgctcgctgcactggacgcgttccttgaggaggtcacagtgctaccacccggacggtgggatcctacggccaggattcctccacccaagtgtctgccttcccagcacaaacgcttaccctctcagcagcgcgaaatcagggggcccgccgtgcctcggttgacatccgccgaggacagacatcggcacggaccgcatgctcactcgcccgaacttcagcggactgggagattgttcggcgggttgattcaggacgtgaggcgcaaggtgccttggtacccaagcgatttcttggacgctctgcacctccagtgcttttcagccgtgttatacatttacttagcaaccgtcactaatgctatcacttttggcgggctcctgggagacgccaccgatggcgcgcagggggtgctggagtcttttctagggaccgccgtggcgggcgccgccttctgcctaatggcagggcagccacttaccatcctctcatcaactggccctgtgctggtgttcgagagattgttgttcagcttctctcgcgattattcgcttgattacctccccttccgtctgtgggtgggcatctgggtggccacgttctgcctagttctggtggccaccgaggctagcgtcctggtgcgctattttacccgctttacggaggaggggttctgtgcattaataagtttgatctttatatatgacgctgttggtaaaatgctcaatcttacacacacctatcccatccagaaaccgggctcgagtgcctatggatgcctctgccagtatccaggtcccggaggaaatgaaagtcagtggatcagaactaggcccaaagaccgagacgacatcgtttccatggaccttggcttgatcaatgcgagcctgctccccccacctgaatgcacccgccagggagggcacccccgtgggcccggatgccacacagttcccgacatcgcctttttctcattgctgctctttctgacaagtttcttttttgccatggccttgaagtgcgtcaagacctctagattttttccttcagtggtgaggaagggcctgtcagatttctcaagcgtgctcgcaattctgcttggatgtggtctggacgcattcctcgggttagccaccccaaagctgatggtgccccgtgagttcaagcccaccctcccagggcgagggtggcttgtctctccttttggagcaaatccctggtggtggagtgtggcagctgctttgcccgccctactcttaagtatactgatcttcatggaccagcaaataacggccgtcatcttgaatcgcatggaataccgcctccagaaaggcgccgggtttcacttggacctattctgtgttgccgtgcttatgctcctaactagtgccctaggattaccctggtacgtttcagcaacagtgatctcattagcacacatggattctctccggcgcgagagtagagcctgtgcacccggtgaacggcccaatttcctcgggatccgggagcagcgcctgaccggactcgttgtgttcatcctgaccggagcctccattttcctcgcgcccgtcctcaagtttattccaatgccagtgttatatgggatatttctctacatgggagtcgctgccctttcaagtattcagttcaccaatagggtgaaactgctattgatgccagctaagcatcaacctgatctgctgctgttaagacacgtgccactcacccgggtccatctctttacagcaatacagttggcttgtttgggcctgctgtggattattaaatctacccccgccgctatcatctttcccctgatgcttctcgggctagtgggtgttaggaaagccttggagcgtgtttttagtccacaggagttgctttggttggacgaattaatgcccgaagaggaacgctctattcccgaaaagggattggaaccggagcatagtttttcaggaagtgactccgaggattcagagttaatgtaccagcctaaggcacctgagatcaacatctccgtcaactag

SEQ ID NO: 193763 - DNA, 123 bp, synthetic construct
  misc_feature 1..123: note = Description of Artificial Sequence: Synthetic coding sequence
  source 1..123: mol_type = other DNA
atgcggttcgcctggaccgtgctgctgctgggccccctgcagctgtgtgcgttagtccattgcgcccccccagccgcgggtcaacagcagccccccagagaacccccagccgcccccgggtag

SEQ ID NO: 193764 - DNA, 1134 bp, synthetic construct
  misc_feature 1..1134: note = Description of Artificial Sequence: Synthetic coding sequence
  source 1..1134: mol_type = other DNA
atgcggttcgcctggaccgtgctgctgctgggccccctgcagctgtgcgcattagtccactgcgctccccctgcagcagggcagcaacagcctcccagggagcctcccgccgcccccggagcagctagtgcccaacagcctcggacccctatcctgttgattcgcgacaacaggacggccgcggccagaactcgcacagccggatcctccggtgtcaccgccgggcggccccgccccactgcgcggcattggtttcaggctggatatagtacatctcgtgccagggaagccggcgccagcagggctgaaaaccagacagcaccgggggaagtaccagccctatctaatctgcgacccccatcacgcgtggatggcatggtgggggatgacccctataacccatacaagtactctgacgataacccctactacaattattacgacacttatgagcggcccaggccagggggcaggtatcgcccaggatacggaacagggtattttcaatacggactgccagaccttgtggcagacccttactatatccaagccagcacatacgtccagaaaatgagcatgtataaccttcgctgcgccgctgaagagaattgccttgccagcacggcctatcgcgcagatgttagagattacgaccatcgggtcctgctcagattcccccaaagagtgaagaaccaaggcacttcagatttccttccctctaggcccaggtatagctgggagtggcactcatgtcatcagcactatcacagcatggatgagttctcccattacgacctgcttgatgccaacacacagaggcgcgttgccgaaggtcacaaagcttcgttttgcttggaggacacctcctgtgactatgggtaccatcggagatttgcatgcactgctcacacacagggcctttcccccggatgttatgatacctacggcgccgacatagactgccagtggattgatatcactgatgtaaagccagggaactacatcctgaaagtttccgtgaatcctagctatctggtgcccgaaagcgactacacaaataatgtggtgcgctgcgacatcaggtataccggacaccacgcttacgcctcaggctgtacaatatctccttactag

SEQ ID NO: 193765 - DNA, 2325 bp, synthetic construct
  misc_feature 1..2325: note = Description of Artificial Sequence: Synthetic coding sequence
  source 1..2325: mol_type = other DNA
atggagcggcccctgtgcagccacctgtgcagctgcctggccatgttggcccttctgtcacctctttccctggctcagtacgatagctggcctcattatcccgaatacttccagcagccggctccagagtaccaccaacctcaagccccagccaatgttgccaagattcaattacggctagccgggcagaagagaaagcattccgagggacgagtggaagtgtactacgatggccaatggggaactgtgtgtgacgacgatttcagcatacatgcagcgcatgtcgtatgccgtgagttggggtatgtggaggctaagtcttggacagcatcctcttcttacgggaagggtgagggtcccatttggttggataatctgcactgtactggaaatgaggcaacactcgctgcttgcacttctaacggatggggggtaacagattgtaaacacacagaggacgttggcgtggtctgctccgataaaagaatacctggtttcaagttcgacaacagccttatcaaccaaattgagaatctgaacattcaggtggaagacatacgtattagagccatattgtcaacatatcgtaagaggactccagttatggaaggttacgtggaggtcaaagagggtaaaacatggaagcagatttgcgataagcactggacagcaaaaaattctcgagtcgtgtgtggtatgtttggcttccctggggaaagaacctataacaccaaggtgtacaagatgtttgcgagtcggcggaagcagcgttattggcctttttctatggattgcacgggaaccgaagcccatatttctagttgcaagctggggccccaggtcagcttggaccccatgaaaaatgtgacttgtgaaaacggcctcccagcagtggtctcttgcgtaccggggcaggtattctcaccagacgggccttcgagattccggaaggcatataagccagagcagcccctggtcaggcttcgcgggggggcatatatcggcgagggtagggtggaagtgttaaaaaatggggaatggggcaccgtatgtgatgataaatgggacctggtttccgcaagcgtggtgtgccgagagctcggcttcggatctgcaaaggaggcagtgacaggaagtagacttggacagggcataggcccgattcatctgaatgagattcagtgtacaggaaatgaaaaaagcataatcgactgcaagttcaatgccgagagccagggctgcaatcacgaggaggacgcaggggtgaggtgcaacacccctgctatgggtctgcagaaaaagctccgtctgaatggaggtagaaatccttatgagggaagggtggaggtacttgtggaaaggaacggctcgcttgtgtggggaatggtttgtggtcaaaactgggggattgtggaggcaatggtagtatgtcgtcagctgggcctgggctttgcctcgaacgcttttcaggaaacatggtactggcatggagacgtgaactcaaacaaggtggtgatgagtggggtcaaatgctcaggaactgagctatctctggctcactgtaggcatgacggagaggatgtagcttgcccccaaggcggagtgcagtacggggcgggggtggcctgctcggagacagccccggatctcgtactgaacgccgagatggttcagcaaacaacttacctcgaagaccgccccatgtttatgttgcagtgcgccatggaggaaaactgcctctctgccagcgcggcccagacagatcccactactggatatcgtagattgctcaggttcagctctcagatccacaataacgggcagagcgacttccgccctaagaacggtagacacgcatggatatggcatgattgccaccgtcattaccacagtatggaagtatttacacattatgacctgctgaatttgaatggaaccaaggtagcagaaggacataaggcttctttttgtctggaagatacggagtgtgaaggggacattcagaaaaactacgaatgtgctaattttggcgatcaagggatcaccatgggatgttgggacatgtatcgccatgacatcgactgtcagtgggtcgacataactgacgttcccccaggcgattacctttttcaagtggtcataaacccgaatttcgaggtggccgagtccgactacagtaacaacatcatgaaatgccgatctcgatatgacggacaccggatctggatgtacaactgccatatcggggggagtttcagcgaagagaccgagaaaaagttcgagcacttttctggactgcttaacaaccagctctctcctcagtag

SEQ ID NO: 193766 - DNA, 456 bp, synthetic construct
  misc_feature 1..456: note = Description of Artificial Sequence: Synthetic coding sequence
  source 1..456: mol_type = other DNA
atggagcggcccctgtgcagccacctgtgcagctgcctggccatgctggcccttctgagccccctatctcttgctcagtacgactcgtggccacactaccccgagtattttcagcagcccgcccctgagtatcaccagcctcaggctcccgcaaacgttgcgaagatccagttacgactggctggtcagaaaagaaaacatagcgaagggagagtggaggtctactatgacggtcaatggggtacagtgtgcgatgacgacttcagtatacacgctgcccacgtggtgtgccgcgagcttgggtacgtggaggcaaagagctggaccgcgagtagctcctacggtaaaggggagggcccaatctggctggacaacctgcattgcacaggcaacgaagccaccttggccgcatgcacatccaatggctggggtgttactgactgcaaacatacatag

SEQ ID NO: 193767 - DNA, 291 bp, synthetic construct
  misc_feature 1..291: note = Description of Artificial Sequence: Synthetic coding sequence
  source 1..291: mol_type = other DNA
atggagcggcccctgtgcagccacctgtgcagctgcctggccatgctggctctgttatctcctctgagtcttgctcagtatgacagctggccacattatcccgaatatttccagcaacccgcaccagaatatcatcagcctcaagcaccagctaatgtggccaagatacagctccggcttgcaggccagaagaggaagcatagtgagggacgggtggaggtgtactatgatggccagtgggggacagtgtgtgacgatgatttttcgatacacgcagctcacgtcgtgtag

SEQ ID NO: 193768 - DNA, 420 bp, synthetic construct
  misc_feature 1..420: note = Description of Artificial Sequence: Synthetic coding sequence
  source 1..420: mol_type = other DNA
atggagcggcccctgtgcagccacctgtgcagctgcctggccatgctggccctcttgtccccactcagtttagctcagtacgacagctggccccattacccagaatactttcagcaacctgctcccgaataccaccagccacaggcaccagcaaatgtagcaaagatccaacttcgactggctggtcagaaacgtaagcacagcgaaggacgagtggaagtctactacgatggccagtggggcaccgtgtgcgatgatgatttttctattcatgcagcacacgttgtctgcagagaactggggtacgtggaagccaagagttggacagctagctcaagttatggcaagggcgaggggccgatctggctggacaacctgcactgcactggaaatgaggcgactctcgccgcttgcacgtag

SEQ ID NO: 193769 - DNA, 2262 bp, synthetic construct
  misc_feature 1..2262: note = Description of Artificial Sequence: Synthetic coding sequence
  source 1..2262: mol_type = other DNA
atgcggcccgtgagcgtgtggcagtggagcccctggggcctgctgctgtgtttgctttgttcttcctgcctcggttcaccatcacccagcacaggccccgagaaaaaagcaggttcccagggccttcggtttaggctcgctggcttcccaaggaagccctacgaggggcgcgtggaaatccaaagggctggcgagtgggggaccatttgcgatgacgattttacccttcaggctgcacacatactttgccgagaactcgggttcactgaggcaaccggctggacccactcggcaaagtatggacccggaaccggcagaatctggctggataatctaagttgctccggaacagaacagagcgttactgagtgtgcaagtagggggtggggcaatagcgattgtactcatgacgaggacgccggggttatttgcaaagaccagagattgcctggatttagtgactctaacgtcatcgaggttgagcatcatttacaagtggaagaggtcaggattagaccagccgtgggctggggtcgacgacctctgccagtgactgaagggttagtggaggtgagactgccagatggatggtctcaggtttgtgacaaaggatggtctgctcataattcccacgtggtctgcggcatgctgggctttccatccgagaaacgggtaaacgcggcattctacaggcttctggcccagcggcaacagcatagctttggactccatggagttgcatgtgtgggtactgaagcacacctcagcctctgctctttagaattctaccgcgcgaatgacacagcccgctgcccagggggaggaccggcagtggtctcatgcgtgcctggacccgtgtatgctgctagctccggccaaaagaaacagcaacagtcaaagccccaaggggaagctcgagtccgcttgaaggggggggcacacccgggtgagggtagagttgaggtgctgaaggcctctacgtggggcaccgtatgcgatcgtaaatgggatctgcacgctgcatcagtcgtgtgtcgcgaactcgggttcggctctgccagggaggcactgtcaggcgcccgaatggggcaggggatgggagctatccacctttcagaggtgcgctgttctgggcaagagctttctctttggaagtgtccacacaaaaacatcacagcagaagactgtagccactcccaggatgcaggtgttaggtgtaatctgccctacacaggagccgagactcgaatcagactctctgggggaaggagtcagcacgaaggccgggtggaagtccaaattgggggtcccggtcctttaaggtggggcttaatttgtggcgacgattggggcaccttagaggccatggtggcctgtagacagctgggccttgggtacgccaaccatgggcttcaggaaacttggtactgggacagcggaaatataacagaggtggtcatgtctggcgtccgatgcactggaaccgagctttctctggatcagtgcgcgcatcacggcacgcatattacatgtaagagaacagggacccggttcacagccggagtcatatgttccgaaactgcatcagatttacttctgcactccgctctagtgcaggagacggcttatattgaggatagaccactgcacatgctttactgcgccgccgaggaaaactgcctggcctccagtgcccgcagcgccaactggccctacgggcataggcgccttctgcgctttagttcacagatccacaacctaggccgcgccgacttcaggccaaaagctggaagacattcctgggtttggcatgagtgtcatgggcactatcattcaatggacatctttacacactacgacattctgacacctaacggcacaaaagtggcagagggccacaaggcctctttctgcctcgaggacaccgaatgccaagaggacgtgtcgaaacgttacgagtgcgctaatttcggcgaacaggggatcaccgtaggatgttgggacttgtatcggcacgatatcgactgtcagtggattgacattactgatgtgaaaccaggaaattatatcttgcaagtcgtcatcaatcctaactttgaggttgccgagtccgatttcactaataatgccatgaagtgcaactgcaaatacgatggacatcgcatatgggtgcacaactgtcacattggagacgctttttccgaagaagccaacagacgttttgaacgttaccccggtcaaacgagcaaccaaatcatctag

SEQ ID NO: 193770 - DNA, 1827 bp, synthetic construct
  misc_feature 1..1827: note = Description of Artificial Sequence: Synthetic coding sequence
  source 1..1827: mol_type = other DNA
atgcggcccgtgagcgtgtggcagtggagcccctggggcctgctgctgtgcctgctgtgcagctcctgcctgggctctccatcaccatcaacagggcccgaaaagaaggcaggatcccagggtcttaggttcagattggcgggcttcccgaggaagccttatgaaggccgggtagagatccagagggcaggtgaatggggcactatttgtgatgacgatttcacactgcaggcagcgcatattctctgcagggagctagggtttacagaggctacaggctggacacacagcgcaaaatacggacctggcaccggccgtatctggctagacaatctgagctgctctggaaccgaacaaagcgtcacagaatgcgcatccagggggtgggggaacagcgactgtacccacgatgaggatgccggtgtcatttgtaaggatcaaaggctccctggattttctgactccaacgtgattgaagctcgcgtccgcctgaaagggggagctcatccaggggaaggaagggtcgaagtgttgaaagcctccacatggggtaccgtgtgtgatcgtaagtgggatctccatgccgccagtgttgtgtgcagagagcttggcttcggaagcgcgagagaggctttgtccggcgctagaatgggtcaaggcatgggagctatccacctgagcgaggtacgctgttccggacaggaattatctctctggaaatgtcctcataagaatatcacggcagaggattgctcccactcgcaggacgccggggtccgatgcaatctgccttatacaggcgccgaaacaagaattaggttgtccgggggcagatcccagcatgagggcagggtggaggtgcagattggcgggcccgggcctctgcgctggggactgatttgtggtgatgactggggtaccctcgaagccatggtagcctgccggcaactcggattgggctacgccaatcacggacttcaggagacttggtactgggacagtggcaatattacagaggtcgttatgagcggggtaaggtgtaccggaacagagctgtccctggaccagtgcgcccaccacggcactcatattacgtgcaaaagaacaggaacccggtttacagctggagtcatttgttccgagaccgcctcagatctgctgttacatagcgccctcgtgcaagagacagcatacatagaggacagacctctgcacatgctgtactgtgccgcggaagagaattgcttggcatcctctgctcgatcagccaactggccatacggccaccgccgcctccttcgattttcctctcaaatccacaatctcgggcgggctgattttcggcccaaggcaggaagacactcatgggtgtggcacgagtgccacggtcactaccactccatggatatcttcacacactacgacatccttaccccgaatggcaccaaggttgcggaaggtcataaagcatcgttttgtctcgaagacacagagtgccaggaggacgtgagcaaaagatacgaatgtgccaactttggggagcagggcataactgtaggatgctgggatctgtataggcacgacattgactgtcagtggatcgacattacggatgtgaagccaggaaactacattttgcaggtggtgatcaacccgaattttgaagttgcagaaagcgattttaccaataacgccatgaaatgtaattgcaaatatgatgggcaccggatctgggttcacaattgccatatcggcgacgccttctccgaggaggcaaaccgccggttcgagaggtacccagggcaaacatcaaaccagattatatag

SEQ ID NO: 193771 - DNA, 2094 bp, synthetic construct
  misc_feature 1..2094: note = Description of Artificial Sequence: Synthetic coding sequence
  source 1..2094: mol_type = other DNA
atgcggcccgtgagcgtgtggcagtggagcccctggggcctgctgctgtgtcttttgtgttcgtcttgcttggggtcaccgtcgccttccactggaccggagaaaaaggcaggaagccagggactgcggttccgtctcgccgggtttcctcggaagccctacgagggacgcgtcgaaattcaaagggcaggggagtggggcaccatatgcgatgacgactttaccctacaggcagcgcacattctctgtagagagttaggctttactgaggccaccggctggacccatagcgcaaaatatggccccggcacgggccggatttggcttgataacctcagctgtagcggcacagagcagagcgtgacagaatgcgcaagccgcgggtggggcaattcggattgtacacacgacgaagatgccggggtgatctgtaaggaccagagattgccaggcttttctgactccaatgtgattgaagtcgagcatcatctgcaggttgaggaggtgcggatccgtccagccgtgggatgggggcgacgacctctcccagtgacagagggacttgtggaggtgcggctccctgatggttggtcccaggtctgcgacaaaggctggagcgcccacaacagccacgttgtgtgtggcatgctggggttcccaagtgagaagagggtcaacgctgctttttataggctgcttgcacagagacagcagcattcttttggactccacggggtggcctgcgtagggacggaagcacacctcagcctttgctcacttgagttctatagggctaacgataccgctagatgtccgggcggggggcctgccgtcgttagctgcgtgccgggacctgtgtatgccgcaagcagcggccaaaaaaaacagcaacagtccaaaccccagggggaggccagagtgagactaaaagggggggctcaccctggcgaaggccgtgtggaggtgctgaaagcttctacatgggggacggtgtgcgatcgcaagtgggatctccacgcagctagcgttgtgtgtagggaattgggctttggaagcgctagagaggctctgtcaggagccaggatgggccagggcatgggagctatacacctgagtgaggtgcgttgtagtggccaagagcttagcctgtggaaatgtcctcacaagaatattacggcagaggactgttcacatagtcaggatgctggagtaagatgcaacctgccatatactggagctgagacccgggaaacatggtattgggacagcgggaacattaccgaagttgtgatgtctggggtgagatgtaccggtaccgagctgtctctcgaccagtgcgcacaccacgggactcacattacctgcaaacggacaggcacgcgatttactgccggtgtgatctgcagcgagacggcctcagacctgctgctgcactccgcactggtccaagaaacagcttatattgaggacagacccctccatatgctgtattgtgccgccgaagagaattgtctggcctcctccgccagaagcgcgaattggccatacggacaccggaggctcctgaggtttagcagccaaatccacaacctgggtcgagcggatttccgcccgaaggcgggacggcacagctgggtgtggcatgaatgccacggccattaccattccatggatatctttactcattatgacatcttgacccctaacggaactaaagtggcagagggccacaaagccagcttttgtctagaggacactgagtgccaagaggacgtcagtaagcgatatgaatgtgctaactttggcgaacagggaataacggtcggatgctgggatctgtacaggcacgacatcgattgccagtggatagacattactgatgttaagcctggtaactacatcctgcaagtcgtcattaaccccaacttcgaagtggccgaatccgatttcaccaacaatgctatgaaatgcaactgtaaatatgatgggcatcgcatctgggtccacaattgccacatcggagatgccttcagcgaagaagctaataggcggttcgagcggtaccctggacaaaccagtaaccagattatctag

SEQ ID NO: 193772 - DNA, 912 bp, synthetic construct
  misc_feature 1..912: note = Description of Artificial Sequence: Synthetic coding sequence
  source 1..912: mol_type = other DNA
atgcggcccgtgagcgtgtggcagtggagcccctggggcctgctgttgtgtctcctgtgctccagctgtctggggtccccgagtccctctacaggtccggagaagaaggctggttctcagggtctcagattcagactcgcagggtttccaaggaaaccctatgaagggcgcgttgagatccagagagccggcgagtggggcactatctgcgacgacgatttcaccttgcaagccgctcatatcctgtgccgggagttgggattcacggaagctactgggtggactcattcagccaaatatggaccgggaactggtaggatttggcttgacaatctctcttgctccggaacggagcagtccgtcaccgaatgcgctagccgaggatgggggaactcagattgcacccatgacgaagatgcaggcgtcatctgtaaggatcaaaggcttccaggatttagcgattcaaacgtcattgaggtggagcatcatttgcaggtcgaagaggtgagaatccgccctgcggtggggtggggcaggcgcccactaccagtaacggagggcctagtcgaagtgcggctgcccgacgggtggagccaggtttgtgataaaggatggagtgcccacaatagccacgtggtgtgtggaatgctgggtttcccctccgaaaagagggttaacgccgcattctataggctgctcgcccaacggcagcagcatagtttcggccttcatggggtggcctgcgtggggacagaagcgcacttgagtctgtgctccctcgaattttatcgagcgaacgacacggcgcgatgtccgggcggaggcccagcagtggtctcctgcgtaccaggaccagtctacgctgcctcttccgggcagaagaagcagcagcaaagtaagccacaaggatag

SEQ ID NO: 193773 - DNA, 2271 bp, synthetic construct
  misc_feature 1..2271: note = Description of Artificial Sequence: Synthetic coding sequence
  source 1..2271: mol_type = other DNA
atggcctggagcccccccgccaccctgttcctgttcctgctgctgctgggacagccccccccttctcggcctcagtcgttgggtaccacgaaactgagacttgttggccccgagtccaaaccagaggagggcaggctagaggtgttgcaccagggacaatgggggaccgtctgcgatgataattttgcgattcaggaggcaacggtagcctgccgacagctgggttttgaagcggccctgacatgggcccattcagctaagtacggacagggagaaggacccatatggctggacaatgtaagatgcgtcggaaccgaaagtagcctggatcaatgcggaagcaacgggtggggtgtgtcggattgctctcactctgaagatgtaggggtaatctgccatcccagacggcatcgaggttatctcagcgagacagtgtccaatgcactgggccctcagggcaggaggctcgaggaagtcaggctgaagccgatcttagcatcagcaaagcagcactcacccgtgaccgagggagccgttgaggtaaagtatgagggacactggaggcaagtgtgtgatcagggctggacaatgaataatagcagggtggtgtgcggaatgctgggcttccccagcgaggttccagtcgattctcactattaccgcaaggtgtgggatctgaaaatgcgggaccccaagagtagattgaagagcttaaccaacaagaactccttttggattcaccaggtaacatgtctaggcaccgaacctcatatggctaattgtcaggtgcaggtcgcgccggcccgcgggaagcttcggcctgcttgcccgggcggcatgcacgctgttgttagttgcgtggcagggcctcatttccgccctcccaaaactaagcctcagcggaaagggagttgggcggaggagccaagggtgagactgaggtctggggcccaggtgggcgaggggagagttgaggtattgatgaatcgacaatggggcactgtctgtgaccaccggtggaatcttattagcgctagcgtagtctgccggcagcttgggtttggaagtgctagggaggccctgttcggagcccgacttggacaggggctgggccccatccatctttccgaggtaaggtgcaggggctatgagcgaaccttatctgactgtcctgcactggaaggctcccagaacggttgccaacacgagaatgacgcagccgtgcggtgcaacgtgcccaacatgggattccagaatcaagtgcggttggcaggcggcagaatccccgaggaggggctgctggaagttcaggttgaggtgaacggggtccccagatggggcagcgtttgctcagagaactggggacttacagaggccatggttgcctgcaggcagctaggcctcgggttcgctattcacgcttataaagagacgtggttttggtccggcacaccaagggcccaagaggtggtcatgagtggggtgagatgcagtggcacagagctggcgcttcagcagtgtcagcggcacggccctgtgcactgcagtcacgggggggggcgctttttagccggagtctcatgcatggattctgccccggatctcgtaatgaacgcgcagttagtgcaggagaccgcctatctcgaagatagaccactctctcagctgtactgcgcacacgaagagaattgtctctcgaaatctgcagaccacatggactggccttatgggtataggagattgctgcgctttagtactcaaatttacaatctcggccgaaccgacttccggcccaagacagggcgggactcttgggtttggcaccaatgccacagacactatcactcaattgaggttttcactcactacgacctattaacattaaacgggtcaaaggttgccgaaggccacaaagcatccttctgcctcgaggatactaactgtccgaccggcctccagagaaggtatgcgtgcgccaacttcggagagcagggtgtgaccgtgggatgctgggacacatatagacacgacatcgattgccagtgggtcgacatcactgatgtcggacccggcaactatattttccaggtaattgtgaacccgcattatgaggtggccgagtctgatttctccaataacatgcttcagtgccgatgcaaatacgacggtcacagagtgtggctccataattgccatacgggcaatagctatcctgccaacgctgagctgagcctcgagcaggaacagcgcctgcgtaataatctcatttag

SEQ ID NO: 193774 - DNA, 1794 bp, synthetic construct
  misc_feature 1..1794: note = Description of Artificial Sequence: Synthetic coding sequence
  source 1..1794: mol_type = other DNA
atggccgccgtgcaggccgccgaggtgaaggtggacggcagcgagcctaagctgtccaaaaacgaactgaaacggaggctaaaggctgagaaaaaagtggcggaaaaggaagccaagcaaaaggaactctctgagaaacaactgtcacaggctacagcagccgcaacaaaccatacaacagacaatggcgtgggcccggaagaggagtctgtagacccaaatcagtactataagattcgtagccaggctatccatcagctcaaggtgaacggagaggacccatacccgcacaagttccacgtcgacatatccctgaccgacttcattcagaaatacagtcacctgcagcctggagaccatctgacagacatcaccttgaaagtggcgggaaggattcacgctaaacgcgctagcggcggcaagcttattttctatgacttgcgcggcgagggagttaagctccaggtaatggcaaatagcagaaactacaaatccgaagaagagtttatccatataaacaacaaactgcggaggggagatatcataggggtccagggcaacccaggcaagacaaagaagggggagctgtccattatcccatacgaaataaccctgctctcaccttgccttcacatgcttccacacctgcacttcggacttaaggataaggagaccagatatcgccaaagatatttggacctgattctcaacgacttcgtgaggcaaaaatttattattcgctccaagattataacttatatccgctcatttctggacgaactaggctttctagaaatcgagacacccatgatgaatatcataccaggaggggctgtggccaagccgttcatcacataccacaacgagttagacatgaacttgtacatgagaatcgctcccgagctataccataaaatgttggtcgtgggagggattgatcgtgtgtatgaaattggcaggcagttccgcaacgaaggcatcgacctcacacacaacccagaatttactacttgcgaattctatatggcttatgctgattaccacgacctaatggaaatcacagaaaagatggtatccggtatggttaaacatattacgggttcatataaggtgacctatcatcctgacggccccgagggacaagcttatgacgtggacttcactccgccgtttaggaggatcaatatggtcgaagagctcgaaaaggcccttggtatgaagttgccagagaccaatctgtttgaaacggaagagacccgtaagatactggacgatatctgcgtggccaaagccgttgaatgtcccccgcccaggacaacagctcggctccttgacaagctcgtgggggaatttctagaagtgacatgcattaatcccacgttcatttgtgaccatcctcagattatgtcccccttggctaagtggcatcggtctaaggaaggacttactgagaggttcgagttgttcgttatgaagaaagagatatgcaacgcctatacagagctgaacgacccaatgcgccagcggcagctgttcgaggagcaggctaaggccaaggctgccggcgatgacgaagcaatgttcattgacgaaaatttctgtaccgccctggagtacgggttgcctcccactgccggttggggaatgggcatagatcgagtcgcaatgttcctgacagatagcaacaatattaaggaggttctcctgtttcctgccatgaagcccgaagacaagaaagaaaatgtagccaccacagacactctcgagtccaccactgtcggcacctcagtgtag

SEQ ID NO: 193775 - DNA, 1878 bp, synthetic construct
  misc_feature 1..1878: note = Description of Artificial Sequence: Synthetic coding sequence
  source 1..1878: mol_type = other DNA
atgctgacccaggccgccgtgcggctggtgcggggcagcctgcggaagaccagctgggcggagtgggggcaccgggagttgcgcctgggacagttagcccccttcactgctccccataaggacaagagctttagcgatcagcggtcagaactaaaacgccggttgaaggcagaaaagaaggtggcagaaaaggaagctaagcagaaggaacttagcgaaaaacagctgtcccaggcaactgccgctgcgaccaaccacacaaccgacaacggggtggggcccgaagaagagtcggtggatcccaaccaatactataaaattcgttcacaggcgattcaccaactcaaggttaacggagaagatccatatccacataaatttcatgtggacatttctctgacggactttattcagaaatactcacacctgcaacctggggatcatttgaccgacattactctcaaagtagccgggcggatccacgccaagcgggcttctggaggaaaactcatcttttacgacttaaggggcgagggcgtgaagctacaagtcatggcgaattcaagaaactacaaatccgaagaagaatttatccacattaacaataaactgagacgaggggacattatcggtgttcagggtaaccctggcaagactaaaaagggagagctgtccattatcccatatgaaatcaccttactgtccccatgtttacatatgctgccgcatttgcactttgggctgaaagataaggaaacccggtaccggcagagatatctggaccttatcttgaacgatttcgttagacagaaattcattatccgctccaagatcatcacctacattcgttcatttcttgacgaactgggctttttggagatcgagacgccgatgatgaacatcatccctggtggagcggtcgccaagcccttcataacttaccataatgaactcgatatgaacttgtatatgcgtatcgccccagaactgtatcacaaaatgcttgtcgtcggtggtattgaccgggtttatgaaattgggaggcaatttcggaatgagggaatagacttgacccataacccggaattcacaacctgcgaattttacatggcttatgctgactaccatgacttgatggaaatcaccgaaaagatggtgtctggaatggtcaagcacatcactgggtcctacaaggtgacctaccacccagacggcccagagggccaggcttatgatgttgacttcactcctcctttccgacggatcaacatggttgaggaactggagaaggcgttaggcatgaaactcccggagaccaacttattcgagaccgaggagacccggaagattctggacgatatctgcgtggcgaaggctgtggagtgtcctccaccacggaccacagcccgtctgctcgataaattagtgggggagtttctggaagtgacctgtatcaacccaacgttcatctgcgatcaccctcagattatgagcccacttgccaagtggcatcgcagtaaagaggggttgaccgagagattcgaacttttcgtgatgaagaaggagatctgcaatgcttacacagagctgaacgacccaatgagacagcgccaacttttcgaggagcaggctaaagccaaagcagcaggggacgacgaagccatgtttatagatgaaaatttctgcactgccctggagtatggattgccacctaccgctggctgggggatgggcatcgatcgcgtggccatgtttcttaccgactccaacaatatcaaggaggttttactgtttcctgcaatgaagcccgaagataagaaggagaatgttgcgactaccgacactcttgaatccactacagtaggtacttctgtttag

SEQ ID NO: 193776 - DNA, 1569 bp, synthetic construct
  misc_feature 1..1569: note = Description of Artificial Sequence: Synthetic coding sequence
  source 1..1569: mol_type = other DNA
atgcagccctggcacggcaaggccatgcagcgggccagcgaggccggcgccaccgcccccaaggcatcagcccgaaacgccagaggcgctccaatggaccccacagaaagtcctgcagcccccgaggccgctctacctaaggccggcaagtttggcccagcaaggaagagtgggagcaggcagaagaagtccgcccctgacacccaggaaaggcctcccgtgcgcgctacaggcgctagagcaaagaaagctcctcaacgcgcgcaagacactcagcctagtgacgccactagcgccccaggtgcagagggactcgagccccctgccgccagggagcctgcactgagtagagctggctcttgccggcagcgaggcgctcgttgttcgacgaagcctagaccacccccggggccctgggacgtccccagtcctggacttccagtgtctgcgcccatcctggtgagaagagacgccgctcccggcgcttctaagctgagggctgttctggagaaattaaagctgtcccgtgatgatatcagtactgccgcaggtatggtaaagggggttgtggaccaccttctgctccgtttaaagtgcgattccgcatttaggggcgtcgggctattgaatacaggatcttactatgagcacgtgaagatctccgcccctaacgagttcgacgtaatgttcaagctcgaggtacccaggatccaattggaagagtactctaatacacgggcctactattttgtaaagttcaagcgtaatcccaaggagaaccctctaagccagtttctggagggcgagatcctgtcagcctcaaaaatgctttctaagttcagaaaaattattaaggaagaaattaatgacattaaggacactgacgtaattatgaagcgaaaacggggaggatcacctgccgtgaccctcctcattagtgagaagatttccgtcgacattacgctggctctggaaagcaaaagcagctggcccgcctcaacccaggagggcttacgaatacaaaactggttgtctgctaaagttcgtaaacaactgagactgaagcctttctacctggtgccaaagcatgccaaggaggggaatggcttccaggaagaaacatggagattgagtttctctcatatcgagaaagaaattttgaacaaccacgggaaaagcaagacctgttgtgaaaacaaggaagagaagtgttgccgtaaggactgcctgaaactgatgaagtacctgttggaacagctgaaggaacgctttaaggataagaagcacctggacaagttcagcagctaccacgtcaagacagcttttttccatgtgtgcacgcagaatccacaggactcgcaatgggaccggaaagacctcggcctctgttttgacaactgcgtcacctatttcctgcagtgcttaaggaccgagaagctcgaaaattatttcatacccgaatttaacttattttcatctaacctgatcgataaacggagtaaagagttcctaacgaaacaaattgaatatgagaggaataatgagttccccgttttcgacgagttctag

SEQ ID NO: 193777 - DNA, 1344 bp, synthetic construct
  misc_feature 1..1344: note = Description of Artificial Sequence: Synthetic coding sequence
  source 1..1344: mol_type = other DNA
atgcagccctggcacggcaaggccatgcagcgggccagcgaggccggggcaacagctccaaaagcctcagcacgtaatgctcggggagctcccatggatcctactgagtcccccgccgccccagaggccgcactgccaaaggctggaaagttcggccctgccaggaaatccggatcaaggcagaaaaagagcgccccagacacacaggagcgcccccccgtccgagccacaggcgctagggcgaaaaaggcccctcagagagcccaggacactcaacctagtgacgcaacttccgcacctggggctgaaggtctggaacctcctgcagcgagagagcccgccctgagcagggcgggttcctgcaggcaacgcggggccagatgcagcacaaagccacgacccccccctggcccctgggacgtcccatcccccggcctcccagtgagcgccccaattctggtgaggcgggatgccgctccgggcgcctcaaaattgagggcagtgctagaaaaactgaagctcagtcgagacgatatctccacggcggccggaatggtgaaaggtgtcgtggatcaccttctgctccggctgaaatgtgactcagccttcaggggggtgggcctattgaataccgggagttactatgagcacgtgaagatctccgcaccgaatgagttcgacgtcatgtttaaactggaggtccctaggattcagttggaggagtattccaacacgcgggcctactattttgtgaaatttaaaagaaatcctaaggaaaatcctctgagtcaatttctcgaaggggaaatcctgtctgcttccaagatgctgagcaagtttcggaagataatcaaggaggaaattaatgatattaaggatacagatgtgataatgaaacggaaacgagggggcagccccgccgttacccttcttatctctgagaagatttccgttgatatcaccctggccttggagtctaagtctagttggcccgccagcacacaggaaggcctgcgcatacagaattggctttctgccaaggttcggaaacagcttaggctcaagccattctacctggtacctaaacacgcaaaggaggggaacggatttcaggaagagacgtggcggctcagcttctcgcacattgagaaggaaatcctcaacaaccatggcaagtctaagacgtgctgtgaaaataaggaagaaaaatgttgtaggaaggactgcctgaagctgatgaagtatcttctcgaacagctcaaagagagatttaaggacaagaagcacttagataagttctcttcatatcacgttaagaccgcctttttccaccgtttgtattag

SEQ ID NO: 193778 - DNA, 1080 bp, synthetic construct
  misc_feature 1..1080: note = Description of Artificial Sequence: Synthetic coding sequence
  source 1..1080: mol_type = other DNA
atgatcgccgcccaggccaagctggtgtaccacctgaacaagtactataatgaaaaatgccaggcacggaaagctgctattgcaaagacgattcgcgaggtttgcaaggtagtgtcagatgttctcaaagaggtggaggtgcaagaaccccgattcatttcatcactaaatgagatggacaacagatacgaaggactcgaagtgattagcccgacagaattcgaagttgttctgtatctaaatcagatgggggtcttcaacttcgtggacgacggcagcctcccaggctgcgctgttctgaagctgtcagacggcaggaagcgatccatgtccctgtgggtggagtttataaccgccagtggctatctgtcagctagaaaaataagaagccgattccaaacactggtggctcaggccgtagacaaatgcagctaccgtgatgttgtcaagatggtggcagacaccagcgaggtcaaacttaggataagagacagatacgttgtgcagattacgccagcatttaaatgcacaggcatctggcccagatccgcggcgcactggcctctcccgcacataccttggcccggcccaaacagggtggctgaagttaaagccgaggggttcaacttattgagtaaggagtgtcacagcctggctggtaagcagtcctccgcagagtctgatgcctgggtgttacaattcgctgaggccgagaatcgtctgcagatgggagggtgccgcaagaaatgcctttccattctcaagacacttcgggataggcacctggagcttccaggccagcccctcaataattatcacatgaagacactggtgtcctacgaatgcgaaaagcatccacgggaatccgactgggatgaaagctgcctaggtgataggctgaatgggattttgctgcaattaatttcctgccttcagtgccggcgctgcccccactattttctgccaaacctagatcttttccaaggtaagccacactccgctctggagaacgccgcgaagcagacctggcggctggcacgagaaattttaaccaatcctaagtccctcgaaaagctctag

SEQ ID NO: 193779 - DNA, 1176 bp, synthetic construct
  misc_feature 1..1176: note = Description of Artificial Sequence: Synthetic coding sequence
  source 1..1176: mol_type = other DNA
atgagcggccccgtgcccagccgggcccgggtgtacaccgacgtgaatacccaccgccctcgcgagtactgggactacgagagccatgtggtggagtggggaaatcaagatgattaccagcttgttagaaaactgggaaggggtaagtattctgaggtattcgaggcgataaatattaccaacaatgaaaaggtcgtggtgaagatcctcaagccagtaaagaaaaaaaaaatcaagcgagagattaaaattctcgagaatctgagggggggcccaaatatcatcacactggctgatatcgtcaaggatccggtgagtcggacaccagcattagtcttcgagcacgtcaacaataccgactttaagcagctttaccaaacgctcaccgattatgacataaggttctatatgtatgagatcctgaaagcactggactattgccactcgatggggattatgcatagagatgtgaaacctcataatgttatgattgaccacgagcacagaaagctcaggctaatcgattggggtttggcagagttctatcacccaggccaagagtataatgtgcgagtagcctcacgctacttcaaggggccagaattgctggttgattatcagatgtatgattacagtttggacatgtggagcctgggatgtatgttggctagcatgattttcagaaaggagcctttttttcatggacacgacaattacgaccagctggtacggattgcaaaggtcctgggaactgaagatctctacgactacatcgacaaatataacatagaactggaccctaggtttaacgacatccttggtaggcactccagaaaaaggtgggagagatttgtccatagtgagaaccagcacctggtcagtcccgaagctctggacttcctggacaaactgctgaggtacgaccaccaaagcaggctgaccgccagagaggcaatggagcatccctatttttacaccgtggtgaaggaccaggctcggatgggttcttcttctatgccaggtggaagtacccctgtgtccagcgccaatatgatgtctggaatctcctccgtacctacaccgagtccactgggcccactggccgggtcccctgtaattgccgcagccaacccattgggaatgcctgttcctgctgctgctggggcccagcagtag

SEQ ID NO: 193780 - DNA, 1347 bp, synthetic construct
  misc_feature 1..1347: note = Description of Artificial Sequence: Synthetic coding sequence
  source 1..1347: mol_type = other DNA
atgtaccccagcaacaagaagaagaaggtgtggcgggaggagaaggaaagactcctaaaaatgactttagaggaaaggaggaaagagtacctccgcgactacattccgctcaacagcatcctcagctggaaggaagaaatgaaagggaagggacagaatgatgaagaaaacacacaggagacctcacaggtgaagaagtctttgactgaaaaagtttccttgtatcggggggatattaccctgcttgaagtagacgccattgtgaacgctgctaatgctagcttattgggcggagggggcgtggatggttgcatccaccgagcagcagggccatgtctgcttgccgagtgcagaaacctgaatgggtgcgacactggccacgctaaaataacatgtggctacgacctccccgccaagtacgttatccatacagtgggacccatcgcacgaggccacattaatggctcacataaggaagatcttgctaattgttacaagtcttcactgaagctcgtgaaagagaataacattcggtcggtagcctttccctgtataagtactggtatttatggattccccaacgagcccgcagccgtgatcgcgctgaacacgataaaagagtggcttgccaaaaaccaccacgaggtagacaggatcatattctgtgtgtttttagaggtcgattttaagatctacaagaagaaaatgaacgaattcttctccgtggatgataacaatgaagaggaggaagacgttgaaatgaaagaagactccgatgaaaatggcccggaggagaaacaatctgtggaagaaatggaggagcagagtcaggatgccgacggagtgaatactgtgaccgtgccaggcccagcaagtgaggaagctgtggaagactgcaaagacgaggatttcgccaaggacgaaaatatcactaaaggtggcgaagttaccgaccatagtgttagagaccaggaccacccagacggacaggagaatgactctaccaagaatgaaattaagatagagaccgaatcacagagctcttatatggaaactgaagagctttcctccaaccaggaagatgcagtgattgtggaacagcccgaagtcataccactcacggaagatcaggaagagaaggagggcgaaaaggctcccggggaagacacccccaggatgccggggaagtcagagggcagctccgaccttgagaacacacccggccccgacgtggaaatgaatagtcaggtggataaggtcaatgatcccacagaatctcagcaagaagaccagctgatagcaggtgcgcaagacgaggcgaaggaacaaaggaatggtactaaatag

SEQ ID NO: 193781 - DNA, 642 bp, synthetic construct
  misc_feature 1..642: note = Description of Artificial Sequence: Synthetic coding sequence
  source 1..642: mol_type = other DNA
atgaacgagttcttcagcgtggacgacaacaacgaggaggaggaggacgtcgagatgaaggaagactcagacgagaacggcccggaggagaagcagagcgtggaggaaatggaggagcagtctcaggatgctgacggcgttaatactgtaaccgttcccggtcccgcgagcgaggaagccgttgaggactgcaaagacgaagattttgcgaaggacgagaacataaccaaaggaggcgaggtgaccgatcactctgtcagggatcaagaccaccccgacggccaagagaacgacagtaccaagaacgaaatcaagattgagacagagtctcagagctcatatatggagaccgaagaactctcttctaatcaggaggacgcagtgatcgtggagcagcccgaggtgatccctcttaccgaggatcaagaggagaaggagggggagaaggccccaggtgaggacacgcctaggatgcctggtaagtccgaggggtctagcgatctggaaaacactccaggccctgatgtcgaaatgaactcccaagtggataaggtgaacgatcccaccgagtcccagcaggaagaccagctcatcgcaggggctcaggacgaagccaaggaacagcggaacgggactaagtag

SEQ ID NO: 193782 - DNA, 642 bp, synthetic construct
  misc_feature 1..642: note = Description of Artificial Sequence: Synthetic coding sequence
  source 1..642: mol_type = other DNA
atgaacgagttcttcagcgtggacgacaacaacgaggaggaggaggacgtggaaatgaaagaggattcggacgagaacggaccggaggagaagcaatcagtcgaagagatggaagagcagagtcaggatgctgatggagtaaacaccgtcaccgtgcccgggcccgcttccgaggaagccgtcgaggattgtaaggacgaggattttgcaaaagatgaaaatatcaccaaagggggcgaggttacagatcatagtgttcgcgatcaggaccatcctgatggccaggagaacgactcaacaaagaatgaaatcaaaatcgaaactgaatcccagtcatcctatatggaaacagaggagctttcctctaaccaggaggatgctgtgatagtggagcagccggaggttataccgcttactgaggatcaggaggagaaagagggggaaaaggctccaggcgaggacactcctcgtatgccagggaagtctgagggatcttccgatctggaaaataccccagggccagacgtggagatgaactcacaggtggacaaggtgaacgacccaacagagtcccagcaggaagaccaactgatagccggtgcccaggacgaggcaaaggagcagcggaacgggacgaagtag

SEQ ID NO: 193783 - DNA, 1068 bp, synthetic construct
  misc_feature 1..1068: note = Description of Artificial Sequence: Synthetic coding sequence
  source 1..1068: mol_type = other DNA
atggccgtgcaggagagcgccgcccagctgagcatgaccctgaaggtgcaggagtatcctaccctgaaggttccctacgagaccctgaataaacgcttcagagccgcccaaaagaatattgatagagaaacctcccacgtgactatggtggtcgccgaactcgagaagacactgtcaggctgccctgccgtggactcagtcgtttcattactcgatggcgtggtggaaaaactttcagtcctgaagagaaaagccgtcgaatccatccaggctgaggacgagagcgctaagctgtgcaagcgacggatagaacacttgaaggaacactcaagcgatcagccagccgcggcctccgtctggaaaaggaagcgcatggaccgtatgatggtggagcatctgctcagatgcggatactataacacagcagttaagctggccagacagagtggcatcgagagttgtctggaattctccctgaggatccaagagttcatcgaacttattagacagaacaagagactggatgccgttcggcacgcgcgtaaacacttctcccaggctgaaggcagccagctggatgaagtgcgccaggctatggggatgctggctttcccacccgacactcacatttcaccctacaaggatctcctggacccagctcgatggcggatgctgatccagcagtttcgctacgacaactatcgtctgcatcagttaggtaataactccgtctttacccttactctgcaagccgggctgtcagccataaaaacaccgcagtgctataaagaagacggttcttctaagagccccgattgccccgtgtgcagcaggtctttaaataagctagcacaaccacttcccatggctcactgcgctaacagtaggctagtgtgtaaaatttccggggatgttatgaacgaaaataatccaccaatgatgttacccaacggttacgtctatggatataacagcttgttgagcatccgtcaagacgataaagtcgtgtgtccacgcactaaggaggtgttccacttcagccaagccgagaaggtctacataatgtag

SEQ ID NO: 193784 - DNA, 1191 bp, synthetic construct
  misc_feature 1..1191: note = Description of Artificial Sequence: Synthetic coding sequence
  source 1..1191: mol_type = other DNA
atggccgtgcaggagagcgccgcccagctgagcatgaccctgaaggtgcaggaatacccgaccttgaaagttccctacgaaactttaaacaagcggtttagagctgcccagaagaatatagatagggaaactagccatgttacaatggtggtagccgagctggaaaagacactttccggttgtccagccgtagatagtgtcgtcagcctgttggacggcgtggttgagaaactgagtgtgctgaaacggaaagccgtggagtctatccaggcagaggatgagagcgccaaattgtgcaaacgaaggattgaacacctcaaagagcactccagcgatcagcccgcagctgctagtgtatggaaacgtaaaaggatggatcggatgatggtcgaacacttgttacgatgcggatactacaacacagccgtcaagcttgcccgccagtctggcatagaggacctggtgaacatcgagatgtttttgacagccaaagaggtggaggaatccctggagcgaagggagaccgcaacctgcctcgcctggtgccacgataacaaatctcggcttcgcaagatgaagtcgtgtcttgagttttctcttcggatccaagagttcattgaactgatccgacaaaacaagaggttagacgcagtgagacacgcccgaaagcacttctctcaggcggaaggatcccagcttgatgaggttcgccaagctatgggaatgctggcctttccaccggatactcatataagtccatacaaagacttactggacccagctcgttggcgcatgctgatacagcaatttagatatgataattacaggcttcaccaacttgggaataactctgtcttcaccttgacactgcaggccggcctttcggccatcaaaacccctcagtgctacaaagaggacggcagttctaagtcacccgactgtcccgtttgctcacggagcctcaacaagctggcccagcctctccctatggctcactgcgctaactccaggctcgtctgcaagatcagcggagatgtgatgaatgagaataatccaccgatgatgcttcccaatggatatgtatacggatacaattctttgttgtcaataagacaggatgacaaggtggtctgccctagaactaaagaagtattccatttcagccaggctgaaaaggtgtacatcatgtag

SEQ ID NO: 193785 - DNA, 987 bp, synthetic construct
  misc_feature 1..987: note = Description of Artificial Sequence: Synthetic coding sequence
  source 1..987: mol_type = other DNA
atggccgtgcaggagagcgccgcccagctgagcatgaccctgaaggtgcaggagtatcctacacttaaagtgccctacgagactctgaacaaacggttccgggccgcacagaaaaatattgacagagagactagccacgtgaccatggttgtggccgagctcgagaagactctgtctggctgtccagctgttgactctgtggttagtttgctggatggcgttgtggagaagctgagcgttcttaaaagaaaagcagtggagtcgattcaagcagaggacgagtcagccaagttatgtaaaagacgcatcgagcacctaaaagagcactcatctgatcagcctgccgccgcttctgtctggaagcggaagaggatggacaggatgatggttgagcacttgttgaggtgtggatactacaacaccgctgtcaaacttgcccgccaatcggggattgagacatgtaagaaagcactgcaaccctcccggcgcgagccagctggaaggggggctccaggccatggtcacgcaggtctgcctgctcggcatgcacacttgccagtgcagggcccttcaggcccctgtacggttgcagacgctgaccccgctgtcccagtcaggcagctgcctacaacaccagcaggcaaacagttttgtgtgcacccacatcccgccggctggccactgagtcaccaggagcagtgctacaaggaagacgggtcgtccaagagtcccgactgccctgtttgttccaggtccctgaataagctcgctcagccccttcctatggcacactgtgccaactctcggctcgtctgtaagatctccggtgacgttatgaatgaaaacaatcccccaatgatgttgccaaatggctacgtttacggctataatagtctcctgtctatccgccaggatgataaggtcgtgtgcccccgcaccaaagaggtcttccattttagtcaggccgaaaaagtgtacatcatgtag

SEQ ID NO: 193786 - DNA, 954 bp, synthetic construct
  misc_feature 1..954: note = Description of Artificial Sequence: Synthetic coding sequence
  source 1..954: mol_type = other DNA
atgaccctgaaggtgcaggagtaccccaccctgaaggtgccctacgagaccctgaataagcgctttcgggctgcacagaaaaatattgacagggagacctctcatgtcacaatggttgtcgccgagctggagaaaacattgtctggttgcccagcagtggattccgtagtgagcttattagacggggtagtggaaaaactgtctgttctgaagaggaaagacctagttaatatagagatgttccttacggcgaaagaggtggaggagtcattggaacgaagagaaacagccacttgcctagcttggtgccatgacaataagagcaggctgcgaaaaatgaaaagctgcctggagttctcgctgaggatccaggaatttatcgagttgattcgccagaataaaaggctggacgcagtccgtcacgcacgcaagcacttttcccaagccgagggatcccagttggatgaggtgcgccaggctatggggatgctcgccttccctccagacacccatatctcgccatacaaagacttactcgaccccgccagatggcgcatgctcatccagcagtttaggtatgataactaccgcctccaccagcttggtaacaattctgtctttactttgaccctgcaggctggcctgagtgcaatcaagaccccacagtgctacaaagaagatgggagctccaaatctcctgactgtcccgtgtgctccagatcccttaacaaactggctcaaccactccccatggcccactgtgccaatagccgcctggtgtgcaagatctccggagacgtgatgaacgaaaacaatcccccgatgatgctgccaaacggatatgtgtatggctataactccctactgagcattagacaggacgacaaggttgtctgccctcggactaaggaagtgttccacttctcacaggctgaaaaagtttacattatgtag

SEQ ID NO: 193787 - DNA, 1305 bp, synthetic construct
  misc_feature 1..1305: note = Description of Artificial Sequence: Synthetic coding sequence
  source 1..1305: mol_type = other DNA
atggccgtgcaggagagcgccgcccagctgagcatgaccctgaaggtccaggagtaccctacactcaaggtcccttacgagacactaaacaagaggtttcgcgccgcacagaagaatatagaccgcgaaacgagtcacgtaacaatggtcgtggcagagctagaaaaaactttgagcggctgcccagctgtcgatagtgtggtgtcccttctggacggagtggtggagaagctgagcgtgctgaagcggaaggccgtcgaaagcattcaagccgaggacgaatcagcgaagctttgtaagagacgtatcgaacacctgaaagaacattccagtgaccagccagcagcagcctcggtatggaagcggaaaagaatggacaggatgatggtggaacatctgttgcgttgcggatattataacacggccgtgaagctggccagacagagtgggattgaggatctggtcaacatcgagatgtttctcactgccaaggaggtggaagaaagcctcgagagacgcgagaccgcaacctgtctggcttggtgtcacgacaacaagtcccgactacgaaagatgaaaggcagacagaataagcacgaagctaaaaccggcaggaagtctagagctgcttcttcttcaccaaaggaaagtttggacctgggtatggagacgttaaagggaaagccagagctgtcttgtctagagttttcacttcgtatccaggagtttatcgagctgatcaggcagaacaaacgactggacgctgtgcgccatgcccgtaagcatttttcccaggctgagggaagtcaactggatgaggtgcgccaagctatggggatgctcgcctttcctccagatacccatatcagcccatacaaggatctgttggatccggcgcggtggcggatgctgattcagcaatttaggtatgataactacagactgcatcaactggggaacaactccgtgttcactttaacactgcaagcggggttgtccgctattaagacaccacagtgttacaaggaggacggctcttccaaatccccagattgccccgtctgctcgcgctctctgaataagctggcccagcccctgccgatggcacactgcgccaattcacgccttgtttgcaagatttccggcgatgtgatgaacgaaaacaaccctcccatgatgctgccaaacggctacgtgtacggatataactccctgcttagcatccggcaggacgataaggtggtatgtcccagaacaaaggaggtgtttcacttctcccaagctgaaaaggtgtacatcatgtag

SEQ ID NO: 193788 - DNA, 1047 bp, synthetic construct
  misc_feature 1..1047: note = Description of Artificial Sequence: Synthetic coding sequence
  source 1..1047: mol_type = other DNA
atggtggtggccgagctggagaagaccctgagcggctgccccgccgtggactccgtggttagccttttagatggagtggtggagaaactgagcgttttgaaacggaaagcagtggaatccattcaagcagaggacgagtctgcaaaactgtgcaagaggagaatcgagcatcttaaggagcacagctctgaccagcccgcagcagcgagtgtgtggaaaagaaaaagaatggatagaatgatggtggaacaccttttgagatgtggttactataacacagctgtgaagctcgccagacagagtggaatcgaagacctcgtaaacatcgagatgtttctgaccgctaaggaagtggaggaatccctagagcggcgcgaaacggcaacatgtcttgcatggtgtcacgataacaagtctcggttgaggaagatgaagtcctgtctggagtttagtctccggatccaggaatttattgagcttatcagacagaataaaaggcttgacgcagtacgccatgcacggaaacatttcagccaggcagagggttcacagctcgacgaagtcaggcaagcgatggggatgctggcgttcccgccagacactcacatcagcccatacaaagacctgctagatccagccaggtggaggatgctcatccagcagtttaggtatgacaactaccggctgcaccagctcggaaataatagtgtattcaccctcacgctgcaggccgggcttagcgcaatcaaaactcctcaatgctataaagaggatggatcaagcaagagtcccgattgccctgtgtgtagtcgctcactgaacaaactggctcagcctcttcctatggcccattgcgcgaacagtcgtctcgtgtgcaagatctctggggacgttatgaatgagaacaatcctcctatgatgctgcctaatggctacgtctatggatacaactccctcctgtccatccgacaggacgataaggtggtctgccccaggacaaaagaggtcttccatttctcacaggccgagaaggtgtacatcatgtag

SEQ ID NO: 193789 - DNA, 1188 bp, synthetic construct
  misc_feature 1..1188: note = Description of Artificial Sequence: Synthetic coding sequence
  source 1..1188: mol_type = other DNA
atgtggaccctgcgggccaccggccgggaggtgggcagcagcagctgtgaggacacagtggcgcctgtgccctacgagacactaaataagaggttcagagcggctcagaaaaatattgaccgggagacctctcatgtcaccatggtggtcgcggagctagaaaagacgttaagtgggtgtcccgctgtggactcggtggtgtctctgctggatggagtcgttgaaaagttaagcgttctcaaacgcaaagccgtggagagcatacaagcagaagacgaaagtgcgaaactttgtaagcggagaatagagcatctgaaagaacattcgtccgatcagccggcggccgcttccgtatggaagagaaagcggatggaccggatgatggttgaacaccttctccgctgtggatattacaatacggccgtcaaacttgcgaggcaatccggaatagaggacctggtcaacattgagatgttcctgaccgctaaagaagtcgaggaaagcctggaaaggagggagactgcaacttgtcttgcttggtgtcatgacaacaagtctagactgcggaaaatgaagagctgtctcgaattctcattgagaatccaagagtttattgagctgataagacagaacaaaagactggacgcagtgcggcatgccaggaagcatttctcccaagcggaaggctcccagctggatgaagtcagacaggcaatgggcatgctggctttcccacccgacacccacatctccccttacaaggatctgctggaccctgcccggtggcggatgcttatccagcagttccggtatgacaattatagactccatcagctagggaataactcagttttcactctaacactgcaggccgggctgtccgccattaaaacaccccagtgttacaaagaagacgggagtagcaaaagcccagactgcccggtttgtagccgctctctgaataagctggcacagccgctccccatggcacactgcgccaattcaaggctcgtttgtaagattagcggcgacgtgatgaacgaaaataaccctccgatgatgctgccaaacggctatgtttacggatataactcccttctgtctattcggcaagacgataaagtggtgtgccctcgtacaaaagaggtgtttcacttctcacaggctgaaaaagtgtatatcatgtag

SEQ ID NO: 193790 - DNA, 987 bp, synthetic construct
  misc_feature 1..987: note = Description of Artificial Sequence: Synthetic coding sequence
  source 1..987: mol_type = other DNA
atggccgtgcaggagagcgccgcccagctgagcatgaccctgaaggttcaagagtaccccacccttaaagtgccgtacgagacgcttaataaaaggttcagggccgcccaaaagaacatcgatcgagaaaccagccatgtcacaatggtggtggccgagctggaaaaaacgctgtctggttgtcccgccgttgactcagtagtcagcttgttagacggggtagtagaaaaactgtcggttctgaagcgcaaagccgtcgaatcgatacaggctgaagacgaaagcgctaagttatgcaaaaggcgtatagagcacctgaaagagcattcctcagatcagcccgctgcagcgtctgtgtggaagcgaaaacggatggacagaatgatggtggagcacctcttgcgttgtggatattacaatactgcagtgaaactggcgcggcagagtggcatcgaaacctgtaagaaggctctgcagccctctaggagagagcctgccggcagaggcgccccgggacacggccatgcaggcctgcccgcccggcatgcacacctgccagtgcaaggaccatccggcccctgtactgtggctgatgccgaccctgcagtccctgtccgccaattacccaccaccccagctgggaaacagttctgcgtgcatccccatcctgccggatggccactgagccatcaggacacctgctataaagaagacggctcctctaagagtccggactgcccggtgtgttctcggtctctcaacaagctggcccagccgctgcccatggcccactgtgctaactcgaggcttgtgtgcaagatcagtggggacgtgatgaatgagaataaccctccaatgatgttgccaaacggctacgtgtacggctacaactctctgctctcaatcaggcaggacgataaagttgtgtgtccacgcaccaaagaagtcttccacttctctcaggccgagaaggtgtacatcatgtag

SEQ ID NO: 193791 - DNA, 1128 bp, synthetic construct
  misc_feature 1..1128: note = Description of Artificial Sequence: Synthetic coding sequence
  source 1..1128: mol_type = other DNA
atggccgtgcaggagagcgccgcccagctgagcatgaccctgaaggtacaggaatatccaactctcaaagtaccgtacgagaccctcaataaacgatttagagcagcccagaaaaatatagaccgggaaacatcccacgtcacgatggtggtggcagaacttgaaaaactgagtgtcttgaagagaaaggccgtagagtcgatccaggctgaagatgaaagcgctaaattatgtaaacgcaggatcgaacacttaaaggaacattcctccgaccagcccgccgcggcctcagtgtggaagcggaagcgcatggacagaatgatggtcgagcacttgttaagatgcgggtattacaacacggctgttaagttggcccgccagtcagggatcgaggacctcgtaaacatcgagatgttcctcacggccaaggaggtggaagaatcgttggaaagacgcgagaccgcaacttgcctggcttggtgccacgacaataaaagccgtttgcgcaagatgaaatcttgcctggagttcagtctgcgaattcaggagtttatagaactgatcagacagaacaagcgcttagatgctgttcggcatgctcgcaagcatttctctcaggccgaaggatcccagctagacgaagtgcggcaggccatgggtatgctcgccttccctccggacacccacatatctccgtacaaggacctacttgaccccgccagatggcgcatgttgattcagcagttccgttacgacaactatagattacaccagctagggaataactccgtctttacactcacactgcaagccgggctcagcgctatcaagacaccccagtgttacaaggaggacggttcatccaagtcacctgactgcccggtttgctcccgctcccttaataaactggcacagcccctgccaatggcccactgcgccaatagcagactggtgtgcaaaattagcggcgatgtgatgaacgaaaataaccctccaatgatgctccctaatggttatgtgtatgggtataacagtttattatcaatacggcaggatgacaaagttgtgtgccctaggactaaggaagtttttcacttctctcaggcagaaaaggtgtacattatgtag

SEQ ID NO: 193792 - DNA, 1467 bp, synthetic construct
  misc_feature 1..1467: note = Description of Artificial Sequence: Synthetic coding sequence
  source 1..1467: mol_type = other DNA
atggcccccgccgcctggctgcggagcgccgccgcccgggccctgctcccccctatgttgctgctgctgctgcagcccccacccttactagctcgggctctgcccccagacgcacaccacctccacgccgagcgccgaggtccccagccctggcacgcagccctcccaagttctccagcacctgcgcccgccacacaggaagcgcccagacctgcctctagtctcaggccaccgcgctgcggggttcctgacccctccgatggccttagcgccagaaatcggcaaaaaaggtttgtactatcaggtgggcgctgggagaaaaccgaccttacctataggatacttaggttcccttggcaactcgtgcaggagcaggttaggcagaccatggcagaagcactcaaggtgtggagtgacgtgacacccctcacgttcaccgaggtgcacgaaggacgcgcagacattatgatcgactttgcaaggtactggcacggggatgatttgcccttcgacgggccaggaggcatcctggctcacgcgttcttccctaaaacacacagagaaggcgacgttcattttgattatgatgaaacatggacgattggcgatgatcagggtaccgatctgcttcaggttgctgctcacgagttcgggcatgtgctgggcctccagcacactaccgctgccaaggctttaatgtctgcattctataccttccgctaccccctttcactctcgcccgacgattgtcgcggcgtgcaacacctgtacggccaaccatggcccactgtcacgagtcgcacaccagcactgggtccgcaggccggtatcgatactaacgaaatcgccccccttgaacctgacgcaccgccggacgcttgtgaagcctctttcgatgccgtcagcaccatccgcggcgaactattttttttcaaggcgggttttgtctggcggctgcgcggagggcaattacagcctggctaccctgcgctggcctctcgccattggcaagggctacctagtcccgtcgacgccgcattcgaagacgctcaggggcatatttggttcttccagggtgctcagtactgggtttatgacggggagaaacctgtcctgggccccgcacctctgactgaactcgggctcgtccgctttcccgttcacgctgctttagtgtgggggcccgagaaaaataagatctatttcttccggggacgcgactattggcggttccatcccagtacacggcgcgtcgattccccagtacctaggcgcgcgactgactggcgcggcgtgccatccgaaattgatgccgcgtttcaggatgccgacgggtacgcctatttcctgagaggcagactgtactggaagttcgaccccgtcaaggtcaaggccctggaaggcttccctcgtttagtgggacccgacttttttggctgtgctgagccagcaaatacattcctttag

SEQ ID NO: 193793 - DNA, 1563 bp, synthetic construct
  misc_feature 1..1563: note = Description of Artificial Sequence: Synthetic coding sequence
  source 1..1563: mol_type = other DNA
atgcggaacaagaagatcctgaaggaggacgagctgctgagcgagacccagcaggcagcattccatcagattgctatggagcctttcgagatcaatgtgcccaaacctaaacgaaggaacggagtcaacttttccttggccgtggtggttatttatcttatcctactgacagccggcgcgggcctgcttgttgttcaggtgctcaatctgcaggcacgcctcagagtgctggaaatgtattttttgaacgataccctcgctgctgaggactctcccagcttttctctccttcagtccgctcacccaggcgaacatttggcacagggagcctctagactacaagtccttcaagctcagcttacttgggtgcgggtgagtcacgaacatctattgcagcgagtggacaacttcacacaaaatccagggatgttcagaataaaaggtgagcaaggagccccaggtctccaggggcacaaaggggccatgggcatgcctggagctccaggaccaccgggtccgcccgcagagaagggcgctaagggcgcaatgggtcgagacggcgccaccgggccctccggtccgcagggccctcctggggttaaaggcgaagctggtctgcaaggaccccagggggctcctggcaagcagggggccaccggtacccctgggcctcaaggggagaaggggtcaaagggggacggcggacttatcggcccaaagggggagacaggtactaagggcgagaaaggagacctcggacttccaggctccaaaggcgatcgcgggatgaaaggtgacgcgggggtgatgggaccccctggcgcccaggggtccaaaggcgactttggccgccctggacctcccgggctagcagggttcccgggcgctaaaggcgaccagggccagccaggcctgcagggagtcccaggtcccccaggtgcagtaggccaccctggggcaaaaggagagcctgggagtgcagggtcgcctggccgtgcgggacttcctggttcgcccggctccccgggcgccaccggactcaagggctctaagggggatacagggcttcagggccagcaaggcagaaaaggcgaaagcggtgtccctggacccgccggagttaagggcgagcagggctcccccggccttgcaggacctaagggtgcccctggacaagcagggcagaagggcgatcagggcgtcaagggttcgtcaggagagcagggagttaaaggagagaaaggcgaacgtggcgagaacagcgtctcagttcgcatcgttggcagctctaatcgtggtcgcgccgaggtttactactccggcacctggggcaccatctgcgacgacgaatggcagaactctgatgcaatagtgttttgtcgaatgctgggatactccaagggacgtgccctttacaaggtgggcgctggcaccgggcagatctggctggacaacgtgcagtgcagaggaacggagagcacgctgtggtcctgtaccaaaaacagctggggccaccacgactgctcacatgaggaagacgccggggtggagtgctcagtgtag

SEQ ID NO: 193794 - DNA, 1329 bp, synthetic construct
  misc_feature 1..1329: note = Description of Artificial Sequence: Synthetic coding sequence
  source 1..1329: mol_type = other DNA
atgtacttcctgaacgacaccctggccgccgaggacagccccagcttcagcttgctacagagcgctcacccaggagagcaccttgcccagggcgcctctagattgcaggtactccaggcccagctgacctgggtgagagtcagccacgagcatctcttgcaaagagtggacaattttactcagaaccccggaatgtttaggatcaaaggagagcagggcgccccgggcctgcaggggcacaagggagccatggggatgcctggagccccgggccctcctgggccaccggctgaaaagggcgctaaaggagccatgggccgtgacggcgccactggcccatccggacctcagggcccacctggcgtgaagggggaagcaggattgcagggcccacagggcgcaccaggtaaacagggggcaacaggcacacctgggccacagggtgagaaagggagtaagggagatggcggcttgattggccccaagggtgagacgggcaccaaaggggagaaaggagacctcggcctgccaggttccaagggagaccggggtatgaagggggacgccggcgttatgggaccgccaggagctcaggggtcaaagggcgacttcggtcgccctggcccaccaggcttggctggctttcccggcgccaaaggtgaccaaggacagcctggcctacagggtgttcccgggcccccgggcgccgttggtcacccaggagccaagggggagccagggagtgccggatcacccggtcgggcaggattgcccggatctcccgggtccccaggcgccacaggactgaaaggttctaaaggcgatactgggctgcagggacagcagggccgcaaaggggaatccggagtgcctggtccagcgggggttaaaggggagcaaggatctcctgggcttgcgggcccgaagggagccccggggcaggctggacagaaaggcgatcagggcgtgaaaggcagcagtggcgaacagggagtcaagggcgaaaaaggcgagaggggcgagaattctgtctccgttcggatagtgggcagtagcaaccgtgggagagctgaggtgtactatagcggaacatggggtaccatctgcgacgatgaatggcaaaacagcgatgcaatcgtgttctgtcgcatgcttggctactccaaagggagagctttatacaaagtgggcgctggcaccggccagatctggctcgacaatgtgcagtgtcgcgggaccgaatcgactctttggtcttgtacgaagaactcttggggacaccatgattgtagtcatgaagaagatgcaggggtggagtgctccgtgtag

SEQ ID NO: 193795 - DNA, 1356 bp, synthetic construct
  misc_feature 1..1356: note = Description of Artificial Sequence: Synthetic coding sequence
  source 1..1356: mol_type = other DNA
atggagcagtgggaccacttccacaaccagcaggaggacaccgacagttgttcggagtccgtgaagtttgatgcgcggagtatgactgccctgttgccgcccaaccccaagaacagcccttcactccaggaaaagctaaaatcctttaaggccgccctgatcgctttatacttgcttgttttcgccgtgctgattcctctgatcggcatcgtcgcagcgcagttattaaagtgggaaaccaagaactgtagtgtgtcatcaactaatgctaatgatattacgcagagtctgacagggaaagggaatgacagtgaagaagagatgcggtttcaggaagtgttcatggagcacatgtccaacatggagaagcgcatacagcatatcctggacatggaggctaatctcatggacaccgagcattttcagaacttttctatgacaacagatcagcggttcaatgatatcctgctccagctgagcacactgttctcatccgtccagggccacgggaatgccatcgacgagataagtaaaagccttatctcccttaatacaacactgttggatctgcagcttaatatagagaacctcaatggtaaaatccaggagaacaccttcaaacaacaggaagagatcagcaagctggaagaaagagtgtataatgtgagtgccgaaataatggcgatgaaagaagaacaggttcatttggagcaggagataaagggagaagtcaaggtgctaaacaacatcactaatgatctccggcttaaggactgggaacactcacagacccttaggaatatcactctgattcagggccccccagggcccccaggagagaaaggggaccggggacctactggagagtcaggcccaagagggtttcctggacctatcggtccaccgggactcaaaggcgatcgcggtgcaataggatttcccgggagcagaggtctgcccggatacgcgggcagaccaggcaacagcggccccaagggccagaaaggggagaaaggaagtggcaacactctcactccattcactaaggtgcggctcgtgggaggatcagggccacacgagggccgcgtcgagatcctacactctggtcagtggggtacaatttgcgatgacagatgggaggtccgggtgggacaggtggtgtgccgcagtctggggtaccccggagtgcaggcagtgcacaaagctgcacactttggtcaggggactgggcctatctggctgaacgaagtgttttgctttggccgcgagtcatcaattgaggaatgtaaaatccggcagtggggaaccagagcctgtagtcactccgaggatgctggggtgacgtgtacactgtag

SEQ ID NO: 193796 - DNA, 1167 bp, synthetic construct
  misc_feature 1..1167: note = Description of Artificial Sequence: Synthetic coding sequence
  source 1..1167: mol_type = other DNA
atggagcagtgggaccacttccacaaccagcaggaggacaccgacagctgttccgagtcggtcaaatttgacgcacgctcgatgacagcccttctgcccccaaaccccaagaatagcccatcgctacaggaaaaactcaagtccttcaaggcagcacttattgcgttatacctgcttgtcttcgcagtgctcattcctctgatcggcatagttgctgcccagctgcttaagtgggagaccaaaaactgttctgtatcgtccacaaacgcaaacgatatcactcagtccttgaccggtaagggaaacgactcagaagaggaaatgcggttccaggaagtctttatggagcacatgagcaacatggagaaaagaatacagcacatcctggatatggaggccaatttgatggatacagagcatttccaaaacttctccatgactactgaccagcggttcaacgatatcttactgcaattaagtacccttttcagctctgtacaaggccatggtaacgctatagacgaaatttctaaatctctgatcagtctgaacacaacccttctggacctccaattgaatatcgaaaacctgaacggcaaaattcaagaaaacaccttcaagcaacaggaggagatctccaaacttgaggaaagggtgtataacgtatctgccgaaataatggccatgaaggaagagcaagttcacttagagcaggaaatcaagggcgaggtcaaggttctcaacaacataacaaatgacctcagactgaaagactgggagcactctcagaccctgaggaatatcactctcatacagggcccacccggaccacctggagagaagggagatagaggccctacaggcgagagcgggccacgcgggttcccagggcccatcggtcctcctggactgaagggcgacagaggcgcaatcgggtttcccggcagcagagggctgcccggatatgccggcaggcctgggaattctggcccaaaggggcagaaaggagagaagggtagcggcaatactctgagtaccggaccgatctggcttaacgaggtgttttgcttcggccgggagagtagcatcgaagagtgtaagattcgacagtggggcacaagagcgtgttctcacagcgaggacgccggcgttacgtgtaccctgtag

SEQ ID NO: 193797 - DNA, 1167 bp, synthetic construct
  misc_feature 1..1167: note = Description of Artificial Sequence: Synthetic coding sequence
  source 1..1167: mol_type = other DNA
atggagcagtgggaccacttccacaaccagcaggaggacaccgactcatgttctgagtcagtgaagtttgatgcccggagcatgaccgcgctcctgcctccaaacccaaagaactccccgtcattacaggagaaactcaagagctttaaagccgccctgatcgccctgtacctgctggtctttgccgtgctgattcccctgattgggatagtagcggcgcaactcttgaaatgggaaaccaagaactgtagcgtaagctccactaatgccaacgatattacacagtctttaacaggaaagggcaacgactctgaggaggaaatgcgctttcaggaagtttttatggagcatatgagtaatatggaaaagagaattcagcatatccttgacatggaggcgaacctgatggacacggagcattttcagaatttcagtatgactacggatcagcgcttcaatgacattctgcttcaattatcgactctctttagctctgtgcagggtcacgggaatgccatcgacgagataagtaaatcactcatctccctgaacaccactcttctggatctgcaattgaacatagagaacctcaacggcaagatacaggagaacacatttaaacagcaagaggaaattagcaaactcgaagaacgcgtctataatgtttcagctgagatcatggcaatgaaggaggaacaggtacacctcgagcaggaaattaagggagaagttaaagtgctgaataacatcacaaacgatctgaggctgaaagattgggagcattctcaaaccctgagaaacattacactgattcagggccccccgggtcctcctggggagaaaggggacagaggcccaacaggtgagtctggccccagggggtttccaggacctatcggtcctcctgggttgaagggggatcggggggcaattgggtttcccgggtctcggggattgcccggctatgccgggcggcccgggaatagtggtcctaaagggcagaaaggtgagaagggctctggaaatactctaagtaccggccccatctggttaaacgaggtattctgcttcggccgcgaatccagcatcgaggagtgcaaaatccgacagtggggcacaagagcctgctcccacagtgaggacgcgggagtcacgtgcacactgtag

SEQ ID NO: 193798 - DNA, 1077 bp, synthetic construct
  misc_feature 1..1077: note = Description of Artificial Sequence: Synthetic coding sequence
  source 1..1077: mol_type = other DNA
atggagcagtgggaccacttccacaaccagcaggaggacaccgactcttgcagcgagagtgtgaaattcgatgctaggtctatgacggccctactgcctcccaaccctaaaaacagtccttcactgcaggagaagctcaaaagctttaaagcagcacttatcgccctttacctcttggttttcgcggtgctcataccactgataggaatcgtagccgcccagttgttgaaatgggaaacaaaaaattgctcagtgtcctccaccaatgctaacgatatcactcagtctctgaccggcaaagggaacgacagcgaagaggagatgcgtttccaggaggtgttcatggagcacatgtcaaacatggaaaagcgcattcagcatatcctggatatggaagccaatttgatggatacggagcacttccagaacttttcaatgactaccgaccagcgcttcaatgacatacttcttcagttgtctaccctgttttcttcagttcagggccacggcaacgctattgacgagatatccaagagcttgatttcactcaataccactctgctcgacctgcaattgaacattgagaatttgaatggcaaaatccaagaaaatacatttaagcagcaagaagagatcagtaaactggaggagagggtgtataacgtcagcgcagagattatggctatgaaagaagagcaggtgcatttagaacaggaaatcaagggagaagtcaaagtgctcaacaatattaccaacgatctgaggctgaaggactgggagcacagccagactctgaggaatatcaccctgattcagggtcccccggggccaccaggcgaaaaaggagaccggggccctaccggcgaatctggcccaaggggattcccaggtccaatcggtcctcccgggcttaagggagacagaggagcaattgggtttccagggtcgcgtggattgccgggttatgccggacggccaggaaatagcggaccaaagggacagaaaggcgaaaagggctccggaaatactttacgccccgtccaacttactgaccacatacgggctggaccgtcttag

SEQ ID NO: 193799 - DNA, 1410 bp, synthetic construct
  misc_feature 1..1410: note = Description of Artificial Sequence: Synthetic coding sequence
  source 1..1410: mol_type = other DNA
atgtgctacctgagcgccatcatcagcatcagcctgctgaacaagaagccaagtatggaacagtgggaccactttcacaaccaacaggaagacactgatagttgcagcgaatccgtcaagttcgatgcccggagcatgacagctctgctccctccaaaccccaagaatagcccgtccctgcaggagaaactgaagtcatttaaagcggctttgatcgccttatatcttctcgtatttgccgtgctaattccgctgattggaatcgtcgcggcgcagctccttaagtgggagaccaaaaactgcagtgtctccagtactaatgccaacgacatcactcagagccttaccggcaaaggtaacgatagcgaggaagaaatgcgcttccaggaggtttttatggaacatatgtccaatatggagaaacggattcagcacattctagatatggaagccaacctgatggacaccgagcactttcagaatttcagtatgacaactgaccagcgattcaacgatattttgctccagttatcaacgctgtttagctcagtgcaaggccatgggaatgccatcgacgagatctctaaaagtctgatctccctaaacactaccctgctggatctccagctgaatatcgaaaatctaaatggaaagattcaggagaatacctttaaacaacaggaagaaatttcaaaactggaggaacgcgtttacaatgtgagcgctgagattatggccatgaaggaagagcaggtacatctggaacaggaaatcaaaggagaggtgaaggtcctgaataacatcacaaatgatctgcggcttaaggactgggagcattcccagactttacgcaatattacattaattcagggccctccgggtcctcctggggaaaagggagacaggggtccaacaggagagagtggccccagagggtttcccgggcccattggaccgccaggtctcaaaggtgataggggagcgatcggcttcccaggcagcagaggactccctggctacgctggcagaccagggaattccgggccaaaaggccaaaagggcgagaaggggtccggcaatactctgacgccttttaccaaagtgagactggtgggcggctctggaccacacgaggggagggtggaaattttgcatagcggtcagtggggaacaatatgcgacgaccggtgggaggtgagagtaggacaggtcgtttgtagatctctggggtaccctggggtgcaagccgtgcataaagccgcccacttcggtcagggcacaggccccatctggctgaacgaggtgttttgcttcggtagagaaagtagcatcgaagaatgcaagatccgccagtggggcacccgtgcctgctcacattctgaagatgctggcgtgacatgcaccctatag

SEQ ID NO: 193800 - DNA, 195 bp, synthetic construct
  misc_feature 1..195: note = Description of Artificial Sequence: Synthetic coding sequence
  source 1..195: mol_type = other DNA
atggagcagtgggaccacttccacaaccagcaggaggacaccgacagctgtagtgaatccgttaaatttgatgctcggtcaatgacagccctgctgcctcctaacccaaaaaattctccatcactgcaggagaagctcaagtcctttaaggcggcattgatcgcactctacctgctcgtgttcgccgtgttatag

SEQ ID NO: 193801 - DNA, 399 bp, synthetic construct
  misc_feature 1..399: note = Description of Artificial Sequence: Synthetic coding sequence
  source 1..399: mol_type = other DNA
atggccatgaaggaggagcaggtgcacctggagcaggagatcaagggggaagttaaagttctgaacaacatcaccaacgacttgagactgaaagactgggaacatagccagactctccgcaacatcactctgatccagggcccccccgggcctcctggagagaaaggggatcgcgggccaactggtgaatccggcccaagagggtttccaggacccattgggcctcctggactcaaaggcgaccgtggagctatcggatttcccggaagccggggtctgccaggatatgccggacgccctggaaattcgggacccaaggggcaaaagggtgaaaaaggctccggaaacacactcagaccagtccagttgaccgatcatattagagccgggccttcttag

SEQ ID NO: 193802 - DNA, 4203 bp, synthetic construct
  misc_feature 1..4203: note = Description of Artificial Sequence: Synthetic coding sequence
  source 1..4203: mol_type = other DNA
atggagctgctgccccccctgccccagagcttcctgctgctgctgctactaccagccaaaccggctgccggagaggattggcagtgtccaagaacaccctacgccgcgagcagggactttgacgtgaagtatgtggtccccagtttcagcgctggtggtcttgtccaggccatggttacatatgagggtgatcgcaacgagtctgctgtttttgtagctattcgcaatcgcctccatgtgcttggtccggatctgaagagtgtccagtctctggcaacgggccccgccggcgaccctggatgccagacctgcgcagcttgcggccctggtcctcacggcccacctggagataccgatactaaagtactcgtgttagatcccgccttgcctgctctggtcagctgtggcagttctctgcaggggagatgcttcctgcacgatttagaacctcaggggaccgccgtccatctggcggctcctgcatgtctgttctctgcccaccataaccgccctgacgattgcccagattgcgtcgcatcccctctcggtacgcgggtgactgttgtggaacaggggcaggccagctacttctacgtcgcctcatcccttgacgctgcagtggccgcctcattttcccccaggtccgtctccatcagacggcttaaagccgacgcatcaggatttgcccctggttttgtggctctgtccgtgctgcccaagcacctcgtgtcctacagcattgagtacgtacactcctttcataccggtgcttttgtatactttctgactgttcagccggcctctgtgaccgacgatccaagcgccctgcacacccgccttgccagactgtcagctactgagcctgagctgggcgactaccgagagctggtcttagattgccgcttcgcccccaagcggaggcggcgaggcgctcccgaagggggccagccttaccccgtcctccgcgtcgctcattctgcccctgtgggggctcagctagcaacagagctctcaatcgccgagggccaggaggtgctgttcggcgtcttcgtgaccgggaaggacgggggacctggggtagggcccaattccgtggtgtgcgcgttccctatagatctcctggacacactgatcgacgagggggtcgagcgctgctgcgaaagtccagtccacccaggactacgccgaggactggatttttttcagagcccttcattctgtcccaatcctcccggcctcgaagctctctcacccaatacaagttgccgtcatttccctctgctggtcagctctagcttctcccgggtggatctgttcaacgggctgctagggcccgttcaagtcacagccctctatgttacgcgtttagataacgtgacggtggctcacatgggaaccatggacggacgcatcctgcaggtggagctggtgcggtccttgaattacctcctgtatgtctctaacttcagcctcggggactcagggcaaccggtccaacgagacgtgtcccgcttgggggaccatttgttgtttgcctctggggatcaggtgttccaagtgcctatccagggaccaggttgtaggcacttccttacctgcgggcggtgtctgagggcctggcacttcatgggctgtgggtggtgtggaaacatgtgcggccagcaaaaggaatgccccgggtcttggcagcaggatcattgccctcctaaactcactgaatttcatcctcattccggcccactgcggggctctacacgattaaccctgtgtggcagcaacttctatttgcatccctcgggcctggtcccagagggcactcatcaagtgactgtcggacagtccccttgtcgaccattacccaaggacagttccaagttgagacctgtgcctcggaaggactttgtggaggagttcgagtgcgaactcgagccactaggcacccaggccgtcgggccgactaatgtatccctgacagtgactaatatgccaccaggaaagcattttagggtggatggcacctctgttctgagaggcttttctttcatggaacccgtactcattgcagtgcagccattgttcgggccccgggcgggcggaacgtgcctgactcttgaggggcagagcctgagcgtggggacgagtcgcgccgttcttgtgaacgggactgagtgccttcttgccagggtgagtgaaggtcagttgctttgtgccaccccaccaggcgcaaccgtggcgtctgtgccactcagtctgcaggtcggaggagcccaggtgccaggaagttggacattccagtatagggaggatccagttgtcctctccataagccccaactgcggatacattaattctcatattactatttgcggtcaacacctgacaagcgcctggcacttggtgctgtccttccatgacggcctgagagccgtcgagtcccgttgtgagcgtcagctgcctgaacaacagttgtgccgtttgccagaatacgtcgttcgggacccgcagggctgggtcgccggtaacctgtccgcccgcggcgacggagccgcagggttcacattaccaggctttagatttctccctccaccccacccaccgtccgccaacctcgtgcccctcaaacccgaggagcacgccataaagtttgaatatattggcttgggagctgtcgccgattgcgtagggataaacgtaaccgttggaggggagagctgccagcatgagttccgtggagacatggtggtctgtcctttacctccttccttgcagcttgggcaggacggggcgcccctgcaggtttgtgtggatggcgaatgtcacatccttggtcgagtagtacgccctggccctgacggggtgcctcagtcaactctgctcgggattttactccctctgttgcttttggtggctgctctggcgacggccttggtgttttcttactggtggagacgcaagcaactggtgctcccgcctaatcttaatgacctcgctagtttagaccaaaccgcaggggcaacacctctgcccattctgtacagcggctccgactatcgatccgggctggctctgcccgccatcgacggcttggactctactacctgcgtccacggagccagcttcagtgattctgaggacgagtcatgtgtgcccttgctgcgcaaagagtctatccagctgcgcgacctggattccgccctgttagccgaggtgaaagacgttctcatccctcacgagagggtggtgactcattccgacagagtgatcggtaaaggccacttcggagtggtgtatcatggagaatatatagaccaggctcagaataggattcaatgcgccataaagagcctaagcaggattacagagatgcagcaagtggaagctttcctgcgtgaaggcctgttgatgaggggactgaatcatccaaacgtcctggccctcattggtattatgctgcctcctgaaggattacctcacgtgctcctgccgtacatgtgccacggagacctgttgcagttcatacggtccccccagaggaacccaacggtcaaagatttgattagctttggcctacaggtggctagatccatggagtacctcgccgagcagaagtttgtgcatcgagaccttgctgctcgtaattgtatgcttgatgagagttttacagtgaaggtggcagacttcgggctagcacgggacatcctggatcgagagtactactccgtacaacaacaccgtcacgctaggctccccgtcaagtggatggcactggaaagcttgcagacttatcgctttaccactaagtctgatgtatggtccttcggcgtgctgctgtgggaactgctaacgagaggggcccctccgtatcgccacattgatccttttgacctgactcactttttggcgcagggcagacggctgccgcagcccgaatattgtcccgacagcttgtatcaggttatgcagcaatgttgggaagcagaccctgccgtgcgacccacgttcagggtgcttgtgggcgaggtcgaacagatcgtgtccgctctcctgggcgaccactacgtgcagctacccgccacctacatgaacctgggcccaagcacctcccacgaaatgaacgtgaggccagagcagccacagttctcacccatgcctggtaacgtccgcagacctagacctctctctgaaccaccacgacctacgtag

SEQ ID NO: 193803 - DNA, 4056 bp, synthetic construct
  misc_feature 1..4056: note = Description of Artificial Sequence: Synthetic coding sequence
  source 1..4056: mol_type = other DNA
atggagctgctgccccccctgccccagagcttcctgctgctgctgctcttgccagccaaacccgccgctggcgaagattggcagtgccccaggacaccatacgcggcaagcagagattttgatgttaagtatgtcgtgccctcattttccgcggggggccttgttcaagccatggttacatacgaaggggatagaaacgaaagtgcagtgtttgttgctatcaggaaccggcttcatgttttgggcccagaccttaagtccgtacaaagcctcgctaccggtcccgccggcgacccggggtgtcagacttgtgcggcatgcggacctggaccacatggtcctcccggtgacaccgataccaaggtattagtgttagacccagcccttcccgccttagtgtcctgcggatcatctctccaaggccgttgcttcctgcatgaccttgaaccacaaggaaccgcggtgcaccttgccgctcctgcctgcctgttttccgcacaccacaaccggccagacgattgcccggattgcgtcgcctccccactcggtacccgggttactgtcgtggaacagggccaggcatcttatttttacgtagcgtcatccttggacgccgcagtcgctgcctcgttttctccgcgatcggtttcaatcaggcggctcaaggccgacgcgagcggctttgctccaggctttgttgcattaagcgtgctccctaaacatttggtgtcatattctattgagtacgtgcactcattccacactggtgcatttgtctatttcctgacagttcagccagcctccgtgaccgacgacccgagtgctcttcatacacgtcttgccagacttagcgccactgaacccgaactgggagactacagggaattagtgctagattgcaggttcgcccccaagcggcgtcggcggggggcccccgagggagggcagccctacccagtgctgcgcgtggcccactccgcccccgttggcgctcagctagcaacagagttgtcaatagcggagggtcaggaagtcttgtttggagtattcgtaaccgggaaagacggaggtcccggtgtgggccctaattccgtggtttgtgcatttcccatcgatcttctggacactctaatcgacgagggggtggagcgatgctgcgagtctccagtgcatccgggacttaggcgtggcctagacttctttcagagcccttcattctgtcccaatcccccaggactggaagccctgagtccaaacaccagctgtcgccattttcccctgctcgtatcaagcagcttttcacgtgtggacctgtttaacggactgctaggtcccgtgcaggtaacagccctctacgtaacgcgacttgacaacgttacagtagcgcatatgggtacaatggatggacggattttgcaagtcgagctcgtacgctccctgaactatctcctgtatgtctccaacttcagcctgggtgactccggacagccagttcaaagagacgtttccagactgggcgaccatctgttattcgcctcaggggaccaggtcttccaggtgcctattcaaggtccaggttgcagacacttcctgacttgcggcagatgccttagggcctggcacttcatgggctgcgggtggtgcggaaacatgtgcggacaacaaaaagaatgtcccgggagctggcagcaagatcattgcccaccaaagttgaccgagtttcatcctcattcggggccgctccgagggtctacaaggctgacactttgtgggtccaatttctatctgcacccgtctggcttagtgccagaagggactcaccaagtcaccgtcggtcaatccccatgcagaccactgcccaaggactcatctaaactccgacctgtaccccgcaaggacttcgttgaggaatttgagtgcgagttggagccattggggacccaggccgttgggccaacaaatgtgtctctgacagtgactaatatgccccccgggaagcacttcagggttgatggaacttctgtcttgaggggcttttctttcatggaaccagtgctgatcgcagtgcagccattgttcggaccgcgcgcaggcggcacatgcctgactctcgagggccaatcattaagcgttggcacctccagggccgtgctggtcaacggcacggagtgcttgcttgctagagtcagcgagggtcagctcctttgcgccaccccacccggggccactgtggccagtgttcctctgtccctacaagtgggcggtgcccaggtgcctggctcctggacattccaataccgcgaggaccccgtggtgctgagtatctcccccaactgtgggtacatcaactctcacataactatctgcgggcagcatctgacctccgcctggcacttggtgttgagttttcacgacggactgagggccgtggaatcccgctgcgagaggcagctgcctgaacagcagctctgtcgcctcccagaatatgttgtgcgagatccgcagggctgggtcgctggcaatctgagcgctaggggagacggcgccgctggctttaccctgccggggtttaggttcctgcctccaccccatccaccaagcgcaaatctagttcctctgaagcccgaggagcacgctataaaattcgaagtgtgtgtcgacggggagtgccacatccttgggcgagtggtcaggccaggcccagacggcgtgccccagagcaccctcctgggaatcctactgccgctgctcctacttgtggcggcccttgccacggccctggttttcagttactggtggaggaggaagcagctagtactgccaccgaatctgaacgacctcgcctcattagaccagaccgccggagctaccccattacccatcctgtatagcgggagcgactacaggtctggcctggcactgcccgccattgacgggctggactcaaccacctgcgtacatggcgcttctttctccgatagcgaagacgaaagctgcgtgcctctcttaagaaaagaatccattcagctgcgagaccttgactctgctttgctcgccgaagttaaagacgttctcatcccacacgaaagagtggtgacacattcggacagagttattggaaaggggcactttggcgttgtgtatcatggggagtacatcgaccaagcccagaatcgtattcagtgtgcaatcaaatctctgagcagaatcacagaaatgcagcaggtcgaggcattcttgcgtgagggtcttttaatgcgcggattgaatcatccaaacgtcctggcccttataggaatcatgcttccacccgagggcctgccacacgtcctcctgccttacatgtgccacggcgatctgttgcagtttatcagatccccccagcgcaatccaactgtcaaagatctcatttcctttggcctgcaggtagccagatctatggaatatctggcagaacagaagttcgtccaccgcgacctggctgctagaaattgcatgctcgatgaaagcttcactgttaaggtagcagattttggtctcgcccgggacattcttgacagggaatactactcagtacagcagcaccggcatgccaggttgcctgtgaaatggatggccctagagtcgctccagacctatcgcttcacaaccaagtctgatgtttggtcattcggcgtactgctttgggaactcttgacccgcggggctccaccttaccgccatattgacccctttgatcttacccacttcctggcacaggggaggcgcctgccacagcctgaatattgccccgacagcctataccaggtgatgcagcagtgctgggaagctgacccggccgtgcgtccaacatttcgagtgctggttggcgaagttgagcagattgtttctgctctgcttggcgaccactacgtgcagctgccggctacctacatgaacttgggaccaagtaccagtcacgagatgaacgtgaggcctgaacaaccgcagtttagtcccatgcctggaaatgtaaggagacccagaccactgtccgagccccctagacctacatag

SEQ ID NO: 193804 - DNA, 2157 bp, synthetic construct
  misc_feature 1..2157: note = Description of Artificial Sequence: Synthetic coding sequence
  source 1..2157: mol_type = other DNA
atggaggacctgggcgagaacaccatggtgctgagcaccctgcggtctctgaataacttcatctcgcagcgcgtcgagggtggaagtggcttggatatttccacctccgctcccggttccctgcagatgcagtatcagcagagtatgcagctggaggaacgtgctgaacagatcagaagtaaatctcacctgatccaggtggaacgggagaaaatgcagatggagttgtcccataaacgtgctagggtggagctggaacgggctgcttccacaagcgcccgaaactatgaaagggaagtggaccgtaatcaggagcttttaactagaatcaggcagctacaggagcgcgaggcaggcgcggaggagaagatgcaggagcagctagagagaaacagacagtgccagcagaacctggacgctgccagcaaaagacttcgtgaaaaagaggactccctggctcaggcaggggaaacaattaacgccctgaagggccggatctccgagctacagtggtctgtgatggaccaagagatgcgggtcaagcgccttgagtcagaaaaacaggagcttcaagagcagttggatcttcagcacaagaaatgtcaggaagcaaaccaaaagatacaagagttacaggccagtcaggaagcccgagctgaccacgagcagcagatcaaggatctggaacaaaagctttcactacaggagcaggatgcggcgatcgtgaaaaacatgaagagtgagctagtgagattgccccggctagaacgagaactgaagcagttgcgggaggaatctgctcacttgcgcgagatgagggagacaaacggtcttctgcaggaggaactcgaaggactgcaaagaaagttaggccgccaagagaaaatgcaggaaaccctcgtcggcctagagctcgagaacgagcgtctgctggccaagctccaatcgtgggagcggctggaccagactatgggacttagcatcagaactccagaagatctaagccggtttgtcgtagagctgcagcagagagagctggcactgaaggataagaattcggctgtgacctcttctgccagaggcctcgaaaaagctcggcagcaactgcaggaagagctaagacaggtgtccggacagcttctcgaggaacgcaaaaagcgagaaacgcacgaagctttagcaagaaggctacaaaagagagttttactcctgaccaaggaacgagacggtatgagggctattttggggtcatacgactctgagctcaccccagctgaatacagtcctcagttgactcgccgtatgcgggaggccgaggatatggtgcaaaaggttcacagccactccgcagagatggaagcgcagctgtcacaagcactggaagaactcggtggtcagaaacagcgagcggacatgctggagatggagctcaaaatgttaaaaagccagtcgtccagcgctgagcagagctttctgttctcaagggaggaggccgatactctgagactgaaggttgaagaattggaaggcgaaaggagccgtcttgaggaggagaagcggatgctggaggcccagctcgaaagacgggctttacagggcgattacgaccagtcccgcaccaaggtcttgcacatgagcctgaatcccacaagcgtcgcccgccaacgcctgagagaggatcattcccaacttcaagcggaatgtgagaggctgcggggtcttttacgggctatggaaagagggggtacagtgccggccgaccttgaggctgccgccgctagcctgcctagctctaaagaggtggcagaactcaagaagcaggtcgagtccgcggagttaaaaaatcagcgtttaaaggaagtcttccagactaaaatccaggaattcagaaaggcctgctataccctgacaggataccaaatcgatattaccaccgagaaccaataccgcctgacttctttgtatgccgaacaccccggcgactgtctcattttcaaggcaacgagcccatccgggagcaagatgcagttgttggagacggagttctcccacacagtcggagagctcattgaggtacacctccgacgccaggactccattccagcgttcctcagctctttaaccctggaactgttctcccggcagacagtggcgtag

SEQ ID NO: 193805 - DNA, 2157 bp, synthetic construct
  misc_feature 1..2157: note = Description of Artificial Sequence: Synthetic coding sequence
  source 1..2157: mol_type = other DNA
atggaggacctgggcgagaacaccatggtgctgagcaccctgcggtcgttgaacaactttatttcccagcgggttgaaggagggtcaggcctggatataagcacgagcgcacctggatcacttcagatgcaataccagcagtccatgcaactggaggaaagggcagaacagattaggtccaagagccatctcatacaggtggaacgggagaaaatgcagatggagctcagccacaagcgagcacgtgtcgaactggagcgcgccgcttcaacctccgctcggaattatgaacgcgaagtggatcgcaatcaggaactgctgactagaattcggcagcttcaggagcgggaagccggagcagaggagaagatgcaggaacagcttgagaggaaccgacagtgccaacagaatttggatgctgcctctaaaagattaagggagaaggaagacagtctggctcaagccggggaaaccattaacgccctgaagggccgcattagcgaactccagtggagcgtgatggaccaagagatgagggtgaagaggctcgagtctgaaaaacaggagttgcaagagcagttggacttgcagcacaagaaatgccaggaggccaaccagaagattcaggaattgcaggcctctcaggaggcaagggcagatcatgaacaacaaatcaaagacctggagcagaaactgagcctgcaggagcaggacgcagccatagtcaagaacatgaaatcggagctggtgcgcctcccccggttggagcgcgagctaaaacagttaagggaagagtccgcccatcttagagagatgcgagagacaaacgggctgcttcaggaggaactggaaggcctgcagcggaagctgggaagacaggaaaaaatgcaggagacattagtagggctagaattggaaaacgagaggctgctcgccaagctccagagctgggaacggctggatcagactatgggcctctcgattcggacgcccgaggacctgtcccgcttcgtggttgaattgcaacagcgggagctggcactgaaagataaaaacagcgctgtcaccagcagcgcaaggggcttggagaaggccagacaacagttacaagaagaactgaggcaagtcagcggccagctgctcgaagagcgcaagaagagagagacgcacgaggccttggcccggcgcctacagaaacgagtgctgctgctcactaaagaaagagacgggatgagggccatcttaggatcttatgattcagaactcacccctgcggaatatagcccacagttgacaagaaggatgagagaggccgaagatatggtccaaaaagtgcattcccatagcgcagaaatggaggctcagctctcacaggccctggaggaattaggaggtcaaaagcaacgggctgatatgctggaaatggagcttaagatgctgaagtcgcagtcaagctctgctgagcagtcttttctcttcagcagggaggaagcagatacactcagattaaaggttgaagaattggagggggaacgatcaaggttggaggaagaaaagcgcatgctggaggcgcaactagaacgaagagccctccaaggcgactacgatcaaagcagaactaaagtgttgcacatgtctctgaaccccacatccgtcgcacgccaaaggctcagggaagaccactctcagcttcaagcagagtgcgagcgcctgaggggactgctgcgtgccatggaaaggggcggcaccgtgccggctgacctggaggccgctgcagctagcctcccaagttctaaggaggtggccgaattgaaaaagcaggtggaatcagctgagctgaagaatcagcgactaaaggaggtgtttcagacaaaaatccaggaatttcgcaaagcttgctacaccctgactggctatcaaattgatattacaaccgagaaccagtacaggctgaccagcctgtatgccgagcatcccggcgattgtctaattttcaaggcgacatcacccagtggctcaaaaatgcagctcctggaaaccgagttttctcatacagttggggagctaatcgaggtgcacctaaggagacaggattctattccagcatttttaagcagcctcaccttggagcttttttcacgtcagactgtggcctag

SEQ ID NO: 193806 - DNA, 1881 bp, synthetic construct
  misc_feature 1..1881: note = Description of Artificial Sequence: Synthetic coding sequence
  source 1..1881: mol_type = other DNA
atgctgcccgcccggggctgcgtgcggaagcggaccgtgtggcccaggctggcccgcgtgttgattgtgacactgctgacacttgagctgtcttatgctcctctgccatgtcagctcagcggcgtgccatacaatactggcgatccagtgggcaggtgggccaggccatgtatttggccctgtccttggcacactaccattaacgccctcaagggtcgtatcagcgagctccagtggtcggtgatggaccaggaaatgagagtgaagaggctagagtccgaaaagcaagagctgcaggagcaattggacctgcagcataagaaatgccaagaggctaaccagaagatccaggaactgcaggctagtcaggaagcccgtgcggaccatgaacagcaaatcaaagacctcgaacagaaactcagtctgcaagaacaggacgccgctatagttaagaacatgaaatccgaattggtgcgtttgccaaggctcgagagggaactgaaacagttaagagaagaaagcgcacatttaagggagatgcgagagacaaatggtttgctccaggaagaactggagggcctgcagaggaagctggggcggcaggagaagatgcaagagacattggtgggacttgagcttgagaatgagaggctcctggcaaagctgcaatcatgggagagactggaccagacaatgggactatcaatcaggactcccgaggacctgtctaggtttgttgtggagttgcaacagcgggagctggcactgaaggataagaactcagccgtaacatcatcagctcgcggcctggagaaggcaagacaacagctccaggaagaactacgccaggtgtccgggcagcttcttgaagagcggaagaagagggagactcacgaagcgttggcaaggcgcttgcagaagagagtgcttctgctgaccaaagagcgggatgggatgagagctatactaggttcttatgattctgagctcacgcctgccgagtactcaccacagttgacacgcaggatgagagaggccgaagacatggtgcagaaggtgcacagtcatagtgctgagatggaagcacaactgagccaggctctggaggaacttggggggcagaagcaacgcgccgacatgcttgaaatggagctgaaaatgctcaagtctcagagctcgtcagctgaacaatcttttctcttctcccgcgaagaagcggatactctgcggcttaaggtcgaggaacttgagggcgagcgctcaaggcttgaagaggaaaagaggatgctcgaagctcagctggaaagacgcgctttacagggagactacgaccagtccagaaccaaggttttgcacatgtctctgaaccccacgagcgtggcgaggcagagattgcgcgaggaccactcacagcttcaagcagaatgtgagcgactgagaggcctgctgagagccatggagcggggcggtactgtgccagcagacttagaggcagccgctgcctcattgccatcttccaaggaagtggctgagcttaaaaagcaagtggaaagcgcggaactgaagaaccagagattgaaagaggtctttcagacaaaaatacaggagtttcgtaaagcttgctatacactaaccgggtaccagattgacatcactacggaaaatcaataccgactgacgagcctgtatgctgagcaccctggagattgcctcatattcaaagcaacatcccccagcggctcaaagatgcagctattggagaccgaattctctcacactgtcggggagttaattgaagtgcacttgaggcgacaggattccatccccgctttcctttccagtctgacactggagctattttcccgccagaccgttgcctag

SEQ ID NO: 193807 - DNA, 2157 bp, synthetic construct
  misc_feature 1..2157: note = Description of Artificial Sequence: Synthetic coding sequence
  source 1..2157: mol_type = other DNA
atggaggacctgggcgagaacaccatggtgctgagcaccctgcggtcgctgaacaacttcatctcacaacgtgtggagggagggtccggactggatatatctacatccgcacccggttctctccagatgcagtaccagcagtcgatgcagctggaggagcgtgcagaacaaatcaggagcaagtctcacctgatccaggtggaacgggagaaaatgcagatggagttgtctcataagcgagcacgagttgagttggagagggctgcctcaactagcgcccgtaactatgaacgcgaggtggatcgcaaccaagagctgttgactcggattagacagctgcaggagagggaggctggcgccgaggaaaaaatgcaggaacagctggaacgcaatcggcaatgccagcagaatttagacgccgcttcaaagcgcctgcgggagaaagaagactcgcttgcgcaggctggggaaaccatcaacgcactgaagggacgcataagtgagctgcaatggagcgtgatggatcaggagatgagggtgaaacgcctagaaagtgaaaaacaggaactgcaggagcagcttgacttgcagcacaagaaatgccaagaagctaatcagaagattcaggaactgcaggcctcccaagaagcgagagcggatcatgagcaacaaatcaaggatctggagcagaagctgagcttacaggaacaggatgccgctattgtgaaaaacatgaagtcagagctggtgcgtctgccccgactggagagagaactcaagcagttgcgggaggaatccgctcacctgcgggaaatgagggaaacaaatggactgctgcaagaagaattagaaggtctgcagaggaagctgggcaggcaggagaagatgcaggaaaccctagttgggcttgagctggaaaacgagcgtctccttgccaaactacagtcttgggagaggcttgatcaaactatggggctgagcattcgcaccccagaagacctgtctcggttcgtagtggagctgcagcagagggagttagccctcaaggacaagaattctgctgtcacgagctctgccagagggcttgaaaaggccaggcagcaactccaggaggagttgcgccaggtgtcaggccagctgctcgaggagcgtaagaaacgggagacgcacgaagcattggctcggcgcttgcagaagcgggttctgctgctgacaaaagagcgggatggcatgcgggccatcctgggaagctacgactctgagcttactccggccgaatattctccccagcttacacggaggatgagggaggcagaagacatggtccagaaagtgcatagtcattctgcagagatggaggcgcaattatcgcaggcactggaagaactgggtggccaaaaacagcgcgccgacatgttggaaatggaactaaagatgcttaagtcccaatctagttcggccgagcagtctttcctgttttctcgagaagaggcggacacgctccggctgaaagtagaagaactggaaggggagagatcccgattagaggaagagaagcgcatgctggaggctcagcttgaaagacgcgcactgcagggagattacgaccagtcgcgtaccaaggtcctgcacatgtctttgaatccaacttccgtggctcgccagcgtctccgggaggaccattcccagttacaagctgagtgtgagaggctccgcggtttactacgtgcaatggagagggggggcactgtcccagccgacctggaggcggccgcagctagcctgccctcatcaaaagaggtggccgaactgaagaagcaagtggagtctgccgagttgaagaatcaaagactcaaagaggtctttcagaccaagatccaagagtttagaaaggcttgttacaccctgaccggttaccagattgatatcactacggagaatcaatataggctgacgtccctttacgctgaacaccctggcgactgcctcattttcaaagccacctccccgagcggaagcaaaatgcagctacttgagacagaattctcacacactgtcggggaactaatcgaggttcatctgcgaagacaggactcaatccccgctttcctgtcgtcgctaaccttagagcttttttctagacagaccgtcgcttag

SEQ ID NO: 193808 - DNA, 474 bp, synthetic construct
  misc_feature 1..474: note = Description of Artificial Sequence: Synthetic coding sequence
  source 1..474: mol_type = other DNA
atggaggacctgggcgagaacaccatggtgctgagcaccctgcggtctttgaataattttatctctcagagagttgaagggggttcaggcctggatattagtacctccgccccaggttctctgcagatgcaatatcagcagtcgatgcagcttgaggagcgggccgagcagatccgaagcaaaagccacctgatccaagtcgaacgggagaaaatgcaaatggagctgagccacaaaagggcccgcgtcgagttggagcgtgcggctagtaccagtgctcggaactacgagagagaggtggatcgcaatcaagagctgctgaccaggatcagacagttacaggagcgggaagcaggcgccgaggaaaagatgcaagaacagttagaacgcaacagacaatgtcagcagaacctggacgccgccagcaaacgattacgagagaaggaggactctctggcccaggccggggaatag

SEQ ID NO: 193809 - DNA, 810 bp, synthetic construct
  misc_feature 1..810: note = Description of Artificial Sequence: Synthetic coding sequence
  source 1..810: mol_type = other DNA
atgcgggagctggagttcgccaagctggagtgctgcctggcctggcagcttcaggctagccggcgggagctggagatggagctgaaaatgcttaaatcccagtcatcctccgcagaacaatctttcctattctcacgcgaggaagctgatactctgcggctaaaggtcgaagagttggagggagagaggtccaggctggaagaagagaagagaatgcttgaagcgcaactcgagaggagagctctgcagggagattatgatcagagccgtaccaaggtgttgcatatgagtctgaatcccaccagtgtagcacgccagcggctgcgcgaagatcactcacagctccaggccgagtgcgagaggttgaggggacttctgcgagcaatggaaagaggggggactgtgcccgcagatctggaggcggccgcagcttctctgccgagttccaaagaagtagccgagctgaaaaagcaagtagaatccgcagagttgaaaaaccagaggctcaaagaggtgttccagacaaagatccaggagttccggaaagcttgctatacactgactgggtatcagatcgacattaccactgaaaatcaataccggctaaccagcttgtatgcagagcaccccggggactgcttaatctttaaggctacctctccttccggatctaaaatgcagctgctggaaacagagtttagtcacacagtgggtgagcttattgaagttcacttgagaagacaggacagcatccccgctttcttgagcagtctgaccctagagttattttctcgtcaaacagtagcctag

SEQ ID NO: 193810 - DNA, 618 bp, synthetic construct
  misc_feature 1..618: note = Description of Artificial Sequence: Synthetic coding sequence
  source 1..618: mol_type = other DNA
atggccctgcagctgagccgggagcagggcatcaccctgcggggcagtgccgagattgtggctgagttctttagttttggaatcaactctatcctttatcaacgcgggatctaccctagcgaaaccttcactcgcgtccagaagtacggtctgaccctattagtcacaaccgatcttgagctgatcaaatatctcaacaacgtggtagagcagttaaaggattggctctacaaatgctcagttcagaaactcgtggttgtcatttcaaacatcgagtccggcgaagttctggagcgttggcagtttgacattgaatgcgacaagaccgctaaagacgactctgcaccccgagaaaagagtcaaaaggccattcaggatgagatccggtcagtcattagacagatcacagccactgtgaccttcctgccactccttgaagtcagctgctcctttgatttgctgatctatacagacaaagacctggtggttcccgagaagtgggaagaatccggaccacaatttattacgaattcagaggaagtgcggctcagatccttcaccaccacaatccacaaagtcaattcaatggtggcatataaaataccagttaacgattag

SEQ ID NO: 193811 - DNA, 1212 bp, synthetic construct
  misc_feature 1..1212: note = Description of Artificial Sequence: Synthetic coding sequence
  source 1..1212: mol_type = other DNA
atgcccaaccggaaggccagccggaacgcctactacttcttcgtgcaggaaaagatcccagagctgcgacggcgcgggctgccagtcgctcgggtcgcagacgctattccatactgctcctctgattgggccaagcccgtttttacgccactgcggcgcccggggatgctggtgcccaagcaaaacgtgtcgcctccagatatgtccgcactcagtcttaagggggatcaggcgctactcggcggcatcttttattttctgaatattttttctcatggagaactgcccccccactgcgaacagcgctttctgccctgtgagatcggttgcgtgaaatacagcctccaggagggtatcatggcagactttcattcattcattaatcccggggagatccctcgaggcttccggtttcattgccaggccgcgagtgactcctcgcataagatcccaatctcaaactttgaacggggccataatcaggcgacagtgctccagaatctctatcgctttatccatccaaaccctggcaattggccgccgatatattgtaaaagcgatgacagaactagggtcaattggtgtttaaaacatatggctaaggcatcggaaatcaggcaagacctccaactgctcacagtggaagacctcgtggtaggcatttaccaacagaaatttcttaaggagccatccaaaacatggatccgcagcctgctcgatgtggccatgtgggattattcttccaacacaaggtgcaagtggcacgaagagaatgacattcttttttgtgccttggctgtatgcaagaagatcgcgtattgtattagtaactcacttgctaccttattcgggattcagctgactgaagcacacgttccgctccaggactacgaagcatccaattctgtgaccccaaaaatggtggtgctcgatgccgggcgctaccaaaagctgcgggtgggtagcagcggcttctctcatttcaattcatctaacgaggaacagcggagtaatacgcctataggtgactacccttcccgagcaaaaatttcaggccagaattcttccgttaggggaagagggataactagactgttggagtctatcagtaatagcagttcaaacatacacaaattttctaattgcgatactagcctgtccccatacatgagccagaaggacgggtataagagcttttcatcgctctcttag

SEQ ID NO: 193812 - DNA, 1305 bp, synthetic construct
  misc_feature 1..1305: note = Description of Artificial Sequence: Synthetic coding sequence
  source 1..1305: mol_type = other DNA
atgcccaaccggaaggccagccggaacgcctactacttcttcgtgcaggaaaaaatccctgaactgcggaggcgcggccttcctgtggcgcgggtagccgatgctataccttactgttcttctgactgggctttgctgagagaggaggagaaggaaaagtacgcggaaatggctagggaatggcgggccgcccagggaaaagaccccgggcctagcgagaaacagaagcctgtcttcacccccctccggcgccccggaatgctcgtgcctaaacagaatgtttcaccacctgacatgtcagctctaagcctgaagggagaccaggccctgctgggcgggatcttctacttcctcaacatcttctcacacggagagttgcctcctcattgtgagcagcggtttttaccttgtgagatcggctgcgttaagtattcattgcaggagggtatcatggctgatttccacagctttattaaccccggcgagatccccagaggcttccggttccactgtcaggctgcgagcgatagctcacataaaatcccaatctccaactttgaaagaggccataatcaggctaccgttttgcaaaacctttaccggttcatacaccctaatcctggcaattggccccccatctactgtaagtccgatgacagaacaagagtcaattggtgtctgaagcatatggctaaagccagtgagattcgccaagacttgcaacttctcactgttgaggacctggtggtgggtatttatcagcaaaagtttctaaaggaacctagcaagacttggattaggagtctccttgatgttgctatgtgggactacagttcaaacacccgttgcaaatggcatgaagaaaatgatattctgttttgcgcgctcgcagtgtgtaagaagatcgcatattgcatctccaattctttagctaccctgtttggcattcaactcacagaggctcacgtccccctgcaggactacgaggcttccaattctgttactcccaagatggtcgttctagatgcaggacggtaccagaagctacgggtgggaagctccggattctctcacttcaattcctccaatgaagagcagagaagcaacacgccaatcggcgactatccctcgagggccaagatttccgggcagaactctagcgtccggggccgggggataacaagattattagagtccatctccaacagcagctctaacatacataagttctcaaactgcgacaccagcctatcaccttacatgagtcagaaggacggttacaagtctttttcctccctgagctag

SEQ ID NO: 193813 - DNA, 951 bp, synthetic construct
  misc_feature 1..951: note = Description of Artificial Sequence: Synthetic coding sequence
  source 1..951: mol_type = other DNA
atgcccaaccggaaggccagccggaacgcctactacttcttcgtgcaggagaagatccccgagctgcgtcgcagaggcctgcctgtcgctcgagtggcagacgccattccctactgttcttctgactgggccaaaccggttttcacccctctgcgtcggccgggcatgttagtccctaaacagaatgtgtccccgcctgacatgtccgccttgtccctgaaaggagaccaggctctcctcggcggcatcttttactttctaaacatctttagccacggtgagcttccaccacactgcgagcagcggtttctgccctgcgaaataggttgcgtgaaatactccctccaggagggcattatggcggactttcactcttttattaatcccggcgaaattcccaggggatttcgtttccactgccaggctgccagtgacagttctcacaaaatcccaatttcaaattttgaacggggccataaccaggccactgtcctacaaaatctgtacaggtttatccacccaaacccaggtaactggccccccatttattgtaagtccgacgacaggacgagggtcaattggtgtcttaagcacatggcaaaggccagtgaaattcgccaggacctgcagctactgacagtggaggatctggtagttggtatttaccagcagaaattcctgaaagagccctccaaaacatggattcggtctttgctggacgtagctatgtgggactactcgagtaataccaggtgtaaatggcacgaggagaatgatattctgttttgcgcccttgctgtctgcaagaagatcgcttattgtatcagcaattcacttgctactctgtttggaatccagctgactgaagcccacgtccctttacaggattatgaagccagcaattctgttacacccaaaatggtggtgctagatgcgggtcgctaccagtag

SEQ ID NO: 193814 - DNA, 471 bp, synthetic construct
  misc_feature 1..471: note = Description of Artificial Sequence: Synthetic coding sequence
  source 1..471: mol_type = other DNA
ctgctgcagcggtgcaagtggcacgaggagaacgacatcctgttctgcgctctcgcagtgtgcaaaaaaatcgcctactgtattagtaacagcctggccaccttattcgggatccagctgacggaggctcatgtcccgctgcaggattacgaggcctctaacagcgtcacgccaaagatggtggtgctcgatgcggggcggtatcagaaattaagggtcggatctagtggattcagccatttcaatagtagtaacgaggaacaacggtccaacaccccgatcggggattatccctctagagccaagatcagtggacagaactcctctgtaagaggcagaggcatcactagactccttgagtccatttccaacagcagtagcaacatacataaattctctaactgtgatacgtccctgtctccctacatgagccagaaggacggttataaatctttttctagtctgtcttag

SEQ ID NO: 193815 - DNA, 747 bp, synthetic construct
  misc_feature 1..747: note = Description of Artificial Sequence: Synthetic coding sequence
  source 1..747: mol_type = other DNA
atggaccagcggcagcggcggatcctgggccagcccctgagcatccccacttcccaacctaagcaaaaacgcacatccatgattagcttcttctcgaaggtgtcttggaaactcagattccagaagagggagcctctgaaaaacgtgttctttattctggcggagagagctagggatccctcagcgaaaaagcggcatatggccatgagaaacctggggacaatggcttatgaagcgcccgacaaagtccggaaatataaaaagattgttcttgacctgctcgtttatggcctgtacgaccccgtgaaccttgaggtgattcacgagagcatgaaaacacttacggttgtcctcggcaagatccaggggaagggcctcggttcttttttcatcgacattacacttcagacccgtactctgctggatgatgaaaatgactccttgaggtacagcgcattcgtactctttgggcagctggctgctttcgccgggcggaagtggaaaaagttcttcactagtcaggtgaaacagacacgggattcacttttaatccaccttcaggatcgcaacccacaagtagctaaggcatgtaagaccacctttcaggcatgcagtccttatcttaaattgaaagaggaatattcttttcagtcagaagaggaccagagaaataccaagctgtaccaacagctctcccactatcacccagaaatacttcaattcttttatgccaacaagatattgtag

SEQ ID NO: 193816 - DNA, 747 bp, synthetic construct
  misc_feature 1..747: note = Description of Artificial Sequence: Synthetic coding sequence
  source 1..747: mol_type = other DNA
atggaccagcggcagcggcggatcctgggccagcccctgagcatcccgacttcccagccgaagcagaaacggacctcgatgatatcctttttctcaaaagtgtcttggaagttaaggtttcagaaacgggagcccctgaagaacgtgttctttatactggctgaacgtgccagagaccccagtgccaaaaagagacatatggccatgcgaaatctgggtactatggcctacgaggcgcccgacaaagtgagaaagtacaaaaaaatcgtgcttgatctcctcgtctacggactgtatgaccctgttaatctcgaagtgatccacgagagtatgaaaactctgaccgtggtcctcgggaagatacaaggaaaagggctgggcagcttttttattgatatcacactccagactcgcactctacttgatgacgagaacgactctctaagatatagtgccttcgtgttattcggccaactggccgcattcgctggccggaagtggaaaaaattttttacatcacaggtgaagcagacaagagacagcctcttgatccacttacaggatagaaatccgcaggtcgccaaggcgtgcaaaacaacctttcaggcgtgttctccgtatctgaagttaaaagaggagtacagttttcagtcagaggaggatcaacgaaacaccaaactctatcaacaactcagccactatcaccctgaaatcttgcaattcttctacgccaataagattttgtag

SEQ ID NO: 193817 - DNA, 591 bp, synthetic construct
  misc_feature 1..591: note = Description of Artificial Sequence: Synthetic coding sequence
  source 1..591: mol_type = other DNA
atggaccagcggcagcggcggatcctgggccagcccctgagcatccccacctcccaaccaaagcagaagagaactagtatgataagtttctttagcaaagtgtcctggaagcttcgctttcagaaacgggagcctcttaaaaacgtctttttcattctggcggagcgagctagagacccatccgccaagaagagacacatggctatgcgcaatctcgggaccatggcgtatgaggcacccgacaaagtcaggaagtacaagaagatcgtgcttgatttgcttgtctatggcctttacgaccctgttaatctggaggttatacatgaatctatgaaaacccttacagtggtcctgggtaagatacagggcaaaggactcgggtccttttttattgacatcactctgcagacaagaacactgctggatgacgcctgcaaaactaccttccaagcgtgcagtccatatttaaaacttaaggaggagtactccttccagtcggaagaggaccagaggaacactaaactctatcaacagctttctcactatcatcccgaaatcctccagttcttctatgcaaataaaatcctgtag

SEQ ID NO: 193818 - DNA, 633 bp, synthetic construct
  misc_feature 1..633: note = Description of Artificial Sequence: Synthetic coding sequence
  source 1..633: mol_type = other DNA
atggcctggggcagcaagggcatccagggctgggagaacctggccgagtctagtcacctggccacaacccgtgagtcatctccccctgagtcaggaaccggctccggcagcagccgcggaagtcggttgcaggaacctcaggtgtcttggaagctacggtttcaaaaaagagagcctctgaaaaatgtgttctttattctagcagagagggcacgtgacccaagcgccaaaaagagacacatggcaatgagaaatctcggaaccatggcatatgaggccccagacaaagtgcgcaagtacaaaaaaatcgtcctggacctgctcgtgtatggcctgtacgacccggtgaaccttgaagtcatccatgagtcaatgaagacccttactgtggtcctgggcaagatccaaggcaagggtcttgggtcattctttatcgacattactctccagacaaggacgctgcttgatgacgcatgcaaaactacatttcaggcgtgcagtccctatcttaagctaaaggaggagtacagcttccagtccgaggaagaccagcgtaacactaagctgtaccagcagctttcacattatcaccctgaaatcctccagttcttttatgccaataagattctatag

SEQ ID NO: 193819 - DNA, 789 bp, synthetic construct
  misc_feature 1..789: note = Description of Artificial Sequence: Synthetic coding sequence
  source 1..789: mol_type = other DNA
atggcctggggcagcaagggcatccagggctgggagaacctggccgagagctcccatctggctactaccagggaatcctctccgcccgagtcaggaacaggatcaggctctagtcgtggatcccgtctgcaggagccacaggtttcttggaaactgcgctttcagaagagggagccgttgaaaaatgtcttttttattcttgccgagagagcccgcgatccctcagctaaaaagcgtcacatggctatgcgcaacctgggcacaatggcttacgaagcacccgataaggtgcgcaaatataagaagatcgtgcttgaccttctcgtgtatggcctgtacgatcctgtcaatctggaggttattcacgaatctatgaaaacactgactgtcgttctgggtaaaattcagggcaagggccttggatctttctttattgatatcactctgcagactcgaacattattggacgatgagaatgattccctgcggtacagcgctttcgtcctgtttgggcaattggcagctttcgccggccggaagtggaagaaattcttcacgagtcaggtaaagcagactcgcgactctctgctcatccacctgcaggaccgcaacccgcaggttgccaaagcttgcaagactacttttcaagcttgcagtccctacttgaagctcaaagaagaatacagtttccaatcagaagaggaccagcgtaatacgaagttataccagcagctgtcgcactatcaccccgagattctacaattcttttacgccaataaaatcctgtag

SEQ ID NO: 193820 - DNA, 591 bp, synthetic construct
  misc_feature 1..591: note = Description of Artificial Sequence: Synthetic coding sequence
  source 1..591: mol_type = other DNA
atggaccagcggcagcggcggatcctgggccagcccctgagcatccctacttcacagcccaagcagaagagaaccagtatgataagtttctttagcaaagtgtcttggaaactgcgcttccagaaacgagagcccttgaagaacgtcttctttattctggccgagcgggctagggatccatccgccaagaagaggcacatggccatgagaaacttaggaaccatggcatatgaagctccagacaaagtgcgcaagtacaaaaagatcgtactcgatctcctcgtttatggtctgtatgatccagtgaacctggaggtaattcatgagagcatgaagaccctgactgtagtattaggaaagattcaaggcaaaggtttagggtcttttttcattgatataaccctgcagaccaggaccttactcgacgatgcctgtaagaccacctttcaagcatgtagtccgtatctcaagttaaaagaggaatactcctttcagtccgaagaggatcagcggaacacaaagctgtaccagcaacttagccactaccatcctgagatactgcagtttttctatgcaaataaaattctatag

SEQ ID NO: 193821 - DNA, 771 bp, synthetic construct
  misc_feature 1..771: note = Description of Artificial Sequence: Synthetic coding sequence
  source 1..771: mol_type = other DNA
atgaagctgctggagaacagcagcttcgaggccatcaacagccagttgacagttgagaccggagacgcacatatcataggacgaattgaatcctactcttgcaagatggccggggacgacaagcacatgttcaaacagttctgtcaggaaggtcaaccccatgttcttgaggcgctgtcacctcctcaaacatcagggttgtccccttctcggctgagcaagagccaggggggcgaggaggaaggccctctgtctgacaaatgttcaagaaagactctcttttacctgattgctactctgaatgaaagttttcgtccagactatgacttctccacagcaaggtcacatgagttcagcagggaacctagcctctcttgggtcgtcaatgctgtcaactgcagcctgttctcagcagtccgtgaagatttcaaggatctcaagccacaactctggaatgcagtagatgaagagatatgcctggcagaatgcgacatttatagttacaatcctgacctagactcagacccttttggcgaagatgggagcctgtggagtttcaattactttttttacaataaacgactgaagcgtatagtttttttctcttgccggtccatctctggatcaacctacacgccgtcggaggcggggaatgagctggacatggagctcggagaggaagaagttgaggaggagtctcggtcaggcggaagtggagctgaagaaacctccacgatggaggaagatcgggtccccgtaatttgcatatag

SEQ ID NO: 193822 - DNA, 213 bp, synthetic construct
  misc_feature 1..213: note = Description of Artificial Sequence: Synthetic coding sequence
  source 1..213: mol_type = other DNA
atgaagctgctggagaacagcagcttcgaggccatcaacagccagctgaccgtcgagacgggcgacgcccacatcatcggacggattgagagctacagttgtaagatggccggtgatgataaacacatgtttaaacaattttgtcaggaaggccagccgcacgtgttggaggcactgtcacctcctcagacctccggactatcccccagctag

SEQ ID NO: 193823 - DNA, 771 bp, synthetic construct
  misc_feature 1..771: note = Description of Artificial Sequence: Synthetic coding sequence
  source 1..771: mol_type = other DNA
atgaagctgctggagaacagcagcttcgaggccatcaacagccagcttaccgtcgagacgggtgacgctcacatcatagggcgaatcgagtcctattcctgcaaaatggccggcgatgacaagcatatgtttaagcagttctgtcaggaggggcagcctcacgtgctggaggcactgtctccaccccagacttccggcttgtcccccagcagactctccaagagccagggaggggaggaggaagggccactatcagacaaatgttctcgtaaaacactcttctaccttatcgcgactcttaacgagtcatttcgccctgactacgacttcagtaccgcgcggagtcatgagttttcacgtgagccatctttgagctgggtcgtaaacgctgtcaactgctcactgtttagcgccgttcgagaggatttcaaggatctgaagccgcagctgtggaacgccgttgatgaagaaatttgcctggctgagtgtgacatctacagctataatcccgatttggacagcgacccatttggagaagacggatcactttggtccttcaactacttcttctacaacaaaaggctgaaaagaatcgtcttcttttcttgcagatcaatctccggcagcacttatactcccagcgaagccggcaacgagctagatatggagctgggggaggaggaagtagaggaggaaagtagaagtggcgggtccggagccgaggagactagcacgatggaggaggatcgggtgcctgtgatctgtatttag

SEQ ID NO: 193824 - DNA, 1104 bp, synthetic construct
  misc_feature 1..1104: note = Description of Artificial Sequence: Synthetic coding sequence
  source 1..1104: mol_type = other DNA
atgcggaagggcaagggccccatctgcctgttcagccggcccaccctccgcccatcccggtccaaggtatccctgatcgaaggtcgcggggcaaacatggcggcgaggtggaggttttggtgtgtctcagtgactatggtggtggcacttctgattgtatgtgacgtcccaagcgcctcagctcagcgcaagaaagaaatggtgctcagcgagaaggtgtcgcagctgatggaatggacaaataagcggcctgtcattcgtatgaacggagacaagttcaggcggctggtcaaagccccccctagaaactatagtgtcatcgttatgttcacagctcttcagttgcatcggcagtgtgttgtatgcaaacaggccgacgaagaattccagatattagccaacagttggcgctattcgagcgcgttcaccaatcggatcttttttgctatggtggacttcgatgaagggagcgatgtgttccagatgctgaacatgaattctgcacccacttttattaacttcccggccaaggggaagccaaaacgcggcgacacctatgaacttcaggtcagaggatttagcgccgaacaaattgcgagatggatagctgacaggaccgacgtgaacatacgcgttattcgcccgccaaactatgcagggcctctcatgcttggactgttgctggctgtcatcggcgggttggtgtatctccgtaggtccaatatggagttcctgtttaacaaaactgggtgggcttttgctgccttgtgtttcgtgcttgccatgaccagcggccagatgtggaatcatatccgcggtccaccatatgcccacaagaatccacacacagggcacgtgaattacattcatgggagttcccaagcacagtttgtggccgaaacacacatagttttgctattcaatggaggtgtcaccttggggatggtcttgttatgcgaagccgcaaccagcgacatggatattggtaagcgcaagatcatgtgtgtggccggcatcgggcttgtagtcctcttcttttcatggatgctaagcattttccggtctaaatatcacggttacccatactccttcctgatgtcttag

SEQ ID NO: 193825 - DNA, 657 bp, synthetic construct
  misc_feature 1..657: note = Description of Artificial Sequence: Synthetic coding sequence
  source 1..657: mol_type = other DNA
atggtggacttcgacgagggcagcgacgtgttccagatgctgaacatgaattctgcacccacatttatcaacttccccgctaagggaaaaccaaaaagaggcgacacctatgaactccaggtgcgaggatttagtgcggagcagatagcccgctggattgcggaccggactgacgtcaatattagagtgatcaggccaccgaactacgcaggccctctgatgctcggactactgctagccgtgattggcggactggtgtaccttaggcgctccaatatggaatttctatttaataagaccggctgggcttttgccgctctttgctttgttttggcaatgacaagtggacagatgtggaaccacatacgaggtcctccgtacgcccataagaatccacacacgggccacgttaactacatccacgggtcctctcaggcacagtttgtggctgaaactcacattgtgctgttgtttaatggtggcgtcaccctgggtatggtcctgctgtgcgaggctgccactagtgatatggacattggtaaaagaaaaatcatgtgtgtcgcaggaattggcttggtcgttctgttcttttcctggatgcttagcatcttccgatctaagtatcacggctatccctatagcttcctcatgtcctag

SEQ ID NO: 193826 - DNA, 330 bp, synthetic construct
  misc_feature 1..330: note = Description of Artificial Sequence: Synthetic coding sequence
  source 1..330: mol_type = other DNA
atggagagcgacttctacctgcggtactacgtgggccacaagggcaaattcggtcacgagtttctcgagtttgaatttagacccgatgggaagctgcggtacgcaaataacagcaattataagaacgatgtgatgatccgaaaagaagaactggagattgtcataggcgatgagcatatttcatttaccacctcaaagatcggatccctgattgatgtgaatcagagcaaggacccggaggggctccgtgtgttctactatcttgtacaggatctgaagtgtctagtctttagcctgattggcctgcactttaagataaaaccaatttag

SEQ ID NO: 193827 - DNA, 441 bp, synthetic construct
  misc_feature 1..441: note = Description of Artificial Sequence: Synthetic coding sequence
  source 1..441: mol_type = other DNA
atggagagcgacttctacctgcggtactacgtgggccacaagggcaaatttggtcatgagtttctcgagtttgagttcaggcccgatggcaagcttcgttatgccaacaacagtaactacaagaacgacgtcatgattcgcaaggaggcctacgttcacaagagtgtcatggaagagttaaaaaggatcattgacgactccgaaattacgaaggaggacgacgccctttggcctcctcctgatagagtgggacgccaagaactggagatagtcatcggcgacgagcatatcagtttcactacatcaaagattggaagcttgatagacgttaatcagtccaaagaccccgagggtctgcgggtgttttactacttggttcaggacctgaagtgcttggtgttctcactgatagggctccactttaagatcaaacctatttag

SEQ ID NO: 193828 - DNA, 1731 bp, synthetic construct
  misc_feature 1..1731: note = Description of Artificial Sequence: Synthetic coding sequence
  source 1..1731: mol_type = other DNA
atgggcagcatcctgagccggcggatcgccggcgtggaggacatcgacatccaggcaaactcagcttatcgctatccccctaaaagtggaaattatttcgcttcacactttttcatgggcggagaaaaatttgatacacctcatcctgaaggctatcttttcggtgaaaacatggacttaaatttcctgggatcacgacctgtgcaatttccgtacgtgacgccagctccccacgaacccgtgaaaacactgcgcagcctcgtcaacatcaggaaagattcactgcgactggtgcgctataaggacgacgctgacagccccactgaagacggagataaacctagggtgctgtattcgttagaatttaccttcgacgcggacgccagggtcgccattaccatttactgtcaggctagtgaagaatttctcaatggacgcgcggtatactctccaaagtcaccatcgctgcagagcgagaccgtgcactataagcgtggggtgagccagcagttcagcctgccatccttcaaaatcgactttagtgagtggaaggacgatgaacttaatttcgatctggataggggggtgttccccgtggttatccaggctgtcgtcgacgagggcgacgtcgtggaagttacagggcatgcccacgtcttgttggcagccttcgagaaacatatggatggaagcttctcagtgaaacctctcaagcagaaacagattgtagacagagtgagttatctcctacaggaaatctacggtatagagaacaagaacaaccaggaaaccaaacccagcgacgatgagaacagcgataattccaacgaatgtgtcgtctgtctatctgacctcagggatacgctgatcctaccatgtcgtcacctctgcctctgcaccagctgcgcagatacactcaggtatcaagctaacaactgtcctatttgccgcctgccatttcgcgcacttcttcagattcgggctgttcggaagaagcctggcgctctttcgcctgtatccttttccccggtgctggcccagtccctggaacacgatgaacactcctgtcccttcaagaagagcaagcctcaccccgcgtccctcgcttccaagaaacccaagcgggagaccaactcagatagcgtacccccaggctacgagcctatttctttgctcgaagccctaaatggacttagagcggtctcaccagcgatccctagcgccccactgtacgaagagatcacatatagtgggatctccgacgggcttagccaggcatcttgccccctggctgccattgatcacattctggattcatcgaggcaaaagggacgcccacagagcaaggctcctgactctacactacggagcccctcctcccccatccacgaggaagacgaggagaagctgagcgaggatgtggacgcccctccccctctcggtggggctgaactggcgctgcgcgagtcctcatcgcccgaatcattcattacagaagaggtggacgagagttcatctccacagcaaggcacccgtgcggccagcatcgaaaacgtcctgcaggattcttcacccgagcactgtgggcgcggcccaccagctgatatctaccttcctggacgacctacatctatggagacagctcatgggttggcgacaacaagtcccacctggcctcctctcggcgggccctctccagatcccagcgccgctgaactgactccgctatag

SEQ ID NO: 193829 - DNA, 1659 bp, synthetic construct
  misc_feature 1..1659: note = Description of Artificial Sequence: Synthetic coding sequence
  source 1..1659: mol_type = other DNA
atgggcagcatcctgagccggcggatcgccggcgtggaggacatcgacattcaggctaactccgcctataggtaccctccaaagagtggtaactacttcgcctctcacttcttcatgggcggtgagaaattcgacacgccgcacccagaagggtacctgtttggggagaacatggaccttaatttcttgggttcacggcccgttcagtttccttacgtaactccggcacctcatgagcccgtcaaaactctgagatctctggtgaacatacgcaaggattcccttcgattggtccggtacaaagacgacgcggatagccctactgaggatggcgacaagcccagggtgctgtactcacttgagtttactttcgacgccgatgcacgtgtggcaattacaatctattgccaagcatccgaggagttcttgaatggccgcgcggtgtactcaccaaagtccccatccctgcaaagcgagaccgtccattataaacgtggagtctcacagcagttttcgttgccgagctttaagatcgatttcagcgagtggaaagacgacgaactcaacttcgatctcgaccgtggcgtctttccagtggtcattcaagccgtagtcgacgagggcgacgtcgtcgaggtaacaggtcacgcccacgtgttgcttgccgccttcgaaaaacacatggatgggtctttctccgtcaaacctctgaagcaaaaacagatagtggaccgagtcagctatctgctccaggagatctatgggattgaaaacaaaaataatcaagaaactaaaccaagcgacgacgaaaactcagataacagcaacgagtgtgtcgtttgcctgtctgatctgcgggatactctcattctgccctgcaggcatctgtgcttatgcacctcctgtgccgatacgctccggtatcaggcaaataattgcccaatctgcaggctgccgttccgcgctctcttacagatcagggcagtcaggaaaaagcctggggccttgagccctgtgtcctttagcccagtgttggctcagtccctggagcacgatgaacacagctgtcccttcaaaaagtctaagccccatccagcatctctcgcatccaaaaagccaaagagagaaacaaacagtgactccgtgcctcctggctacgagccaatctccctgttagaggctttaaatggtctgagggcagtctcgcctgcaattccttcggcccctctgtatgaggagatcacgtattctggtatctctgatggccttagccaagcatcttgcccactcgcagcaattgaccatatcttagactcctcgaggcagaaaggcaggccacaaagtaaggcccctgatagcaccttgaggagccctagctccccaattcacgaagaagacgaggaaaagttatcagaggacgtggacgcccccccccccctgggaggtgccgaactcgccctgcgcgaaagttctagtccagagtcgtttataactgaggaggtagatgagagctctagtccccagcaggggaccagggccgccagtattgagaacgtgttacaggactcctctccagaacattgcggtaggggccctcccgccgatatttacctccccgctctcgggcctgatagttgttctgtgggcatcgacgagtag

SEQ ID NO: 193830 - DNA, 1596 bp, synthetic construct
  misc_feature 1..1596: note = Description of Artificial Sequence: Synthetic coding sequence
  source 1..1596: mol_type = other DNA
atgggcagcatcctgagccggcggatcgccggcgtggaggacatcgatattcaggctaattcagcctataggtacccacccaaatcaggcaattacttcgcaagtcactttttcatggggggtgagaagtttgatacaccgcaccctgagggatacttgttcggggagaacatggatctgaacttcctgggctcccgacccgtgcagtttccttatgtaacccccgctccccatgagcccgttaaaacccttaggtctctggtcaacattaggaaggattcactaaggttggtgaggtacaaagacgacgcggacagcccgacagaagacggggataaacccagagtgctttactccttggaatttacctttgatgcagatgctagagtcgctataaccatttactgccaggctagcgaggagttcctgaatggcagggccgtctacagcccaaaatccccctccttgcagtcggaaaccgttcattataaacgaggagtgagccagcaattctcactaccatcctttaagatagattttagcgagtggaaggatgatgaactgaacttcgacctggatcggggcgtttttccagtggttattcaagccgtagttgacgagggagacgctgtggtcgaggtgacaggtcacgcccacgtgctgctcgctgccttcgaaaagcacatggatggatccttctctgtgaaaccactgaagcagaagcagattgtggatcgcgttagctacctgctgcaagagatctacggaattgagaataagaacaaccaagagactaagcccagcgacgacgaaaactccgacaacagtaacgagtgtgtggtctgcctgtcagacctgagggacaccctaatattgccgtgtcgccacctatgtctttgtacttcctgtgccgacacattgcgataccaggcaaataattgcccgatctgtcgcttgcctttcagagccctgctgcagattcgagcggtgcgaaagaagccaggcgctctgagtcccgtatcattcagccccgtcctagctcaaagcctggaacatgacgaacacagcaattctgactcagtcccccctggttacgaaccaatctctttattggaagccctcaatggcttacgcgcagtgagcccagccatcccctcggcccccctttatgaggagatcacgtattcgggaatttctgacggtctttcacaggcctcctgtcccttagccgctatcgaccatatcttggactccagccgccagaaggggcgtccgcagagcaaggcccctgattcgacgcttcgaagtccaagcagccctatacacgaggaggatgaggagaagctctctgaggacgtggatgcaccgcctccactcgggggcgcagagttggccctacgagaatccagcagccccgagtcttttataaccgaagaggtggacgagtcttcttcacctcagcaaggcacgcgggctgcctcgattgagaacgtgctacaggattcgagccccgagcactgtggcaggggaccgcccgcagacatctacctgcctgcactggggcccgattcctgttcggtgggcattgatgagtag

SEQ ID NO: 193831 - DNA, 963 bp, synthetic construct
  misc_feature 1..963: note = Description of Artificial Sequence: Synthetic coding sequence
  source 1..963: mol_type = other DNA
atgggcagcatcctgagccggcggatcgccggcgtggaggacatcgacatccaggcgaactccgcctatcggtatcccccaaagtcaggcaattactttgccagccacttctttatgggaggtgaaaaattcgatacccctcaccccgaaggatatctgtttggcgagaatatggatctgaatttcctcggctccaggcccgtacagtttccctacgtcacgccagcaccacacgagcctgtaaagacactcaggagccttgtcaatataagaaaggattctttgcgccttgtgcgttataaggacgatgctgattccccaacagaggatggtgacaaaccgagagtgttgtattctttagaattcaccttcgatgctgacgcaagggtggccatcacgatctactgccaggcaagcgaagagtttctgaacggcagagccgtctactcaccaaaatcacccagcctgcagagcgagaccgttcactacaaacggggcgtctcccagcaattctcattaccctcgtttaaaatcgatttcagcgagtggaaggatgacgagctaaacttcgatctcgatcgtggagtgtttcccgtcgtcatacaggccgtcgtggacgagggtgacgtcgtagaagtgactggacatgcgcacgtcctgctggccgccttcgaaaaacacatggatggttccttctctgtcaaaccgcttaaacagaaacaaattgtggaccgcgtatcatatttgttgcaggaaatttatgggatcgaaaacaagaataaccaggagacaaaaccatctgatgatgagaattccgacaatagcaacgagtgtgtggtgtgtctctcagatttgagagatacattaatcttgccatgccgacacctgtgcttatgtactagctgtgcggacacattaaggtatcaagccaataactgtccaatctgccggctgcaactatag

SEQ ID NO: 193832 - DNA, 1632 bp, synthetic construct
  misc_feature 1..1632: note = Description of Artificial Sequence: Synthetic coding sequence
  source 1..1632: mol_type = other DNA
atggccaagggcgagggcgccgagagcggcagcgccgccggcctgttgcctacctccattctgcagtctaccgagagaccagcccaagtgaagaaagaacctaagaagaagaaacaacagctttctgtctgcaataaattgtgttatgccctgggaggggcaccatatcaggttacggggtgcgccttggggttttttctccagatctacctcctggatgtggctcagaaggacgaggaagtcgttttctgtttctccagcttccaagtcggccccttttcagcctccatcatactgttcgtcggacgcgcctgggacgcgattacagaccccctcgtgggactgtgcatcagcaagagcccatggacttgcttgggacggctgatgccatggattatattttcaactccgctggccgtcatcgcgtacttcttgatttggttcgtccccgactttcctcacggacagacttactggtatttactgttctattgcttatttgagacgatggtgacatgctttcatgttccgtactccgctctgacaatgttcataagcacagagcagactgagcgcgatagcgctactgcgtataggatgaccgtcgaagtcctaggaacagtcctgggtacggcaatccagggccagatcgtgggccaggccgatacaccttgtttccaggacctcaattcttccacggttgcctctcagagcgcgaatcacacacatggaaccactagccaccgcgaaacccagaaagcatatctgctggcagcgggagtaattgtctgtatctatattatttgtgctgtgatcctgattttgggtgtgagagagcagcgcgaaccatatgaggcacaacagtcagaacccatagcgtattttcggggcttaagactggtcatgagtcatggaccctacatcaaactcatcaccggattcctctttacatcattggcatttatgctagtcgaggggaattttgtactgttttgcacgtatacgctgggatttcggaacgagttccaaaatctcctgcttgccatcatgctcagtgccacactaactatccccatttggcagtggttcctgactcggttcggcaagaagaccgcagtctacgtgggcataagctcagcagtccctttcctgattcttgtggcgttgatggaatcgaatttgatcattacttatgctgttgccgttgcggccgggattagcgttgccgccgcatttctgctgccctggagtatgctgccagacgtcattgatgattttcacttgaaacaaccccatttccacggtacggaacccatatttttcagcttctatgtcttcttcacaaaattcgctagcggggtttccctgggaatctcgacgttgtcactcgacttcgctggctatcagacccgcggttgcagccaaccggagcgggtcaagttcacccttaacatgctggtcaccatggcacccattgttctgattctgcttggtctgctcctgtttaagatgtatccaattgatgaagagagacgcaggcagaacaagaaggccctgcaggcactgagagacgaagcatccagctccggctgcagcgagacggattctactgagttggcctcaattttatag

SEQ ID NO: 193833 - DNA, 1593 bp, synthetic construct
  misc_feature 1..1593: note = Description of Artificial Sequence: Synthetic coding sequence
  source 1..1593: mol_type = other DNA
atggccaagggcgagggcgccgagagcggcagcgccgccggcctgctgcccacctccatccttcagagtaccgaacgcccggcacaagtgaaaaaagagccaaagaaaaagaaacagcaactgtcggtttgcaacaaactgtgctatgccctgggcggagctccctatcaggtgacaggttgtgctctgggattttttctccagatctacctgctggacgtggcccaagtgggcccttttagcgctagtattatccttttcgtaggacgtgcgtgggacgccatcacagaccccttggtcggtctgtgtatttcaaaatcaccctggacctgtttgggccggctgatgccttggataatcttctccacgcccttggctgtgatagcctactttttgatttggttcgtgcctgattttccacacggccagacctactggtatctgcttttttactgtctctttgagacgatggtcacttgctttcatgtgccttacagcgcattaacaatgttcatctctaccgagcagaccgaaagggattcagccaccgcctaccgtatgacggtggaagtgttggggactgtgctggggactgccattcaaggccagatcgtcggtcaggccgacaccccctgctttcaggaccttaactcttcaaccgtggcctctcagagtgctaaccatacacatgggaccacatcccaccgcgaaacccagaaggcatacctgctagccgcaggggtgattgtctgcatctacataatttgtgctgtgatcctcatccttggagtcagggaacagagagagccatatgaagcccagcagagcgagcctatcgcatattttcggggcctgagactggtgatgagtcacggtccatatataaagctgataacagggttcctgttcacttccttagcgttcatgttggtggaaggaaatttcgttctcttttgcacatatactctaggcttcagaaacgagtttcagaacctcttattggccataatgctaagtgcaacccttacgatccctatttggcagtggtttctcacccggtttggcaagaaaacagctgtgtacgtaggtatatcttctgctgtccccttcctgattttggtggcacttatggaaagcaatttgatcattacatacgcagtggcggtggctgctggaattagcgtcgccgctgcattcttgctgccgtggtctatgcttcccgacgtgattgatgactttcacctgaagcaaccccacttccacggaaccgagccaatcttcttctcgttctatgtcttttttaccaaattcgcctctggcgtctcgctaggcatcagtacactaagcctggactttgcagggtaccagacgagaggctgcagccagccggagcgggtgaaatttactcttaacatgctggtaacaatggcccccatcgtcttgatcctgcttgggctgctgttattcaagatgtatcccatcgacgaagagcggcggcgacagaacaagaaagccctccaagccttgcgcgacgaagcgtcttccagcggatgctccgagaccgattctacggaattggcttctatactttag

SEQ ID NO: 193834 - DNA, 1125 bp, synthetic construct
  misc_feature 1..1125: note = Description of Artificial Sequence: Synthetic coding sequence
  source 1..1125: mol_type = other DNA
atggtgacctgcttccacgtgccctacagcgccctgaccatgttcatctctacggagcaaaccgaacgagacagtgccaccgcctacagaatgacggtggaagtactcggcaccgtcctgggcaccgccatacagggccagatcgtgggacaggccgatactccttgctttcaggacctgaactcctcaaccgtggcgagccagtccgctaaccatactcacgggaccacctcccatcgggaaacgcagaaggcctacctactcgctgccggcgtgattgtgtgcatctatattatctgtgctgtcattttgattttaggagtgcgggagcagcgcgagccttacgaggcacagcaatctgagcccattgcctatttcaggggtttgcgcttggtgatgtcccatgggccctacatcaaactcattacagggtttttattcacttccctcgccttcatgttggtcgaaggcaactttgtcctgttttgcacatacacactgggcttcaggaatgagttccagaatttgcttctggccattatgttatccgcgacgttaacgattccaatctggcaatggtttttaactaggttcgggaaaaaaaccgcagtatacgtggggatttccagcgctgttcccttcctcatcttagtggcacttatggagtccaacttgatcatcacctacgccgtagccgtcgcagctggtataagcgtggcggctgccttcctactcccctggtcgatgctgcccgatgtcattgatgattttcaccttaaacagcctcacttccatggcactgagccgatattcttttccttttacgtgttcttcacgaagttcgcctccggggtgtccctgggtatttctacactgtcactggactttgcaggttaccagacaagaggatgcagtcagccagaaagggtgaaatttacgctcaatatgctcgttaccatggcccccattgttctgatcctgctcggactgctgctgtttaaaatgtatccaattgatgaggaacggaggcgccagaacaaaaaggctttacaggccctgagggacgaagccagcagctcgggctgcagtgagaccgattcaacggagctcgcatcgattctgtag

SEQ ID NO: 193835 - DNA, 801 bp, synthetic construct
  misc_feature 1..801: note = Description of Artificial Sequence: Synthetic coding sequence
  source 1..801: mol_type = other DNA
atggccaagggcgagggcgccgagagcggcagcgccgccggcctgctgcctacttctatcctgcagagtaccgagcggcctgcccagaaggagcctaagaagaaaaagcagcagttgtccgtctgcaacaagctgtgttacgcattgggtggggccccctatcaggtaacggggtgcgccctgggttttttcctgcagatctacttactggacgtggcccaagtgggtcccttctctgccagcatcatcctctttgttggacgggcatgggacgcaattactgaccccctcgtgggattgtgtatctcaaaaagtccctggacctgtcttggccgtttaatgccttggatcattttcagcacgcccttggccgtgattgcctattttctcatatggtttgttcccgacttcccgcacggccaaacatactggtaccttctcttctattgccttttcgagaccatggtgacatgttttcatgtaccctatagcgccctgaccatgttcatctctaccgagcagacagagagggattcagccacagcctatcggatgaccgtagaggttcttggaaccgtgctcggcacagctatccagggccagatagtgggacaagcagacaccccgtgttttcaggatttgaactcatcaaccgttgctagtcaaagcgctaatcacacccacggcacaacctcccatagagagacacagaaggcctacctgctggccgccggagtgatcgtctgtatctacataatttgtgctgtaattttgattctgggggtccgtgagcagcggtag

SEQ ID NO: 193836 - DNA, 2376 bp, synthetic construct
  misc_feature 1..2376: note = Description of Artificial Sequence: Synthetic coding sequence
  source 1..2376: mol_type = other DNA
atggccgacgacaaggtggccatcctgaccgacgacgaggaggagcagaagcgtaaatacgtccttgccgacccgtttaatgggattagcagggaacccgagcctccctcaaatgaaactccttcgagtacagagactagtgcaattcctgaggaagaaattgattggattgagaaacactgcgttaagataaataatgacctgctgatcagcaaggtcttttacttcttcttttatagtgcctacggctccctgtatcctcttctgcccgtgtactataaacaactggggatgagcccctctcaaagcggcctcttggtggggattagatatttcatcgagttctgctcagctccgttctggggtgtcgtcgcagaccgttttaagaagggcaagatcgtcctcctattctcattgctgtgctgggtcctgtttaatctgggcataggattcgttaaacctgccactcttcggtgcgtgcctaagatcaggcccacgacgcatcctacaaatgcttctcaccaactcactatcctgcccactaattctagctttaccagcttcctcacgatttcacccaaaatgcgcgaaaaaagaaacctactcgaaacccgactgaatgtgtcagatacagtcactctccccacggcacccaacatgaattctgaaccaaccctgcagcctcagacaggcgaaatcaccaacagaatgatggacttgacgctgaactcttccacggcaacaccagtgagtccaggatcggtcacgaaagaaaccactactgtcattgtcaccactacaaagtcactgccttccgaccaggttatgctcgtttatgaccagcaggaggtggaggcgatcttccttgtgatcctggttgtggtgattatcggtgaattcttttccgcatcctccgtcacaattgtggatactgtgaccctccagtatctgggtaaacatcgcgaccgatatggtctgcaacggatgtgggggagcctgggttggggactggctatgctctctgtcgggatcggaatagattatactcatattgaggtgttgattgacgggaaaggctgtaaaccacccgaatatcgaaactaccagatcgtgttcatcgtgttcggggtgctaatgactatggcgctgattgttgctacccagtttcgattccgctataatcattttaagaacgacgacagcaaagggaaggaagtcgagattcctcaagtggagaggaataacagcaccgaatcaagcgaagagacacctaccacgacgagccactcacaggcctttaatttctgggatctgatcaagctcctgtgttcagtgcagtatggttcggtgctcttcgtggcctggttcatggggttcggatatggctttgtcttcacctttctgtactggcacctggaggaccttaatggtaccactaccctgtttggagtgtgttctgtcctgtcccacgtaagcgagcttaccgcatacttcttcagtcacaagttgatcgaactcatcggacacattcgagtgctgtacattggactggcttgtaacacagcaaggtacatttatatatcttatcttgaaaacgcatggacggtgttgccaatggaggtgctgcagggcgtgacccatgccgctatttgggccgcttgtatatcatatctctccgccgccgtgcccccagaactgagaacctcggctcagggtattttgcagggattacaccttgggctggggcggggatgtggagctatgatcgggggagtcctcgtcaactactttggggccgctgcaacgtttcgcggaataggcatggcatgcctagtaatcctcttgctgttcgccctgatccaatggctggctgtccccgatgaggaagaagacaaaacgatgcttgccgaacgcatcccagtgcccagttcccccgtaccaatagcaacaattgatctggttcagcaacagactgaggatgtgatgcctaggatcgagccaaggctgccacctaaaaagaccaaacatcaggaggaacaggaagacgtaaacaagcccgcatggggagtttcttctagcccttgggttacattcgtttacgctctttaccagatcaaagaaatgatgcagcttactagagacaaccgagcatcagaaatccaaccactgcagggtaccaacgagaatcgggagaacagtccggctggccgggcacaaccggtaccctgtgagactcactcggatccctcgagaaatcagccttcccctgacgccgctgcaagccagacccagacaagtccagcccacccgagtgtggatccctgtactgaggaatctgaggaacagcaggcccagctggccgcagggggccattag

SEQ ID NO: 193837 - DNA, 2376 bp, synthetic construct
  misc_feature 1..2376: note = Description of Artificial Sequence: Synthetic coding sequence
  source 1..2376: mol_type = other DNA
atggccgacgacaaggtggccatcctgaccgacgacgaggaggagcaaaaacggaaatacgtgcttgccgaccctttcaatggaatctctcgtgagcccgaaccaccatccaatgagaccccctcttctacggagacctcagcaatccctgaagaggaaattgattggatcgaaaagcattgcgtgaagatcaataacgacctgctgatatccaaggttttttactttttcttttacagtgcctacggctccctctatcctcttttgccggtgtactataaacagctcggtatgtcacccagccagtcgggcttactggtcgggattcgctacttcatcgagttttgctcggcccctttctggggagtcgtggcagacagatttaaaaaagggaaaattgtactcctattttcattgttatgctgggtcctattcaatttgggaattgggttcgtgaaaccagcgacattacgatgcgttcctaagattaggcctacgacccaccccacgaatgcaagtcaccaactgaccattttacccacaaactcaagctttactagttttctgactatttcgcccaagatgagggagaaaaggaatctgcttgagactcggctgaacgtatccgacacagtaactcttccaactgccccaaatatgaattccgagccaactttgcagccccaaaccggggaaatcacaaataggatgatggacctgacgttgaactcatcaacagcaactcccgtatcaccaggatcggtgacgaaagagactacaacagtgattgtgaccaccaccaaatcccttccatctgaccaagtgatgttggtctacgatcaacaggaggtggaggccatttttctcgtgattctagtggtggttataattggagagttctttagtgcaagttcagttacaatcgttgatacagtgacattgcagtatctgggtaagcaccgagatcgttacggccttcagaggatgtggggcagcctgggatggggtttggctatgctgtctgtaggcataggaattgattatactcatatcgaggttctcatcgatggcaagggctgcaaacccccagagtatcgaaactaccagatagttttcattgtcttcggcgtgctgatgaccatggccctgatcgtcgctacccaattccggtttagatataaccattttaagaacgatgactccaagggaaaggaggtggaaatacctcaagtggaacgcaacaactccactgagagctcagaggaaacacctacaacaacttcacacagccaagcctttaatttctgggacctgatcaagctgttatgtagcgtccaatacggtagcgtcctatttgtggcctggttcatgggctttggatatggcttcgtctttacgtttttgtactggcacctcgaggacctgaatgggaccacgacgctgtttggggtttgcagcgtgctgagccacgtttccgagctgaccgcatattttttttcacacaaactgattgaactaattggccacataagagttctctatatcgggctggcctgcaatactgcccgatacatttacatcagctatctggagaatgcctggactgtcctaccaatggaggtcctgcagggagtgacccatgcggcaatctgggcagcctgtatctcctacttatccgccgcagttccacccgaactgaggacatcagcccaaggtattcttcagggtctacatctggggttaggacggggatgcggcgcgatgattggcggagtgctcgtgaactactttggtgcggcagcgacgttcagggggattggaatggcatgcctagtgatacttctactgtttgcactgatccagtggctagccgtgcctgacgaagaggaggataagactatgcttgcggagcgtatccccgtgcctagctctcccgttcctatagctacaatcgatctggtgcaacagcagacggaagatgtgatgccacgcattgaacctaggctcccccctaagaaaaccaaacaccaggaggagcaggaggatgtgaacaaaccagcctggggggttagttcttctccatgggtcaccttcgtgtatgcactgtatcaaatcaaggagatgatgcagctaaccagagataatagggcctcagagattcagccattgcagggaactaacgagaatcgcgagaattcgccagctgggagagcacagcccgttccctgcgaaacccactcagatccatctaggaaccagccaagcccagatgccgccgcaagtcaaactcagacaagtccggctcaccccagcgtcgatccctgtactgaggagtcggaggaacagcaggcacagctggccgcaggcggccactag

SEQ ID NO: 193838 - DNA, 129 bp, synthetic construct
  misc_feature 1..129: note = Description of Artificial Sequence: Synthetic coding sequence
  source 1..129: mol_type = other DNA
atggccgacgacaaggtggccatcctgaccgacgacgaggaggagcagaagcgcaaatacgtcctggccgatccctttaacggcataagccgggaacctgagcctccctcaaatgagacgccaagttag

SEQ ID NO: 193839 - DNA, 345 bp, synthetic construct
  misc_feature 1..345: note = Description of Artificial Sequence: Synthetic coding sequence
  source 1..345: mol_type = other DNA
atggccgacgacaaggtggccatcctgaccgacgacgaggaggagcagaagagaaagtatgtgctggccgatccttttaatggaatttccagagagccggagcctccttccaacgagaccccatcaagcacggaaacatctgcgatacctgaggaagagatagactggatcgaaaaacactgtgtgaaaattaataacgacctcctgatttctaaagtattttacttttttttttattccgcctacggcagcctctaccctctgctgccagtgtattacaaacagctcggtatgagtccctctcaatccggtttgctggttggaatccgatatttcattgaatag

SEQ ID NO: 193840 - DNA, 471 bp, synthetic construct
  misc_feature 1..471: note = Description of Artificial Sequence: Synthetic coding sequence
  source 1..471: mol_type = other DNA
atggccgacgacaaggtggccatcctgaccgacgacgaggaggagcaaaagcgtaagtatgttctggccgatccctttaacggcatcagcagggagccggaacccccctccaatgagaccccatcctccacagagacttccgccatcccagaagaggaaattgattggatcgaaaagcactgcgtgaaaattaataacgacctgctcatcagtaaagtcttttatttcttcttctattcagcctacggcagcctgtatccactcctgcccgtgtattataagcagctaggaatgagcccctcccagagcgggctcctggtgggcatccggtacttcatagagttctgcagtgctcccttctggggcgtcgtagctgaccggttcaagaaggggaagattgtcttactcttctcactgctttgctgggtcctcttcaatctggggattggatttgtcaaacccgcgacttag

SEQ ID NO: 193841 - DNA, 762 bp, synthetic construct
  misc_feature 1..762: note = Description of Artificial Sequence: Synthetic coding sequence
  source 1..762: mol_type = other DNA
atggaggtgctgcagggcgtgacccacgccgccatctgggccgcctgcatttcctacctgtcagctgctgtgcccccagagctgcggacgagcgcgcagggcatcctacaggggctgcatctgggacttggaagaggttgtggcgccatgatcggaggcgttctcgtaaattatttcggagctgccgccaccttcagggggattggcatggcctgccttgttatcctgctgctgttcgccttaattcagtggctggcagtgcctgatgaggaggaagacaagaccatgctcgctgagagaattcccgtgccctcctcgccagtgcctatcgccaccatcgatttagtgcagcagcaaaccgaggacgtgatgcctcgcatcgaacctcgcctcccccctaaaaaaaccaaacaccaggaggaacaggaggatgtcaataagcctgcttggggtgtctctagctcaccctgggtgaccttcgtgtacgcgctgtatcagattaaggagatgatgcagctgacgagggacaatcgggctagcgagatccagcccttgcaaggaacgaatgagaacagagagaactcgcccgccggccgcgcccaaccagtcccttgtgaaactcatagcgatccaagccgcaatcagcccagccccgacgccgcggcatctcagacccagacctccccagctcatccttccgtggatccatgcaccgaggaaagcgaggaacagcaggcccaacttgctgcgggtggacactag

SEQ ID NO: 193842 - DNA, 696 bp, synthetic construct
  misc_feature 1..696: note = Description of Artificial Sequence: Synthetic coding sequence
  source 1..696: mol_type = other DNA
atggaggtgctgcagggcgtgacccacgccgccatctgggccgcctgcatttcctatcttagcgctgctgtgccccctgagctacgcacatcagctcaggggattcttcagggtctccatttaggtctgggtcgcggttgcggcgctatgatcggcggagtgctggtgaactacttcggcgcggccgcaacctttagaggcataggcatggcctgtctggtgatactgctactcttcgcccttatacagtggctcgccgttccggatgaggaggaggacaaaacgatgctcgctgaaaggattccggtgccttcttcaccagtccccatcgcgactattgatctcgtgcagcagcaaacggaggatgtgaataagccggcctggggagtgtcatcctctccttgggtcacattcgtgtacgccctttaccagattaaggagatgatgcagctaactagagacaacagggcctctgagatacagccactgcagggtacaaacgaaaacagagagaactcccccgccggaagagctcagccggtcccctgcgaaacccactctgacccgtcccgaaaccagccctcgcccgacgccgcagcgtcccagacgcaaactagtcccgcccacccctcggttgatccctgcacagaggaatccgaggaacagcaggcacagctcgccgccggaggacactag

SEQ ID NO: 193843 - DNA, 1557 bp, synthetic construct
  misc_feature 1..1557: note = Description of Artificial Sequence: Synthetic coding sequence
  source 1..1557: mol_type = other DNA
atggccggcctgcggaacgagagcgagcaggagcccctgctgggcgacacacctggcagtcgcgaatgggacatcctcgaaacagaggaacactacaaatcaaggtggcggagcatccgaattctgtacttgaccatgtttctctccagtgttggtttcagcgtagttatgatgagcatctggccctatctacagaagatcgacccaactgctgacacatcatttctgggatgggtcattgcctcctacagtctgggtcagatggtcgcctcccccatctttggcctgtggtctaattacaggccaagaaaggagcctctgatcgtgtccatattgatttctgtagcggcgaattgcttgtacgcctaccttcatattcctgcctctcataacaaatattacatgctggtcgcccgcggtctactcggcattggtgctgggaacgtagcagtggtgagaagctatactgcgggtgcgacctccctgcaggaacgcacttcctcaatggccaatatcagtatgtgtcaggcattagggttcatcctggggccagttttccagacctgtttcaccttcctaggcgaaaagggcgtgacttgggatgtaatcaaactacagataaatatgtacacaacccccgttctcctcagcgcctttcttggaattctgaatatcatcctcatcttggctattctgcgggaacatagagtcgacgacagcgggcgccaatgtaaaagcatcaatttcgaggaggccagtacagacgaagcccaggtgcctcagggcaacatcgaccaggtagctgttgttgctatcaatgttctgtttttcgtaactttgtttatatttgcattgtttgagacaatcattacccccctgactatggacatgtacgcatggacacaggaacaggccgttttgtacaatgggattattctcgccgcactgggtgtcgaggcagtcgttatcttccttggcgttaagctcctgtcgaagaaaatcggggagagggccatcctgttgggggggctcatagtcgtctgggtaggcttctttatactgttgccttgggggaaccaattcccaaagattcagtgggaggatctgcataataattctatcccgaatacgacgttcggcgaaattatcatagggctgtggaaatctccaatggaggacgacaacgagcgcccaacgggttgcagcattgagcaggcctggtgcttatacacccccgtgatccacttggcacagtttctaacaagcgcagtgctgatcggtctggggtaccctgtttgcaacctaatgtcctacacactgtactctaaaattctcggcccaaagccccaaggcgtgtacatgggatggctgacagccagtggcagcggggcccggattctagggccaatgtttatttcacaggtatatgcgcactggggccctcgatgggccttctcacttgtctgtggcattattgttttaaccatcacattactgggggtggtgtataaaagacttattgccctgtctgttaggtacgggagaatacaggagtag

SEQ ID NO: 193844 - DNA, 462 bp, synthetic construct
  misc_feature 1..462: note = Description of Artificial Sequence: Synthetic coding sequence
  source 1..462: mol_type = other DNA
atgttcctgagcagcgtgggcttcagcgtggtgatgatgagcatctggccctacctgcagaagatcgatccaaccgcagacacttcattcctcggttgggtgatcgctagctactctttaggacaaatggtggcatccccaatttttgggctctggtcaaactatcgcccccgaaaggaaccgctaattgtctccattcttattagcgttgccgctaactgtttgtacgcctacctgcatattcccgcctctcacaataagtactacatgctagtggcccgaggcctccttggcattggcgcggtgtttcaaacttgctttacgtttttaggggagaagggcgttacgtgggatgtgatcaagctgcaaatcaacatgtacaccaccccagtgctactgtcggcgttcttaggcattctcaatatcatccttatactcgctatcctctccaagtaccgttag

SEQ ID NO: 193845 - DNA, 555 bp, synthetic construct
  misc_feature 1..555: note = Description of Artificial Sequence: Synthetic coding sequence
  source 1..555: mol_type = other DNA
atgttcctgagcagcgtgggcttcagcgtggtgatgatgagcatctggccgtatctgcagaagatagaccccacggctgatacatcattcctcggctgggttatcgctagctacagtctcgggcaaatggtggccagccccatttttggcctctggtcaaattaccgtccaagaaaggagccgctgatcgtctccatcctcatttccgtggccgccaactgcctctatgcttacttgcatatacccgcttctcataataaatactacatgctcgtggcacgcggcttgctggggattggagcaggcaatgtagccgtggtgagatcctatacagcgggcgcaacctccctgcaggagaggacttctagcatggcaaatatatcgatgtgtcaagcactgggattcattctcggacctgagaatatcgtgtggatgacgcaggaggactcggtcaaggtgctcatccttaaaaagcaggtgcagatgaaactgcgcttccctaaggaaattctgacaaggctgttattgtggcccagcatgttctgttttctctag

SEQ ID NO: 193846 - DNA, 750 bp, synthetic construct
  misc_feature 1..750: note = Description of Artificial Sequence: Synthetic coding sequence
  source 1..750: mol_type = other DNA
atgggcgagctgatggccttcctgctgcccctgatcatcgtgctgatggtaaaacacagcgattctcgaactcactcgctgagatacttccggttaggggtgtcagatccaattcacggagtacctgaatttatctcagtaggatatgttgactcacaccctattactacgtatgattccgtaactcgccagaaggagccgagagctccctggatggcagagaatctggcacctgaccactgggaacgttacacacagcttctgcggggctggcagcagatgttcaaggtcgagctgaaacgactccagcgccactacaaccactctggcagtcacacctaccagcggatgattggctgcgaactgctggaggacggatcaactaccggatttttacagtatgcctacgacgggcaggattttcttatcttcaataaagacacattgtcttggctggcggtagataacgtggcccatacgattaagcaggcttgggaagcaaaccagcacgaactgctctaccaaaaaaattggcttgaggaggagtgcattgcatggctcaagaggtttcttgagtatggaaaggatacactccagcggacagaatctgaaaccatccctttggtgatgaaggctgtgagcggatcaatcgtcttagtgattgtgctcgctggcgtgggggtgctagtgtggcgcaggaggccccgggagcaaaacggcgccatatatctgcctacccctgaccgctag

SEQ ID NO: 193847 - DNA, 783 bp, synthetic construct
  misc_feature 1..783: note = Description of Artificial Sequence: Synthetic coding sequence
  source 1..783: mol_type = other DNA
atgcggcccgaggaccggatgttccacatccgggccgtgatcctgcgggcactgagcctggcgttccttttgtccctgcggggcgcgggcgccatcaaggccgaccacgtctcaacctacgctgccttcgttcagacccacaggcctaccggagaattcatgttcgaatttgacgaagatgagatgttctacgtggacctcgacaagaaagaaacagtgtggcaccttgaggagttcggccaggccttttcattcgaggcccagggagggttggcgaacatcgccattctcaataacaatctcaacaccttgatccaaaggtcaaaccacactcaggctactaatgacccccccgaagtaaccgttttccccaaagagcctgtcgaactggggcagccaaatactctgatctgtcatatcgacaaatttttcccacccgtactcaacgtgacttggctgtgtaacggggagctggtcaccgagggggtggcagaaagtctcttcctgccccgaactgattattctttccacaagttccattacctgacctttgttccatcagccgaagatttctatgactgtcgcgtggagcactggggtcttgaccagcctctcctgaaacattgggaagcccaagaacctattcagatgccagagacaacagagacggtgttgtgcgccctcggactggttttgggcctcgttgggatcattgtcgggaccgttttgattatcaagtcccttaggtcaggacacgaccctagggcacaaggtactctctag

SEQ ID NO: 193848 - DNA, 783 bp, synthetic construct
  misc_feature 1..783: note = Description of Artificial Sequence: Synthetic coding sequence
  source 1..783: mol_type = other DNA
atgcggcccgaggaccggatgttccacatccgggccgtgatcctgagggccctgtccctagcattcttactgagtctgaggggagcgggggccatcaaagcagatcacgtgtccacatatgccgctttcgtacagacgcatagacccactggtgaatttatgttcgaatttgatgaggacgaaatgttttatgttgatctggacaagaaagaaacggtgtggcacctggaagaatttggccaggcattctcattcgaagcccagggtggactggctaacattgccatactgaataacaatctgaacaccttgattcagcgcagtaatcacactcaagccacaaacgacccgccagaagtgacagtgtttcctaaggagcccgtggaattgggacagccaaatacacttatctgccatatcgataagtttttcccacccgtgcttaacgtcacttggctgtgcaatggagagctggttactgagggcgtagccgagtcactgtttctcccccgtacagattacagttttcacaagtttcactatctgacctttgttccatccgccgaggacttctatgactgtcgggtagaacactgggggcttgatcagcccttactgaaacactgggaagcccaggaacctatacagatgcccgagaccacggaaactgtcctttgtgccctgggcctcgtgctgggtctcgtcgggatcattgtgggtacagtgctcataatcaaatccctgcggtcagggcacgaccctagagcccagggcacgctttag

SEQ ID NO: 193849 - DNA, 72 bp, synthetic construct
  misc_feature 1..72: note = Description of Artificial Sequence: Synthetic coding sequence
  source 1..72: mol_type = other DNA
atgcggcccgaggaccggatgttccacatccgggccgtgatcctgcgggccttaagccttgccttcctctag

SEQ ID NO: 193850 - DNA, 387 bp, synthetic construct
  misc_feature 1..387: note = Description of Artificial Sequence: Synthetic coding sequence
  source 1..387: mol_type = other DNA
tgaaacaccctgatctgccacatcgacaagttcttcccccccgtgttaaacgttacttggctttgcaacggggaattagtgactgagggagtggccgaaagccttttccttccgcgaacagattactcattccataagttccactatctcacgtttgtccctagcgcggaggacttttacgattgccgcgtggaacactggggcttggaccaaccacttctaaagcattgggaagctcaagaacccatccagatgccagagacaaccgagacagttttgtgtgctcttggtctggttttgggcctcgttgggatcatcgtggggaccgtcctgattatcaaaagcttgaggagcggtcacgaccctagagcgcagggaactctgtag

SEQ ID NO: 193851 - DNA, 630 bp, synthetic construct
  misc_feature 1..630: note = Description of Artificial Sequence: Synthetic coding sequence
  source 1..630: mol_type = other DNA
atgcggcccgaggaccggatgttccacatccgggccgtgatcctgagagcattatcgctggccttcctgttaagtctgaggggagctggagccatcaaggctgatcatgtttcgacatatgctgcttttgtgcagactcatcgacccaccggcgaatttatgttcgagttcgatgaggacgaaatgttctatgtggatctggataaaaaggaaacagtctggcatctggaagagtttgggcaagcattctcctttgaggcccagggcggcctcgccaacattgcaatcttgaataataatctcaacacactgatccagcgaagtaatcatacacaggctaccaatgatccaccggaggtgactgtgttccccaaggagcctgtggagcttggccagccaaatacccttatctgtcatatagacaaattctttcccccagtcctgaatgtcacctggttatgtaacggcgaactcgttaccgaaggtgtggcagagtctctctttttgcccaggacagactactctttccacaagttccattatcttacctttgtcccctccgccgaagacttttatgattgtcgcgtggagcattggggcctggaccagccacttctcaagcattggtag

SEQ ID NO: 193852 - DNA, 783 bp, synthetic construct
  misc_feature 1..783: note = Description of Artificial Sequence: Synthetic coding sequence
  source 1..783: mol_type = other DNA
atgcggcccgaggaccggatgttccacatccgggccgtgatcctgcgcgcactgtccttggcattcttgctgtctctgcggggtgcaggcgcaatcaaagcagatcacgtatccacatacgctgcttttgtgcagacacatcgtcccacaggcgagtttatgtttgaatttgacgaggatgagatgttttacgtagacttagataagaaggagaccgtctggcatctggaagagtttggccaggcctttagctttgaagcccagggaggcctagcaaacattgccattctcaataataacctgaatacactgattcaaaggtccaatcacactcaggcgacgaacgaccctcctgaggtgactgtctttccaaaggaacctgtggaactggggcagcccaataccctcatttgccatatcgataagttctttccccctgtgctaaatgtcacctggttgtgcaacggggaattagttaccgaaggagtggccgagtctctgttcctgccccgcacagactatagcttccataaattccattatttgacctttgtgccatccgcggaggatttctatgactgccgcgtggagcactggggacttgatcagccgctgctgaagcattgggaagcccaggaaccgattcaaatgcccgagacgacagaaaccgtgctatgtgccctcggactggtcttgggactggttgggatcatagtgggcacagtgcttattatcaagtcgctgaggtccggacacgatccaagggcacagggcacgctgtag

SEQ ID NO: 193853 - DNA, 72 bp, synthetic construct
  misc_feature 1..72: note = Description of Artificial Sequence: Synthetic coding sequence
  source 1..72: mol_type = other DNA
atgcggcccgaggaccggatgttccacatccgggccgtgatcctgagagcgctcagtctggcgtttctgtag

SEQ ID NO: 193854 - DNA, 783 bp, synthetic construct
  misc_feature 1..783: note = Description of Artificial Sequence: Synthetic coding sequence
  source 1..783: mol_type = other DNA
atgcggcccgaggaccggatgttccacatccgggccgtgatcctgcgggcactcagcctcgcctttttactcagcctaaggggtgccggagctattaaagctgatcacgtctctacctatgccgccttcgtgcagacccacaggcctactggcgaattcatgttcgagttcgacgaagatgagatgttctacgtggatctcgacaaaaaggaaaccgtgtggcacctcgaggaattcggccaggctttcagctttgaggctcagggtgggcttgcaaacattgccatcctgaacaataatctgaatactctgattcagcggtccaaccatactcaggccactaatgaccctcctgaagttacagtcttccccaaggaaccagtggaattggggcagcctaataccctgatttgccacatagacaaattcttcccgccggtgctcaatgtaacttggctgtgtaatggagaactcgtgacggagggagtcgctgaatctctgttcttgccccgcactgactattcgttccacaagtttcactaccttactttcgtgccctctgctgaggatttttacgattgtagggtggagcactggggcctcgaccagcccctgcttaagcactgggaggcgcaggagcctattcagatgcccgaaacaaccgaaacagtgctgtgtgcgttgggcctcgtcctcggtctggtcgggattatcgtgggtaccgtgctgataattaaaagcttgcggtcagggcatgatccccgcgcccagggcaccctgtag

SEQ ID NO: 193855 - DNA, 387 bp, synthetic construct
  misc_feature 1..387: note = Description of Artificial Sequence: Synthetic coding sequence
  source 1..387: mol_type = other DNA
tgaaacaccctgatctgccacatcgacaagttcttcccccccgtgctcaacgtgacttggttgtgcaatggcgaactggtgacagagggtgtcgccgagtctctcttcctaccgaggactgactattcgttccataagttccattacttgacgttcgtcccgtcggccgaagacttctatgattgccgcgtggagcactggggactggaccagccactgctcaaacactgggaggcccaggaaccgattcaaatgccggagacgactgaaacagtactgtgtgctctcggccttgtgctgggtctggttgggatcattgttggcactgtgttgatcattaagagccttagatcgggccatgacccccgcgcccagggcaccctgtag

SEQ ID NO: 193856 - DNA, 783 bp, synthetic construct
  misc_feature 1..783: note = Description of Artificial Sequence: Synthetic coding sequence
  source 1..783: mol_type = other DNA
atgcggcccgaggaccggatgttccacatccgggccgtgatcctgagggcgctttctttggcttttctactttcacttcggggcgcgggggctatcaaggctgaccatgtatcaacttacgccgccttcgtccaaactcacaggcccacaggtgagttcatgttcgagtttgacgaggacgaaatgttttatgtggacctggataagaaggagactgtgtggcaccttgaggaattcggccaagctttttcgtttgaggctcagggaggacttgccaacatagccattctcaataacaatctaaatacactgattcaacgaagtaaccacacacaagccaccaacgatcctcctgaagtgactgtctttccgaaggaacccgtcgagttaggacagcccaatactctgatatgtcacattgataaattctttccccctgtcctcaatgtcacatggctctgcaatggtgaactcgtgaccgaaggtgtcgccgaaagtctcttcctgcctagaaccgattactcctttcacaagttccactacctaaccttcgtgccatcggccgaagacttttacgactgcagagtggaacattggggcctcgaccagcccctacttaaacactgggaggcccaggagcccatacagatgcccgaaacaactgagactgttctttgtgcgctcggactcgtgctcggcctggttggaatcattgtaggcacagtgctcatcattaagtcgctgaggtccgggcatgacccacgggcacagggtaccctctag

SEQ ID NO: 193857 - DNA, 72 bp, synthetic construct
  misc_feature 1..72: note = Description of Artificial Sequence: Synthetic coding sequence
  source 1..72: mol_type = other DNA
atgcggcccgaggaccggatgttccacatccgggccgtgatcctgcgagctctttctttggctttcctctag

SEQ ID NO: 193858 - DNA, 630 bp, synthetic construct
  misc_feature 1..630: note = Description of Artificial Sequence: Synthetic coding sequence
  source 1..630: mol_type = other DNA
atgcggcccgaggaccggatgttccacatccgggccgtgatcctgagggctcttagtctggcattcctgctcagcctgcgaggagcgggagccattaaggcggaccacgtgagcacatacgctgctttcgtgcagacccatagacccacaggggaattcatgtttgagtttgatgaagacgagatgttttatgtagatctggataagaaagaaaccgtctggcatctggaagaattcgggcaggctttcagtttcgaggcccaagggggcctggccaatattgcaattctcaacaataatctcaacaccttgatacagcggagtaatcacacgcaggcaaccaacgatccaccggaggtgacagtctttccaaaggaaccagttgagctggggcagcctaacaccctgatatgccacatcgataaattcttcccgccagtattgaatgttacgtggttgtgcaatggggaactcgttaccgaaggtgttgccgaatcccttttcttaccgaggacagactacagctttcataaattccactacctcacgttcgtcccttccgccgaggacttttatgactgccgtgtcgaacactggggtctggatcagcccttactcaaacactggtag

SEQ ID NO: 193859 - DNA, 72 bp, synthetic construct
  misc_feature 1..72: note = Description of Artificial Sequence: Synthetic coding sequence
  source 1..72: mol_type = other DNA
atgcggcccgaggaccggatgttccacatccgggccgtgatcctgagagcactgtcactggccttcctgtag

SEQ ID NO: 193860 - DNA, 387 bp, synthetic construct
  misc_feature 1..387: note = Description of Artificial Sequence: Synthetic coding sequence
  source 1..387: mol_type = other DNA
tgaaacaccctgatctgccacatcgacaagttcttcccccccgtgctcaatgtcacttggctgtgcaacggtgagcttgtaactgagggcgtggctgagtcattgtttcttccgagaactgactacagctttcataaatttcattatttaactttcgtcccgagtgcagaagatttttatgattgccgagtcgagcactggggactggatcagccccttctgaaacattgggaagctcaagagccgatccaaatgcccgaaactacagaaactgtgctgtgtgccctaggcctggtgcttggcctggtgggtatcatcgtgggcaccgtgcttattatcaagagtctgcgcagcggacacgatcctcgagcccagggtacgctctag

SEQ ID NO: 193861 - DNA, 783 bp, synthetic construct
  misc_feature 1..783: note = Description of Artificial Sequence: Synthetic coding sequence
  source 1..783: mol_type = other DNA
atgcggcccgaggaccggatgttccacatccgggccgtgatcctgcgtgccctgtccctcgctttcctgctgagcttgaggggagctggcgctatcaaagctgatcatgtcagcacctacgctgcatttgttcagactcacagaccaactggcgaattcatgttcgagttcgatgaggatgagatgttttatgtggaccttgacaagaaggaaacggtgtggcacttggaggagttcggtcaagctttttccttcgaggcacaaggcggacttgccaacattgctatccttaacaacaacttgaacacactcatccagcgttccaatcacacacaagctacaaatgacccccctgaggtgaccgtctttccaaaggagccagttgagctcggtcagccgaatacgcttatctgtcacatcgataagttcttcccacctgtacttaatgtgacctggctgtgtaatggcgagctggttacggagggggtggcagaatccctgttcctgccgaggacagactactcctttcacaagttccactatctgacgttcgtcccgagtgccgaagacttctatgactgccgggtggaacattggggtctagatcaacctctcttgaagcactgggaggcccaggagcctattcagatgcctgagactacagaaacagtgctctgcgcacttggcttggtgctcgggttagttgggatcatagttggcacagtactgatcattaaatctctccggagtggacacgaccctagggctcagggaactctctag

SEQ ID NO: 193862 - DNA, 387 bp, synthetic construct
  misc_feature 1..387: note = Description of Artificial Sequence: Synthetic coding sequence
  source 1..387: mol_type = other DNA
tgaaacaccctgatctgccacatcgacaagttcttcccccccgtgctgaatgtgacatggctgtgcaacggtgagcttgtgaccgaaggcgtagccgaatctctgtttttgcctagaaccgactactcctttcacaaattccattacttgacttttgtcccaagcgctgaagacttctacgattgtagggtggagcattggggactcgaccagcctcttctcaaacactgggaggcacaggaaccaattcagatgccagagactacagaaaccgtgctgtgtgcattgggactcgttctcggattggtcggcatcatcgtaggaacagtcctgatcatcaaaagtctccgctcaggccacgatcccagagcccaggggacgctgtag

SEQ ID NO: 193863 - DNA, 72 bp, synthetic construct
  misc_feature 1..72: note = Description of Artificial Sequence: Synthetic coding sequence
  source 1..72: mol_type = other DNA
atgcggcccgaggaccggatgttccacatccgggccgtgatcctgcgagctctctccctcgcatttctgtag

SEQ ID NO: 193864 - DNA, 630 bp, synthetic construct
  misc_feature 1..630: note = Description of Artificial Sequence: Synthetic coding sequence
  source 1..630: mol_type = other DNA
atgcggcccgaggaccggatgttccacatccgggccgtgatcctgcgggcgctgtctctggctttcctcctctctctgcggggcgcaggcgccatcaaagccgatcacgtgtccacctacgctgcttttgtgcagacgcacagacccacaggcgagttcatgttcgagttcgacgaggacgagatgttttacgtcgatctcgataaaaaagaaaccgtgtggcatttggaggagttcggccaagcattcagctttgaagctcaggggggtctcgcaaacatcgccattctgaataataaccttaacaccttgattcagcggtctaaccatacacaggccactaacgaccctcctgaggttaccgtctttcccaaggagcccgtggagctgggacagcctaacaccctgatatgccacattgataagttctttcctcccgtcctcaatgtgacctggctgtgtaacggggagcttgtgacggaaggggtggctgaatcactttttttgccaagaacagactatagtttccacaaatttcattacctcacttttgtgccctccgcggaggatttctatgactgcagagtggaacactggggacttgatcaacctctgctaaagcattggtag

SEQ ID NO: 193865 - DNA, 639 bp, synthetic construct
  misc_feature 1..639: note = Description of Artificial Sequence: Synthetic coding sequence
  source 1..639: mol_type = other DNA
atgcggcccgaggaccggatgttccacatccgggccgtgatcctgcgtgcactctccctggccttccttctgtcattaagaggcgcaggcgctatcaaagctgatcacgttagcacctacgctgccttcgtgcagacacatcgacccactggagaatttatgtttgaatttgatgaggacgagatgttttacgtggacctggataaaaaggagaccgtgtggcatctggaagagtttggccaagccttctccttcgaggtaaccgtctttccaaaagagccagtggagttagggcagcctaacacactgatttgccacatagataagtttttcccacccgtgcttaatgtcacatggctgtgtaacggcgaattggttactgagggagtggccgaaagtctattcctgccacgcacagattatagctttcataagtttcactatttgaccttcgtgccttccgctgaggatttctatgactgccgcgttgaacattggggattggaccaacccctgttgaaacactgggaggctcaggagccaattcagatgcctgagacaactgaaactgtcctgtgtgccctcggcctggtgttgggattggtcggcataatagtcggaaccgtactgattatatag

SEQ ID NO: 193866 - DNA, 639 bp, synthetic construct
  misc_feature 1..639: note = Description of Artificial Sequence: Synthetic coding sequence
  source 1..639: mol_type = other DNA
atgcggcccgaggaccggatgttccacatccgggccgtgatcctgagggcgctgtcattggccttccttctgtctctgcggggcgctggggccatcaaggcggaccacgtaagcacctacgccgccttcgtacagacacaccggcccaccggagagtttatgtttgagttcgacgaagacgagatgttttacgttgatttggataagaaagaaactgtatggcatctggaagaatttggccaggcattcagtttcgaggtgacagtgtttcccaaggagcctgtagagttgggccagccaaacaccttgatttgtcacattgataagttcttcccacctgtcttgaacgttacgtggctgtgcaacggcgagctggtcactgagggcgtagccgagagcttgtttcttccacgaaccgactactcttttcacaagttccactaccttacatttgttccttccgcagaagacttctacgactgcagggtcgagcattggggattggaccagcccctgctgaaacactgggaggctcaggaacccatccaaatgccagaaaccacggaaaccgtcttgtgtgcgcttgggctcgtgctgggtctcgtaggcattatcgtcggaaccgtactgattatttag

SEQ ID NO: 193867 - DNA, 387 bp, synthetic construct
  misc_feature 1..387: note = Description of Artificial Sequence: Synthetic coding sequence
  source 1..387: mol_type = other DNA
tgaaacaccctgatctgccacatcgacaagttcttcccccccgtgcttaatgtcacttggctgtgtaatggcgagctggtgacggaaggggtcgccgagtctctcttcctaccccggacggattatagctttcacaagtttcactatttgacattcgtgccttcagcagaggacttctacgactgtagagtggaacactggggactggatcagccgctgttgaagcactgggaggcgcaagagcctatccagatgcctgagacaaccgaaactgtcctttgtgccttaggattggtcctcggcctggtgggaatcatcgtcggaaccgtgctgatcatcaagagcctgcgctcaggccatgatcctagagcacaaggaactctatag

SEQ ID NO: 193868 - DNA, 639 bp, synthetic construct
  misc_feature 1..639: note = Description of Artificial Sequence: Synthetic coding sequence
  source 1..639: mol_type = other DNA
atgcggcccgaggaccggatgttccacatccgggccgtgatcctgcgcgcactcagtctggccttccttttgagccttcgcggcgcaggcgccatcaaggctgatcatgtcagcacttacgccgcctttgtccagactcaccggcccactggggagtttatgtttgaattcgatgaggatgagatgttctacgtagacctcgacaaaaaagaaactgtatggcacttagaagagttcgggcaggcattttctttcgaggtcacggtgttccccaaggagcctgtagagctaggtcagccaaataccctgatctgtcacattgataagtttttcccacccgtactgaacgttacttggttgtgcaacggtgagctagtgacggaaggagtggccgaatcactcttcttgccccgtaccgattattcatttcataaatttcactacctcaccttcgtgccctcggccgaagacttttatgactgtcgggtggagcactggggtctcgaccaaccccttctgaagcactgggaggcacaggaaccaatccagatgccagagacgactgagactgttttatgcgcgctcggcctggtgctgggcttagtgggtataatcgtcggaaccgtactaataatctag

SEQ ID NO: 193869 - DNA, 630 bp, synthetic construct
  misc_feature 1..630: note = Description of Artificial Sequence: Synthetic coding sequence
  source 1..630: mol_type = other DNA
atgcggcccgaggaccggatgttccacatccgggccgtgatcctgagagctctcagcctggcctttttacttagcctacgaggagcaggagctatcaaagcagaccacgtgagcacctacgccgcattcgtccaaacccatcgcccaactggggagttcatgttcgagttcgatgaagacgaaatgttctacgtggatctggacaaaaaggaaacagtgtggcatctggaggaatttggccaggccttttccttcgaggcacaagggggcctcgctaatattgcaattctcaataataatctaaatacactgattcaacgcagtaaccatacccaggctactaatgaccctcctgaggtgactgtttttccgaaggagcctgtggaactcggccaacccaataccctgatttgtcacatagacaaattctttccacccgtgttaaatgtgacatggctctgtaatggcgagctcgtgactgagggggtagccgaaagcttgttcctgccgcggacagattattctttccacaagtttcactacctaacattcgttccaagcgcggaagacttttatgactgcagggttgaacactgggggctcgaccagccccttctaaagcactggtag

SEQ ID NO: 193870 - DNA, 72 bp, synthetic construct
  misc_feature 1..72: note = Description of Artificial Sequence: Synthetic coding sequence
  source 1..72: mol_type = other DNA
atgcggcccgaggaccggatgttccacatccgggccgtgatcctgcgcgcactgtctctggctttcctctag

SEQ ID NO: 193871 - DNA, 639 bp, synthetic construct
  misc_feature 1..639: note = Description of Artificial Sequence: Synthetic coding sequence
  source 1..639: mol_type = other DNA
atgcggcccgaggaccggatgttccacatccgggccgtgatcctgcgggcactttcactggccttccttctttctctgcgcggcgccggggctattaaggccgaccacgtctccacttacgctgcgtttgttcaaacgcatcggcctaccggcgaatttatgttcgagttcgacgaggacgagatgttctatgtggaccttgataagaaggagaccgtctggcatttggaggaattcggtcaggcattctcattcgaagtaacggtgtttccgaaggagcctgtcgaattaggacaacccaataccctcatatgtcacattgacaagttttttcctcccgtactcaatgtgacttggctttgtaatggggaactggtcaccgaaggggtggccgaaagcctttttctgccgcgaactgattattcattccataaatttcactatctcacatttgtaccttcagccgaagacttttatgactgcagagtggagcattggggccttgaccagccactactcaagcattgggaagcacaggaaccaatccagatgcctgaaaccaccgaaacagtgctctgtgcattaggcctggtattgggcttggttggaattatcgttgggacagtcctgatcatctag

SEQ ID NO: 193872 - DNA, 630 bp, synthetic construct
  misc_feature 1..630: note = Description of Artificial Sequence: Synthetic coding sequence
  source 1..630: mol_type = other DNA
atgcggcccgaggaccggatgttccacatccgggccgtgatcctgagagcactgagcctggcctttctactcagcctgcgaggcgctggtgcaataaaggcagatcacgtatcgacgtatgctgccttcgtccaaacacatcgcccaacgggggagttcatgtttgagttcgatgaagatgagatgttctatgtggacctcgataagaaggagaccgtgtggcacctggaggaattcggacaggctttctccttcgaggcccaaggcgggttggcaaacattgcaatactaaataacaacctgaacactcttatacagcggagcaatcatacgcaggccacaaacgatcctcctgaggtgactgtctttcccaaggagcctgtcgagctggggcaacctaacactcttatatgccatatcgacaagttctttccacccgtgctcaatgtaacctggttgtgtaatggggaactcgtgaccgaaggcgtggccgaatcccttttcttgcctagaaccgattattctttccacaaatttcactatctgacattcgtgccaagcgccgaggacttttacgactgcagagtcgaacattggggtctggatcagccactgcttaagcattggtag

SEQ ID NO: 193873 - DNA, 387 bp, synthetic construct
  misc_feature 1..387: note = Description of Artificial Sequence: Synthetic coding sequence
  source 1..387: mol_type = other DNA
tgaaacaccctgatctgccacatcgacaagttcttcccccccgtgttaaacgtgacctggctctgcaacggagagctcgtaactgaaggtgttgcagaaagcctctttctgccaagaacggattattctttccataaattccactatctgaccttcgtgcccagcgccgaggacttttatgactgcagagtggagcattggggactggatcagccattgctcaaacactgggaggcacaggagcccattcagatgccagaaacaacggagactgtgctgtgtgccctcggcttggtcttgggcctggttggcataattgttggtacagtgttgattatcaagagcttaagatcaggccatgatccacgcgcccaggggactctgtag

SEQ ID NO: 193874 - DNA, 783 bp, synthetic construct
  misc_feature 1..783: note = Description of Artificial Sequence: Synthetic coding sequence
  source 1..783: mol_type = other DNA
atgcggcccgaggaccggatgttccacatccgggccgtgatcctgcgggctctctctctcgctttcctgctgtctctcaggggcgctggggcgataaaagcagatcatgtttcgacatatgctgccttcgtccagacgcaccggcctacaggagagtttatgtttgaattcgacgaagatgagatgttttacgtggacttagacaaaaaagagaccgtgtggcatctggaggaattcggtcaagctttctccttcgaagcacaaggcggactggccaatatcgctattttgaataataaccttaacaccctgatacagcgatctaaccacacacaggccacgaatgacccccccgaggtcactgtgtttccaaaggaaccagtggagttaggtcagcccaataccctcatttgtcatatagacaagttctttccccccgtgctcaatgtgacctggttgtgtaatggtgaactcgttacagagggtgtggccgagtcgctcttcctgccgcggaccgactattcctttcataagttccattacttgaccttcgtaccctctgccgaagatttttatgactgcagagtagaacattggggtctcgaccagccgctactcaagcactgggaggcccaggagcccatccaaatgccggaaacgacagagactgttctctgtgcactgggcctagtactggggctggtaggaattattgttggaaccgttctcattatcaagtccctccgcagcggacacgaccccagagcgcagggaacgctgtag

SEQ ID NO: 193875 - DNA, 639 bp, synthetic construct
  misc_feature 1..639: note = Description of Artificial Sequence: Synthetic coding sequence
  source 1..639: mol_type = other DNA
atgcggcccgaggaccggatgttccacatccgggccgtgatcctgagagcactgtcacttgcatttctgttgtcccttcgaggggctggggccattaaagcggaccacgtgtccacctatgccgctttcgttcaaacacatcgcccaaccggagaatttatgttcgaatttgatgaagacgagatgttctacgttgacctggataaaaaggagaccgtgtggcacttagaagaattcgggcaggcattctccttcgaagtcaccgtatttccgaaggaaccagttgaactcgggcagcctaacaccctgatatgccatatagacaagttcttcccaccagtgctcaatgtgacctggttgtgtaatggcgagctcgtgacggagggcgtcgccgaaagtcttttcttgcctaggacagactacagtttccataagtttcattatctgacatttgtcccatctgccgaagatttttacgattgtcgagttgaacattggggcctcgaccagccacttctgaaacactgggaagcccaggaaccaattcagatgcctgaaaccactgaaactgtgctgtgcgctctgggactggtattggggttggtgggcataattgtcggtaccgtgttgatcatttag

SEQ ID NO: 193876 - DNA, 72 bp, synthetic construct
  misc_feature 1..72: note = Description of Artificial Sequence: Synthetic coding sequence
  source 1..72: mol_type = other DNA
atgcggcccgaggaccggatgttccacatccgggccgtgatcctgagggccctgagccttgcgttcctgtag

SEQ ID NO: 193877 - DNA, 639 bp, synthetic construct
  misc_feature 1..639: note = Description of Artificial Sequence: Synthetic coding sequence
  source 1..639: mol_type = other DNA
atgcggcccgaggaccggatgttccacatccgggccgtgatcctgagggccctgtccctcgcttttctgctctctctgcgcggggctggcgcaattaaggcagatcacgtcagcacgtatgcagcatttgtgcagacacacagacccaccggagaattcatgtttgagtttgacgaagacgagatgttctatgtcgacctggataagaaagaaactgtgtggcaccttgaggagttcggacaggctttttctttcgaagtgacagtgtttccaaaagaacctgtggagctcggacagcctaataccctgatatgtcacatagacaagttcttccccccggtgctgaatgtgacgtggttatgcaatggtgagctggtgactgaaggggtggctgaatcactgtttctgcctcgtaccgattactcctttcacaaatttcattatctcaccttcgtgcctagcgcagaggatttttacgactgtagagtggagcactgggggttagatcagcccctgctgaaacactgggaagctcaagaacctatccagatgcctgaaacaactgaaacagtcctctgtgccctgggactcgtgctcggcctagtgggaattatcgtaggtactgttctcatcatctag

SEQ ID NO: 193878 - DNA, 72 bp, synthetic construct
  misc_feature 1..72: note = Description of Artificial Sequence: Synthetic coding sequence
  source 1..72: mol_type = other DNA
atgcggcccgaggaccggatgttccacatccgggccgtgatcctgcgggcccttagtctggccttcctgtag

SEQ ID NO: 193879 - DNA, 639 bp, synthetic construct
  misc_feature 1..639: note = Description of Artificial Sequence: Synthetic coding sequence
  source 1..639: mol_type = other DNA
atgcggcccgaggaccggatgttccacatccgggccgtgatcctgcgagccctcagcctggccttcttgctgtccctgcgcggcgccggcgccataaaggccgatcacgtgagcacctacgctgcttttgtccagacgcacaggccgaccggtgagtttatgtttgaattcgatgaagatgagatgttttacgtggacttggacaagaaagaaacagtttggcacctcgaagagtttggccaggccttctcatttgaagtgactgtctttcccaaggaaccagtagaactgggtcaaccaaacaccctgatatgtcatattgacaaattcttcccgcccgtgctgaacgtcacctggttgtgtaacggtgaactggtgaccgaaggcgtcgctgagagccttttcttgcctcgtaccgattacagctttcataaattccactatctgacgttcgtcccctcggctgaagatttctatgattgccgtgtcgaacattggggcttggaccaacctttgctgaagcactgggaggctcaggaaccgattcagatgccagagaccacagagacagttctgtgcgcactgggactggtgctcggcctggtagggattattgtagggacggtgctgatcatctag

SEQ ID NO: 193880 - DNA, 387 bp, synthetic construct
  misc_feature 1..387: note = Description of Artificial Sequence: Synthetic coding sequence
  source 1..387: mol_type = other DNA
tgaaacaccctgatctgccacatcgacaagttcttcccccccgtgctcaacgtaacttggctgtgcaatggggaactcgttacagaaggggtcgccgagagtctgttcctgccgaggacagactattcctttcacaagttccactatctaacttttgttccttccgctgaggacttttatgattgccgcgtcgaacattgggggttggatcagcccctgctgaaacactgggaagctcaagagccaatacagatgcctgagacaacagaaacggtcttgtgtgcccttggactggtgctgggtttggtggggatcattgtcggaaccgtgttgatcattaaatcacttcgttcggggcacgacccccgggcccagggtaccctctag

SEQ ID NO: 193881 - DNA, 630 bp, synthetic construct
  misc_feature 1..630: note = Description of Artificial Sequence: Synthetic coding sequence
  source 1..630: mol_type = other DNA
atgcggcccgaggaccggatgttccacatccgggccgtgatcctgcgtgcactcagcctggcatttctgctgtcactccgcggggctggggccatcaaagccgaccacgtctccacctacgctgccttcgtgcagactcatcggccaaccggtgaatttatgttcgaattcgatgaggacgagatgttctacgtggatttagataagaaagagaccgtttggcacctagaagagtttggccaggccttttctttcgaagcacagggcggactggcgaacatcgcgattctaaataataatttgaataccttgattcagcggtcaaaccatacacaggctactaacgacccacctgaggtgacggtgtttcccaaggagccagtggaattggggcagcccaacaccctgatttgtcacatcgacaagttttttccccccgtgttaaacgtcacctggctctgtaacggcgaattagtgaccgagggagtggcggagagcttgttcctgcctcgtaccgactattccttccataagtttcactacctaacatttgtacctagtgccgaggacttctacgattgcagagtggagcactgggggcttgatcaaccacttctgaaacactggtag

SEQ ID NO: 193882 - DNA, 783 bp, synthetic construct
  misc_feature 1..783: note = Description of Artificial Sequence: Synthetic coding sequence
  source 1..783: mol_type = other DNA
atgcggcccgaggaccggatgttccacatccgggccgtgatcctgcgagctctgagcctggccttcctgctatccctaagaggtgccggggccatcaaggcggaccatgtctcaacatatgctgccttcgtccagacccatagaccaaccggagagtttatgttcgagttcgatgaagatgaaatgttctacgtggaccttgataaaaaggagacagtatggcatctcgaggagttcggacaagccttttcttttgaggctcaaggcggcctggcaaacatcgccatcttgaacaataatctgaacacactgatccaacgctccaatcacacccaggctaccaacgacccacctgaggtcacagtgtttcctaaagagcctgtggagctggggcaacctaataccctcatctgtcatatcgacaagttttttccacctgttcttaacgtcacttggctgtgcaacggagaactggttacagaaggcgttgcagaaagtttgttccttccgcggaccgactacagttttcacaagttccattatttgactttcgtgccatccgctgaggatttttacgactgcagggtggagcactggggtttggaccagcctttactgaagcattgggaagctcaggagccaattcagatgccggagaccacggagaccgtcctttgcgcactcggcttagtgctgggcctcgtcggaatcatcgttggtacagtccttattatcaagagtctaagatcgggtcacgaccccagggcccaggggaccctgtag

SEQ ID NO: 193883 - DNA, 387 bp, synthetic construct
  misc_feature 1..387: note = Description of Artificial Sequence: Synthetic coding sequence
  source 1..387: mol_type = other DNA
tgaaacaccctgatctgccacatcgacaagttcttcccccccgtgctgaatgtaacttggttgtgtaacggcgaactggtgacagagggtgtggccgagtctctgttcttacctcgcaccgactattcctttcataagttccactacttaaccttcgttccatcagctgaagatttctacgattgcagggttgaacactggggactggatcagccactgctgaagcactgggaagcacaggaaccaattcagatgcccgaaactacagagacagtgctttgcgcacttggcctagtgctggggctagtcggtataatagtgggcacagtgctgatcattaaatctctccggagtggccacgatccccgcgcccagggcaccttgtag

SEQ ID NO: 193884 - DNA, 630 bp, synthetic construct
  misc_feature 1..630: note = Description of Artificial Sequence: Synthetic coding sequence
  source 1..630: mol_type = other DNA
atgcggcccgaggaccggatgttccacatccgggccgtgatcctgcgcgccctctctctggcttttctgctgtctctgcgtggcgccggtgccatcaaagccgatcacgtgtctacctatgctgcgtttgtgcagactcatagacccactggcgaattcatgttcgaatttgatgaagacgaaatgttttacgttgatctggacaaaaaggagacagtatggcacctcgaggagttcgggcaagccttctccttcgaggctcagggtggcctggccaatatagcaatcctgaacaacaacctcaacactttaatacaaaggtctaaccatacgcaagccaccaatgacccaccagaggttactgtgtttcccaaagaaccagtggagttagggcagccaaatactctaatttgccacattgataagttcttccctcccgtactgaatgtgacttggctctgcaatggggagctcgtaacagaaggcgtggccgagagtttatttctgccacggacagactacagttttcacaaatttcactatctgacttttgtgccttctgcagaggacttctacgactgccgggttgagcattggggactggatcagccactcctcaagcactggtag

SEQ ID NO: 193885 - DNA, 630 bp, synthetic construct
  misc_feature 1..630: note = Description of Artificial Sequence: Synthetic coding sequence
  source 1..630: mol_type = other DNA
atgcggcccgaggaccggatgttccacatccgggccgtgatcctgcgtgccttgtcgctggcttttctcctgtcactgaggggggcgggagcgataaaggctgaccatgtatccacttacgccgcttttgtccagacccaccgacccacaggagagtttatgtttgagttcgacgaagatgaaatgttctatgtcgatctcgacaagaaagagaccgtatggcacctggaggagttcgggcaggccttttcatttgaagcccaaggggggctggctaatattgccatactgaacaacaacctgaacaccttaattcagcgttctaaccacactcaggctaccaatgacccacctgaggtaacagtgttccctaaagagcccgttgaattgggacagccaaacaccctgatctgtcacattgacaaattcttcccccctgtgctgaatgtaacatggctgtgcaacggggagctggttacagagggggttgccgagagcttgttcctgccacgcaccgattactcttttcacaagtttcattatttgacttttgtgccttccgcggaagatttttacgactgccgggtagagcactggggcctggatcagccgctccttaaacattggtag

SEQ ID NO: 193886 - DNA, 783 bp, synthetic construct
  misc_feature 1..783: note = Description of Artificial Sequence: Synthetic coding sequence
  source 1..783: mol_type = other DNA
atgcggcccgaggaccggatgttccacatccgggccgtgatcctgcgcgccctgtccctggcatttctgttgtcgctgcgtggggctggcgccatcaaggccgatcatgtgtcgacatatgcagcattcgtccagacgcaccggccaacaggtgaattcatgtttgagttcgacgaggatgaaatgttctatgtggatttagataaaaaagagacagtgtggcatctagaggaatttggccaagccttctcattcgaggcccagggcggcctggcaaacattgcaatacttaacaataatctgaatacgctcatacagaggagcaaccacacccaggccacgaatgatccccccgaagtgaccgtgttcccaaaggagcctgttgagctggggcagcctaacactcttatttgtcatatcgacaagttcttcccgcctgtcctgaatgtgacctggctgtgcaacggagagctcgtgaccgaaggcgtcgccgagtctctgttcctaccaagaaccgactactccttccacaagttccactatctgacctttgttccttccgctgaagatttctacgactgccgggtcgagcattggggactagaccagcctcttctgaagcattgggaagctcaagagcccattcaaatgcccgaaactacagagacagtgctgtgtgccctcggcctggttctgggccttgtgggaatcatcgtgggaacagtgctcattataaagtcacttaggagcgggcacgatccccgggcacagggaaccttgtag

SEQ ID NO: 193887 - DNA, 639 bp, synthetic construct
  misc_feature 1..639: note = Description of Artificial Sequence: Synthetic coding sequence
  source 1..639: mol_type = other DNA
atgcggcccgaggaccggatgttccacatccgggccgtgatcctgcgcgccctgtccctagcatttcttctttccctgcgcggggctggggcgattaaggctgaccacgtgtcgacgtacgcagcattcgtgcagactcaccgacccactggcgagttcatgttcgaattcgacgaggatgagatgttttatgtcgatctggacaaaaaggagaccgtatggcatctggaagaattcggacaggctttcagtttcgaggtcacggtctttcccaaagagcctgtggaactgggacaacctaatacgcttatctgtcatatcgacaaattttttccacccgttctgaatgtgacatggttatgtaatggagaactggtaaccgagggagtagccgaatctttattccttccaaggacagattacagctttcacaagttccactatctaaccttcgtgccaagcgccgaagacttctacgattgccgggtggagcactggggcctggatcagccactgcttaagcactgggaagcccaagaaccaatccagatgccggaaacgacagaaacagtactgtgcgccctcggcctggtgctgggactggtgggcatcattgtcggcacagtcctgattatatag

SEQ ID NO: 193888 - DNA, 783 bp, synthetic construct
  misc_feature 1..783: note = Description of Artificial Sequence: Synthetic coding sequence
  source 1..783: mol_type = other DNA
atgcggcccgaggaccggatgttccacatccgggccgtgatcctgcgtgccttatccctggcatttcttctcagccttagaggtgcaggcgccatcaaggccgaccacgtgtctacctatgcggccttcgtgcagactcatcggcccacaggtgagttcatgtttgagtttgacgaagatgaaatgttttacgtggacctggataagaaagaaacagtttggcatttggaagagtttggacaggcattcagcttcgaggcgcaggggggcctcgccaatattgctattttgaacaataacctcaacaccctgatacagaggtctaatcatacccaggccaccaatgatccccctgaggtgacagtgttcccgaaggaacctgtggagctcgggcagccaaatacactaatttgtcacatcgacaagttttttccccccgtgctgaatgtgacgtggctgtgtaacggcgaactggtaaccgaaggcgtggccgaatctctctttctgcccaggactgattactcttttcataaattccactacttgacctttgtaccatctgccgaagacttctatgattgccgggttgagcactggggattagatcagcctctcttaaagcattgggaggcccaagagcccattcagatgcctgaaacaacagaaacagtcctgtgtgccctaggactggtgctgggattagtaggcattattgtgggaactgtactcataattaaaagtctgcgaagcgggcacgaccctagagcccagggtactttatag

SEQ ID NO: 193889 - DNA, 783 bp, synthetic construct
  misc_feature 1..783: note = Description of Artificial Sequence: Synthetic coding sequence
  source 1..783: mol_type = other DNA
atgcggcccgaggaccggatgttccacatccgggccgtgatcctgagggcgctctctctagcctttcttctctcgttgcgcggagcaggggccattaaagccgatcacgtgtctacctacgcggccttcgtgcaaactcacagaccgactggcgagtttatgtttgagttcgacgaagacgagatgttttatgttgatcttgataaaaaagaaacagtttggcatcttgaagaatttggccaagcattcagctttgaagctcagggagggctagccaatattgccattctgaacaataatctgaatacccttatccagaggtctaaccatacacaagcgactaatgatccaccggaggtgaccgtgtttcctaaagaacccgttgaacttgggcagcccaatacattgatctgccacatcgataaatttttcccgccagtgttgaacgtgacatggctgtgtaacggcgagctggtgaccgagggcgtggcagagagtttgtttttgcccagaactgattattccttccacaaattccattatctgacttttgtgcccagtgctgaagacttttacgattgtcgggtggagcattgggggctggaccagcctttgttaaagcattgggaggcacaggagccaatccaaatgcctgagactaccgagaccgtcctctgtgcactggggttggtcctgggactcgtgggaatcatagtgggcactgtcttaattatcaagtctcttcgctccggacacgatccccgggcacagggcacactgtag

SEQ ID NO: 193890 - DNA, 783 bp, synthetic construct
  misc_feature 1..783: note = Description of Artificial Sequence: Synthetic coding sequence
  source 1..783: mol_type = other DNA
atgcggcccgaggaccggatgttccacatccgggccgtgatcctgagggctctctccctggcattcctgctgtcccttcggggagccggcgcgatcaaggccgaccatgttagcacatatgcagcctttgtgcaaactcatcggcctactggcgagttcatgtttgaattcgacgaggacgaaatgttttacgtcgatttggacaagaaagagactgtctggcatcttgaggagtttgggcaggccttcagtttcgaagcccagggcggcctcgccaatattgccatactcaacaacaatctaaacaccctgatccaaaggagcaaccacacacaggccactaatgacccacctgaagttactgtgtttccaaaggagcctgtggaactgggccagccaaatacactgatatgccacatcgataaattctttccgcccgtcttgaatgtcacttggctttgtaacggggaactggtgactgagggcgttgccgagtcactcttcctacctcggaccgactacagctttcataagttccattacctgacgtttgtgccgtctgccgaggacttttacgattgtagggtggagcattggggactcgaccagccactcctgaagcattgggaggcacaggagccaatacaaatgcccgagacgaccgaaaccgtattgtgcgctcttggcctggtgctgggacttgtcggtattattgtaggaacagtgctgattattaagtccctacgctcaggccacgaccccagggcccaaggaactctgtag

SEQ ID NO: 193891 - DNA, 783 bp, synthetic construct
  misc_feature 1..783: note = Description of Artificial Sequence: Synthetic coding sequence
  source 1..783: mol_type = other DNA
atgcggcccgaggaccggatgttccacatccgggccgtgatcctgagagccttatccttggccttcttgctgagcctacgcggtgccggggctatcaaagctgatcatgtatctacgtatgctgcctttgttcagacacatcggcctaccggtgaattcatgtttgaatttgatgaagatgaaatgttctacgtggatttagataaaaaggaaactgtgtggcaccttgaagaatttggacaggcctttagcttcgaggctcaggggggcttagcaaacatcgcaatcctgaataacaacctaaacactttaatacagaggagcaaccacacccaagctactaatgacccccctgaagtgacagtcttcccaaaggagccagtggagctcgggcaacctaatacattgatctgccacatcgataagttttttcccccagtgctgaatgtgacatggctttgcaacggtgagcttgtgaccgagggagtggccgagtccctttttctaccccgcactgattactcattccataagtttcattatttaaccttcgtaccttctgccgaagacttttacgactgtcgggtggaacactgggggctggatcaaccgttgttgaagcactgggaggcgcaggagccaatacaaatgcctgagacgaccgaaacagtcctttgcgcccttggcctcgtacttggtctcgtgggtattattgtggggacggtactgatcattaagtctctccggagcgggcacgatccacgggctcagggcactctctag

SEQ ID NO: 193892 - DNA, 783 bp, synthetic construct
  misc_feature 1..783: note = Description of Artificial Sequence: Synthetic coding sequence
  source 1..783: mol_type = other DNA
atgcggcccgaggaccggatgttccacatccgggccgtgatcctgcgcgcactatcattggctttcttgctgtctctgagaggggccggagccatcaaagcggatcacgtgtccacttatgcggcctttgtgcagacacatcggccaaccggggaattcatgttcgaattcgatgaggacgagatgttctacgtagatctggacaagaaagaaacagtgtggcatctggaggaatttggtcaggcattcagctttgaggcacaaggtgggctcgcgaatattgccatacttaacaataatttgaacactcttatacagaggtctaaccacactcaggcgacaaatgaccccccagaggtcacggtttttccaaaagaaccagtggagctgggtcagccgaatacattgatatgccacatcgataaatttttccctcctgtgctgaatgtgacatggctctgcaacggcgagttggtgactgagggagtggctgaaagcctctttctcccacgaaccgactacagcttccacaaattccactatctgacgttcgttccttccgcagaggacttctacgattgtagagtcgagcactggggactggatcaaccactgctgaaacattgggaagctcaggagcctatccagatgccagaaaccaccgaaactgtgctgtgcgccctggggttagtgctgggtctcgttggtatcatcgtaggcaccgtgctcattataaaatccctgcgtagcggccacgaccctcgggcccaggggaccctctag

SEQ ID NO: 193893 - DNA, 783 bp, synthetic construct
  misc_feature 1..783: note = Description of Artificial Sequence: Synthetic coding sequence
  source 1..783: mol_type = other DNA
atgcggcccgaggaccggatgttccacatccgggccgtgatcctgcgggcactatcacttgcgtttctactgagcctccggggagctggggccattaaagccgaccatgtcagcacatacgcggctttcgtgcagacccacaggccaactggggagttcatgttcgaatttgatgaggacgaaatgttctatgtggatttggacaaaaaggaaactgtatggcatctcgaggagtttggacaggcattctcattcgaggcccaggggggtctggccaacatcgccattcttaataataatttaaacactctaattcagaggagtaaccacacacaggctactaatgacccccccgaggtaacagttttccctaaagaacctgtggaacttggacagcccaacaccttgatctgccacatagataagttttttcctccagtcctgaacgtcacatggctgtgtaacggggagctggtcaccgagggagtggctgagtcattgttcctgccgaggaccgattactctttccacaagttccattacttgacatttgttcctagcgcggaagacttttatgattgtagagtcgagcactggggactggatcagccccttctcaaacactgggaggcccaggaacccatccagatgcctgagaccactgagaccgttctgtgtgccctagggttggtactgggccttgtggggataatcgtcggcaccgttctgatcatcaaatccttgcgcagcggtcatgaccctagagctcagggaactctgtag

SEQ ID NO: 193894 - DNA, 777 bp, synthetic construct
  misc_feature 1..777: note = Description of Artificial Sequence: Synthetic coding sequence
  source 1..777: mol_type = other DNA
atgatggtgctgcaggtgagcgccgccccccggaccgtggccctgaccgcattattaatggtgctgctgacttcagtcgtgcagggcagagcaaccccggagaactatgtgtaccagctgaggcaagagtgctatgccttcaatggcacccagagattccttgaacggtatatctataatcgcgaggaatttgtccgcttcgattctgatgtaggggaattcagggcagtcaccgaactcgggcgacccgacgaagattattggaactcccagaaggatctgctggaggagaagcgcgccgtaccagatcgggtatgccgtcacaattatgaactagatgaggccgtgactctgcagcgtagggtccagccaaaagtgaacgtctctccatccaagaaaggaccgctgcaacatcacaatctgttggtctgtcacgtgactgatttttatcccgggtccattcaggtgagatggttcctgaatggccaggaagaaaccgcgggcgtggtcagcaccaacctgatccgaaacggggattggactttccagatcctggttatgctggagatgacaccccagcagggcgacgtctatatctgtcaagtggagcatacttctctcgacagccctgtgacagtagagtggaaagcccaaagtgactctgcaagatccaagacgctgactggcgccggcggctttgtgctgggcctgatcatatgcggggtggggatattcatgcacaggcggagcaagaaagtgcagcgggggtccgcctag

SEQ ID NO: 193895 - DNA, 687 bp, synthetic construct
  misc_feature 1..687: note = Description of Artificial Sequence: Synthetic coding sequence
  source 1..687: mol_type = other DNA
atgatggtgctgcaggtgagcgccgccccccggaccgtggccctgacggcactgctgatggttctcctgacttcagtagtccaagggagggccactcccgaaaattatctgttccagggcaggcaggaatgctacgcatttaatggcacccaacgctttctggagagatacatctataacagagaggagttggtgaggttcgactctgacgtaggagagttcagagcagtgaccgagctcggtcgaccggaggccgaatattggaacagccagaaggacatcctcgaggaagaacgtgccgtccctgatcgaatgtgtaggcacaattacgaattgggcggcccaatgactctgcagcggcgaggtagtatccaggttaggtggttcctgaatggtcaagaagagaccgctggagtagtatccaccaatctgatcaggaacggggattggacgtttcagattctcgtgatgctggaaatgacaccgcagcaaggtgacgtctatacatgtcaggtagagcacacatcactggattcccccgtaaccgtggagtggaaagctcagagtgattccgctagatcaaagacgcttactggagcgggtggattcgtcctgggtctcatcatctgtggcgtcggcatctttatgcatcgccggagtaaaaaggtccagagagggagtgcctag

SEQ ID NO: 193896 - DNA, 777 bp, synthetic construct
  misc_feature 1..777: note = Description of Artificial Sequence: Synthetic coding sequence
  source 1..777: mol_type = other DNA
atgatggtgctgcaggtgagcgccgccccccggaccgtggccctgaccgctctcttgatggtcctgttgacatccgtggtccaaggcagagcaacaccagagaattacctttttcaagggcgccaggagtgttacgcctttaatggcacccaaagatttttagagagatacatctacaatcgtgaggagctggttagatttgactcagacgtgggtgagtttagggcggtgacggagcttggaaggcctgaagccgaatattggaacagtcagaaggatatcctggaagaggagcgggcagttcctgacagaatgtgccgccacaactacgagctgggtggccctatgacactacagcggagggtgcaaccccgggtgaacgtctctcctagcaagaagggtccactccagcatcacaacctgctggtgtgtcacgtcactgacttttaccctggctctatccaggtcaggtggtttttgaacggacaggaagagacagcgggcgtggtgtcaactaatttaatcaggaatggcgactggacgtttcagatcctcgtcatgttggagatgactcctcaacagggagatgtctacacttgccaggttgagcatacctctctggattccccggtgacggtggagtggaaggctcagagtgactccgctcggagtaaaacgttaaccggagcaggtggttttgttcttggtctcatcatttgtggtgtgggtatttttatgcaccgtcggtccaagaaagtgcagcgaggctcggcctag

SEQ ID NO: 193897 - DNA, 690 bp, synthetic construct
  misc_feature 1..690: note = Description of Artificial Sequence: Synthetic coding sequence
  source 1..690: mol_type = other DNA
aagcaggcctggcggggcagcgccacccggctgggcccccagaactccggtaggcaggagtgttacgcatttaatgggacccagaggttcctcgaacgctatatctataaccgggaagaactcgttcgctttgatagcgatgtcggggagtttcgggcggttaccgagctggggagaccggaggccgagtattggaatagccaaaaggatatccttgaggaggagcgagcagtgcctgacagaatgtgccgacacaactacgaattaggtggaccaatgaccctgcaacggcgcgttcagccccgggtcaacgttagcccttccaagaaaggaccacttcagcatcacaacttactggtttgtcatgtgaccgatttttacccgggttccatccaggtccgttggttccttaacgggcaggaagaaaccgccggggtggtaagcaccaatttaatccgaaatggcgattggacctttcaaatcctagtgatgctcgaaatgacacctcaacagggggatgtttatacttgtcaggtggagcatacctccctggatagcccagtcacagtggaatggaaggcgcagagcgattccgcaagaagtaaaaccctgacaggtgcaggtgggtttgtgctggggttaatcatctgtggggttggcatctttatgcaccgccgctccaaaaagtag

SEQ ID NO: 193898 - DNA, 687 bp, synthetic construct
  misc_feature 1..687: note = Description of Artificial Sequence: Synthetic coding sequence
  source 1..687: mol_type = other DNA
atgatggtgctgcaggtgagcgccgccccccggaccgtggccctgacggcattgctaatggtgctccttacgtcggttgtgcagggccgggccacaccagaaaattacctgtttcagggcaggcaggaatgttacgcgtttaacgggacccaaagattcttagaaagatacatctataaccgggaggaatttgcaagatttgactcggatgtgggagaatttagggcggtcacagaactcggacggcccgcggctgagtactggaactcccaaaaggatatccttgaggaaaagcgggcagtgcccgatcgaatgtgtagacacaactacgagctgggcggccccatgacactgcagagaaggggaagtattcaggttcgctggttcctgaacgggcaagaggagacagccggcgttgtctccacaaatctgatcagaaacggagattggaccttccagattcttgtaatgctggagatgaccccgcaacagggcgacgtatacacctgccaggtggaacataccagcttggattcacctgtaactgtggagtggaaggctcagagtgacagcgctcggtcaaagactttgactggcgccggcggcttcgtgctgggcctcatcatctgcggggtgggcattttcatgcacagacgtagcaagaaagtacagcgcggaagtgcatag

SEQ ID NO: 193899 - DNA, 687 bp, synthetic construct
  misc_feature 1..687: note = Description of Artificial Sequence: Synthetic coding sequence
  source 1..687: mol_type = other DNA
atgatggtgctgcaggtgagcgccgccccccggaccgtggccctgaccgccctcctcatggtgctactgactagtgtcgttcaggggagggccactcctgagaactatttattccagggccgtcaagagtgctatgccttcaacggtacacaaagatttcttgagagatatatctacaatcgagaagagttcgtgaggtttgactcagacgttggggagtttcgagcagtcactgagttagggcggccagacgaagagtattggaactctcagaaggatatattggaggagaaacgcgccgtccccgatcgaatgtgtcgccacaactacgagctgggtggtcctatgaccttacaacgcagagggtctattcaggttcggtggtttcttaatggccaagaagaaacggccggcgtggtctctaccaacttaattcggaacggagattggaccttccagatcctggtgatgcttgaaatgacgccccagcagggggacgtttacacttgtcaggttgagcatacgagtatggattctcccgtgacggtcgaatggaaagcacagagcgatagcgctcgcagcaaaacacttacgggggcaggaggtttcgttcttgggctaataatatgcggagttgggattttcatgcacaggcgctccaaaaaggttcaacgcggctccgcgtag

SEQ ID NO: 193900 - DNA, 708 bp, synthetic construct
  misc_feature 1..708: note = Description of Artificial Sequence: Synthetic coding sequence
  source 1..708: mol_type = other DNA
tgaaactacctgttccagggccggcaggagtgctacgccttcaacggtacacagcgattcctggaacggtacatctacaaccgagaagagtttgttcgatttgattcggacgtcggagagtttagagcagtgaccgagctaggccggccagacgaggaatattggaactctcagaaagatatcctcgaggagaaaagggctgtgcccgatagaatgtgccgccacaactatgaactgggaggacctatgaccctgcagcggcgggtgcaacctagggtgaatgtctctccatctaaaaaaggcccgctgcaacatcacaacctcctcgtctgtcatgtgactgacttttaccctggctctatacaggtgcgatggttcttgaacgggcaagaggagaccgccggcgtcgtgtcaaccaacctaatccgtaatggcgattggacattccagatcctggtgatgctggagatgacaccccagcagggggatgtgtacacttgccaggttgagcatacctccatggacagcccagtgacggtcgaatggaaggcacagagtgattccgcacgttccaagactctgaccggagctgggggctttgtcctgggactaataatctgtggggttggaatttttatgcatcgccggagcaagaagggagaaaaagcctgccgcttcaacgaggacctgcataagcaggggtcgtag

SEQ ID NO: 193901 - DNA, 777 bp, synthetic construct
  misc_feature 1..777: note = Description of Artificial Sequence: Synthetic coding sequence
  source 1..777: mol_type = other DNA
atgatggtgctgcaggtgagcgccgccccccggaccgtggccctgacagctctgctgatggttcttctcaccagtgtcgtacagggacgagccacccccgagaactacctctttcaagggagacaagagtgctacgccttcaatggcacacaacggttcctggagcgatacatctataatcgggaggagttcgtgagattcgactccgatgtaggtgaatttcgggcagttactgaactcgggagacccgacgaggagtattggaactcccagaaggacatcctggaggagaagcgcgcggtcccagacaggatgtgtagacataactacgaacttggcggccctatgactctccagagacgcgtgcagccccgagttaacgtgtccccttcaaagaagggccctctgcagcaccacaatctactcgtgtgtcacgtgactgacttttatcccggctctatccaggtgaggtggtttctaaatggacaagaggagaccgcaggagttgtgtctacaaatctgataaggaacggggactggacgtttcaaatcctggttatgctcgagatgacacctcagcagggcgatgtttacacttgtcaggtggaacatactagcatggactcccccgttactgtagaatggaaggcccagtctgattccgcacgctctaaaacccttaccggggcagggggttttgtgctgggcctcatcatatgcggggtcggcatttttatgcacagacgatctaagaaggtgcagagaggaagtgcctag

SEQ ID NO: 193902 - DNA, 687 bp, synthetic construct
  misc_feature 1..687: note = Description of Artificial Sequence: Synthetic coding sequence
  source 1..687: mol_type = other DNA
atgatggtgctgcaggtgagcgccgccccccggaccgtggccctgactgccctcctgatggttctcctgacctctgtggtgcaaggaagagcaacccctgagaactacttatttcaaggacgacaagagtgctatgcctttaacggcacacagcggttcttggagcgctatatttataaccgggaggaattcgctcgcttcgattccgacgttggagagttccgagctgtgaccgagctgggccggccagccgctgaatactggaatagccagaaagacatcttggaagagaaaagagctgtgccggaccgaatgtgtaggcacaactatgaactgggggggcctatgactttacagcgcagaggctccatccaggtgcgctggtttttgaacggccaagaagagaccgcaggggtggtgtccacaaacctcatccggaatggggactggacctttcagatactagtcatgctggagatgaccccacagcagggcgatgtatacacatgccaggtcgagcatacctccctcgacagccccgtgaccgttgaatggaaggcccagagtgatagtgccaggagcaaaaccctcaccggggcagggggttttgtgctcggacttatcatatgcggagtgggtatctttatgcaccgccggagtaaaaaagttcaaaggggctccgcctag

SEQ ID NO: 193903 - DNA, 690 bp, synthetic construct
  misc_feature 1..690: note = Description of Artificial Sequence: Synthetic coding sequence
  source 1..690: mol_type = other DNA
aagcaggcctggcggggcagcgccacccggctgggcccccagaactctggcaggcaggagtgttacgcatttaacggaactcagcgctttctggagagatatatatacaatcgtgaagaatttgtccggtttgatagcgacgtaggcgaattccgagcagtaaccgagttgggaagacccgatgaagagtattggaacagccaaaaagatatattggaagaagagagggccgtgccggatcgtatgtgcagacacaactacgagctcggaggccctatgactttgcaacgtcgggtgcagccccgggtgaacgttagcccctctaaaaaggggcctctgcaacaccataacctgctggtgtgtcatgttacggatttttacccaggcagcattcaggtgcggtggttcctcaacggtcaagaagaaaccgccggagtggtgagtacaaatctgattagaaatggggactggacattccagatactcgttatgctcgagatgactccccaacagggtgacgtgtacacctgtcaggtggagcacacttcactggattctcctgtgactgtagagtggaaggcccaatctgattccgccaggtctaaaaccctgacaggggccggaggctttgtgctagggcttatcatttgcggcgtgggaatatttatgcatcgacggagtaaaaaatag

SEQ ID NO: 193904 - DNA, 777 bp, synthetic construct
  misc_feature 1..777: note = Description of Artificial Sequence: Synthetic coding sequence
  source 1..777: mol_type = other DNA
atgatggtgctgcaggtgagcgccgccccccggaccgtggccctgaccgccctgctgatggtactgctcacgtccgttgtgcagggtcgggccacaccagaaaactatttgttccagggaagacaggagtgttatgcttttaacggaactcagagattcctggagagatacatctacaatcgcgaggaatttgtacgcttcgactctgatgtcggagagttccgagctgtgaccgagttagggcgacccgacgaggaatactggaattcccagaaggatatcttggaggaagagagagccgtccctgacagaatgtgccgccacaattatgagctgggcggtcccatgaccctccagcggagagttcagccccgtgtaaacgtgtcaccgagtaaaaagggcccgctgcagcatcataacctcttggtgtgccacgtcaccgacttctatccgggatctatccaggtgcgatggtttctcaatggtcaggaggagacagctggcgtagtgagcacaaacctcatccgtaacggtgactggactttccagatccttgttatgcttgagatgactccccagcagggtgacgtatacacttgccaagtggaacacacgtccctcgacagtccagtgaccgttgagtggaaggcgcagtcagattccgcccgatctaaaaccctgacaggggccggcggcttcgttctcggccttattatctgtggcgtcgggatatttatgcacaggcggagtaaaaaagtgcagaggggcagcgcctag

SEQ ID NO: 193905 - DNA, 708 bp, synthetic construct
  misc_feature 1..708: note = Description of Artificial Sequence: Synthetic coding sequence
  source 1..708: mol_type = other DNA
tgaaactacctgttccagggccggcaggagtgctacgccttcaacggcacccagagattcttggaacggtacatctataacagggaggagtttgcgaggttcgatagcgatgttggcgaatttcgggccgtgaccgagctcggaagacccgcagctgaatattggaatagtcaaaaagacattttggaagaaaaacgagctgtcccagatagaatgtgtcggcataattacgagttggggggccccatgacattgcagcggcgagttcaaccccgcgtaaatgtaagcccaagcaaaaagggccctctgcagcaccataatcttttggtgtgtcacgtcaccgacttctatcccggctcaattcaggttcggtggtttcttaacggtcaggaagagacggcaggggtcgtgagtacaaacctgataagaaatggagattggacatttcagatactggttatgttggagatgactccccaacagggcgacgtgtatacgtgtcaggtggaacacacctcgcttgactcacctgtgacagtcgagtggaaagcacagagcgattccgccagaagtaagaccttgactggagccgggggctttgtcttagggctgataatctgtggagttggcatttttatgcacaggcggagtaaaaagggagaaaaagcctgcaggttcaatgaagacctgcataaacaggggtcttag

SEQ ID NO: 193906 - DNA, 690 bp, synthetic construct
  misc_feature 1..690: note = Description of Artificial Sequence: Synthetic coding sequence
  source 1..690: mol_type = other DNA
aagcaggcctggcggggcagcgccacccggctgggcccccagaactcagggcgccaggagtgttatgcctttaatggaactcagcggttccttgagaggtacatttataacagggaggagtttgcccgcttcgattcagacgttggcgagtttcgcgccgtgactgaactaggacggcccgctgcggagtactggaattcccaaaaagacatcctcgaggaaaagcgggccgtgccggatcgaatgtgccggcacaactatgagctgggtggacctatgaccctccagaggagagtacagcctcgtgtgaacgtgagcccgagcaagaagggcccactgcagcatcacaaccttctggtgtgtcacgttacagatttctaccctgggtcaatacaggtgcggtggttcctgaacggccaggaagagactgcaggggtcgtttcaactaacttaataagaaacggcgattggaccttccagatactggtaatgctcgaaatgacgccccagcagggggacgtgtatacctgtcaggttgagcataccagcttggattctcctgtcacagtggaatggaaggctcaatctgattcagctagatccaagactctgacaggcgcaggcggctttgtcctggggttgatcatttgcggcgtgggtatttttatgcaccggagaagtaaaaagtag

SEQ ID NO: 193907 - DNA, 777 bp, synthetic construct
  misc_feature 1..777: note = Description of Artificial Sequence: Synthetic coding sequence
  source 1..777: mol_type = other DNA
atgatggtgctgcaggtgagcgccgccccccggaccgtggccctgaccgcgttgcttatggtcctcctgacttccgtcgttcagggtagggctaccccagagaactatttgttccaaggaaggcaggaatgttatgcttttaatggtacacaaagatttcttgagaggtacatctacaatagggaggagtttgcccggtttgacagcgatgtgggggaatttagggccgtcacagaactgggccgtcccgcagctgaatactggaactcacagaaagacatcctcgaggagaagcgggcagtgcccgataggatgtgccggcataactatgagctgggtggtccaatgaccctacagagacgtgtgcaacccagggttaatgtgagccctagcaaaaaagggcccctgcagcaccataacctgctcgtgtgtcacgtgaccgatttctaccctggtagcattcaagtcagatggttcctcaacggccaggaagagacagcaggggtggttagcaccaaccttatacggaatggcgattggacgtttcagatccttgttatgcttgaaatgacacctcagcagggcgacgtgtacacctgccaggtcgaacacactagcctggactccccagtcactgtcgaatggaaggctcagtcggactcagctcggtctaaaacactgaccggcgcaggaggcttcgtcttgggactgattatctgtggcgtgggaattttcatgcatagaagaagtaagaaagtccaacgggggagcgcatag

SEQ ID NO: 193908 - DNA, 249 bp, synthetic construct
  misc_feature 1..249: note = Description of Artificial Sequence: Synthetic coding sequence
  source 1..249: mol_type = other DNA
atgaccccccagcagggcgacgtgtacacctgccaggtggagcacacgtctctggattcaccagtgacggtggaatggaaggcgcagagcgacagtgcacgctccaagacgttgactggagccggaggacgggccggcgcccaccatctgtggtcgggccatctgcacgcgcaggaagaacaggagagttcaacccggatctgcatcaacagggtccccgaattgaccgagaagaccattgtgccctag

SEQ ID NO: 193909 - DNA, 777 bp, synthetic construct
  misc_feature 1..777: note = Description of Artificial Sequence: Synthetic coding sequence
  source 1..777: mol_type = other DNA
atgatggtgctgcaggtgagcgccgccccccggaccgtggccctgacggctctccttatggtgctgttgacttccgtcgttcagggcagggccactccagaaaactatttgtttcagggccgtcaagaatgttatgctttcaatgggactcagagattcctcgagaggtacatctacaatcgcgaagaattcgtgaggtttgattccgacgtcggagaattccgggcagtgacagagctaggccgacctgacgaggaatactggaactcccaaaaagatatcctggaggaaaaaagggccgtcccggatcgcatgtgcagacataattacgagctcggcggacccatgaccttacaacgccgtgttcagcccagagtcaacgtctccccatcaaagaaggggccactccaacatcataatctactcgtgtgccacgtcacggatttttaccctggcagcatccaggtcaggtggttcttaaacggccaagaagaaacggcaggcgtagtgagcactaacctgattagaaatggagactggacattccagatcttggttatgctcgagatgacccctcagcagggcgatgtttacacctgccaggttgagcatacaagtatggatagccccgtgacagtggagtggaaagcgcagtctgatagtgcacggagcaaaacactgaccggcgccggaggattcgtgctaggcttgattatatgcggcgtgggcattttcatgcatcggcgctccaaaaaagtccagagaggcagtgcctag

SEQ ID NO: 193910 - DNA, 690 bp, synthetic construct
  misc_feature 1..690: note = Description of Artificial Sequence: Synthetic coding sequence
  source 1..690: mol_type = other DNA
aagcaggcctggcggggcagcgccacccggctgggcccccagaactcaggtagacaggagtgttatgcgttcaatggcacccaacggtttctggaaaggtacatctacaatcgggaagagttcgcaagatttgattctgatgttggggagttccgcgccgtgaccgaacttggacggcccgcggcagaatattggaactcccaaaaggatatcctggaggaaaaaagggcagtgccagacagaatgtgccggcacaactatgagctcggagggcctatgacgctgcagcgtcgagtccagccacgggtgaacgtgagcccaagtaagaaggggccactgcagcatcacaacctcctcgtgtgtcatgttaccgatttctaccctggcagcattcaggtccgctggttcctgaatggacaggaagagaccgccggcgtcgtgagcacaaacttaattaggaacggcgactggactttccagattctagtaatgctggagatgacccctcagcagggagatgtctatacatgccaagtggagcacacctcccttgactctcccgttaccgtggagtggaaagctcagtccgattcagcccgcagtaagaccctgaccggagccggaggcttcgtgctgggtctcattatctgcggagtgggtatattcatgcatcgtaggagcaagaagtag

SEQ ID NO: 193911 - DNA, 708 bp, synthetic construct
  misc_feature 1..708: note = Description of Artificial Sequence: Synthetic coding sequence
  source 1..708: mol_type = other DNA
tgaaactacctgttccagggccggcaggagtgctacgccttcaacggcacacaacgctttctcgagcgctatatttataatcgcgaagagttggttcgctttgactccgatgtgggagagttccgtgccgttacagaactggggcgccctgaagcggaatattggaatagccaaaaagatatcttggaggaggagagggcagtgcccgatcggatgtgccggcataattacgagcttggtggccctatgacactccagaggcgggtccagccaagagtgaacgtaagcccttctaagaaggggccactgcaacatcataacctgcttgtctgccatgtgactgatttctacccaggatcaatacaagtgcgatggttcctgaacgggcaagaggagaccgcaggggtcgtgtcaacaaacctcatccgtaatggagactggacctttcagattctggtgatgctcgagatgacgcctcagcagggcgacgtgtacacctgtcaggtcgagcataccagcctggacagtccggttactgtggagtggaaggctcagtccgacagcgcccgcagcaagacactaacaggcgccggcggattcgtgctgggcctgataatctgtggcgtgggcatattcatgcaccgaaggtctaagaagggcgagaaagcttgtcgctttaatgaggatctgcacaaacagggctcttag

SEQ ID NO: 193912 - DNA, 777 bp, synthetic construct
  misc_feature 1..777: note = Description of Artificial Sequence: Synthetic coding sequence
  source 1..777: mol_type = other DNA
atgatggtgctgcaggtgagcgccgccccccggaccgtggccctgaccgcactgctgatggtcctgctcacttcagtggtccaaggtcgggccaccccggagaactatctctttcagggaaggcaagaatgctacgccttcaacggtacacaacggttccttgaacgctacatctacaatcgggaggaatttgcccgcttcgactccgatgtgggggaattcagagctgtgaccgagctgggaagacctgccgccgagtactggaacagccaaaaagacatcctggaggaaaaacgcgctgtccctgatagaatgtgcaggcacaattacgagttgggcggaccaatgacgctgcagaggcgggttcagcccagagtcaatgtgagcccgtcaaaaaaagggccactgcagcaccacaatctgctggtgtgccatgttaccgatttctaccccggcagcatacaggttaggtggttcctcaatggacaggaggaaacggccggggtggtgtcgactaacctgatcagaaacggggattggaccttccaaatcctggtaatgctggagatgacgccccagcagggagacgtgtatacatgccaagtggagcatacaagcttggacagccccgtcacagttgagtggaaggcccagagtgattccgccaggtctaagactctcacaggagccggaggcttcgtgctgggcctaattatttgtggggtcggaattttcatgcatcgtcggagcaaaaaggtgcaacgagggtcggcatag

SEQ ID NO: 193913 - DNA, 708 bp, synthetic construct
  misc_feature 1..708: note = Description of Artificial Sequence: Synthetic coding sequence
  source 1..708: mol_type = other DNA
tgaaactacgtgtaccagctgcggcaggagtgctacgccttcaacggcacacagcgcttcttagagaggtacatttataaccgggaggagtttgtccgctttgacagcgacgtcggtgagttcagagcagtgacagagctcggccgtcctgacgaggactactggaacagtcaaaaagatctgctggaagagaagcgggcagtgcccgatagagtgtgtaggcacaactacgagctagacgaggctgtgaccctgcagagacgtgtgcagccaaaggtgaatgttagtccaagtaaaaaaggacctctgcaacatcataacctgttagtgtgtcatgtcacagatttctatcctggcagcatccaggtgaggtggtttctgaacggccaggaggaaaccgccggcgtcgtaagcacgaatctcatcagaaatggagattggacatttcaaattctggtgatgctggagatgacaccacagcagggtgacgtctacatctgccaagtggaacatacctccctagacagccctgtgactgtcgagtggaaagctcagagcgattcggctcgcagcaaaaccctgaccggtgccggtggctttgtgctgggtctgatcatctgcggcgtgggcatattcatgcatcgccgctccaaaaaaggggaaaaagcatgcaagttcaacgaggacttacacaaacagggatcttag

SEQ ID NO: 193914 - DNA, 690 bp, synthetic construct
  misc_feature 1..690: note = Description of Artificial Sequence: Synthetic coding sequence
  source 1..690: mol_type = other DNA
aagcaggcctggcggggcagcgccacccggctgggcccccagaactcagggcggcaggagtgctacgcattcaacggcacgcagcgctttttagagcgctatatttacaacagggaagagttcgtccgcttcgatagcgatgttggagagttccgggccgtgacagaactgggacgtcctgatgaggagtattggaacagccaaaaagacatcctggaggaaaagagggctgtccccgatcggatgtgtcggcacaactacgaactcggcggcccgatgactcttcaacgccgtgtccagccaagagtgaatgtgtccccatcaaaaaaaggtcctctgcagcaccacaacctgctggtctgtcacgtgaccgacttctaccctgggtctatacaggttagatggtttctcaacgggcaggaggagactgccggcgtcgtatccacgaatttgatcagaaatggggactggacgtttcagattcttgtaatgctcgagatgacccctcaacaaggagacgtgtatacctgccaggtggagcatactagtatggatagtcctgtgaccgttgagtggaaagcccaatcagactctgcacgctccaagactttaaccggcgctggtgggttcgtgctgggcttaatcatttgtggcgtcggaatatttatgcacaggcggtcaaagaagtag

SEQ ID NO: 193915 - DNA, 687 bp, synthetic construct
  misc_feature 1..687: note = Description of Artificial Sequence: Synthetic coding sequence
  source 1..687: mol_type = other DNA
atgatggtgctgcaggtgagcgccgccccccggaccgtggccctgacggcgctcctgatggttctactgacatctgtcgtgcagggtcgtgccacccccgagaattacgtgtaccagctgcggcaggagtgctacgctttcaatggcacccagaggtttctggaacggtacatttacaatcgggaagaattcgtgagatttgatagcgatgttggcgagttcagagctgttactgagctcgggcggcccgacgaggattactggaactcccagaaggacttgctcgaagagaaacgggccgttccagatcgagtgtgccgccataattacgaactagacgaggcagtgacgcttcaaagacggggttctatccaggtgagatggtttctcaacggccaggaggaaactgctggagttgtgagcaccaatttgatccgaaatggggattggacgtttcagattctggtgatgttggagatgactccacaacagggggatgtgtacatctgccaggtcgagcatacatccctggattcacccgtgacggttgagtggaaagcccagtctgactctgctagatcaaagaccctgacgggagcaggcggattcgtgctcggactgatcatctgcggggtcggaatctttatgcaccgcagaagtaagaaagtgcagcgcggctctgcctag

SEQ ID NO: 193916 - DNA, 687 bp, synthetic construct
  misc_feature 1..687: note = Description of Artificial Sequence: Synthetic coding sequence
  source 1..687: mol_type = other DNA
atgatggtgctgcaggtgagcgccgccccccggaccgtggccctgacagcattgctgatggtgctcctgacctctgttgttcagggaagagcaacacctgagaattacttgttccaggggagacaggagtgttacgccttcaacgggacccagcgattcctggagaggtacatctataaccgggaagagtttgtccgatttgacagcgatgtgggcgaattccgggctgttactgaattgggccgaccggacgaggagtactggaatagtcagaaagatatcctggaggagaagcgagcagttcccgatcgcatgtgtcgccacaattacgagcttggcgggcccatgaccctccaacggcggggaagtattcaggtcagatggtttctgaacggtcaagaggagaccgccggtgtagtctctacaaatctgatcaggaacggtgactggacatttcagattctagtgatgctggagatgaccccccagcagggagacgtgtacacatgccaggtggaacataccagtatggattcccccgtgacagtcgagtggaaggcacaatctgattccgcccgctcaaagactctgacaggggcagggggctttgtgctgggcctgattatctgcggagtgggcatctttatgcacagacgctcaaaaaaggtgcagagagggagcgcctag

SEQ ID NO: 193917 - DNA, 687 bp, synthetic construct
  misc_feature 1..687: note = Description of Artificial Sequence: Synthetic coding sequence
  source 1..687: mol_type = other DNA
atgatggtgctgcaggtgagcgccgccccccggaccgtggccctgacagcattgctgatggtcctcttgactagcgtcgtgcagggacgggcaacccccgaaaattacctgtttcagggcaggcaggaatgttacgccttcaacggtacacagaggttcctggaacgctacatttacaaccgcgaggaatttgccagattcgattccgacgtcggtgagttccgagccgttactgaactgggccggcccgccgcagagtattggaactcccagaaggacatactggaggaaaagcgggctgtgccggatcggatgtgccgccacaattacgaactcggcggccccatgaccctccagagaagaggctccatccaagtgcgctggttcctaaacgggcaagaagaaacagccggtgtggtttcaacgaacttaattcgaaacggagactggacatttcaaattctcgtgatgctggagatgactcctcagcagggagacgtgtacacttgtcaggtggaacacaccagcctcgattcgccagttacagtggagtggaaagcccaatccgacagtgcccgctccaaaaccctcacaggcgccggcggctttgttctgggcctcatcatctgtggcgtgggcatatttatgcaccgaagaagtaagaaggttcagcggggaagtgcttag

SEQ ID NO: 193918 - DNA, 690 bp, synthetic construct
  misc_feature 1..690: note = Description of Artificial Sequence: Synthetic coding sequence
  source 1..690: mol_type = other DNA
aagcaggcctggcggggcagcgccacccggctgggcccccagaacagtggcagacaagaatgttacgccttcaacggaactcagcgattcttagagcgttatatttataatcgagaggaattcgtgcgattcgatagcgatgtcggcgagttcagggccgtgacggagctggggaggccagacgaggaatattggaactctcagaaagacatcctcgaggagaagcgggctgtgcctgatagaatgtgccggcacaattacgagcttggcggccctatgaccctgcaacggcgcgtgcagccccgtgttaatgtcagcccaagcaaaaaaggaccacttcagcatcacaatttactggtatgtcacgtgactgacttttatcctggcagtatccaggtccgatggtttctaaacgggcaggaggagacagctggagtcgtgagtactaacctgatacgcaatggggattggaccttccagatcctagtgatgctggagatgactccacaacaaggcgacgtctatacctgtcaagtggagcacacgagcatggacagcccagtgactgttgagtggaaagcccagtctgacagtgctcggtccaaaactctgacaggcgccggaggttttgtgctcggcttgattatttgcggcgtgggtatctttatgcaccggcgatccaaaaaatag

SEQ ID NO: 193919 - DNA, 708 bp, synthetic construct
  misc_feature 1..708: note = Description of Artificial Sequence: Synthetic coding sequence
  source 1..708: mol_type = other DNA
tgaaactacctgttccagggccggcaggagtgctacgccttcaacggaacccagcgatttctcgagcgttacatatataacagagaggaatttgtgaggtttgacagcgatgtgggcgagtttagggccgtgactgagttaggtcgcccagacgaggagtattggaatagccagaaggatattctcgaagaggagcgcgccgtgcctgatcgtatgtgccgacataattatgagctgggcggtccaatgaccctacaacggagggtgcagcctcgagttaacgttagcccaagtaagaagggacccctccagcaccacaatctgttggtgtgtcatgttacggacttttatcctggctctattcaggtaagatggttcttaaacggacaggaagaaacagccggagttgtgtccacaaatttaatccgtaacggggattggacatttcagatcctagttatgctggaaatgaccccccagcagggcgacgtgtatacatgccaggtcgagcacacttctctcgattctccagtcacggtcgaatggaaagcccaaagtgacagtgcgcggagcaagaccctcaccggagctggaggatttgtcctcgggttgatcatttgcggcgtaggaattttcatgcaccgcaggtccaagaaaggagaaaaggcctgccggttcaacgaagacctgcacaagcaggggtcttag

SEQ ID NO: 193920 - DNA, 708 bp, synthetic construct
  misc_feature 1..708: note = Description of Artificial Sequence: Synthetic coding sequence
  source 1..708: mol_type = other DNA
tgaaactacctgttccagggccggcaggagtgctacgccttcaacggaacacagcgcttcctggagaggtacatctacaatagagaggaatttgcacgtttcgatagcgatgtgggagagttccgcgctgtgactgaactcgggagacctgcagcagagtattggaatagtcaaaaggatatactggaggagaaaagagctgtacccgaccggatgtgtaggcacaactacgagctgggcggacctatgacgctccagaggcgggtgcagccccgggtaaatgtgtctccgagcaagaaaggccctctgcaacatcataatctcctagtgtgtcacgtgaccgacttctatccgggatccatccaggtacggtggttcctaaacggtcaggaggagacggccggagttgtgagtacaaatctgatcagaaacggggattggacgttccagatcctcgtcatgctggagatgactccccagcagggcgacgtgtacacttgccaggtggagcacacctccctagacagtcccgtgaccgtggagtggaaagcccagtctgactcagcaaggtccaagaccttgactggggcaggtgggtttgttctcggcctgatcatttgtggggttgggatcttcatgcacaggcgctctaagaagggggaaaaggcctgcaggtttaatgaagatcttcataaacaaggtagttag

SEQ ID NO: 193921 - DNA, 687 bp, synthetic construct
  misc_feature 1..687: note = Description of Artificial Sequence: Synthetic coding sequence
  source 1..687: mol_type = other DNA
atgatggtgctgcaggtgagcgccgccccccggaccgtggccctgactgctctgcttatggtgctgttaacttcggttgttcaaggcagagctactcccgagaactacttattccaggggaggcaggagtgctatgccttcaacggcactcaacggttcctcgagcgttacatttacaatagggaagagttcgttagatttgattcagacgtcggggagttccgcgccgttacagagcttggccggcccgatgaggagtactggaacagtcaaaaagacattctcgaggaagaaagagcggtgccagaccgtatgtgtaggcataactacgaactagggggccccatgacgctccagcgcaggggctccattcaggtgcggtggtttttaaatggacaggaggagacagccggtgtcgtgtctactaatctaattcggaacggcgactggacgttccaaatcctggtaatgctagagatgaccccacagcagggggacgtatacacatgtcaggtggagcatacgtcccttgactcacctgtgacggttgagtggaaggcccagtcagactctgccagaagtaagacccttactggcgccgggggttttgttctcgggctgatcatctgtggagtcggtattttcatgcatcgacgttctaaaaaagtgcagcggggctccgcctag

SEQ ID NO: 193922 - DNA, 690 bp, synthetic construct
  misc_feature 1..690: note = Description of Artificial Sequence: Synthetic coding sequence
  source 1..690: mol_type = other DNA
aagcaggcctggcggggcagcgccacccggctgggcccccagaactctctgcgacaggagtgttacgctttcaatgggacacagcgcttcctggaaaggtatatctacaaccgagaggaatttgtccgcttcgactccgacgtaggcgagttcagagctgtgaccgagctgggcaggccagatgaagactactggaacagccagaaggacctgttagaagaaaagagggcagtgccggatcgggtatgcaggcataactacgagctggatgaagccgtaacactccagaggagagttcaaccaaaggtgaacgtttctccatccaagaagggcccattacagcaccacaacttgcttgtgtgccatgtcactgacttctacccaggatctattcaggtgagatggtttctcaacggacaggaggaaaccgctggcgtcgtctcaacaaatttgatccgtaacggggactggacgtttcagatcttagtgatgttggagatgacaccccagcagggggatgtatacatttgccaggtggagcacacctcactggactctcccgtcaccgtagaatggaaagcacaaagcgactccgcccggagcaaaactctgactggagcaggcggctttgtgctgggtctcatcatttgtggggtcgggatatttatgcatcggcgaagtaaaaagtag

SEQ ID NO: 193923 - DNA, 777 bp, synthetic construct
  misc_feature 1..777: note = Description of Artificial Sequence: Synthetic coding sequence
  source 1..777: mol_type = other DNA
atgatggtgctgcaggtgagcgccgccccccggaccgtggccctgacagcccttctgatggttctgctgaccagcgtcgttcaaggtcgtgctacccctgagaactatctctttcagggccgacaggaatgctacgccttcaatgggacacaaaggtttctcgaacgctatatttacaatcgcgaggagttcgcacgttttgactccgatgtgggcgaattcagggcggtgacggagttggggaggccggctgccgagtactggaactcacagaaagacattctggaggaaaaacgggcagtgcccgatcgcatgtgccgccataactacgagcttgggggccctatgactctgcagaggcgcgtgcagcctagggtcaacgtttcaccatctaagaaggggcccctacagcaccacaatcttctggtatgccacgtaactgatttttatcctggtagcattcaagtaagatggtttctgaacggacaggaggagaccgctggtgtcgtaagtacaaacctcattcgcaacggggactggaccttccagatcctcgtgatgctcgagatgacgcctcaacagggagatgtttacacttgtcaggttgaacatacctccttggattcccccgtaactgtggagtggaaggcgcaatctgattccgctaggagtaagaccctgacaggggccggtggcttcgtactgggtctgattatttgtggcgtcggcatttttatgcacaggcgctcaaagaaggtccaacgcgggtcagcgtag

SEQ ID NO: 193924 - DNA, 708 bp, synthetic construct
  misc_feature 1..708: note = Description of Artificial Sequence: Synthetic coding sequence
  source 1..708: mol_type = other DNA
tgaaactacctgttccagggccggcaggagtgctacgccttcaacggtacacaacggttcttggaacgatacatctataatcgggaagagtttgtacgcttcgattccgacgtgggggagttcagagctgtaacagagctcgggcgcccagatgaggagtattggaacagccagaaagacatcttagaagagaagagagcagttcctgatcgaatgtgccgccacaattatgaactgggtggccccatgactttgcagaggcgcgtccagcctagggtcaatgtgagtcccagtaaaaaggggccgctgcaacatcacaatctgcttgtttgccatgttacagatttttaccccggaagcattcaagtccgatggttcctgaatggacaggaggagacagctggggtcgtgagtaccaatcttattagaaatggagattggaccttccagattcttgtgatgcttgagatgacgccccagcagggtgatgtgtatacttgtcaggtggagcatacatctatggattcacccgtgaccgtggagtggaaggcccagtcagattctgctcgttccaaaaccctgacgggcgccggcgggttcgtgcttggccttattatatgcggggtcgggatctttatgcacagacggtctaagaaaggggagaaggcatgcaggtttaatgaagacctccacaagcagggaagttag

SEQ ID NO: 193925 - DNA, 690 bp, synthetic construct
  misc_feature 1..690: note = Description of Artificial Sequence: Synthetic coding sequence
  source 1..690: mol_type = other DNA
aagcaggcctggcggggcagcgccacccggctgggcccccagaactcaggccggcaggagtgttacgcctttaatgggacacaaagattcctggaaaggtacatctacaaccgtgaggagttcgccaggtttgactccgatgtgggtgagttccgggctgtgactgaactgggtagaccagcagccgaatattggaatagccagaaggacatccttgaggagaaacgggccgttcccgacagaatgtgtaggcacaactatgagctgggcgggccgatgacgcttcaaagacgcgtacagcctagagtaaatgtttcaccatctaaaaaagggccactccaacaccataatctgctggtttgccacgtgactgacttttacccagggtccatacaagtgcgctggttcttgaacgggcaggaagagacagccggcgtggtctcaaccaatctcattcggaatggagattggactttccaaatcctggtcatgttggagatgacaccacagcagggtgacgtgtacacctgtcaggtggaacatacatccttagactcacctgtcacagtcgagtggaaggcccagtccgattctgccagatctaaaactctgacaggcgccgggggatttgtgttaggtctgattatttgcggagtcggcatcttcatgcatcgacggagcaaaaagtag

SEQ ID NO: 193926 - DNA, 708 bp, synthetic construct
  misc_feature 1..708: note = Description of Artificial Sequence: Synthetic coding sequence
  source 1..708: mol_type = other DNA
tgaaactacctgttccagggccggcaggagtgctacgccttcaacgggacgcaaaggttcctggagcgctacatatataatagggaggaattcgcaaggttcgacagcgatgtcggggaattcagagcggttactgaactgggtagacccgccgccgagtattggaactctcagaaagatatattagaggagaaacgtgccgttcccgatcgcatgtgtagacataattatgagctagggggccctatgaccctgcagaggcgcgttcaaccccgtgtcaacgtgagcccgtccaagaaaggacccctccaacatcacaacctgttggtgtgtcatgtgactgatttctaccccggaagcatccaagtgcgatggttcctcaacggccaggaggaaactgctggggtggtgagtacaaaccttattaggaatggcgattggacctttcagattctcgtgatgttagaaatgaccccccagcaaggggacgtgtatacctgtcaggtggaacataccagtctcgactcccccgtaacagtcgaatggaaggcacaaagtgatagcgccagaagcaagaccctaacaggagcaggggggttcgtgctgggtctgataatttgcggtgtcggaatctttatgcatcggcggtcaaagaagggcgaaaaagcgtgcagattcaacgaagacttacacaagcaaggtagctag

SEQ ID NO: 193927 - DNA, 372 bp, synthetic construct
  misc_feature 1..372: note = Description of Artificial Sequence: Synthetic coding sequence
  source 1..372: mol_type = other DNA
atgatggtgctgcaggtgagcgccgccccccggaccgtggccctgactgcacttcttatggttctcctgacatcggttgtgcagggccgcgctacgccagagaactatctgtttcagggcagacaagagtgctacgcgttcaacggtactcagcgtttcctggagagatacatctacaatagggaagagttcgccaggttcgacagcgatgttggagagttccgggcggtgaccgagctcggccgccccgcggccgaatattggaattctcagaaggatatcctggaggaaaagagagccgtgcccgatcggatgtgtcgacacaattacgaactgggaggccccatgaccctgcagaggcggggggagtag

SEQ ID NO: 193928 - DNA, 249 bp, synthetic construct
  misc_feature 1..249: note = Description of Artificial Sequence: Synthetic coding sequence
  source 1..249: mol_type = other DNA
atgaccccccagcagggcgacgtgtacacctgccaggtggagcacacatccctggatagcccagtgaccgtcgaatggaaagcccaatcggactccgctcggagtaaaactcttaccggggccggcggaagagccggtgctcatcatctctggtcaggccatcttcacgctcaagaagagcaggagagctccactcgaatttgcataaacagggttcccgagctgacagaaaagacaatagtgccctag

SEQ ID NO: 193929 - DNA, 249 bp, synthetic construct
  misc_feature 1..249: note = Description of Artificial Sequence: Synthetic coding sequence
  source 1..249: mol_type = other DNA
atgaccccccagcagggcgacgtgtacacctgccaggtggagcacaccagtctggattccccggtgacggtcgagtggaaggcccagtctgactctgccaggagtaagaccctcaccggcgccggcggacgcgcaggtgcccatcacttgtggtctggacatcttcatgcacaagaggaacaggagtcgtccacgaggatttgtattaaccgggtgcccgagctgaccgaaaagaccatagttccttag

SEQ ID NO: 193930 - DNA, 372 bp, synthetic construct
  misc_feature 1..372: note = Description of Artificial Sequence: Synthetic coding sequence
  source 1..372: mol_type = other DNA
atgatggtgctgcaggtgagcgccgccccccggaccgtggccctgacggccctgctgatggtgctcttaacatctgtagtccaaggaagggctacgccggaaaattacctgttccagggacgccaggaatgttatgcgttcaatggtacccagcgctttctggaacgctatatatataaccgcgaggaactggtgcgctttgatagcgatgtgggagagtttagagccgtgaccgaactggggaggccagaagccgagtactggaattctcagaaagatattctcgaggaagagcgggcggtgccagataggatgtgtcggcataactacgagcttggcggtccgatgacattacagcggcggggagagtag

SEQ ID NO: 193931 - DNA, 372 bp, synthetic construct
  misc_feature 1..372: note = Description of Artificial Sequence: Synthetic coding sequence
  source 1..372: mol_type = other DNA
atgatggtgctgcaggtgagcgccgccccccggaccgtggccctgaccgcgctcctgatggtgctactgacatctgtcgtccagggacgcgcgacccctgagaactacttgtttcagggaaggcaggagtgttatgcattcaatggcacacaacggtttctggagagatacatttacaaccgagaggaattcgtacggtttgactccgacgtgggagagtttagggccgtcaccgaactgggacgtccggatgaggaatactggaactctcagaaagacatccttgaggaaaaacgcgccgtgccggataggatgtgtcgccataactacgagctcggcggccccatgactctgcaacgacgcggagagtag

SEQ ID NO: 193932 - DNA, 372 bp, synthetic construct
  misc_feature 1..372: note = Description of Artificial Sequence: Synthetic coding sequence
  source 1..372: mol_type = other DNA
atgatggtgctgcaggtgagcgccgccccccggaccgtggccctgacagccctattaatggtgctgctcacctctgtggttcaggggcgtgctacgccagagaattatctattccagggtagacaagagtgttatgctttcaacggtacccaacggttcctggaacgctatatttataatagggaggaattcgttagattcgatagcgacgttggcgagtttagggccgttaccgaactaggcagacccgatgaggaatactggaactctcagaaggatattctggaggaggaaagggccgttccagaccgaatgtgccgccataattatgagttgggaggcccaatgaccctgcagcggcgtggggagtag

SEQ ID NO: 193933 - DNA, 750 bp, synthetic construct
  misc_feature 1..750: note = Description of Artificial Sequence: Synthetic coding sequence
  source 1..750: mol_type = other DNA
atggtgctgctgaccagcgtggtgcagggccgggccacccccgagaattatgtgtaccagcttaggcaagaatgctatgccttcaacggcacacagcgctttctcgagaggtacatctacaaccgggaagagtttgtccggttcgattcagacgtaggtgagtttcgagctgtcacagagctcggcagacccgatgaggactattggaactcccagaaagatcttcttgaggagaagagggccgtgcccgatcgggtatgtcgtcataattatgagcttgatgaggctgtgacactgcagcggcgtgtgcagcccaaggttaacgtgagcccatcgaagaaaggccctctgcagcatcacaatctgctggtgtgccacgtcaccgatttttaccccggcagtattcaggtgcgctggtttctgaatgggcaggaagagaccgcaggggttgtgagtaccaaccttatcagaaacggagactggacgttccaaattctggtcatgttggagatgacaccccaacagggtgatgtgtatatctgccaggtagaacacacaagcctcgatagtccggtgacagtggaatggaaggctcagtctgactctgcccgtagtaaaacactgaccggtgctggcggattcgtgctcggcttgatcatatgtggggttggcatatttatgcataggagatctaagaagggggaaaaagcatgtaaatttaacgaggacctccacaagcaggggtcttag

SEQ ID NO: 193934 - DNA, 249 bp, synthetic construct
  misc_feature 1..249: note = Description of Artificial Sequence: Synthetic coding sequence
  source 1..249: mol_type = other DNA
atgaccccccagcagggcgacgtgtacacctgccaggtggagcacactagtttggacagtcccgtcacggttgaatggaaggcccagtcagactctgctaggtcaaagacccttactggtgccggcggaagggcaggagctcatcatctctggtctggacacctacacgcacaagaagagcaggaatccagtactaggatctgtatcaacagggtacccgagcttaccgaaaaaacaatcgtaccttag

SEQ ID NO: 193935 - DNA, 372 bp, synthetic construct
  misc_feature 1..372: note = Description of Artificial Sequence: Synthetic coding sequence
  source 1..372: mol_type = other DNA
atgatggtgctgcaggtgagcgccgccccccggaccgtggccctgaccgcccttctcatggtcctcctgaccagtgtagtccagggtcgggccactcctgaaaactatctgtttcaaggcaggcaggagtgctacgctttcaacggaacccagaggtttttagaaaggtatatttataacagggaagagtttgctcgcttcgattccgacgtaggcgaatttagggccgtgacagaactggggcggcccgccgcagagtattggaactcccagaaagacatcctggaggagaagcgggccgttccggaccggatgtgtcggcataactacgagttaggagggccgatgacactccaaagacgcggcgagtag

SEQ ID NO: 193936 - DNA, 372 bp, synthetic construct
  misc_feature 1..372: note = Description of Artificial Sequence: Synthetic coding sequence
  source 1..372: mol_type = other DNA
atgatggtgctgcaggtgagcgccgccccccggaccgtggccctgactgcgctgcttatggtgctgttgacctccgttgtccaggggcgcgccacaccagagaattatctcttccagggtaggcaagagtgttatgcatttaacggcacccagcggttcctggaaaggtatatctataatcgggaggaatttgcgcggttcgatagcgatgtgggggagtttcgagccgtgaccgagctcggaaggcccgcagccgaatattggaacagtcagaaagacatcctcgaggagaagcgagctgtgccagacagaatgtgtcgccataactacgagttgggaggtcctatgacattgcagcgtaggggagaatag

SEQ ID NO: 193937 - DNA, 198 bp, synthetic construct
  misc_feature 1..198: note = Description of Artificial Sequence: Synthetic coding sequence
  source 1..198: mol_type = other DNA
atggacagccccgtgaccgtggagtggaaggcccagagcgacagcgcgaggtccaaaaccctgaccggagcaggtggaagggccggtgctcaccatctctggtcaggccatctgcatgcccaggaggagcaagagagttccacaagaatctgtatcaacagagtcccggaactcacggaaaagaccatcgtcccctag

SEQ ID NO: 193938 - DNA, 381 bp, synthetic construct
  misc_feature 1..381: note = Description of Artificial Sequence: Synthetic coding sequence
  source 1..381: mol_type = other DNA
atgatggtgctgcaggtgagcgccgccccccggaccgtggccctgaccgcactgttgatggtgctgttaaccagtgtagttcaggggagagcaacaccagaaaactatgtgtatcaactgcgccaggaatgctatgcttttaacggcacgcagagattcctagaacgctatatttataacagagaggagttcgtgcgcttcgactccgacgtgggcgaatttcgtgctgtcacggagctaggaaggcctgacgaggattattggaactcacagaaagacctgctggaagagaagcgagccgtccctgaccgggtctgtcgccacaattacgagctggacgaggcggtcaccctccagaggcgcgagcgtggcaaaaagtag

SEQ ID NO: 193939 - DNA, 249 bp, synthetic construct
  misc_feature 1..249: note = Description of Artificial Sequence: Synthetic coding sequence
  source 1..249: mol_type = other DNA
atgaccccccagcagggcgacgtgtacatctgccaggtggagcacacatcactcgatagtcccgtgacagtcgaatggaaggctcaatcagactccgctaggtctaagaccctcaccggcgcaggcgggagagctggcgcccaccacttgtggagcggccatcttcatgcccaagaggagcaggagagctctacacggatctgcattaaccgagtgcccgatctgacggagaaaaccaacgtgccttag

SEQ ID NO: 193940 - DNA, 249 bp, synthetic construct
  misc_feature 1..249: note = Description of Artificial Sequence: Synthetic coding sequence
  source 1..249: mol_type = other DNA
atgaccccccagcagggcgacgtgtacacctgccaggtggagcacactagcttggactctcctgtgaccgttgaatggaaggctcagagcgactccgcaaggtccaagactctcacgggcgcaggcggtcgggctggcgcacatcacctttggtcgggccaccttcacgctcaagaagaacaggaatcctccacaagaatttgcatcaacagagtgcctgagctgactgaaaaaacgatagtaccgtag

SEQ ID NO: 193941 - DNA, 372 bp, synthetic construct
  misc_feature 1..372: note = Description of Artificial Sequence: Synthetic coding sequence
  source 1..372: mol_type = other DNA
atgatggtgctgcaggtgagcgccgccccccggaccgtggccctgaccgcgctgctaatggttctgctgacatctgtggtacagggccgcgccacacctgagaactacttatttcagggacggcaggaatgttatgcctttaacggaactcaaaggttcctcgagaggtacatatataaccgcgaggaatttgtcaggtttgattccgatgtaggtgaattcagggcagtgaccgagcttgggagaccagatgaggagtactggaacagtcaaaaagacattttggaggagaagagggccgtgccagaccgcatgtgccggcataactacgagctgggaggacctatgacactgcagagaaggggcgaatag

SEQ ID NO: 193942 - DNA, 198 bp, synthetic construct
  misc_feature 1..198: note = Description of Artificial Sequence: Synthetic coding sequence
  source 1..198: mol_type = other DNA
atggacagccccgtgaccgtggagtggaaggcccagagcgacagcgccaggtccaagacactcacaggcgccggcggccgagcaggcgcacatcacttgtggagcggacacctgcacgcccaggaggaacaggagtcctccacccgaatctgtatcaatcgggtgcctgagttaacagaaaaaacaattgtcccctag

SEQ ID NO: 193943 - DNA, 768 bp, synthetic construct
  misc_feature 1..768: note = Description of Artificial Sequence: Synthetic coding sequence
  source 1..768: mol_type = other DNA
atgatcctgaacaaggccctgctgctgggcgccctggccctgaccaccgtgatgagcccgtgcggaggtgaagacattgtggcagaccacgttgcctcatgtggcgtaaacctttatcagttttatgggccctccgggcagtacacgcacgagtttgacggtgatgagcagttttacgtggaccttgaacgcaaagaaaccgcatggagatggcccgagttctctaaatttggtggatttgaccctcagggcgctttgagaaacatggctgtggctaagcataacctgaatattatgataaaacggtacaactctactgctgctaccaacgaggtgccggaagtcacagtgtttagcaagtcacccgtgacattgggccaacctaacacccttatctgcctggttgataacatttttcctcctgtagtcaacataacctggcttagtaatggacagagcgtgaccgagggtgtttcggaaacctcctttttatctaaaagcgaccattccttttttaaaatctcatatcttaccttcttgcctagtgcagatgaaatttacgattgtaaggtcgagcattggggacttgaccagcccctgctgaaacattgggaacctgagattcccgcccctatgagcgaactaacagagaccgtggtgtgcgcccttggcctgagcgtcgggctgatgggaattgttgtgggcacagttttcatcatccaaggtttaaggagcgtgggggcgagccggcatcagggccccttatag

SEQ ID NO: 193944 - DNA, 768 bp, synthetic construct
  misc_feature 1..768: note = Description of Artificial Sequence: Synthetic coding sequence
  source 1..768: mol_type = other DNA
atgatcctgaacaaggccctgctgctgggcgccctggccctgaccacagtcatgtcaccttgcggcggcgaggatattgtggctgaccacgttgccagctgcggcgtaaacctgtaccagttttacgggcccagtggccagtacactcatgaatttgatggggatgagcagttctacgtcgaccttgagcggaaggaaacagcatggagatggcctgaattcagcaagtttgggggattcgacccacagggagcactcaggaatatggcagtggcaaaacacaacctcaacattatgatcaagagatataactctaccgccgccactaacgaggttcccgaggtgaccgtcttctcaaagagccccgtcaccttgggacagccaaacactctgatctgccttgttgacaatatattcccccctgtagtcaatatcacttggcttagtaatggacaaagcgtcacagagggggtcagcgaaaccagttttttaagcaaaagtgaccattcattttttaagatcagctacctcaccttcctgccgtctgcagatgagatttatgactgtaaggtggagcactgggggttggaccagcctctgctgaaacattgggagccagagatcccggctcccatgtccgaactgaccgagaccgttgtttgcgccctaggcttaagtgtgggactcatgggcatcgtggtaggcactgtgttcataattcagggactgcgctctgtgggagctagcagacaccaaggcccactctag

SEQ ID NO: 193945 - DNA, 765 bp, synthetic construct
  misc_feature 1..765: note = Description of Artificial Sequence: Synthetic coding sequence
  source 1..765: mol_type = other DNA
atgatcctgaacaaggccctgatgctgggcgccctggccctgaccactgtgatgtctccctgcggaggagaagacatcgtggccgaccacgtggctagctatggagttaacctgtaccagtcttatggccctagcggccagtacacacatgagtttgacggtgacgagcagttttatgtcgatctggggagaaaagaaaccgtctggtgccttccagtgctaagacaattcaggtttgacccccaattcgcgctaacaaatatagctgtcctgaagcataaccttaattcactgatcaaaagatcaaattctaccgcggccaccaacgaggtccccgaagttactgtctttagtaagagccccgtgacgctggggcagccaaacatcctgatttgcctggtggataatatatttcctcctgttgttaacatcacttggctgtctaacggacacagcgtaaccgagggggtctctgaaacctcctttctcagcaagtctgaccacagcttttttaaaatttcatacttaaccttacttcccagtgccgaagagtcatacgattgtaaagtcgaacattggggactggacaagccactattgaagcattgggagcccgaaatcccggcacctatgagcgagcttactgagaccgtggtgtgtgctttgggcctcagtgtaggcctcgtgggcattgtggtcgggactgtgttcatcattagaggccttaggtccgtgggcgcgtctagacaccagggtcctttgtag

SEQ ID NO: 193946 - DNA, 768 bp, synthetic construct
  misc_feature 1..768: note = Description of Artificial Sequence: Synthetic coding sequence
  source 1..768: mol_type = other DNA
atgatcctgaacaaggccctgctgctgggcgccctggccctgaccactgtgatgtccccctgcggaggcgaggatattgtcgctgaccacgtagcctcttgcggagtaaacttgtaccaattctatggtccctctggtcagtatacccatgaattcgatggggacgaacagttttatgttgacctggagcgcaaggaaactgcctggagatggcccgaattttcaaagttcggtggcttcgacccacagggtgcactgagaaacatggctgttgccaagcacaatttaaacattatgatcaagagatacaacagcaccgccgccacaaacgaggtccctgaggtaactgtgtttagcaaatctcccgtgacccttggccagcccaatacattgatttgcttggtcgataacattttccctccagtggtcaacattacgtggctgtctaacggtcagagcgtgaccgaaggcgttagtgagacaagttttttgtcaaaaagcgaccactcattctttaaaatcagctacctaaccttcctcccctcagcagacgaaatatatgactgcaaagtagaacactgggggctcgaccagcccctgcttaagcactgggagccagagatccctgcgcctatgtcagagcttaccgagactgtggtgtgcgccctgggcctatcagtgggcctaatgggaattgtggtcggaacggtcttcatcatccagggacttcgcagcgtgggagcctcaagacatcagggccccttgtag

SEQ ID NO: 193947 - DNA, 768 bp, synthetic construct
  misc_feature 1..768: note = Description of Artificial Sequence: Synthetic coding sequence
  source 1..768: mol_type = other DNA
atgatcctgaacaaggccctgctgctgggcgccctggccctgaccacagtcatgtcgccctgcggaggcgaagatatcgtggccgaccatgtggcctcctgtggggtgaatctttatcagttttacgggccaagcggtcagtacacacacgagtttgacggcgatgaacagttctacgtagatctcgaaagaaaagagaccgcttggagatggccggaattctcaaagtttggcgggttcgatccacagggagcccttcgtaacatggcagtcgccaaacacaaccttaatatcatgattaaaaggtataatagcacggcggcaactaatgaggttccagaagtcaccgtgttttctaagtctccagtgaccctgggtcaacccaatacgctgatctgcctcgtggacaatatttttcccccagtagttaatattacctggctgtctaacgggcaatctgttacggagggcgtgagtgagactagttttctgagcaagtcagatcactcattcttcaaaatcagctatttgacttttctgccatcagccgacgaaatatacgattgtaaggtggagcactggggcctggaccagccgctcctgaagcattgggagcccgagatcccagcgcctatgtcggagctaactgaaactgtggtctgcgcccttggactttctgtgggcctgatgggtatagtggtggggaccgtgttcatcatccaagggctgagatccgtgggggcatcgcggcaccagggacccctgtag

SEQ ID NO: 193948 - DNA, 765 bp, synthetic construct
  misc_feature 1..765: note = Description of Artificial Sequence: Synthetic coding sequence
  source 1..765: mol_type = other DNA
atgatcctgaacaaggccctgatgctgggcgccctggccctgaccactgtcatgagtccttgcggcggggaagacattgttgcagatcacgtcgctagttacggagtcaacctgtaccagagttatggcccctccggacaatacacacatgaattcgacggggatgagcagttctacgtggatttaggacgcaaggaaacagtttggtgccttcccgttctgaggcagttcagattcgatccgcagttcgccctcacaaacattgctgtattgaaacataatcttaattccctgattaagagaagcaactcaactgccgctactaacgaggtccccgaggtgacagtattctcaaagagccccgtgactttaggacaaccaaatattcttatctgcctggtagataatattttcccccccgtcgtgaacatcacttggctgtcaaatggccactccgtgaccgagggcgtgagcgaaactagcttcctctcaaagtctgaccatagcttcttcaaaatatcttatcttactctccttccttctgcggaggagagctatgactgtaaagtcgaacattggggcctagacaaaccactactaaagcactgggaacccgagattcccgcgccgatgtcagaacttactgaaaccgttgtgtgcgccctcggattatcagtcggactagttggcatcgtcgtggggaccgtctttatcattcgggggttaagatcagtcggagcctcacgacatcagggccccctttag

SEQ ID NO: 193949 - DNA, 765 bp, synthetic construct
  misc_feature 1..765: note = Description of Artificial Sequence: Synthetic coding sequence
  source 1..765: mol_type = other DNA
atgatcctgaacaaggccctgatgctgggcgccctggccctgaccactgtgatgtcaccgtgcgggggcgaagacatcgttgcagaccacgtcgctagttacggggttaatttataccaatcctatgggccgtctggtcagtatacccatgagttcgatggggacgagcaattttacgtcgacctgggccgtaaggaaacagtttggtgcctcccggtgctcaggcagtttcgatttgacccccaattcgccctaacaaatattgccgtgctcaagcacaaccttaattcgcttatcaaaagatctaatagcaccgccgccacaaatgaggttccagaagtgacagtgttttccaagagcccggtgacactcggccagcctaacatcttgatctgcctggtggataacatctttccacctgtggtgaacattacatggcttagtaatggacattcagtcactgagggagtgtcggagacttcttttttatctaagagcgaccactctttctttaagatcagctatctgacattgctccctagtgccgaagaaagctatgactgtaaggtggaacattggggccttgataagcctctgcttaaacattgggaacccgagatccccgccccaatgtcagagctcaccgagaccgtggtgtgcgctttgggcttatccgtaggactggtcggcatagtggttggcaccgtgttcataatcagaggcctgcggagcgttggcgcatcacgacatcagggtccgctctag

SEQ ID NO: 193950 - DNA, 75 bp, synthetic construct
  misc_feature 1..75: note = Description of Artificial Sequence: Synthetic coding sequence
  source 1..75: mol_type = other DNA
atgatcctgaacaaggccctgatgctgggcgccctggccctgaccacagtaatgtcaccatgcgggggtgaatag

SEQ ID NO: 193951 - DNA, 765 bp, synthetic construct
  misc_feature 1..765: note = Description of Artificial Sequence: Synthetic coding sequence
  source 1..765: mol_type = other DNA
atgatcctgaacaaggccctgatgctgggcgccctggccctgaccactgtgatgtcaccatgcggcggggaggacatcgtggcagaccacgtggcttcctatggggttaacttgtatcagagctatgggccaagtgggcaatttactcacgagtttgacggcgacgaagagttttacgtcgacctggagcgaaaagagaccgtatggaaacttccactgtttcatcgtctgcggttcgacccccagttcgccctgacaaatatcgcagtattgaagcataacttaaatatactgattaagagatccaattcaactgccgcaacaaacgaagttccagaagtgacagtcttttccaaaagcccagtaacacttggacagccaaataccttgatctgcctggtcgataacatcttcccccctgttgtgaacataacctggctttccaatgggcattccgtgactgagggagtcagtgagacctccttcttatccaagagcgatcattcgttctttaaaataagctaccttacattccttccttcggcagacgaaatctacgactgcaaggtcgagcactggggattagacgagccgcttctcaaacactgggaacccgaaattcccgcaccaatgagtgaactaaccgagaccgtcgtttgcgcccttggactctcagtgggtctggtcggaattgtcgtgggaacagtgttgatcattcgaggcctgaggtccgtgggagcctcccggcatcaaggccccctctag

SEQ ID NO: 193952 - DNA, 768 bp, synthetic construct
  misc_feature 1..768: note = Description of Artificial Sequence: Synthetic coding sequence
  source 1..768: mol_type = other DNA
atgatcctgaacaaggccctgatgctgggcgccctggccctgaccacggtaatgtctccttgtggcggagaggatatcgtcgctgaccacgtggcctcttacggggtgaacctctatcaatcttacggaccttcaggtcagtactctcatgaattcgatggcgatgaggaattctacgtcgatttagagcgtaaagaaacggtgtggcagctgcccttattccggcgtttcaggcgattcgacccacaatttgccctcactaacattgctgttctgaaacataatctgaatatcgtgatcaagaggtctaatagcaccgctgctaccaacgaagtgccagaagttaccgtcttctcaaaaagccctgtgactctgggccagcctaatactcttatatgtctggtggataacatctttcccccagtcgttaatattacctggctgtcaaacggacactctgttactgagggggtctcagagacttcttttctatctaagtcagaccactcctttttcaagatctcatacctgacatttctgcccagcgcagatgaaatatatgattgcaaggtggaacattggggtctcgacgagccacttttgaagcactgggaacccgaaattcccactcctatgagcgaactgaccgaaactgtggtgtgcgccctgggcctgagcgtgggacttgtgggcattgtcgtgggcacagtactaatcatcaggggactccgatcggttggtgctagccgtcatcaaggaccgctatag

SEQ ID NO: 193953 - DNA, 768 bp, synthetic construct
  misc_feature 1..768: note = Description of Artificial Sequence: Synthetic coding sequence
  source 1..768: mol_type = other DNA
atgatcctgaacaaggccctgatgctgggcgccctggccctgaccaccgttatgtctccttgtggtggcgaggacatcgtcgccgaccatgtagccagctatggtgtaaatctctaccagtcttatggccctagcggtcagtacagccatgaatttgatggggacgaagagttttatgtcgatctggaacggaaggagaccgtgtggcagttgcccctcttccgacgcttccgcaggtttgatccacagttcgctttgactaatattgcagtgctgaagcataacctgaacatcgttataaaaagatccaactctaccgcggccacgaacgaagtaccagaggtgacggtcttttcaaagtctcccgtgacactcggtcagcctaacaccctgatctgccttgtggacaatatctttccacccgtcgtcaatatcacctggctatcaaacgggcactcggtaactgagggcgtatccgagacatcattcctgtctaagagcgatcattccttttttaaaatctcttatctcaccttcttaccctccgatgatgaaatctatgactgtaaagtggagcattggggactagatgaaccactcctcaagcactgggaacccgagattcctactcccatgtctgagcttacagaaaccgtcgtctgtgcacttggactatccgtgggcctggtcggcattgtagtgggcactgttctgattattcgcgggctacggagtgtgggagctagtcgtcatcagggcccattatag

SEQ ID NO: 193954 - DNA, 75 bp, synthetic construct
  misc_feature 1..75: note = Description of Artificial Sequence: Synthetic coding sequence
  source 1..75: mol_type = other DNA
atgatcctgaacaaggccctgctgctgggcgccctggccctgaccacagtcatgagtccttgtggcggggagtag

SEQ ID NO: 193955 - DNA, 768 bp, synthetic construct
  misc_feature 1..768: note = Description of Artificial Sequence: Synthetic coding sequence
  source 1..768: mol_type = other DNA
atgatcctgaacaaggccctgatgctgggcgccctggccctgaccacggtgatgtcaccctgtggaggggaggatatcgttgcagaccatgtagcttcctatggagtgaatctataccagagctacggcccctccggacagtatagccacgagttcgacggtgacgaggaattttacgtggatctggaacgcaaggagaccgtctggcagctccctttgttccgtcgcttccggcggttcgatccgcagttcgcgctgaccaacatagctgtcctcaaacacaatctgaacatagtcattaagcgctccaattcaaccgctgcgacgaatgaggtgcccgaggtcaccgtattcagcaagtctcctgttacacttggtcagcccaatactctgatttgtctcgtcgacaacattttcccaccggtagtcaacatcacttggctgtctaacggacactcagttacagaaggcgttagcgaaacttcttttctgagtaaatctgaccattctttcttcaagatcagctatctaactttccttccctccgatgacgaaatttacgactgtaaggtagagcattgggggctagacgaacccctgttgaagcattgggagcctgaaatccctacacccatgtccgagctcaccgagaccgtggtgtgtgcactgggcttaagtgtgggactggtaggaatcgtggtaggcaccgtcctcattatccgcggtttacgatcagtgggcgcatcccggcaccagggacccctgtag

SEQ ID NO: 193956 - DNA, 765 bp, synthetic construct
  misc_feature 1..765: note = Description of Artificial Sequence: Synthetic coding sequence
  source 1..765: mol_type = other DNA
atgatcctgaacaaggccctgatgctgggcgccctggccctgaccaccgtcatgtcgccctgtgggggtgaagacattgtcgccgatcacgtcgcgtcgtacggcgtgaatctgtatcagtcctacggtccttcaggccaattcactcacgagtttgatggagacgaagagttctatgttgacctcgagcgaaaggaaactgtgtggaaactgcctcttttccaccggttacgcttcgacccacaattcgcacttactaatattgcggttcttaagcataacctgaatatactcatcaaacggagtaattccacagccgctactaacgaagtccccgaagtcactgtgttcagcaaatccccagtgactctggggcagcccaatacgctgatctgccttgtggataacatattcccccccgtagtaaacattacatggctctcaaacgggcattccgtgaccgagggcgtctcagagacaagtttcctttcaaaatcggaccacagctttttcaagattagctatctgacctttctgcctagcgctgacgagatatacgactgcaaagtggagcactggggattggacgaaccacttttaaaacactgggagcctgagatccctgctccaatgagcgaattgactgagaccgttgtgtgcgccctgggcctctcagttgggttggttggcattgtggtgggaaccgttctgatcattagggggctgagatctgtcggcgctagccggcatcaagggccactgtag

SEQ ID NO: 193957 - DNA, 765 bp, synthetic construct
  misc_feature 1..765: note = Description of Artificial Sequence: Synthetic coding sequence
  source 1..765: mol_type = other DNA
atgatcctgaacaaggccctgatgctgggcgccctggccctgaccacagtgatgtctccatgcgggggtgaagatattgtcgccgatcatgtggccagctacggcgtaaatctctatcagagctatggaccctccgggcagtttacgcacgagttcgatggggatgaggagttttacgttgacttggaacgtaaggagaccgtatggaaactgccattgtttcatcggttgcgctttgaccctcaatttgccctgaccaatatagcggttctcaaacacaacctgaatatcctgattaagcgtagcaattctactgctgcgaccaatgaggtccctgaagtgaccgtcttttcaaagtcacctgttacgctgggccaacccaacacccttatttgtttagtcgataatatctttccacctgtggtcaacattacatggctctcgaacggtcacagtgttacagaaggcgtcagcgagacaagttttttaagcaagagtgaccactcattctttaagattagttatctcacctttttgccgagtgctgacgagatctatgactgtaaggtggagcactggggtcttgatgagccactgctgaagcattgggagccagaaatacctgccccaatgagtgagcttaccgagacagtggtttgcgctctcggcctatcagttggtcttgtgggcatcgtcgtggggaccgtgctgatcatcagaggactgcggagtgttggggccagtagacaccaggggccattgtag

SEQ ID NO: 193958 - DNA, 765 bp, synthetic construct
  misc_feature 1..765: note = Description of Artificial Sequence: Synthetic coding sequence
  source 1..765: mol_type = other DNA
atgatcctgaacaaggccctgatgctgggcgccctggccctgaccactgtgatgtcgccatgcggaggggaggatattgtggccgatcacgttgccagctatggggtgaatttataccaatcctatgggccatccggccagttcacacacgaattcgatggcgacgaggagttttatgtcgacctcgaacgcaaagagactgtgtggaagctgccgctgtttcatagactgaggtttgatccacagtttgccttgaccaacattgctgttctcaagcacaatctgaatatactcatcaagagatcaaacagcactgcggctaccaacgaggttccagaagtgacggtattttcaaagagcccagttaccttgggccagccgaacaccctgatatgtctggtggataacatcttcccacctgtggtgaatataacctggttaagcaatggtcacagcgtgactgaaggagtgagtgaaacttcattcctaagcaagtctgaccactctttcttcaaaatcagctacctcaccttcctgccgtccgcagacgaaatttacgattgtaaagtggagcactggggtctggacgagcctctgcttaaacattgggaacctgaaatccccgcccctatgagcgagttgactgaaactgttgtgtgcgcactgggtttgagcgttggccttgtgggaattgtcgtgggtactgtgctgatcattagggggctgcgcagtgttggagcatccagacaccagggccctctgtag

SEQ ID NO: 193959 - DNA, 768 bp, synthetic construct
  misc_feature 1..768: note = Description of Artificial Sequence: Synthetic coding sequence
  source 1..768: mol_type = other DNA
atgatcctgaacaaggccctgatgctgggcgccctggccctgaccaccgtgatgtctccatgtggtggcgaggacatcgttgcagatcacgtagcttcttacggcgtcaatctctatcagagctacggaccgagcggacaatactctcacgaatttgacggtgatgaggaattctatgttgacctcgaacgtaaggagacagtatggcaactgccactgttccgccggtttagacggttcgatcctcaattcgctcttacaaacatcgcggtactgaaacataatctcaatatcgttataaaacggtccaactctacagcagccactaatgaggtcccggaagtgacagtgttcagcaaatcccctgtgactcttggacagccaaacaccctcatctgtttagttgataatatatttccacccgtggtgaatatcacatggctgtcaaacggacactcagtgaccgagggggtgtctgagacctcttttctgtccaagtctgatcattcgtttttcaagataagctacttaactttcctaccgtccgcggatgagatatatgattgtaaagtcgagcactggggactcgacgagccgctgttaaagcattgggagccagaaatccccactccgatgtcggaacttacggagacggtggtgtgcgcactaggactctcagtgggattggtgggcatagttgtggggactgtcctgataatcaggggcctgaggagcgtgggggccagtagacatcaggggcccttatag

SEQ ID NO: 193960 - DNA, 75 bp, synthetic construct
  misc_feature 1..75: note = Description of Artificial Sequence: Synthetic coding sequence
  source 1..75: mol_type = other DNA
atgatcctgaacaaggccctgatgctgggcgccctggccctgaccacagtcatgtctccatgcggcggtgaatag

SEQ ID NO: 193961 - DNA, 75 bp, synthetic construct
  misc_feature 1..75: note = Description of Artificial Sequence: Synthetic coding sequence
  source 1..75: mol_type = other DNA
atgatcctgaacaaggccctgatgctgggcgccctggccctgaccactgtgatgtccccctgtgggggtgagtag

SEQ ID NO: 193962 - DNA, 768 bp, synthetic construct
  misc_feature 1..768: note = Description of Artificial Sequence: Synthetic coding sequence
  source 1..768: mol_type = other DNA
atgatcctgaacaaggccctgatgctgggcgccctggccctgaccacggtgatgtctccatgtgggggggaggatatcgtggctgatcacgtggccagttatggtgtgaacctgtaccagagttatgggccatctggccaatacagccacgaatttgatggcgatgaagaattttatgtagacctcgaaaggaaggagaccgtgtggcaactgccattgtttaggcggtttcgtagatttgacccacagttcgcgctcaccaacatagcagtcttaaagcacaatcttaacattgtaatcaagagaagcaatagtaccgccgcgaccaatgaggtgcctgaagttacggttttcagtaaatcaccagtgactctcggacagcccaacacacttatttgtttagttgataacattttccctcctgtggttaatatcacttggctctccaatggtcatagcgtgaccgagggagtctccgagacctccttcctgtcaaagtccgaccatagctttttcaagatctcttacctgactttccttccaagtgacgacgaaatctacgactgtaaggtggaacactggggtctggacgaaccacttctcaagcattgggagcctgaaattccgacccctatgtcggaactgactgaaacggtcgtctgtgctctgggactatctgtgggacttgtcggcattgtggtcggcacagtcttgattatacggggtctaagatctgttggtgcctcacgacatcaaggtccattatag

SEQ ID NO: 193963 - DNA, 765 bp, synthetic construct
  misc_feature 1..765: note = Description of Artificial Sequence: Synthetic coding sequence
  source 1..765: mol_type = other DNA
atgatcctgaacaaggccctgatgctgggcgccctggccctgaccacagtgatgtccccctgcgggggcgaagatatagtggcagatcacgtggcaagctacggcgtaaacctgtaccagagctacggaccctctggacagttcacccatgagtttgatggtgacgaagaattttacgtggacctggagcggaaggagacggtgtggaaactaccattgttccaccgtctcaggttcgatcctcagttcgccctgactaacatagctgtgctcaagcacaatttgaacatcttgatcaaaagaagtaactcgacagccgccaccaatgaggtgcccgaagtcaccgtctttagcaagtcaccagtgaccttaggacagccaaataccctgatctgtctggtcgacaatatttttccgccagttgtcaacattacctggttgtctaacgggcactctgtgactgagggagtgagtgagacaagttttcttagcaaaagcgatcacagtttttttaagataagctacttaacatttctccccagtgcggacgagatctacgattgtaaagtcgagcactggggactagacgaaccgcttcttaaacattgggagcccgagataccggctccaatgtcagagctcacagaaacagtggtctgcgctctgggcttgtctgtcgggctcgtgggtattgtcgtggggacagtgctgatcatccgcgggctgcgctcagtaggggcgtctaggcatcagggtcccctatag

SEQ ID NO: 193964 - DNA, 765 bp, synthetic construct
  misc_feature 1..765: note = Description of Artificial Sequence: Synthetic coding sequence
  source 1..765: mol_type = other DNA
atgatcctgaacaaggccctgatgctgggcgccctggccctgaccaccgtcatgagtccatgcggaggggaggacatcgtggcagaccatgtggcatcatacggggtgaacctctatcagtcgtatgggccgagtgggcagttcacacatgagttcgatggcgacgaggaattttacgtagatctcgaaaggaaggaaacggtttggaaattgcctctctttcatagactgaggtttgaccctcaatttgccctgacgaacatagccgtgctgaaacataatttgaatatattaatcaagaggagcaactctaccgcagccaccaacgaggtccccgaggtgaccgtgttttctaagagcccagtgaccctgggtcagccaaataccctcatctgtctcgtggataacattttccccccagttgttaatatcacatggctctctaatggacacagtgtcacagagggagtctccgagacttcctttttatcgaaaagcgatcattccttttttaaaataagctatcttacctttctcccctctgccgatgaaatttacgattgtaaagtggaacactggggcctggatgagcctttactgaagcactgggagcccgaaatccctgccccaatgagcgagctcacagaaactgtggtgtgcgccctggggctatccgtcgggctggtggggattgtggttgggactgtcttgattatcaggggcctccggtccgtgggcgctagtcgacaccaaggtcctttatag

SEQ ID NO: 193965 - DNA, 765 bp, synthetic construct
  misc_feature 1..765: note = Description of Artificial Sequence: Synthetic coding sequence
  source 1..765: mol_type = other DNA
atgatcctgaacaaggccctgatgctgggcgccctggccctgaccaccgttatgtccccgtgcggaggggaggatattgtcgcggaccacgtggcttcttatggagttaatctgtatcagtcttatggacccagcggccaattcacgcatgaattcgatggggatgaagagttttatgtggacctggaacgcaaagagacggtgtggaaactcccgttgttccaccgcctgaggttcgacccacaatttgccttgactaatatagctgtgctaaagcataatttaaatatactaatcaagaggtcgaactccactgccgcaacaaatgaggtcccagaagtgacagtgttttccaagtcacccgtcaccttaggacagccaaacacactgatctgcttagtggataacatttttccgcccgttgtcaatatcacctggctgtccaatgggcacagcgttactgagggagtgtccgaaacctcattcctgagtaaatcagaccactcgtttttcaagattagctacctcaccttcttaccatctgccgatgaaatatatgattgcaaagtggagcactggggcctggatgaacctttgctgaagcactgggaacccgaaatccctgcgcccatgtctgagctgacagagactgttgtgtgcgcactgggtctttctgtcggactcgttgggattgtggtcggaacagtgctgatcatcagaggcctgcgtagtgtgggggctagtcggcatcagggcccgttatag

SEQ ID NO: 193966 - DNA, 768 bp, synthetic construct
  misc_feature 1..768: note = Description of Artificial Sequence: Synthetic coding sequence
  source 1..768: mol_type = other DNA
atgatcctgaacaaggccctgatgctgggcgccctggccctgaccaccgtgatgtccccgtgtggcggcgaagatattgttgccgatcacgtggcttcgtatggggtgaacctttaccagtcatacggaccatcagggcagtactcccatgagtttgatggggatgaagaattctatgtggacctcgaaagaaaggagaccgtttggcagctgcccctgttcagacggtttagacgcttcgatcctcaattcgccctgactaatatcgcagtcttgaaacacaacctgaatattgtgatcaagagaagcaactctacagccgcaacaaatgaggtgccggaggtgacagtatttagcaagagccccgtgaccctgggacaacctaacacacttatatgccttgtcgacaacatcttcccaccggtcgtgaacattacttggttatcgaacggccactctgttactgagggcgtatcagagacctctttcttatcgaaatccgaccactcgtttttcaaaatcagctacctgacttttctgcctagcgacgatgagatatatgactgtaaggtggagcactggggactcgatgaaccgctcctcaaacattgggagccagagattccgacccccatgtccgagctgacagaaaccgtcgtttgtgcgctaggactgagcgttggcctggtgggcatcgtggtgggcacagtgctgatcatacgaggtcttcgaagtgttggcgcctcccggcatcagggtcccctctag

SEQ ID NO: 193967 - DNA, 765 bp, synthetic construct
  misc_feature 1..765: note = Description of Artificial Sequence: Synthetic coding sequence
  source 1..765: mol_type = other DNA
atgatcctgaacaaggccctgatgctgggcgccctggccctgaccactgtgatgtctccatgtggaggggaagatatcgtcgctgatcatgtggcttcctatggggtcaatttgtatcaatcctacggcccctcgggacagttcacccacgaatttgatggagacgaggaattctatgtcgatctggagcgcaaggagacggtatggaagttgccgctcttccacaggctgcggtttgacccccagtttgcgcttactaacattgccgtcctcaaacacaacctcaatatcctgattaaacgcagtaactctaccgcagctaccaacgaagtcccagaagttaccgtgttctccaagtcacctgtgaccttaggtcagccgaacaccctaatctgcctggtggacaacattttccccccagtcgttaacattacttggctttctaatggccactccgtcacagaaggagtgagcgagaccagttttttgtctaaatccgaccactcgttcttcaagataagctatctaacatttctgccttccgcagacgaaatatacgactgtaaggtagaacactggggcctagatgaaccactgctaaaacactgggagcccgagatccccgcacctatgtccgagttgactgagactgtggtttgtgcactgggcttatcagtgggtttagttgggatagtggttggtaccgtgctaataatccgtggtctgaggtctgtgggggccagtagacaccagggacctttgtag

SEQ ID NO: 193968 - DNA, 645 bp, synthetic construct
  misc_feature 1..645: note = Description of Artificial Sequence: Synthetic coding sequence
  source 1..645: mol_type = other DNA
atgatcctgaacaaggccctgctgctgggcgccctggccctgaccactgtaatgtccccttgtggtggtgaagatatagttgccgatcatgttgcgtcctgtggcgtgaacctttatcagttctacggtccctccggacagtacacacacgagtttgatggggatgaacaattttatgtggacctagaacggaaagagactgcatggagatggcctgaatttagcaagttcggcggctttgatccgcagggtgccctgcgcaatatggcagtggctaaacataacctgaatatcatgatcaagagatataactccacagctgccactaatgaggtccccgaagttaccgtgtttagcaaatctcctgttacccttgggcagcccaatacactgatctgtcttgtggataacatcttcccccccgttgtaaacatcacctggctctcaaacggtcagtcggttactgagggggttagcgagaccagtttcctgagtaaaagcgaccacagctttttcaagatctcatacctcacctttttaccaagtgctgatgagatctacgactgtaaggtggaacattggggccttgaccagccactgctgaagcattggggggcatccccatctaccggtgcagaagagtag

SEQ ID NO: 193969 - DNA, 576 bp, synthetic construct
  misc_feature 1..576: note = Description of Artificial Sequence: Synthetic coding sequence
  source 1..576: mol_type = other DNA
atgagcccctgcggcggcgaggacatcgtggccgaccacgtggccagctatggagtcaatttgtatcaaagctacgggcccagtggacagtatagccatgagttcgacggagacgaggaattttacgttgacctggagaggaaggagactgtgtggcagctgcccttgtttcgtcgcttcaggcggtttgatccgcagttcgccctcaccaacatagcggttcttaaacataatctgaatattgtaataaagcgtagcaatagcacagctgcaacaaacgaagtcccggaggtgaccgtgttcagcaagtcgcccgtgactctgggccagcccaacactctcatctgcttggtggacaatatcttccctccagtcgtcaacattacctggttaagtaatggacactctgtgaccgaaggtgtttcagagacttctttcctgagcaaatccgaccattctttcttcaagatcagctacttaacctttctgccctcagcggacgagatatacgattgtaaggtggagcactggggactggacgagcctcttctcaaacattggggtttactccactag

SEQ ID NO: 193970 - DNA, 441 bp, synthetic construct
  misc_feature 1..441: note = Description of Artificial Sequence: Synthetic coding sequence
  source 1..441: mol_type = other DNA
atgatcctgaacaaggccctgatgctgggcgccctggccctgaccaccgtcatgagcccgtgtggcggggaggatattgtcgcagatcatgtggcatcctatggtgtgaatctttaccagtcctatggacctagcggacagtatacccacgaattcgacggcgatgagcagttttacgtcgatttgggtcggaaagagactgtgtggtgcttgcccgtgctgagacagtttcggttcgaccctcagtttgctcttacaaacatgtgcatcgcaatctataggtctagaagagttgatcttctgcacgacctcgctctattcagtggcccaatctaccacatcccgtttctactgcagatgtttcttctctccccactgctttgggacctcaattgttatatttgctcagaacttaccaatgcgtttgagctttttccctag

SEQ ID NO: 193971 - DNA, 762 bp, synthetic construct
  misc_feature 1..762: note = Description of Artificial Sequence: Synthetic coding sequence
  source 1..762: mol_type = other DNA
ggctgcctgggcaagcggatgatcctgaacaaggccctgatgctgggggctctcgctcttactactgtcatgtccccttgtggaggggaggacatagtggctgatcatgtggcatcttacggagtgaacttataccaaagctacggcccttccggacagtatacccacgaattcgacggagacgaacaattttacgtcgatttggggaggaaggaaacagtatggtgcctccctgtgttgcgacagttcaggtttgaccctcagttcgcccttaccaacatcgccgttttgaaacacaaccttaattctctaatcaagcgttcgaattcaacagctgccacgaacgaagtgccagaagtgactgtttttagtaagagccccgtgaccctgggccagcctaatatactgatttgcctggtggataatatcttcccacctgtggttaatataacatggttgagtaacggccattcagtaaccgaaggtgtttccgagactagctttctgagtaagtcagaccatagtttttttaaaattagttatctgaccctcctgcccagtgcggaggaatcctatgattgtaaggtggagcactggggcctcgacaagcccctgcttaagcactggggtaaagacgaatttcaccattttctgatgctgagctgtctgagcagtagcgagctccctgctttttatagctacatcccgaaacttgtattccatacttcatgggtgagcttcttcctcattttcttcttttag

SEQ ID NO: 193972 - DNA, 603 bp, synthetic construct
  misc_feature 1..603: note = Description of Artificial Sequence: Synthetic coding sequence
  source 1..603: mol_type = other DNA
atgagcccctgcggcggcgaggacatcgtggccgaccacgtggccagctatggagtgaatctgtatcagtcgtacggtccatcaggacagtattcccacgagtttgacggcgacgaggagttttatgtcgatcttgagcggaaagagacagtctggcagctgcctctgttccgaaggtttagaaggttcgatccccagtttgccctcacgaacatcgccgtattgaaacataatctcaatatcgtcattaagcggagtaacagcacagcagcaacaaacgaagtgcctgaagtgacagtgttcagcaaatccccagttaccctcggacaacctaacacacttatttgtcttgtggacaatatcttccctcccgtggtgaacattacgtggctgtccaatggccatagcgtgaccgaaggcgtaagcgagacctctttccttagcaagtctgatcactctttctttaagatctcatacctaacctttctgcctagcgccgatgagatttatgattgtaaagtcgagcactggggcctggacgaacctctgctcaaacactgggaatcacagtcacgtgaatctgaggagtcaacgaaaagctag

SEQ ID NO: 193973 - DNA, 582 bp, synthetic construct
  misc_feature 1..582: note = Description of Artificial Sequence: Synthetic coding sequence
  source 1..582: mol_type = other DNA
atgagcccctgcggcggcgaggacatcgtggccgaccacgtggcctcctacggcgtgaatctctaccagtcttatgggccatccgggcagtacacccatgagttcgacggagatgagcagttctatgtggacttgggaaggaaagagaccgtctggtgtttgcccgtgctccgacaatttaggtttgacccgcaatttgctctgaccaatattgccgtgctcaaacacaaccttaattccctgatcaagcgatcaaacagcaccgccgccacaaatgaggtgccagaagtgaccgtgttcagtaagagccccgtgaccttggggcaacccaacattctgatctgcctggtggataacattttcccacccgtcgtgaacataacttggttgtctaatggccattccgtcaccgagggcgtttcagaaacctccttccttagcaagagcgatcatagtttcttcaaaatttcctatcttacactcctgcctagtgcagaggaatcctacgactgtaaagtggagcactggggcctcgataagcccttgctaaagcactgggttcacgggtttttatcattctag

SEQ ID NO: 193974 - DNA, 606 bp, synthetic construct
  misc_feature 1..606: note = Description of Artificial Sequence: Synthetic coding sequence
  source 1..606: mol_type = other DNA
atgagcccctgcggcggcgaggacatcgtggccgaccacgtggccagctatggcgttaatctataccagagctacggcccatccggtcagtactcccacgaatttgatggcgatgaggagttctatgtcgacttggaacgcaaagagactgtgtggcagctgcctctattccggcgttttagaagatttgatccacagttcgcccttactaatatcgcagtgctaaaacataacctgaacatcgtgatcaaacgaagcaactctactgcggccacgaatgaggttcccgaagttactgtgttcagtaaatctcccgtgaccttgggacaaccaaacaccctcatctgtcttgtagataacatctttcctcccgttgtaaacatcacctggctcagcaacgggcatagcgtgactgaaggagttagtgagacctcatttctttctaaatccgatcattcatttttcaaaatcagttatctcactttcctgcccagcgcggatgagatttatgactgcaaagtcgaacactggggattggatgaacccctgctaaaacactgggggatacaagccgaagagggccagaggcggaaaaagctgggctag

SEQ ID NO: 193975 - DNA, 258 bp, synthetic construct
  misc_feature 1..258: note = Description of Artificial Sequence: Synthetic coding sequence
  source 1..258: mol_type = other DNA
aacaccctgatctgcctggtggacaacatcttcccccccgtggtgaacattacctggctgagtaacggccacagcgtaacagaaggtgtctctgagacgtcctttctttccaagagtgatcacagttttttcaaaataagttatcttacgtttcttccatctgctgacgaaatttacgattgcaaggttgagcactgggggctagacgagccattgttaaagcactgggggaaggactttatgtccttcttctactag

SEQ ID NO: 193976 - DNA, 390 bp, synthetic construct
  misc_feature 1..390: note = Description of Artificial Sequence: Synthetic coding sequence
  source 1..390: mol_type = other DNA
ggctgcctgggcaagcggatgatcctgaacaaggccctgatgctgggtgccttggccctgaccacggttatgagcccctgcggcggcgaggacatagttgcagatcacgtggccagttatggggtaaacctgtatcaatcatacggaccttcaggtcaatacagccatgaatttgatggggatgaggaattctatgtggatctagaaagaaaagagactgtttggcagctgcccctgttccgcagattccggcgctttgacccacagttcgccctgacaaacatcgcagttctgaaacataacctgaatatagtaataaagaggtctaattccacagcagcaaccaatgaagtgccagaggtgaccgtcttttcaaagtccccagtctag

SEQ ID NO: 193977 - DNA, 768 bp, synthetic construct
  misc_feature 1..768: note = Description of Artificial Sequence: Synthetic coding sequence
  source 1..768: mol_type = other DNA
atgatcctgaacaaggccctgctgctgggcgccctggccctgaccgctgttatgagcccgtgcggcggtgaggatattgtagccgaccatgtggccagctacggggtgaacttttatcagagccatggtccttccggccagtatacccacgaattcgatggggatgaggagttttacgttgacttggagacaaaggaaactgtatggcaattgcccatgttttctaagttcataagtttcgacccccagagtgcactcaggaatatggccgtgggaaagcacaccttggagtttatgatgagacagagcaatagcacagctgctactaatgaagtgcctgaggtgacagtgttcagcaagttccccgtgaccctcggccagccgaacaccttgatttgcttggtggacaatattttccctccagtggtgaacataacatggttgtctaatggacattctgttaccgaaggcgtgagcgagacgtctttcttgtcaaagtctgaccactccttctttaaaattagttacttaacatttctgcctagcgccgacgaaatttacgactgtaaagtggagcactggggcctggatgagcctttgctcaaacactgggagccagagatcccagccccaatgagcgaacttacagaaacactggtctgtgccctcggcctaagcgttgggctgatggggattgtggtggggactgtgttcatcattcagggtctgcggtccgttgacgcaagtcgccaccaaggtctgctgtag

SEQ ID NO: 193978 - DNA, 768 bp, synthetic construct
  misc_feature 1..768: note = Description of Artificial Sequence: Synthetic coding sequence
  source 1..768: mol_type = other DNA
atgatcctgaacaaggccctgctgctgggcgccctggccctgaccgctgtcatgagcccctgcgggggtgaagacattgttgccgatcacgtcgcatcctacggggttaacttttatcaatcgcatggtccgtccgggcagtatacacatgaatttgacggggacgaggagttctatgtggacttggagacgaaggaaactgtgtggcagctccctatgttttccaaattcatctccttcgacccccagtcggctcttaggaacatggccgtgggtaaacacacgctggaattcatgatgaggcagtcaaattcaactgccgcaactaacgaggtaccagaggtcactgtgttcagtaagttcccagtcacgttgggacagcccaacactctgatctgcctcgtagataatatttttcctccagtggtgaatattacttggctctctaacggccactctgtgacagagggggtctcggaaacatcctttctcagcaaatctgatcatagttttttcaaaatttcttacctcacttttctcccgtctgccgacgaaatatatgattgtaaggtggaacactggggtctcgatgaacctctgttgaagcactgggagcccgaaatacctgctccaatgagcgagttgactgaaactctcgtctgtgcactcggcctgtctgtcgggctcatgggcatcgtggttggaactgtgtttatcatccaaggcctaaggtctgtcggggccagcaggcatcaggggctcttgtag

SEQ ID NO: 193979 - DNA, 768 bp, synthetic construct
  misc_feature 1..768: note = Description of Artificial Sequence: Synthetic coding sequence
  source 1..768: mol_type = other DNA
atgatcctgaacaaggccctgctgctgggcgccctggccctgaccgcagtgatgtccccgtgtggaggtgaggatatcgtggccgaccatgtggcttcttatggcgtgaacttctaccaatcccatggcccctcaggtcaatatactcacgaatttgacggcgacgaggagttctatgtggacctcgagacaaaagaaactgtttggcagttgcccatgttttctaagttcatcagcttcgatccacagtctgcacttcggaacatggctgttgggaaacacacgctggaattcatgatggggcagtctaactctacagctgctacaaacgaggtcccagaggtgacagtattcagcaagttccccgtgacccttggacagcctaataccctaatctgtcttgtcgataacattttccccccagtagtaaacatcacctggctgtctaatggccactccgttaccgagggcgtgtccgaaacctcattcctgtcaaagtcagaccattcattttttaagatttcgtacctgacgtttttacctagcgcggatgagatatacgactgtaaggtcgaacattgggggctcgatgagcctctcctgaagcactgggaaccagagattccagctcctatgagcgaactgacagaaacgctcgtgtgcgcgcttgggctgtcagtgggcttgatgggcatcgtcgttgggacggtatttatcattcagggcctgcgttcagtcggtgcgtctcggcaccagggccttctctag

SEQ ID NO: 193980 - DNA, 768 bp, synthetic construct
  misc_feature 1..768: note = Description of Artificial Sequence: Synthetic coding sequence
  source 1..768: mol_type = other DNA
atgatcctgaacaaggccctgctgctgggcgccctggccctgaccgccgttatgagtccttgcgggggcgaagatatcgtggccgatcacgtggcctcatacggcgttaatttctatcagtcccatggcccatccggacagtacacccatgagtttgatggcgacgaagaattttatgtggatttagaaactaaagagactgtttggcaacttccaatgttcagtaagtttatctcatttgacccacagtccgcgctaaggaacatggccgtagggaaacacactcttgaattcatgatgcggcaatcaaatagcacagctgcgacaaacgaggtaccagaggttaccgtgttctcaaaatttccggtgaccctcggtcagcctaacacattgatctgcctggtggacaacatctttcctccagtagtgaatattacttggctcagcaacgggcacagcgtgaccgaaggcgtctccgaaacgtcattcctgagcaagtcggatcattccttttttaaaatttcatacctaacatttcttccttctgccgatgagatctatgactgtaaagtcgaacattggggattggacgagccccttctcaaacattgggagcccgagatccccgcacccatgtctgagctcactgagactttggtgtgcgctctgggcctcagcgtgggactaatgggcatcgtcgtggggaccgtgtttatcatccagggcctacgctccgtcggagcgtcccgacatcaggggctactctag

SEQ ID NO: 193981 - DNA, 768 bp, synthetic construct
  misc_feature 1..768: note = Description of Artificial Sequence: Synthetic coding sequence
  source 1..768: mol_type = other DNA
atgatcctgaacaaggccctgctgctgggcgccctggccctgaccgccgtgatgagtccctgcggcggcgaggatattgtggctgatcatgtcgccagttatggcgtgaatttctaccagtcacacggcccatccggccagtatactcatgagttcgatggggacgaggagttttacgtggatctggagaccaaggagactgtgtggcagctacctatgttcagtaaattcattagttttgatcctcaaagcgctctacgcaatatggcagtggggaagcacacactcgagttcatgatgcgccagtcaaattccacagctgcaacaaacgaggtgccagaggtgacagtgtttagcaaatttcccgtgactctgggacagcctaacaccctgatatgtctggtcgataatatcttcccgcccgtggtcaatatcacttggctgtcaaatgggcattccgtgactgagggcgtgagtgaaaccagttttctgagcaaatccgaccattccttctttaaaatatcgtacctgactttcttaccaagcgccgatgaaatctatgactgtaaggtagagcactggggactggatgagcccctcctcaagcactgggaacccgaaatccccgcccctatgtccgagttgactgaaactcttgtctgcgcccttggcctttccgcgggactgatgggaatcgtggttggtacagtattcattattcagggacttagatcagttggcgccagccgtcaccagggcctactgtag

SEQ ID NO: 193982 - DNA, 768 bp, synthetic construct
  misc_feature 1..768: note = Description of Artificial Sequence: Synthetic coding sequence
  source 1..768: mol_type = other DNA
atgatcctgaacaaggccctgctgctgggcgccctggccctgaccgcagtcatgtctccctgcggcggagaagatattgtggcagatcacgttgcttcttatggcgtgaacttttaccagtctcatgggccatctggccagtacactcacgaatttgacggcgatgaagaattctacgtcgacttggagactaaggaaacggtctggcaactgccaatgttttctaagttcattagttttgaccctcagtcagcattgcgcaacatggcggtcggtaaacacactctggaattcatgatgagacagtcaaactccacggctgctaccaacgaggtgccagaggttaccgtgtttagcaaatttcccgtcacacttggtcagcctaacaccctcatctgcctggtcgataatatatttccccccgttgtcaatattacatggctgtccaacgggcactcagtgacagagggagtaagtgagacatccttcctctctaagagtgatcattccttttttaagatctcctaccttacatttctcccctccgccgatgaaatctatgactgtaaggtcgaacactggggcctcgacgaaccgctactgaagcattgggagccggagatcccagctcccatgtctgaattgacagagactttggtctgtgcacttggtctgtctgtggggctgatgggaatcgtcgtgggcaccgtgtttatcatccaggggcttcggtctgtcggagcaagtaggcaccagggtcttctatag

SEQ ID NO: 193983 - DNA, 768 bp, synthetic construct
  misc_feature 1..768: note = Description of Artificial Sequence: Synthetic coding sequence
  source 1..768: mol_type = other DNA
atgatcctgaacaaggccctgctgctgggcgccctggccctgaccgccgtgatgtccccctgcggcggggaggacatcgtggcggaccacgttgcctcctacggcgtgaatttttaccagtctcacgggccttccggccagtacacacacgaattcgatggagacgaagaattttacgtggacctggaaacaaaggagacggtgtggcaattgcccatgttctccaaatttattagtttcgacccgcaatcagctctgagaaatatggcggttggcaaacacactcttgaatttatgatgagacagagtaatagcaccgccgcgaccaatgaggtgccggaggtcactgtttttagtaagttccctgttactttaggacagcccaatactctgatctgccttgtcgacaacatctttccacccgtagtgaatatcacatggctgtctaatggacattccgtcacagagggagtgagcgagacttccttcctatctaagtccgatcattctttttttaagataagttacctcacattcctgcccagcgcagacgaaatttacgattgcaaggtcgaacactggggtctcgacgaacccttacttaaacattgggaacctgaaatacctgctccaatgtctgaactcacggagactctggtatgtgcacttggtctaagtgtagggcttatgggtattgtggtgggcaccgtgtttattattcaggggttgcgatcggtcggcgcaagcagacaccagggtctgttgtag

SEQ ID NO: 193984 - DNA, 768 bp, synthetic construct
  misc_feature 1..768: note = Description of Artificial Sequence: Synthetic coding sequence
  source 1..768: mol_type = other DNA
atgatcctgaacaaggccctgctgctgggcgccctggccctgaccgccgtgatgagcccctgcggcggtgaggacatcgtagccgaccatgtggctagctatggagtaaacttctaccaaagtcacggcccttccggccagtacacccatgaatttgatggagatgaggagttttacgtggacctggagaccaaggagacagtctggcaacttccgatgttctcaaaatttatcagctttgatccccaatcagctctaagaaatatggcagttggaaagcacaccctagagttcatgatgagacagtcaaatagcaccgccgctacgaatgaggtacccgaagtcacggtatttagcaaattcccggtgactctggggcaaccaaacactctcatctgcttggtagacaatatctttcctcccgtggtgaatattacctggctctctaatgggcattccgtgaccgaaggcgtgagcgagacctcattcctgtcgaaaagcgaccattcctttttcaagatatcttacctgacatttttacccagcgctgatgagatctacgattgtaaggtggaacactggggcctggatgagcccctcctaaagcattgggagcctgaaatccccgccccaatgtcagaactgacggagacccttgtgtgcgccctcgggttgtctgccggactcatgggaattgtggttggaacagtgttcataatccagggcctccggtctgtcggcgcctctagacatcagggcctgctgtag

SEQ ID NO: 193985 - DNA, 768 bp, synthetic construct
  misc_feature 1..768: note = Description of Artificial Sequence: Synthetic coding sequence
  source 1..768: mol_type = other DNA
atgatcctgaacaaggccctgctgctgggcgccctggccctgaccgccgtaatgtccccttgtgggggggaggacatcgtggcagaccatgtcgcttcttatggagtcaatttctatcagtcacacgggcccagcgggcagtatacacacgaattcgatggggatgaggagttctacgtggatctggaaactaaggagacggtttggcagttacccatgttttcgaagtttattagtttcgacccccagtccgcactgcgaaacatggcggtcggtaagcacacattggagttcatgatgagacaatctaattctactgccgcaaccaatgaagttccggaggttacagtgtttagcaagtttcccgtgacccttggccagcctaacacactgatttgtctcgtggataacatttttccacctgtagttaacataacttggctcagcaatggacattcagtgacggaaggcgtgagtgagacgtctttcctgtccaaatcagatcactcatttttcaagatcagctacctgacgttcctcccctccgctgacgagatttacgactgcaaggtcgaacattggggcctcgatgaacccctgttgaagcactgggaacccgagatccctgccccaatgagtgaacttaccgagactctggtgtgtgcgcttgggctatctgttgggctgatggggattgtagttggaacggtgttcataatacagggcctgaggagtgtgggcgcatctaggcaccagggcttgttgtag

SEQ ID NO: 193986 - DNA, 249 bp, synthetic construct
  misc_feature 1..249: note = Description of Artificial Sequence: Synthetic coding sequence
  source 1..249: mol_type = other DNA
gaccacgtggccagctacggcgtgaacttctaccagagccacggcccgtccggacagtacacgcatgagtttgacggcgacgaagagttctatgttgatctggagaccaaggagacggtgtggcagctgccaatgttttccaaattcataagcttcgacccccagtctgcactacgcaacatggccgtcggaaaacacacactggagttcatgatgagacaatctaattctacggccgccaccaattag

SEQ ID NO: 193987 - DNA, 768 bp, synthetic construct
  misc_feature 1..768: note = Description of Artificial Sequence: Synthetic coding sequence
  source 1..768: mol_type = other DNA
atgatcctgaacaaggccctgctgctgggcgccctggccctgaccgccgtgatgtccccttgcgggggagaggatattgtcgccgatcacgttgcttcttatggggtgaacttctaccagagccatggtcccagcggccagtacacccacgagtttgacggcgatgaggagttttatgtggacttggaaacaaaagaaaccgtgtggcagctgcccatgttcagtaaatttatctctttcgatccccagtcagccctcaggaatatggcagtaggtaagcacacactggagttcatgatgaggcagtccaatagtaccgctgcaactaatgaagtgcctgaggtgacagtgtttagcaagttcccagtgacactcgggcagccgaacacactgatttgcctggtggataatatctttccccctgtggtcaacataacttggctttcgaacggccacagcgtaactgaaggcgtttctgaaacaagcttcctcagcaagtccgaccacagtttcttcaagatctcatatctcacattcctgccgtccgccgacgaaatttatgattgtaaagttgagcattggggcctcgatgagccattacttaaacattgggaaccagagatccctgctcctatgtctgaattaacggaaactcttgtctgtgccttgggtctgagtgttggcttgatggggatcgtcgtgggaaccgtgttcatcatacaaggacttcgctcagtgggggcctccaggcatcaggggctgctctag

SEQ ID NO: 193988 - DNA, 84 bp, synthetic construct
  misc_feature 1..84: note = Description of Artificial Sequence: Synthetic coding sequence
  source 1..84: mol_type = other DNA
atgatcctgaacaaggccctgctgctgggcgccctggccctgaccgctgttatgagtccatgcggcggcgaagacattgtttag

SEQ ID NO: 193989 - DNA, 810 bp, synthetic construct
  misc_feature 1..810: note = Description of Artificial Sequence: Synthetic coding sequence
  source 1..810: mol_type = other DNA
atgagctggaagaaggccctgcggatccccggcgacctgcgggtggcgactgttactctgatgctcgccatgttgtcatctttgcttgccgagggccgggatagccctgaggattttgtttttcaatttaaaggaatgtgctacttcacaaacggcactgagcgcgttaggctggtgacacgatatatctacaacagagaggagtacgcgcgtttcgactccgacgtgggagtttaccgggccgtgaccccacagggaaggcccgacgccgagtactggaacagccagaaggaggtgcttgaggggaccagagccgagctcgacaccgtgtgtcggcacaattatgaagtggcgtttagaggcattttacaaagacgagtcgagcctaccgttaccattagtcctagccgaacagaggctttgaaccaccacaacttgctggtgtgctctgtcaccgatttctaccctgggcagataaaggtacgatggtttagaaacgaccaggaggagaccgcgggggtggtgagtacacctttgatacggaacggtgactggacgttccaaattctggtgatgctggagatgacaccacagaggggcgatgtgtacacctgtcacgttgaacatccatctctccaatctccaatcaccgtggagtggagggcacaatctgagtcagctcaatccaagatgttaagcggcgtgggcgggtttgtcctgggactgatctttctgggcttaggattgatcataagacagcgctcgcagaaaggccctcagggcccaccgccggcgggactgctgcactag

SEQ ID NO: 193990 - DNA, 786 bp, synthetic construct
  misc_feature 1..786: note = Description of Artificial Sequence: Synthetic coding sequence
  source 1..786: mol_type = other DNA
atgagctggaagaaggccctgcggatccccggcggcctgcgggccgcaaccgtgactttgatgttaagtatgctatctacccctgtggcagaaggaagggatagtcccgaggatttcgtctatcagttcaagggaatgtgttactttactaacggcacagagcgcgtgaggctggtctcgcgttccatctataacagagaggagatcgtgagattcgatagcgatgtgggcgagttcagagcggtaacgttgctcgggctgcccgccgcggaatactggaattcccagaaagatatccttgagcggaaaagggccgcagtggaccgcgtgtgcagacacaattaccaactggagctccggacaacgctgcagaggagggtggagcctactgtgacgattagtccaagtcgcaccgaagccttgaatcaccacaacctcttggtgtgttcggtaaccgacttttatcccgcgcagataaaggtacggtggtttaggaatgaccaggaagaaaccgccggcgtggtatcgacacccctgatcaggaacggagattggaccttccaaatcctggttatgctggagatgactcctcagcgtggcgatgtgtatacttgtcacgtggagcacccgagcctgcagtcgccaatcacggtggaatggagagcccaatctgagagtgcccaaagcaaaatgctgtccggcattggcggttttgtgttgggcttgattttcctcgggctaggtctcatcatacaccatagaagtcagaaagggttgctgcactag

SEQ ID NO: 193991 - DNA, 786 bp, synthetic construct
  misc_feature 1..786: note = Description of Artificial Sequence: Synthetic coding sequence
  source 1..786: mol_type = other DNA
atgagctggaagaaggccctgcggatccccggcggcctgcgggccgcaactgttacgctgatgcttagtatgctctcaacgcccgttgccgagggaagagacagcccagaggatttcgtttaccagttcaaggggatgtgctatttcacaaacggcacagaaagggtgcggctcgtgagccgctccatatacaacagggaggagatcgtgagattcgacagtgatgtcggggaatttagagctgtgaccttgttgggactgcctgccgccgagtattggaatagccagaaggatatcctggaacgcaagcgagctgccgttgatcgggtttgccggcataattaccaattagaattaaggacgacgctccagaggcgggttgagcctactgtcaccatcagccccagcaggacagaagcactgaaccaccataacttgctggtctgctctgttaccgatttttatcctgcacagattaaagtgcggtggttcaggaacgatcaggaggagactgcgggcgttgttagtacccctctgatccgtaacggcgactggacatttcaaattctggtgatgttagaaatgacaccccagcgtggagatgtgtacacctgccacgtcgaacaccccagtctgcaatcgcctattacagtggaatggcgtgcccagtccgaatctgcccagtctaagatgctgtccggtattgggggctttgtgctgggcctgattttcctgggcctcgggctcattattcaccacagatcgcagaagggtctgctacattag

SEQ ID NO: 193992 - DNA, 810 bp, synthetic construct
  misc_feature 1..810: note = Description of Artificial Sequence: Synthetic coding sequence
  source 1..810: mol_type = other DNA
atgagctggaagaaggccctgcggatccccggcggcctgcgggccgcaaccgtgactctcatgctcgcaatgcttagtacccctgttgccgagggccgagattctcctgaagattttgtttatcaattcaaagccatgtgttattttactaatggaaccgagagagtgagatatgtgactcgctacatctataacagggaggaatacgctcgttttgatagcgacgtagaagtttaccgtgccgtcacaccactcggtcctccagatgcagagtactggaattcccagaaggaggtcctggagcgtacccgcgccgaacttgacaccgtgtgtaggcacaactatcagctcgagttaagaactaccctccagcggcgggtggaacctacagtgaccatttccccatctagaaccgaggcgctgaatcaccacaaccttctggtgtgctctgtaaccgatttttaccctgcccaaatcaaggtacgctggttccgcaacgaccaggaggagaccaccggtgtcgtttcaacaccgttaatccgaaacggggattggacttttcaaatcttagtaatgctggagatgactccacaacacggagatgtctacacatgtcatgtggagcacccttccctgcaaaatccgattaccgttgagtggcgcgctcaatctgagtctgcccagtcaaaaatgctctcaggcattggaggctttgtgctgggcctaattttcctaggcctgggactcattatacatcaccggagccagaaaggcccccaaggcccccctccagctggactgctccattag

SEQ ID NO: 193993 - DNA, 810 bp, synthetic construct
  misc_feature 1..810: note = Description of Artificial Sequence: Synthetic coding sequence
  source 1..810: mol_type = other DNA
atgagctggaagaaggccctgcggatccccggcggcctgcgggtggctacagttaccctcatgcttgccatgctgtccactccagtggccgagggtcgggactccccagaagactttgtgtatcagttcaagggaatgtgctatttcactaacggcacagagagagtaagattggtgacacgatacatttataacagagaagaatacgcacggtttgacagcgacgtgggcgtataccgggccgtgacccctttagggccccccgatgccgagtattggaacagtcaaaaggaagttctcgagagaacacgggccgagctcgacacagtatgtaggcataattatcagctcgagctgcgcaccaccctgcagaggcgggtggaacccactgttacaatttctccgagtcgaacagaggcgctaaaccatcacaacctgctggtctgctccgtgacggacttctatcccgctcaaatcaaagtccgctggttccgaaacgatcaggaggagaccaccggagtcgtgagcactccactgataaggaacggggactggacgttccagattctggtcatgttggagatgacccctcagcggggagacgtctatacgtgtcacgtggagcacccaagtcttcaaaaccctattattgtcgaatggagggcccagtcagagtcagcacaatcaaagatgctttcaggcatcggaggatttgtgctgggactcatttttctgggattggggttaatcattcaccacagaagtcagaaaggaccccaaggcccacctccagccggactcttgcattag

SEQ ID NO: 193994 - DNA, 675 bp, synthetic construct
  misc_feature 1..675: note = Description of Artificial Sequence: Synthetic coding sequence
  source 1..675: mol_type = other DNA
atgagctggaagaaggccctgcggatccccggcgacctgcgggtggcaaccgtgaccctaatgctggctatgctgtcttcgctgttagctgaggggcgagattctcccgaagacttcgtgttccagttcaaaggcatgtgctattttactaacggcactgagcgggtgcgcctcgtcaccaggtacatctataatcgggaggaatacgcccgctttgattccgacgtaggagtgtatcgcgcggtaacgccccaggggagaccagacgcggaatattggaattctcagaaagaggtgctggagggcacaagggcagaactcgacaccgtttgcaggcacaattatgaggtggcatttaggggaatcttgcagcggagagtggagcctaccgttacaatctccccctccagaactgaggccctgaatcatcataacttgttagtgtgctctgtgactgacttctacccaggccaaattaaggtgcggtggttccggaacgatcaggaggaaaccgcgggggtcgtgagcacccccttgattcgtaatggcgactggactttccagatccttgttatgttggagatgacaccccagagaggagatgtgtatacatgtcacgtggaacaccctagccttcagtctccaattaccgtggaatggcggcttctgcattag

SEQ ID NO: 193995 - DNA, 786 bp, synthetic construct
  misc_feature 1..786: note = Description of Artificial Sequence: Synthetic coding sequence
  source 1..786: mol_type = other DNA
atgagctggaagaaggccctgcggatccccggcgacctgcgggtggcaacagttacactgatgctggccatgctgtcaagcctgctagccgaaggacgagatagcccagaagactttgtgttccagttcaagggaatgtgttacttcacaaatggcactgagcgcgttaggctcgtgacccggtatatttataatagggaagagtatgcccggtttgactcagatgtgggagtctacagggccgttactccacaggggaggccagatgccgaatactggaatagtcagaaagaagtgctggaaggtacgagagctgaactagacactgtctgccgccataactacgaagttgcatttcgagggatactgcaaaggagagtggagccgactgtgaccattagtccaagccgtaccgaagctctgaatcatcataacctgctcgtctgtagcgtcacagatttctatccaggacaaatcaaggtcagatggttccgcaatgatcaagaggaaactgctggagtggtaagtacacctctgattagaaatggcgattggacgttccaaatcctggtcatgttagaaatgacccctcagagaggtgatgtctatacgtgccatgtggagcacccaagtttgcagagccccataacagtggaatggagagcccagagcgaaagcgcccagtccaagatgctaagcggtgtgggcggcttcgttttaggcctgatcttcctggggctgggactaatcataagacaacggtctcagaagggtctcttgcactag

SEQ ID NO: 193996 - DNA, 786 bp, synthetic construct
  misc_feature 1..786: note = Description of Artificial Sequence: Synthetic coding sequence
  source 1..786: mol_type = other DNA
atgagctggaagaaggccctgcggatccccggcggcctgcgggccgccacggtcacactcatgctggcaatgttgagtactccagtcgctgaaggccgggacagtcccgaagatttcgtctaccagtttaaggccatgtgctatttcacaaatggtacggagcgggtccggtatgtcaccagatacatttacaaccgagaggaatatgcacgtttcgatagcgacgtcgaagtgtatcgtgcggtgaccccattggggcctccagatgctgagtactggaactcccagaaggaggtattagaacgtactagggccgagttagatacagtgtgccgtcacaattatcagctcgaactgaggaccacactgcagaggcgggtagaaccaaccgttacgatctcccctagccgcaccgaggcattgaaccaccacaacctgttagtatgcagcgttaccgacttctatccagcacaaatcaaagtgaggtggttccgcaacgatcaggaggaaacaacaggcgttgtttccactcccctgattcgaaatggagactggactttccagatcctggtgatgctggagatgacaccccagcacggtgacgtgtacacctgtcacgttgaacatccatcgctgcagaatcccatcacagtggaatggagggcacagagcgaatcagcacagagtaaaatgctctctggtatcggcggctttgtgttgggcttgatattcctaggacttggattaattattcatcatcgctcacaaaagggcctcttgcattag

SEQ ID NO: 193997 - DNA, 675 bp, synthetic construct
  misc_feature 1..675: note = Description of Artificial Sequence: Synthetic coding sequence
  source 1..675: mol_type = other DNA
atgagctggaagaaggccctgcggatccccggcggcctgcgggccgccacagtaaccctcatgctcagcatgctctctacccctgtcgctgagggcagagattctcctgaggattttgtctaccagtttaaaggcatgtgttattttacaaatggcaccgagcgtgtcaggctcgtgtcccggtctatctacaaccgtgaagaaatagtcagattcgactccgacgtcggcgaattccgcgccgtgactctgctggggctgcctgccgccgagtactggaacagccagaaggatatcctcgagcgaaagcgggctgcagtggaccgggtttgcagacacaattatcagttagagcttaggactacattacagcgccgtgtggagcccaccgtaaccatctctccatcccgcacagaggccctgaatcaccacaacctgctcgtttgctctgttaccgatttctaccccgctcagataaaggtccggtggttccggaacgatcaggaggaaaccgccggagtggtgtcaacccctctgatcagaaatggcgactggactttccagattctggtgatgctggagatgaccccccagcggggtgatgtctacacctgtcacgtggaacaccccagtttgcagagcccaatcacagttgagtggcgcctgttgcactag

SEQ ID NO: 193998 - DNA, 786 bp, synthetic construct
  misc_feature 1..786: note = Description of Artificial Sequence: Synthetic coding sequence
  source 1..786: mol_type = other DNA
atgagctggaagaaggccctgcggatccccggcggcctgcgggccgccactgtgaccttgatgctagccatgctcagtaccccagtagcggaaggtcgcgacagtccggaggatttcgtctatcagtttaaagctatgtgttatttcacaaatggaaccgagagggtgagatatgtcacgagatatatctataatagggaagaatacgctcgcttcgattctgatgtagaagtatacagagccgttaccccactgggccccccagacgctgaatactggaacagccagaaggaagttctcgaacggacccgggctgaactggacacggtgtgccggcacaactaccagttagaactgcggacgactctgcagcgacgtgtggagccgaccgtgaccattagcccctcacggacggaagccctgaaccaccataatttgctggtgtgctctgtgaccgatttttatcccgcgcagatcaaagtgaggtggtttagaaatgatcaggaggaaaccaccggggtcgtgagcactcctctgatccggaatggggattggacattccaaatactggtcatgctcgagatgacgccacagcacggagatgtctacacctgccacgtcgagcaccctagcctccagaatcccattacagtggagtggcgggcacagtccgagagcgcacaaagtaagatgctaagcggcatcggcgggttcgtgctcggattaattttccttggactgggcctgattattcaccaccggtctcagaaggggctactgcattag

SEQ ID NO: 193999 - DNA, 786 bp, synthetic construct
  misc_feature 1..786: note = Description of Artificial Sequence: Synthetic coding sequence
  source 1..786: mol_type = other DNA
atgagctggaagaaggccctgcggatccccggcggcctgcgggtggccaccgtgactctgatgctggcgatgctgtccaccccggtggctgagggacgcgattcgccagaggatttcgtgtaccagttcaaggggatgtgctactttacgaatgggacagaacgagtccggggagtgacccggtacatatacaaccgtgaagagtacgcgaggtttgacagtgacgtgggggtgtatagagctgtgactcctttgggaccacctgccgccgaatactggaactcacagaaagaagtgctcgagcgcacccgagcagaactcgatactgtctgcaggcataattatcagttagagctcaggactacactacagagacgggttgagcccacagttactattagcccaagccggactgaagctctaaaccaccataatctcctggtatgtagcgttaccgatttctatcctgcacagatcaaggtgagatggttcaggaacgaccaggaagaaacgaccggggtggtgtccacacctctgatccgcaatggtgattggaccttccagattctggttatgctggagatgaccccccagcgcggtgatgtgtatacgtgccacgtggagcatccatccctgcagaatccaatcattgtagaatggagggcccaatcggagagcgcccagtccaaaatgcttagtggaatcgggggattcgtcctgggactcatcttccttggactgggtctaataatccaccaccgtagccagaaaggactgttgcattag

SEQ ID NO: 194000 - DNA, 675 bp, synthetic construct
  misc_feature 1..675: note = Description of Artificial Sequence: Synthetic coding sequence
  source 1..675: mol_type = other DNA
atgagctggaagaaggccctgcggatccccggcggcctgcgggccgctactgtcaccctcatgctgtctatgctcagtacacctgtggcagagggaagagatagtcctgaggattttgtgtaccagttcaaaggtatgtgttactttactaatggcaccgaaagggtgcggctcgtgtctagaagcatctacaacagagaagaaatagtcaggttcgactctgatgtcggtgaattccgagctgtcacgctgctcggcctgcctgctgcagaatactggaactcgcaaaaggacatcctggaacgtaagcgcgccgccgtcgaccgggtgtgcagacataactatcaactggaattgcgtaccaccctgcaaaggcgagtggaaccgacagttacaatctcccctagcagaactgaagctcttaatcatcacaacctgctcgtatgctctgtaacagatttctaccccgctcagataaaagtccgttggttccgtaacgggcaggaggagaccgccggagtggtgtccaccccgcttatacgcaacggcgactggactttccagattctagtgatgctggaaatgactccccagaggggcgatgtctatacctgtcatgtggagcacccgagcctccagagccctatcactgtggaatggcgtctcttacattag

SEQ ID NO: 194001 - DNA, 786 bp, synthetic construct
  misc_feature 1..786: note = Description of Artificial Sequence: Synthetic coding sequence
  source 1..786: mol_type = other DNA
atgagctggaagaaggccctgcggatccccggcggcctgcgggtggccacggtcactctgatgctcgcaatgctcagcacaccagttgccgagggacgggacagcccagaggatttcgtttatcaattcaaaggcatgtgttacttcacgaacggcaccgaacgcgtccgcctggtcaccagatacatctataatcgcgaggagtacgcccggttcgatagcgatgtaggggtgtatagagccgttacaccgctaggtccacccgacgcagagtactggaacagtcagaaagaggtattggagagaactagagctgaactggatactgtttgtcgacacaattatcagctggaactgcggaccacccttcaaaggcgagtggagcctacggtcaccatctccccttccaggactgaggctttaaaccatcacaatcttctcgtgtgttctgttacagacttttacccagcccagatcaaggtccgatggttcagaaacgaccaagaagagacaaccggtgttgtgagcactccattgatccggaacggagactggactttccagatcctcgttatgttggaaatgacaccacaacgcggagacgtctacacatgccacgtcgagcacccctcccttcagaatcccatcatcgtcgaatggcgagctcagtctgagagtgcccagtccaagatgcttagcggcatagggggctttgtcctgggtcttatttttctcggtctcggcctgatcatccatcataggagccaaaagggcctactccattag

SEQ ID NO: 194002 - DNA, 786 bp, synthetic construct
  misc_feature 1..786: note = Description of Artificial Sequence: Synthetic coding sequence
  source 1..786: mol_type = other DNA
atgagctggaagaaggccctgcggatccccggcggcctgcgggccgccaccgtcactttgatgctttcaatgctatccactcccgtggctgagggacgcgacagtcccgaggattttgtgtatcagttcaaggggatgtgctattttactaatggcacggaacgcgttagactagttagtagatccatttacaatcgcgaagagatcgtcaggttcgattctgatgtaggggagttccgggcagtgacactcctgggcctcccagcagcggagtattggaattcccagaaagatattctcgagcgaaagcgggcagccgttgatagagtgtgccgccacaattatcagctggagctgcggacaacactgcagaggagagtcgaacccacggtgaccattagtccatccagaaccgaagccctgaatcaccacaatctgctggtgtgttccgtgactgatttctatcccgcacagatcaaggtccggtggttccgcaatgggcaggaggagacagccggcgttgttagcactcccctgatacgtaacggcgattggacatttcagatcctggtcatgctcgagatgaccccgcagcggggtgatgtctacacatgccatgttgaacacccctcactgcagagtcctattacagtcgagtggcgggcccagtcggagtcagctcagagtaagatgttatctggaatcgggggtttcgtgctggggttgatcttcctgggccttgggcttattattcaccacagaagccagaagggcttgctacactag

SEQ ID NO: 194003 - DNA, 810 bp, synthetic construct
  misc_feature 1..810: note = Description of Artificial Sequence: Synthetic coding sequence
  source 1..810: mol_type = other DNA
atgagctggaagaaggccctgcggatccccggcggcctgcgggccgcgaccgtgacgctgatgctgtctatgctgtccactccagttgctgagggccgggactcacccgaggacttcgtctaccaatttaaaggcatgtgttatttcacaaatggaacggagcgcgtgagactggtgagcaggtcaatttacaatagagaggaaatcgtaagattcgattcagatgtcggggagtttcgagccgtcacactgctgggtctgcctgctgccgaatactggaactctcagaaggatattctggagcgtaaaagggcagctgttgacagggtgtgccggcacaattatcagctcgagctccgcacaacattacagcgcagagtagaacccacagtgacaatctcccctagtagaaccgaggctctcaatcaccataacctgctggtgtgctccgtgaccgatttctacccggctcagattaaggtccggtggttcagaaacggtcaagaggagaccgccggggtggtgtccacccctctgatccgtaacggagattggacctttcaaattcttgtgatgctggaaatgacaccacaaagaggagatgtgtatacctgccacgtggaacacccgagcttacagagcccaattacagtggaatggagggcccagtcggaatcggcccaaagcaagatgctgagcggaataggaggcttcgtcctgggtttaatcttccttgggctgggattaatcatccatcaccgctcacaaaagggaccccagggacccccacccgcaggactgctgcactag

SEQ ID NO: 194004 - DNA, 786 bp, synthetic construct
  misc_feature 1..786: note = Description of Artificial Sequence: Synthetic coding sequence
  source 1..786: mol_type = other DNA
atgagctggaagaaggccctgcggatccccggcggcctgcgggtggcaacagtcacccttatgctggcaatgctctcaacccccgtggcggagggccgggacagcccagaggatttcgtctatcagtttaagggcatgtgttatttcacaaatggaactgagcgtgtgcgtctggtcactaggtacatttacaatagagaggaatacgccagatttgattcagatgttggggtttacagagcggtgactccgttgggtcctccggatgcagagtattggaactcccaaaaggaggtcctggaaaggaccagggcagaactcgatacagtgtgtagacataattaccagcttgaattgcgcacgactctccagagaagggtcgagcccaccgtgaccatctccccttcaaggactgaggcgctgaaccatcataacctgctcgtttgcagcgtgaccgatttttacccagctcagattaaggtccggtggttcagaaatgaccaggaggaaaccaccggagtggtctctacgcccttgatccggaatggcgactggacatttcagattctggttatgcttgagatgactcctcagaggggggacgtgtacacttgccatgtggagcatccctccttgcagaatcccatcattgtcgagtggagggctcagagcgagagcgcacagagtaaaatgctgtccggcatcggcggtttcgtcttagggcttatcttcctgggcctggggctgataatccaccaccgcagccaaaagggtttattacactag

SEQ ID NO: 194005 - DNA, 675 bp, synthetic construct
  misc_feature 1..675: note = Description of Artificial Sequence: Synthetic coding sequence
  source 1..675: mol_type = other DNA
atgagctggaagaaggccctgcggatccccggcggcctgcgggccgcaacagtaactcttatgctcgcaatgctctcaacacccgttgccgaaggtagagactccccggaggactttgtgtatcaatttaaagcaatgtgttatttcacgaacggcacagaacgagttcggtatgttactcgctacatttacaacagagaggagtacgctagattcgactcggacgttgaggtgtatagagctgttacaccgcttggccctcccgacgcagaatactggaactctcagaaggaggtgctggagaggacccgggctgaactcgacacagtgtgccggcataactatcagctggaacttcggaccactctacagagaagggtagaacccacagtcaccatttctccatctaggacagaggcgctcaaccaccataatctactcgtgtgctctgtgaccgatttttacccagcacagataaaggttcggtggtttaggaacgatcaagaagagactacaggcgtggtgtcaacaccccttattagaaatggtgattggactttccaaatcctggtgatgctcgaaatgacgcctcaacacggagacgtctatacttgccatgtcgagcaccccagtctgcagaatccgatcacagtcgaatggcgactgctccactag

SEQ ID NO: 194006 - DNA, 786 bp, synthetic construct
  misc_feature 1..786: note = Description of Artificial Sequence: Synthetic coding sequence
  source 1..786: mol_type = other DNA
atgagctggaagaaggccctgcggatccccggcggcctgcgggccgccacagtaactctgatgctgagcatgttgtctacgccagtggctgagggacgggattctcctgaggatttcgtgtaccagtttaaaggaatgtgttactttaccaacggtactgagcgggtgcggctggtgtccagaagtatttataatagagaagagatcgtgcgcttcgactcagacgttggcgagtttagggccgtcaccctcctgggcctcccggctgcggaatactggaatagccagaaggatatactggaacgaaagagagctgccgtcgatcgggtctgtcggcacaattatcaactagaactacggacaaccctccagcggcgggtggagcccacagtcaccatctctcccagcaggaccgaagctcttaaccaccataatctgttggtttgctcagtgactgacttttatccagcacaaatcaaggtgcggtggtttagaaatggccaggaagagacagctggcgtcgtcagcacgcccctgattagaaacggggactggacatttcagatcctagtgatgttagaaatgacgcctcaacgaggcgatgtgtacacttgtcatgtggagcatccttcactgcagagccctattacggtggagtggagggcacagtccgagagcgcccaatccaaaatgttaagcggaatcggaggattcgtgctcggcctgatttttctaggtttgggactgatcattcaccatagatcacaaaaaggcctgctccactag

SEQ ID NO: 194007 - DNA, 405 bp, synthetic construct
  misc_feature 1..405: note = Description of Artificial Sequence: Synthetic coding sequence
  source 1..405: mol_type = other DNA
atgagctggaagaaggccctgcggatccccggcggcctgcgggccgcaacggtaactctcatgctcagcatgctgagtacgccagtagctgagggacgtgacagccctgtggagcccaccgtgaccatttcgccatctcgcacggaggccctgaatcaccacaatctgctggtgtgttccgtgacggacttttaccccgcccaaattaaggttcgttggtttagaaacggccaggaagaaacggcaggcgtggtgtcgacccccctgatcaggaatggagattggacattccagatcctggttatgcttgagatgaccccccagaggggagatgtttacacttgtcacgtcgaacacccctcgcttcagagccccattacagtggaatggagacttctccactag

SEQ ID NO: 194008 - DNA, 405 bp, synthetic construct
  misc_feature 1..405: note = Description of Artificial Sequence: Synthetic coding sequence
  source 1..405: mol_type = other DNA
atgagctggaagaaggccctgcggatccccggcggcctgcgggtggcaaccgttaccttaatgctcgccatgctgtctacacccgtcgctgagggccgggactctccagtcgagccgactgttacaatcagtccttcacgcacagaagctctgaaccaccacaatctactggtgtgctctgtgaccgacttctatcctgctcagataaaggtgagatggtttaggaacgaccaggaggagacgactggcgtcgtgagtaccccactcatacgcaacggcgactggacgttccagattcttgtaatgctggagatgaccccccaaaggggtgacgtgtacacctgtcatgttgagcatccgtcattacagaatccgatcattgtggagtggcgattgctgcattag

SEQ ID NO: 194009 - DNA, 435 bp, synthetic construct
  misc_feature 1..435: note = Description of Artificial Sequence: Synthetic coding sequence
  source 1..435: mol_type = other DNA
atgagctggaagaaggccctgcggatccccggcggcctgcgggtggctaccgttacacctcttggacccccagatgccgaatattggaactcccagaaggaggtgttagaacggacaagagccgaactagatacggtctgccgtcataattaccagcttgagttgagaactactcttcagaggcgcgtggaacccacagtgacaatctcccctagcaggactgaggccctgaatcaccacaaccttttggtctgttccgtgacagatttctatcccgctcaaataaaagtcaggtggttccggaacgaccaggaagaaactacaggggtcgtgagtacacctcttatccgcaacggggattggacgttccagattctcgtgatgctcgagatgacacctcaaagaggtgacgtgtatacctgccacgttgaatag

SEQ ID NO: 194010 - DNA, 405 bp, synthetic construct
  misc_feature 1..405: note = Description of Artificial Sequence: Synthetic coding sequence
  source 1..405: mol_type = other DNA
atgagctggaagaaggccctgcggatccccggcggcctgcgggccgctacagttacactgatgctggcaatgctgtccactccagtggcagagggcagagatagtcctgtcgagcctactgtgactatctctccatcaagaacagaggctttgaatcaccacaacttgttggtctgttctgtcacggacttttatccagcccagatcaaggttcgttggtttcgtaacgaccaggaagaaaccaccggtgtcgtgtccaccccattgatccggaatggggattggaccttccagattctggtcatgttagaaatgacgccccagcacggcgacgtttatacctgtcacgttgaacatccaagccttcagaatcccattacagttgagtggcgattactgcattag

SEQ ID NO: 194011 - DNA, 786 bp, synthetic construct
  misc_feature 1..786: note = Description of Artificial Sequence: Synthetic coding sequence
  source 1..786: mol_type = other DNA
atgagctggaagaaggccctgcggatccccggcgacctgcgggtggcaactgtgacactgatgctggccatgcttagttctttgctggccgagggtcgtgacagcccagaagatttcgtgtttcagtttaaaggaatgtgttatttcacaaatgggacagagcgagtgcgactggtaacccggtacatttataatcgcgaggaatacgcccgttttgattcggatgtcggtgtatatcgagccgtgacaccacagggtagacccgatgcagagtattggaatagccagaaagaagtccttgagggcactcgggccgagctggacactgtgtgccgccacaactatgaggtcgccttccgcggtatcctgcagcgacgggtggagccgactgtgacaatctctccttcgcggacggaggccctcaatcatcacaatctattagtgtgctcagttacagacttctatcccggacagatcaaggtgagatggtttagaaatgatcaagaggaaaccgcaggagtggtgtctaccccgttgattcgtaatggcgactggaccttccaaattctggtaatgttagagatgacgccacaacgaggagacgtttacacgtgccacgtggagcaccccagtctgcagagtcctattaccgtagagtggcgggcccaatccgaatcagcacagtccaagatgctctccggtgttggcgggttcgtactcggcctaatctttcttgggctgggacttatcattcgccaacggtcccagaagggccttctccactag

SEQ ID NO: 194012 - DNA, 675 bp, synthetic construct
  misc_feature 1..675: note = Description of Artificial Sequence: Synthetic coding sequence
  source 1..675: mol_type = other DNA
atgagctggaagaaggccctgcggatccccggcggcctgcgggtggccaccgtcaccttgatgctcgccatgctgtccacaccggtggcggaaggccgcgactctcccgaggactttgtgtatcagtttaaaggcatgtgctacttcaccaatgggacagagagggtacgattggtgaccagatatatttataatcgcgaagagtatgcaaggtttgactctgacgtgggggtgtatcgggcggtcacgcccctggggccgcccgacgcggagtactggaattcccagaaagaagttctggaacgaacaagagcagaactcgatacagtctgccgccataattatcagctggagttgcgaaccacacttcaacggagggtggagcccacggtgactatttcccctagccgaaccgaagccttgaaccaccataatctgctggtgtgcagcgtgacagacttttaccccgcccaaatcaaggtgcgttggtttaggaacgatcaggaggaaaccacgggcgtggtatctacccctctcatccggaacggtgactggacattccagatactcgtgatgctggaaatgacgccacagcgcggtgatgtatatacatgccacgtggagcatcccagtctgcaaaatcccatcattgtggagtggcggctgttacattag

SEQ ID NO: 194013 - DNA, 435 bp, synthetic construct
  misc_feature 1..435: note = Description of Artificial Sequence: Synthetic coding sequence
  source 1..435: mol_type = other DNA
atgagctggaagaaggccctgcggatccccggcgacctgcgggtggccaccgtgacaccgcagggtcggcccgatgccgagtattggaatagtcagaaagaggtcctggagggaacgcgagctgagttagatacagtgtgcagacacaactatgaagtggccttccgtggaattctacaacggcgcgtcgaaccaacagtaacaatttcaccatcccggacggaagcactgaatcaccacaatctgctggtctgttcggttaccgatttctaccccggacagatcaaagtaagatggttccgcaacgatcaggaagagaccgcaggagtggtcagtacgcctcttattaggaacggcgactggacctttcagatacttgtgatgctggagatgactccccagcggggtgacgtttacacttgccatgtggagtag

SEQ ID NO: 194014 - DNA, 435 bp, synthetic construct
  misc_feature 1..435: note = Description of Artificial Sequence: Synthetic coding sequence
  source 1..435: mol_type = other DNA
atgagctggaagaaggccctgcggatccccggcggcctgcgggccgctacagttaccctgctcggcttaccagcagcagagtattggaacagtcagaaagatatcttagaacgcaaaagggcggctgtggacagggtctgccggcacaactatcaactggaattgcgtactaccctgcagagaagggtggagccaaccgtcactatctctccctccaggaccgaggccttgaatcatcataacctcctggtgtgctctgtcaccgatttctacccagcccagataaaggttcgatggttcagaaacggccaggaggagacagctggagtagtgagcacccctctgatccggaacggagattggacgttccaaattctggtcatgctggagatgacgccccagagaggcgatgtttatacctgccacgtggagtag

SEQ ID NO: 194015 - DNA, 435 bp, synthetic construct
  misc_feature 1..435: note = Description of Artificial Sequence: Synthetic coding sequence
  source 1..435: mol_type = other DNA
atgagctggaagaaggccctgcggatccccggcggcctgcgggccgcaactgtcacccctctcggtccccccgacgcagagtactggaacagccaaaaggaggtgctcgaacgaaccagggcagaattagataccgtgtgtagacacaactatcagctggagctccgtacaactctacagcggcgtgtagagccgaccgtgaccatctccccaagccggacggaagctttgaatcatcacaatcttctcgtgtgttccgtgacagacttctacccagcccaaatcaaggtgcgctggtttaggaacgatcaagaagagacgacaggcgtcgtgtccacgccactgatccgaaatggtgattggacgtttcaaattctggtcatgctggagatgacaccccagcacggggatgtgtacacgtgtcacgtggaatag

SEQ ID NO: 194016 - DNA, 411 bp, synthetic construct
  misc_feature 1..411: note = Description of Artificial Sequence: Synthetic coding sequence
  source 1..411: mol_type = other DNA
atgagctggaagaaggccctgcggatccccggcggcctgcgggccgcaacggtcaccctcatgctgtcaatgctgtctacccccgtggcagaggggcgggattcccccgaagactttgtgtaccaattcaaaggaatgtgctactttacgaatggtacagagcgcgttcggctggtgtcgagatccatttacaaccgggaagaaatcgtgcgttttgattcagacgtcggtgagtttagagctgtgacactcctggggctgcctgcagccgagtattggaactcccagaaggacatactcgagcgaaagagagctgctgtggatcgggtctgtcggcacaattaccagctggagctcaggacaacgctgcaaagaaggggtatggtaacaggcccctccagatcctggtag

SEQ ID NO: 194017 - DNA, 411 bp, synthetic construct
  misc_feature 1..411: note = Description of Artificial Sequence: Synthetic coding sequence
  source 1..411: mol_type = other DNA
atgagctggaagaaggccctgcggatccccggcggcctgcgggccgcaactgtgaccctcatgttggcgatgttatccactcccgtcgccgaaggacgcgactcccccgaggattttgtttaccagttcaaggccatgtgttattttactaacgggacagaaagagtgagatacgtgacgagatatatttacaacagggaagagtacgccagatttgattccgacgtggaagtataccgcgccgtcacccccttgggcccacctgatgccgagtactggaatagtcaaaaagaggtgctcgagaggacaagagcagagctggacaccgtttgccgtcataactatcaactcgagttgaggacaactttacagcggcggggcactgtcacaggccctagcaggagttggtag

SEQ ID NO: 194018 - DNA, 411 bp, synthetic construct
  misc_feature 1..411: note = Description of Artificial Sequence: Synthetic coding sequence
  source 1..411: mol_type = other DNA
atgagctggaagaaggccctgcggatccccggcgacctgcgggtggccacagtgacgctgatgctggccatgctgagcagcctcctggcggaaggcagagactccccggaggacttcgtttttcagtttaagggcatgtgctattttacgaatgggactgaaagagtgaggctagttacacgatacatctacaacagagaggagtacgcaaggttcgacagcgatgtaggggtataccgggccgtcaccccccaagggcgccccgacgccgaatactggaacagccaaaaggaggtgctcgagggcaccagagccgagttagacaccgtgtgtagacacaattacgaggtggcgttcagaggtatccttcagagaagggggatggtcaccggcctgagccggagttggtag

SEQ ID NO: 194019 - DNA, 717 bp, synthetic construct
  misc_feature 1..717: note = Description of Artificial Sequence: Synthetic coding sequence
  source 1..717: mol_type = other DNA
atgctgagcacccccgtggccgagggccgggacagccccgaggacttcgtctaccagttcaaaggaatgtgttacttcacaaatgggacagagcgagtgagacttgtgagccggtccatatacaacagggaagagatagtgaggttcgatagcgatgttggtgaattcagggccgtgacccttctcggattgcccgctgccgagtactggaattctcagaaagatatactcgagcgtaaacgcgccgctgtagaccgcgtctgtcgccacaactaccagcttgagttgagaaccacgctccagagacgggtggagcccacagtcacaatctccccctcacgaacggaagccctgaatcaccataatctccttgtgtgttctgtgacagatttctacccagcgcagattaaagtgcgttggtttcgcaatggacaagaagagacagccggtgtggtatctactccactcatccgtaacggtgactggacatttcagatcctcgtgatgctggagatgactccccagagaggcgacgtttatacctgtcatgttgaacaccccagtttgcaatctcccataacagtggagtggcgggcccagagcgagagtgctcagtctaagatgttatccggtatcgggggttttgttttaggactgatctttctcggcctcggcctaatcattcatcacagaagccagaagggactcctccactag

SEQ ID NO: 194020 - DNA, 543 bp, synthetic construct
  misc_feature 1..543: note = Description of Artificial Sequence: Synthetic coding sequence
  source 1..543: mol_type = other DNA
atgtgctacttcaccaacggcaccgagcgggtgcggggcgtgacccgctatatctacaatcgagaggagtacgccagatttgatagcgatgtgggtgtttaccgggcggtgaccccactgggacctccggctgcagaatattggaattcacagaaggaggtgctcgaaaggactcgtgccgagctggatacagtgtgtagacacaactaccagctcgagctcaggactactctacaaaggcgagtggagcctacagtgacaatcagcccaagtcggacggaagctttaaatcatcacaacctgctggtgtgttcggtgaccgacttctacccagctcagattaaggtgcggtggttcaggaacgaccaggaggagaccacgggtgtcgtaagtactcccctgattcgaaacggagattggacatttcagatcctggtcatgctcgaaatgaccccccagaggggagatgtgtatacatgccacgtagagcaccccagtttacagaatcccatcatcgttgagtggcgtatggacgaattctag

SEQ ID NO: 194021 - DNA, 717 bp, synthetic construct
  misc_feature 1..717: note = Description of Artificial Sequence: Synthetic coding sequence
  source 1..717: mol_type = other DNA
atgctgagcacccccgtggccgagggccgggacagccccgaggacttcgtataccagtttaaggggatgtgctacttcacaaacggaacagagcgggtgcgcctggtgtcacgatcgatttacaaccgcgaggaaatagtccgttttgattctgacgtgggtgaattccgggccgttaccttgctcggacttccagccgctgaatactggaacagccagaaagacatccttgaacggaagcgggcagccgtggatagagtatgtaggcacaactaccagctcgaattgcggaccacactgcaaaggagagtggaacccaccgtcacaatctcaccaagccggaccgaagccctaaatcaccataatctgctggtttgcagcgtgacagatttttatcctgcacagataaaagtgcggtggtttagaaatgatcaagaagaaaccgccggagtggtgtctactcctttgatcaggaacggcgactggactttccagattctggttatgctcgagatgactcctcaacggggggatgtgtatacttgccacgtcgagcaccctagcctgcagtcaccaataactgtagaatggcgtgctcagagcgagagtgcccagtctaagatgctcagcggcataggcggatttgtgctcggactgatttttcttggtctggggttaatcattcaccatagaagccaaaagggattgctccattag

SEQ ID NO: 194022 - DNA, 744 bp, synthetic construct
  misc_feature 1..744: note = Description of Artificial Sequence: Synthetic coding sequence
  source 1..744: mol_type = other DNA
atgctgagcacccccgtggccgagggccgggacagccccgaggactttgtgtatcagtttaaagggatgtgttactttacgaacggtaccgaacgcgttagaggcgtgacccggtatatttacaatcgcgaggagtatgctagattcgacagcgacgtaggcgtgtacagggcagtgacgcccctagggccccccgccgctgagtattggaatagccagaaggaagtattggagagaacgcgagcagaactcgacactgtgtgcagacataactaccaactcgagttgcggaccactttacagcgcagagtggaacccaccgtgacaattagcccgtcgcgcaccgaggcgctgaatcatcacaatcttcttgtgtgtagcgtcacagacttctatccggctcaaatcaaggtccggtggtttagaaacgatcaggaggagacgacaggagtggtatctacaccgctgattaggaacggcgactggacttttcagattctcgtgatgctggagatgacaccacagaggggtgatgtctacacatgtcatgtggaacacccctccctgcagaaccccattattgtggagtggcgtgcacaatctgagagtgcccagtcaaagatgctcagcggcattggaggctttgtactcggactgattttcctgggcttgggtctgatcatccatcacagatctcagaaagcccttccccagggacctcctccagctggcgatataagttag

SEQ ID NO: 194023 - DNA, 717 bp, synthetic construct
  misc_feature 1..717: note = Description of Artificial Sequence: Synthetic coding sequence
  source 1..717: mol_type = other DNA
atgctgagcacccccgtggccgagggccgggacagccccgaggacttcgtgtaccagtttaaagggatgtgttattttaccaatggcaccgagagggtgagactggtgtctcgcagcatctacaaccgagaggaaatcgtgaggtttgacagtgatgtaggcgaatttagagccgtaaccctactgggtctgcccgcggccgaatattggaatagccagaaggacattctagaacgtaagcgagccgccgtggatcgtgtgtgtaggcacaattatcaattggagctccggaccacactgcaaaggagagtagagcctaccgtaacaatatctccgtctcgaacagaggcactaaatcatcacaatctattggtttgctccgtgacggacttctaccccgcacaaattaaagtccgctggtttcgaaacgaccaggaagagaccgccggcgtggtttccacacctctaatccgcaatggtgactggacgtttcagattttagtgatgctcgaaatgaccccgcagcggggcgatgtgtacacatgtcatgtggaacacccttctttacagagcccaatcacagtggaatggcgcgcccagtcagaatctgcgcagagtaagatgttgtctggtatcggcggctttgtattggggctgatattcctgggtctggggctgattatccatcaccgcagtcagaagggactgctgcactag

SEQ ID NO: 194024 - DNA, 801 bp, synthetic construct
  misc_feature 1..801: note = Description of Artificial Sequence: Synthetic coding sequence
  source 1..801: mol_type = other DNA
atggtgtgcctgcggctgcccggcggcagctgcatggccgtgctgaccgttactcttatggtcttgagttcaccactggccctcgccggagacaccaggccacggtttctcgagtacagcacgtccgagtgccactttttcaatgggacagagagggttaggtacttggatagatactttcacaaccaggaggaaaacgtccggtttgacagcgacgtaggtgagtttagagctgtaactgagctgggcagaccagatgcggaatattggaattcccaaaaagatctcctggagcagaaacgcggccgcgtggataactattgtcggcacaactacggagtagtggaatcttttaccgtacagcgaagggtgcacccgaaggttaccgtgtatcccagcaagacacaacccctgcagcatcataatctgcttgtctgttcagtgagcgggttttacccgggaagcatagaagtgagatggttccgcaatggacaggaggagaaaactggagtcgtgagcaccggccttatccacaacggcgactggacattccagacactggtgatgctggagaccgtgcctcgtagcggtgaagtgtatacgtgccaagtggagcatccgtccgttacgagcccactcaccgtcgagtggcgcgccaggtcagagtcagctcagtctaaaatgctcagtggagtgggcggcttcgtgctgggtcttctattcctgggcgccggcctatttatctactttagaaaccagaaggggcattcagggctgcagcctagaggcttcttgtcttag

SEQ ID NO: 194025 - DNA, 801 bp, synthetic construct
  misc_feature 1..801: note = Description of Artificial Sequence: Synthetic coding sequence
  source 1..801: mol_type = other DNA
atggtgtgcctgaagctgcccggcggcagctgcatgaccgccctgacagtgaccctcatggtcttaagttcgcccctcgcccttagcggcgacacccggccgaggttcctttggcagccaaagcgtgaatgtcattttttcaacggcaccgaacgcgttcgattcctggataggtacttctacaatcaggaagaaagcgtcagatttgacagcgacgttggggaatttcgggcagtgacagagctcggtaggcccgatgctgaatactggaatagccagaaagatatactcgaacaggctagggctgcagttgatacgtactgtagacataactatggtgtcgtggagagcttcacggttcagcgacgggtgcagcctaaggtaactgtatacccatcaaaaacccaaccactgcagcatcacaacttgctggtctgctccgttagcggtttctatcctggaagcatcgaggtgagatggttcctcaatggccaggaggagaaagccggtatggtgagcacaggactgattcagaacggagactggaccttccagactctggtgatgctcgagaccgtgccccgatctggagaagtctacacttgtcaagtggaacaccctagcgtaacaagtccgctaacagtagagtggagagccaggtctgagtcagcccagtccaagatgctgtctggtgtcggaggtttcgtgctgggactgctcttcctgggcgccggtctgttcatctacttcaggaaccaaaaggggcattcgggcctgcaaccgaccggtttcttgtcgtag

SEQ ID NO: 194026 - DNA, 801 bp, synthetic construct
  misc_feature 1..801: note = Description of Artificial Sequence: Synthetic coding sequence
  source 1..801: mol_type = other DNA
atggtgtgcctgcggctgcccggcggcagctgcatggccgtgctgactgttacacttatggtactatcttccccactcgctctagctggggatactaggccaagattcctcgagtattcaaccagtgaatgccacttttttaatggcacggagagagttaggtacctggacaggtactttcataaccaggaagaaaacgtcagatttgactccgatgtcggggagttccgcgctgttacggagctgggtcggcccgatgcagagtattggaacagtcagaaagatctgctcgaacagaaacgtggacgggtcgataactattgcaggcataactacggtgtagtcgagagttttacagtgcaaaggcgcgtgcacccaaaggttacagtgtacccctccaagacacaacctctgcaacaccacaatcttttggtctgttccgtgagcggcttttaccccggatccatcgaagttcgctggttcagaaatgggcaggaagagaagaccggggtggtctctacagggttgatccacaacggggattggacgttccagaccctggtgatgctcgagaccgtccctcggtctggcgaagtctacacttgccaggtagagcatcctagcgttacctctccactgactgtcgaatggcgagccagatctgagtcagctcagagcaagatgctgagtggagtcggaggcttcgtcctggggctgctctttctgggtgcgggactttttatatatttcaggaatcagaaggggcattcagggctgcagcctaggggcttcctatcatag

SEQ ID NO: 194027 - DNA, 753 bp, synthetic construct
  misc_feature 1..753: note = Description of Artificial Sequence: Synthetic coding sequence
  source 1..753: mol_type = other DNA
ctgctgaagctgacccgggacttcccccagcggcacgagaagtaccagtcttgggccggcacctttcatttgtgcctgaagaagaacaagtacccagatagtagatcgaccttcattaagcacgcaggctcttacctgaagcggggcgaattcctttcaatccatactgcaatcacctgctttttcctgcagatctcagcgagatttctggagcaagtgaagcatgagtgtcatttttttaatggcactgagagagttcgcttcctggaccgctacttttatcatcaagaggaatatgtgcgttttgatagcgacgtgggggaatatagggctgtgacagagctgggtcgcccggacgcagagtactggaattcccagaaggatctcctcgagcaaagacgggctgaggtggatacatactgccgtcataattatggagtggttgagagctttacagttcagcgaagggtttacccagaggtgacagtgtaccccgccaagactcagcccttacagcaccacaacctcttagtgtgctccgtaaatgggttttatcccggcagtatcgaagtgcggtggttccgtaacgggcaagaagaaaaaactggggtggtttctacaggtctgatccaaaacggggattggacctttcagaccttggtgatgctggagacagtgccacgtagcggtgaggtgtatacttgccaggtcgaacacccaagtctcacatctccactgaccgtggagtggtag

SEQ ID NO: 194028 - DNA, 756 bp, synthetic construct
  misc_feature 1..756: note = Description of Artificial Sequence: Synthetic coding sequence
  source 1..756: mol_type = other DNA
tgactgctgaagctgacccgggacttcccccagcggcacgagaagtaccagtcttgggctggcactttccacctttgcttgaaaaaaaataagtatcctgactccaggagcacatttattaaacatgccggttcgtacctgaagcggggcgagttcttggcaatccatacagctatcacgtgcttcttccgacagatcagtgctcgtttccttgagtacagtacatctgaatgtcatttttttaatggcacagagagggtgcgctatttagaccgttatttccataatcaggaggaaaatgtaaggttcgactcagacgtcggtgaattcagggctgtgacagagctgggccgacccgacgccgaatattggaattcacaaaaagaccttcttgaacagaaaagaggtagagtggacaattattgtaggcataattatggggtcgttgaatccttcacagtgcagcgacgggtacaccccaaagtcacagtctacccgtccaagacacagcctcttcagcaccataacttgctggtgtgttcagtatctggtttctatcctggcagcattgaagtccgatggttccgcaatggtcaagaggagaagaccggggttgtctccactggactgatacacaacggcgattggacatttcaaacactggttatgttggagaccgtgccccggagtggagaagtgtacacctgccaggttgaacaccccagtgtcacctcaccattgaccgttgagtggtag

SEQ ID NO: 194029 - DNA, 801 bp, synthetic construct
  misc_feature 1..801: note = Description of Artificial Sequence: Synthetic coding sequence
  source 1..801: mol_type = other DNA
atggtgtgcctgaagttccccggcggcagctgcatggccgccctgaccgtgaccctcatggtgctgtcatcccctctggccctggccggggatactaggcctcgctttctggaacaggttaaacacgagtgtcactttttcaacggtactgagagggtgcgctttttagaccggtacttctatcatcaggaggaatacgttcgttttgatagcgatgttggagaatatcgagctgtgacagaactgggcagaccagatgccgagtactggaactcccagaaagaccttttggaacagaggcgcgctgaggtggacacctactgtaggcataattacggggtcgtggagtcctttacagtgcagcgtcgggtgtacccagaagtcacagtatatcctgctaagacccagcccctacaacaccacaatctgctcgtctgctctgttaacggattctatcccggttcaatcgaagtgcgatggtttcggaatggccaagaagagaaaacaggcgtggtatctaccgggctcattcagaatggcgactggacgttccaaaccctcgtgatgctcgagactgttccaaggtcaggagaggtgtacacctgccaggtagagcatccttccttgacttctccacttacggtagaatggagagcaaggtccgagagcgcccagagcaagatgctttccggtgtgggggggttcgttctgggactgctgtttctgggagctgggttatttatctactttagaaaccaaaagggccactcgggactacaaccgacagggtttctgagttag

SEQ ID NO: 194030 - DNA, 756 bp, synthetic construct
  misc_feature 1..756: note = Description of Artificial Sequence: Synthetic coding sequence
  source 1..756: mol_type = other DNA
tgactgctgaagctgacccgggacttcccccagcggcacgagaagtaccagtcttgggctggcactttccacctgtgcctgaaaaagaataagtatcctgatagccggagcacctttattaagcatgcagggtcttacttaaagcgcggcgaatttctggccattcatacggccataacatgcttctttcgtcaaatttcggcgagattcttagaatactcaaccagcgagtgccacttttttaatggcacggaaagagtccgatatctggaccgctacttccacaatcaggaagaaaatgtgcgctttgactcagatgtaggagaattccgggccgttactgagctgggccgtccagatgctgagtattggaactctcagaaagacttgcttgaacagaaaagagggagggtggataattattgtcggcacaattacggcgtcgtcgagtcttttacagtacagagaagggtccatccaaaggtgaccgtctatccaagtaagacacaacccctgcagcaccacaatctcttagtctgctctgtcagtggattctatcctggatcaatcgaggtcagatggttcagaaacggacaggaagaaaaaaccggcgtcgtgagcaccgggttaatccacaatggggactggacctttcagaccctggtgatgctggaaaccgtccctagatccggcgaagtatacacttgccaagttgaacatccatccgtgacctcacccttaaccgtggagtggtag

SEQ ID NO: 194031 - DNA, 753 bp, synthetic construct
  misc_feature 1..753: note = Description of Artificial Sequence: Synthetic coding sequence
  source 1..753: mol_type = other DNA
tgactgctgaagctgacccgggacttcccccagcggcacgagaagtaccagtcgtgggccggcactttccacttgtgtcttaaaaagaacaaataccccgacagcaggtctacttttatcaagcatgcaggctcctacttaaagaggggggaattcctgagcattcacaccgccattacatgctttttccttcagatctctgcccgcttcctgtggcaaggcaagtataagtgtcacttctttaacgggactgagagggtgcagttcctcgaaagactgttttacaaccaggaagagttcgttagatttgacagcgatgtgggcgagtatcgcgcggttactgaactgggcaggcccgtggcagagagctggaactcccagaaggatattttggaggatagacggggacaagtggacactgtctgcagacataattacggcgtgggggaatcctttacagtgcagcgaagagtccatcctgaagtaaccgtctaccccgctaaaacccaaccactgcagcaccataatttgctcgtgtgttctgtctccggtttctatccaggttcgatcgaggtgagatggtttagaaatggtcaagaggagaaagccggtgtagtcagcacaggactaatccagaatggcgattggacctttcagacccttgtcatgctcgagacagtcccccgatccggtgaagtgtacacatgccaggtggaacacccatccgtgatgagtccactaaccgtggagtag

SEQ ID NO: 194032 - DNA, 801 bp, synthetic construct
  misc_feature 1..801: note = Description of Artificial Sequence: Synthetic coding sequence
  source 1..801: mol_type = other DNA
atggtgtgcctgaagctgcccggcggcagctgcatggccgccctgactgtgacactgatggtgctgtcatccccactggccctcgccggagacacacagccgcgctttctgtggcagggtaagtacaagtgtcacttcttcaacgggaccgagcgagtgcaatttctcgaacgcctgttttacaaccaggaggagttcgtgaggtttgatagtgatgtgggagagtatcgagccgtgaccgaactggggcgccccgttgctgaaagctggaattcacaaaaggacatccttgaagataggcgtggccaggttgataccgtgtgtcgacacaactatggggtgggtgaaagctttaccgtccagcggagagtacacccagaagtaaccgtctacccagccaagactcagcccctgcagcaccacaacctgctcgtgtgtagtgtcagtggcttttacccagggagcatcgaggttcggtggttccgaaatggtcaggaagagaaagccggtgttgtgtcaaccggtttgattcagaatggcgattggacatttcagactctcgtgatgctcgaaaccgtgcctcgcagcggggaagtatatacttgccaggtcgagcaccctagcgtcatgagtccactcactgtagagtggagagccaggagcgagtccgcgcagtccaagatgctgagcggtgtcggaggatttgtcttgggactcttgtttttaggggccggtttattcatttattttagaaatcagaaggggcatagcggtcttcagcctactggcttcttatcctag

SEQ ID NO: 194033 - DNA, 801 bp, synthetic construct
  misc_feature 1..801: note = Description of Artificial Sequence: Synthetic coding sequence
  source 1..801: mol_type = other DNA
atggtgtgcctgaagctgcccggcggcagctgcatggccgccctgacggtcactttaatggtgttgagctctcccctggctctggccggagatacacagccgcgctttctctggcagggaaaatataagtgccacttcttcaatgggacagagcgcgtgcagttcctggaacgccttttctacaaccaggaagaattcgtgcgctttgactcagacgttggagaatacagagcagtgaccgagctcggaagaccagtggcagagagttggaactcccaaaaagatatactcgaggatcgcaggggccaggtggatactgtttgcaggcacaactacggtgtgggcgagtccttcactgtacagagacgcgtacaccctgaggtgacagtctacccggcaaaaacccagccactgcaacatcacaatcttctggtctgcagtgtgtccggcttttacccaggttcaattgaggtgcgttggtttcgcaacggacaagaagaaaaagccggcgtagtttccaccgggttgatccaaaatggcgactggacgttccaaactcttgttatgctcgagactgtgcccaggtcaggggaagtgtacacatgtcaggtcgaacacccttctgtgatgagcccattgacggtggagtggagggctaggtctgagagcgctcaatccaaaatgctcagtggagtggggggttttgtgctcggactactcttcctcggcgcaggcctgtttatttatttcaggaaccagaaaggccactctggtcttcagccaaccggcttcctcagctag

SEQ ID NO: 194034 - DNA, 810 bp, synthetic construct
  misc_feature 1..810: note = Description of Artificial Sequence: Synthetic coding sequence
  source 1..810: mol_type = other DNA
atgagctggaagaaggccctgcggatccccggcggcctgcgggtggccacagtcacactgatgctggctatgttgagtaccccagttgcagaagggcgtgactctccagaggattttgtgtaccaatttaaaggaatgtgctatttcaccaatgggacagagcgtgtgaggggggtgactagatacatatataacagagaggagtatgctcgattcgactccgatgtgggtgtttatagagctgttacccctctgggcccccctgctgccgagtattggaactctcagaaagaggtgttggaaagaacaagggctgaactggacacagtttgtcggcacaactatcagctcgagctgcgcacaacactacaacgccgggtgtatccagaggtcacagtgtatccggcgaagactcaacctctgcaacaccataacctgctggtgtgctctgtgaatggcttctatcctggatccatcgaagttcgctggttccggaacggacaggaggaaaaaaccggagtggtgtctacaggcctgatccagaatggtgattggacctttcagacgctggtgatgttggagactgtgcctcgctctggcgaagtgtacacatgtcaggtggaacacccctcacttaccagcccattgactgtggaatggagggcacgtagcgagtcagcccagtctaagatgctcagcggtgttggtggttttgtgttgggacttcttttcctgggagccggtctttttatatacttccggaatcagaaaggccatagcggactacagcccaccggatttctgtcctag

SEQ ID NO: 194035 - DNA, 792 bp, synthetic construct
  misc_feature 1..792: note = Description of Artificial Sequence: Synthetic coding sequence
  source 1..792: mol_type = other DNA
atggtgtgcctgaagttccccggcggcagctgcatggccgccctgactgtgacactaatggtgctgtcctcacctctcgcactagctggtgacaccaggcctagattcctggagcaggtcaagcacgaatgtcacttctttaatggcacagagcgagtgcgatttctggatagatacttctaccatcaggaggagtacgttcgctttgacagtgacgttggcgagtatagagcagtcacagaactgggtcggcccgatgctgagtattggaacagtcagaaggatctgctcgaacagcgtagggccgaggttgacacttattgccgacataattacggcgtcgtggagagctttaccgtacagcgccgcgtgtaccccgaagtgaccgtctacccggctaaaacccagcccctgcagcaccacaatttactggtctgtagcgtcaatggtttctatccgggaagcattgaagtcagatggtttcgaaacggacaagaggaaaaaacgggagtagtgagcaccggcctgatccaaaacggcgactggacatttcaaacattagtgatgcttgagaccgtccctcgctcgggtgaggtgtacacatgccaggtggaacacccaagtctgacatcacccctaactgtggaatggcgggccaggtctgagagtgcacagtctaagatgctcagcggcgttggtggctttgtcctaggactgctcttcttgggtgctggcttgttcatttatttccgcaatcaaaaaggacacagtggcttgcagccaacaggatag

SEQ ID NO: 194036 - DNA, 141 bp, synthetic construct
  misc_feature 1..141: note = Description of Artificial Sequence: Synthetic coding sequence
  source 1..141: mol_type = other DNA
cacagcggcctgcagcccaccggcaacaccttcagcagcagcctgcgcaacaggtttgggggccaggcacagcatgcttgtaacccttccacgctgggtggtcggggagggcggatcatgcggattccagaacttaaatag

SEQ ID NO: 194037 - DNA, 891 bp, synthetic construct
  misc_feature 1..891: note = Description of Artificial Sequence: Synthetic coding sequence
  source 1..891: mol_type = other DNA
atggtgtgcctgaagttccccggcggcagctgcatggccgccctgactgtgactctgatggtgctctcttcccccttggcactggcgggtgacaccagaccacgttttttagagcaggtcaagcacgaatgccacttttttaatggtaccgagcgcgtgcgcttcttagaccgctacttctatcaccaggaggagtatgtaagatttgattctgacgtgggtgagtacagggccgtgaccgagctgggccgcccagacgcagagtattggaacagccaaaaggatctcttggagcaacgccgtgctgaagtggacacctattgcaggcacaactatggcgtggtggagtccttcaccgtccagcggcgggtgtacccggaagttaccgtttaccctgcaaagacccagcctctgcagcaccacaatctcctggtgtgcagcgtcaatggcttctaccctggatcaatcgaggtccgctggttcaggaatggccaggaggaaaagactggtgtagtatcaactggacttatccagaatggcgactggaccttccagaccctggtgatgctggaaacagtaccacgaagtggcgaagtttatacgtgtcaggtggagcacccctccttgacttccccactgaccgtcgagtggagagccaggtctgagtccgctcagtcaaaaatgctctctggggtggggggatttgttctgggcctgctttttctgggagctggactttttatctacttccgcaaccagaagggacactctggtctgcagccaactggcaatactttctcctcttctctgcgtaacagattcggaggacaggcgcaatggttaaccccagtgatacctgcgctctgggaggccgaggcgggggagagctag

SEQ ID NO: 194038 - DNA, 801 bp, synthetic construct
  misc_feature 1..801: note = Description of Artificial Sequence: Synthetic coding sequence
  source 1..801: mol_type = other DNA
atggtgtgcctgaagctgcccggcggcagcagcctggccgccctgaccgtgaccctgatggttttatcttctcgcctcgctttcgctggtgataccagacctaggtttctggagctgctgaagtccgagtgccatttcttcaacgggacagagcgagtgaggtttctcgagcgacacttccataaccaggaagaatatgccaggttcgactccgacgttggagagtaccgcgcagtacgggaactgggcagacccgacgcggagtactggaactcccagaaggaccttctcgagcagaagcggggacaggtagataactattgtagacacaactacggcgtcggagagtcctttaccgtccagagacgagtgcatccccaggtgacagtctatccagccaagacccagcccttgcaacaccacaatctcttggtgtgttctgtctcggggttctaccccgggtctattgaggtccgttggtttcggaatgggcaagaagagaaagcgggcgtggtctccaccggccttatccagaacggcgattggacttttcagacactggtcatgttggagactgtgccccgaagtggtgaagtgtacacctgccaggtagagcaccctagtgtgacgagccccctgactgtggaatggagtgcccggagcgaaagcgcccagagtaaaatgttatcaggagtgggtggatttgttcttgggctgctatttctgggcgctggactcttcatttattttcgaaatcagaaggggcattctggattgcaaccaactggctttctaagctag

SEQ ID NO: 194039 - DNA, 801 bp, synthetic construct
  misc_feature 1..801: note = Description of Artificial Sequence: Synthetic coding sequence
  source 1..801: mol_type = other DNA
atggtgtgcctgaagctgcccggcggcagcagcctggccgccctgacagtgactttaatggtcctctcgagccgtctggcatttgccggtgatacaagaccgaggtttctcgagctgcgtaagagcgaatgccacttctttaacggcaccgagcgcgtgagataccttgacaggtattttcataatcaggaggagttcctgagatttgattctgacgtaggcgagtaccgtgctgtgacagagttgggcagacctgtggcggagagctggaacagccagaaggatctgctggaacaaaaaagggggcgagtggacaattactgtaggcacaactacggcgtcggggaaagctttacagtgcagcgcagggtacacccgcaggtcacagtttacccagctaagacacaaccactgcagcatcataatctcttggtttgcagcgtgtcggggttctaccccgggtctatcgaagtcaggtggttccgaaatggtcaggaggagaaggccggcgtggtctcgacaggactgatccagaatggtgactggacttttcagacactcgttatgctggagaccgtccccaggtccggggaagtatacacctgccaggtggaacatccatctgtcacaagcgctctgaccgtcgaatggcgcgctcggtccgagtcagcccagagtaagatgctgagtggcgttggtgggttcgtactgggtctgctcttcttaggagccggcctgtttatctatttccgcaaccagaaaggccactctggcctccagcctaccggatttctttcatag

SEQ ID NO: 194040 - DNA, 801 bp, synthetic construct
  misc_feature 1..801: note = Description of Artificial Sequence: Synthetic coding sequence
  source 1..801: mol_type = other DNA
atggtgtgcctgaagctgcccggcggcagcagcctggccgccctgacagtcacgctcatggtcctgagtagtcgcctcgcctttgcaggggatacaagacctagattcttggaacttttgaaaagcgaatgtcactttttcaatggtacagagagagttcggtttcttgaacggcactttcacaaccaggaagaatacgcaaggttcgactccgatgtgggtgagtatagagccgtgcgggagctgggccgacctgacgccgaatactggaactcccaaaaagacctgttagaacagaagcgcggacaggtggacaactactgtagacacaactacggagtgggagagagcttcacagttcaacgcagagtacatccccaggttacagtgtatccagctaagacccaaccattgcagcaccacaacctgctggtctgttctgtgtctgggttttatcccggctcaattgaggtgagatggttccgaaacggccaagaggagaaagccggggtggtgagcacgggattgattcagaacggggactggacgtttcaaaccttggtaatgctcgagacagttcctcggtccggggaggtgtatacatgtcaggtcgagcatccatccgtcacgtcacccctcacagtggaatggtccgcccggtccgagtcagctcagtccaaaatgctgtccggggtgggcgggttcgtgctaggattgcttttcctaggcgctggactctttatctacttccgcaaccaaaagggccacagcgggctacagcctaccgggtttctatcatag

SEQ ID NO: 194041 - DNA, 801 bp, synthetic construct
  misc_feature 1..801: note = Description of Artificial Sequence: Synthetic coding sequence
  source 1..801: mol_type = other DNA
atggtgtgcctgaagctgcccggcggcagctacatggccaagctgaccgtgacactcatggtgctctccagcccgctggctctggctggcgataccaggccaaggttcttgcagcaggataaatacgagtgccatttcttcaacggtaccgaaagagtgcgctttctacaccgcgatatttataatcaggaggaggacctgagatttgattccgatgtgggtgaatatcgagctgtgacggagctaggccgacccgacgcagagtattggaattcccagaaggattttctggaggatcgcagagctgctgtcgacacatattgcaggcataattacggcgtgggggagagttttactgtgcaacgcagggtcgagcccaaggtcactgtgtatcctgcaagaacccagactctgcagcatcataacctgctggtctgcagtgtcaatggcttctacccaggcagtatagaggtgcgttggttcagaaactctcaggaagaaaaggccggagttgtgtccacaggcttaattcagaatggcgattggacctttcagaccctggtgatgttggaaactgtgccacgctcaggggaggtgtacacctgtcaggtggaacacccgagcgtgactagccccctgaccgtggagtggcgtgcccagagcgagagtgcacagtccaagatgctctctggggttggcgggttcgtgctcggccttctgtttctcggagccgggctatttatatactttaagaaccagaaaggtcattctggactacaccctaccggtttggtctcctag

SEQ ID NO: 194042 - DNA, 891 bp, synthetic construct
  misc_feature 1..891: note = Description of Artificial Sequence: Synthetic coding sequence
  source 1..891: mol_type = other DNA
atgggcgagctgatggccttcctgctgcccctgatcatcgtgctgatggttaagcactctgatagccggacccactcactccgctactttcgtctaggagtgtccgatccaattcacggtgtccctgaattcatcagcgtcggatacgtggactcgcaccctatcactacatacgacagtgtcacgcgacagaaggagcccagagcaccctggatggctgagaatctggcccctgatcactgggaaagatacacacagctcctaagaggatggcagcagatgtttaaagtcgaacttaaaaggctgcagcggcactacaaccactccgataacgttgcccacaccattaagcaagcctgggaggctaatcaacatgagctcctttaccagaagaattggctggaggaagaatgcatcgcttggctcaagagatttttggagtacggcaaagacactctgcagagaacagagccacctctggtccgagtgaaccggaaggagacatttcctggcgtgacagcgctgttttgcaaggcccatggcttctatcccccagaaatctacatgacgtggatgaaaaacggagaagagatagtgcaggagattgattacggtgatattcttccgtccggggatggcacttatcaagcctgggcgagcatcgaattggacccacagtcaagtaatctgtattcctgccatgtggagcattgcggggtacatatggtgctccaggtgccgcaggaaagtgaaacaatccccctagtgatgaaggctgtgtccggcagtatagtgctagtgatagtgttagccggagtgggcgtattggtatggcgccgccgcccaagggaacagaatggcgctatatatctgcccacacctgaccgttag

SEQ ID NO: 194043 - DNA, 1026 bp, synthetic construct
  misc_feature 1..1026: note = Description of Artificial Sequence: Synthetic coding sequence
  source 1..1026: mol_type = other DNA
atgggcgagctgatggccttcctgctgcccctgatcatcgtgctgatggtcaaacacagcgactctcgcacacattctctccgatattttcgcctgggggtctccgatcccatccatggggtgccagaatttatttccgtggggtacgttgatagtcaccctattaccacgtacgatagcgtcacacgtcagaaggagcctagggccccctggatggctgagaatctggcccccgaccactgggagcggtatactcaattgcttcgagggtggcagcagatgttcaaggtggaacttaaaaggctgcaaagacactacaatcattccggctcacatacataccaacggatgataggttgtgaactgctagaagacggcagtacaacgggtttccttcagtatgcatatgacggccaggacttcctgatcttcaacaaggataccctttcctggctggccgtggacaacgtggcccacactatcaaacaggcctgggaggcaaatcagcacgaactgctctatcagaagaactggctggaagaggaatgcatagcctggcttaagaggtttctggagtacgggaaagataccctgcagaggacagaacctcctctggtgcgtgttaatcggaaagagacattccctggggtcaccgcactcttctgtaaagcacatggtttttacccacccgaaatctatatgacttggatgaagaatggagaggagatcgtgcaggaaatcgactatggagatattcttcccagcggggacggcacttaccaggcatgggccagtattgaactcgacccccaaagtagcaatctgtatagctgtcatgtggaacactgcggagttcatatggttctgcaggtgcctcaagagtccgagaccatcccactggttatgaaggctgtcagtggcagtatcgtcttggtgattgtgttagccggtgttggcgtactggtttggcgtagaagaccacgggaacaaaacggcgccatctacctgcccacgcctgatcgctag

SEQ ID NO: 194044 - DNA, 645 bp, synthetic construct
  misc_feature 1..645: note = Description of Artificial Sequence: Synthetic coding sequence
  source 1..645: mol_type = other DNA
atgggcgagctgatggccttcctgctgcccctgatcatcgtgctgatggtgaaacattccgacagtaggacgcacagtctgaggtacttccggctgggcgtgtccgaccctatccacggggtgccagagtttatcagtgtgggttatgtcgactctcatcctattaccacgtacgattcagtgacccggcagaaagaaccccgagctccttggatggctgaaaatctggcccccgaccactgggaacgttatactcagctgctcagaggatggcagcaaatgttcaaagttgagctgaagcgactgcagcgacactacaaccattccgggtcccatacctatcaacgtatgataggctgcgagctgttagaggacggaagcaccacaggatttctgcagtacgcttacgacggacaggatttcctgatctttaacaaggatacactgtcgtggctggccgtcgacaacgtggcccacacaatcaaacaggcgtgggaagcaaaccagcacgaattgctatatcagaaaaattggctggaagaggagtgtattgcatggctgaaacgattcctggaatatgggaaggatactctacagcggacagagcaaaatggggcaatctatctgcctacgcccgacaggtag

SEQ ID NO: 194045 - DNA, 792 bp, synthetic construct
  misc_feature 1..792: note = Description of Artificial Sequence: Synthetic coding sequence
  source 1..792: mol_type = other DNA
atgtgggagctgcggagcgccagcttctggcgggccatcttcgccgagttctttgctaccctgttttatgtctttttcggtttaggctctagcctccgctgggctcctggccctctccatgtcctccaagtggccatggctttcggcctcgctctggcgacgctcgtgcagtccgtgggccatattagtggggcacacgttaatcccgcagtaacattcgcctttcttgttggaagccagatgtcgttactgagagcattttgctatatggccgcacagctgttgggagctgtggcaggcgccgccgtgctgtactcagtaacccctccagccgtccgcggcaatttggcgttaaacaccctacaccccgcagtgagcgtgggacaggccactactgtcgagatcttcctcacgctgcaatttgttctgtgcatttttgcaacctacgatgaacggaggaatggacagctgggaagtgtggctctggctgtaggattctcactcgcactcggacatctgtttgggatgtactacacaggcgctggcatgaaccccgcccgatcttttgcccccgccatattaacgggcaattttactaaccattgggtctactgggtgggtccgataatcggtggtgggcttggcagtctgctgtatgactttcttttgtttccgagactgaagtctatttccgaaaggctgagtgtcttgaaaggggcgaagccagatgtatccaacggccagccagaagtgacaggtgagcccgtcgagctcaatacacaggcgctctag

SEQ ID NO: 194046 - DNA, 2682 bp, synthetic construct
  misc_feature 1..2682: note = Description of Artificial Sequence: Synthetic coding sequence
  source 1..2682: mol_type = other DNA
atggccaccgaggagttcatcatccggatccccccctaccactacattcacgtcctggatcaaaattcaaatgtttcaagagtggaggtggggccaaagacctacatccgacaggataacgaaagggtgctctttgcacctatgagaatggttaccgtgccccctcgccattactgcaccgtggccaacccagtcagccgggacgcccaggggctggtcctattcgacgtgaccgggcaggtgcggctgcgccatgcagaccttgagattcggctcgcccaagacccctttcccctttacccaggtgaggtgctggaaaaggatataaccccactgcaggtggtgctgcccaacactgctttgcacctgaaggccctgctcgacttcgaagataaggatggcgataaagtagtggctggagacgaatggctgttcgagggacccggtacttatatcccaaggaaagaggtcgaagtcgttgagataatccaggccaccataataagacaaaatcaagccctgcgtttgagggctcgaaaagaatgctgggatcgtgacggaaaagagcgcgtgacgggtgaagaatggttagtgacaaccgtgggggcctacttgcccgccgtgttcgaggaagtactggacctggtggacgctgtgattcttactgaaaagaccgccctgcacctacgtgcccgacgaaattttagagatttcaggggcgtatcccgtaggaccggggaagaatggctggtaacggtgcaagacaccgaagctcatgtgccagatgtgcacgaagaagtcctgggagtcgtgccaataacaaccttagggccacataattactgcgtgattctcgatcccgtcggtcctgatgggaagaaccaattaggacagaaaagggtggtaaagggagaaaaatcattctttctccaaccgggggaacaactcgagcagggcattcaggacgtgtatgtgctgagcgagcagcaggggctgctgctgcgagcccttcagcccttagaggagggcgaggacgaggaaaaagtgtcacaccaagccggtgaccactggctcattagaggacctctcgagtacgtacccagcgccaaggtggaggtggtcgaggagagacaagcaatcccgttggacgaaaatgaaggcatttacgtccaagacgtgaagacaggtaaggtgagggccgtgatcggatctacatacatgttgacccaggacgaagtgctctgggagaaggaactgccccccggcgtagaagaattacttaataaggggcaagatcctttagccgatcgaggcgaaaaggacaccgccaaatcattacagcctctcgccccccgaaacaaaacccgtgtcgtctcttatcgggtaccccataacgccgccgtgcaggtgtatgactatagggagaagcgtgcccgggttgttttcggacccgaactggtgtccctgggtcctgaggagcaattcaccgttttaagcctgtccgcaggacgccctaagcgtccacatgctagaagagccctatgtctgctcttggggcccgattttttcacggacgtgattacgatcgaaaccgccgaccacgcccggctgcagctgcagcttgcctataattggcactttgaagtgaatgatcgtaaagatccacaggaaacagctaaacttttcagcgtgcctgattttgtgggagacgcttgtaaggcgatcgcttcccgggtccggggtgcagtggcctctgtaactttcgatgatttccacaagaattccgccagaattatcaggactgcggtgtttgggttcgaaaccagcgaggctaaaggcccagatggaatggctctacctaggccaagagaccaagcagtcttccctcagaacggcctggtggtgtcttcagtggacgtgcagtctgtggagcctgtggaccagcgtacacgcgacgcactccagagaagcgtccagctggccatcgagataaccaccaattctcaagaagcggcagctaaacatgaagcccagagactcgaacaggaggcccgcggaagactggagcgtcagaagatcctggatcagtccgaagccgaaaaggccaggaaggagcttctcgagctggaagccttatccatggccgtggagtctacgggtactgctaaagccgaagccgaatctagagctgaagcagcgaggatagagggtgaaggatccgtgctccaggctaaacttaaggcacaagctcttgctattgagactgaggctgaattacagcgggtgcaaaaggtgcgtgaacttgagctggtgtacgccagagctcaactggagttggaggtttctaaggctcagcagcttgcagaggtggaggtaaaaaagtttaaacagatgactgaggcaattgggccgagtactatccgggatctcgcagtggctggccctgaaatgcaagtaaagttgttacagtcactcggactgaaatctactctgatcacagatggatcgactcccattaacctgttcaacacagccttcggtctgctggggatgggtcctgagggccaacccctgggccggcgggtcgcctctggacctagcccgggagaaggaatctccccccagtctgcccaggcaccccaggcgcccggagacaaccacgttgtaccagtcctgcgctag

SEQ ID NO: 194047 - DNA, 2682 bp, synthetic construct
  misc_feature 1..2682: note = Description of Artificial Sequence: Synthetic coding sequence
  source 1..2682: mol_type = other DNA
atggccaccgaggagttcatcatccggatccccccctaccactacatccatgtcttggaccagaatagtaacgtctcaagggtggaagttgggcctaagacatatatcagacaagacaacgaaagggtgctgtttgcccccatgaggatggtcacagtgccccctaggcactactgcacagttgcgaatccagtcagtcgggatgcccaaggcctggtcttgtttgacgttactgggcaagtgcggttacggcatgccgacctggaaattcgcttggctcaggatccttttccactttaccctggcgaagtcctcgaaaaagatattacccctcttcaggtagtgcttcccaacactgcgcttcatttgaaggccttgctggattttgaggataaagatggcgataaggtggtggctggggatgaatggttgttcgaggggcccggaacttatattccccgcaaagaagtggaggtggtggagattatccaagctactattatccgccagaatcaggccttgagattacgtgcccgcaaagagtgctgggaccgtgatggtaaagagcgcgtgacgggggaagagtggctggtcacgacggtgggagcctaccttccagctgttttcgaagaagttctggacctggtcgatgccgtcatcttaactgaaaaaacggctctgcaccttcgggcccgtaggaatttcagagactttcggggtgtctcgcgtcgtacgggtgaggaatggctggtgaccgtgcaggacaccgaggctcacgtgcccgacgtgcacgaagaggttttaggcgtggtgcccatcacaaccctaggaccacataactactgcgtaattcttgatccagtgggccccgatggtaaaaatcagctaggccagaaaagggtcgtcaagggggagaagtctttttttctccagcctggagaacagctcgagcagggcatccaagacgtgtacgtactgtccgaacaacagggactcctgctgcgggccctgcaacccctagaagagggtgaagatgaggagaaggtgtcccatcaagccggggatcactggcttatcagagggccactcgaatacgtgccttctgctaaggtcgaggtcgttgaggaaagacaagcaattccattggacgaaaacgaggggatttacgtgcaggacgttaaaactggcaaggtgcgtgcagtcattggctccacatatatgctcacccaggacgaggtgctctgggagaaagagctgcctccaggcgtggaagaactgctgaataaaggtcaggatccccttgctgataggggagagaaggatactgctaagagcttacagccactggcgcccaggaataagacgcgtgtggtgagctatcgggtcccgcataacgcggctgtacaggtctatgattaccgggagaaaagagcgcgagtggtgttcgggcctgaactcgtctctttgggccctgaggaacaattcaccgtcctgagtctatcagcgggcagaccaaaacgcccacacgcgcggcgtgccttgtgcctacttctgggtccggactttttcaccgacgtcatcaccatcgagaccgcggatcacgcccgcctacagctgcagctggcttataactggcatttcgaagtgaatgacaggaaagacccacaggaaacagcaaagttattttcggtgcccgattttgtcggagatgcctgtaaggcaatcgctagtagggtcaggggagctgtggctagcgttacatttgatgattttcacaagaacagcgctcggatcattagaaccgcagtgtttggcttcgaaaccagtgaagctaaggggccagatggaatggctctgcctaggcctcgagatcaggcagtattcccccagaatggactggttgtctcaagcgtggatgttcagtcagtggagccagtcgaccagcgcactagggatgctcttcaacgcagtgtccagctggccattgagatcaccactaatagccaggaggctgcggctaaacacgaggcccagcgcctggagcaggaggctcggggccgcctcgagcgacagaagatcctcgaccagagcgaggcagagaaggcgcgcaaggagttattggaactggaggccctctcgatggcggtggagtcgactgggacagctaaggccgaagccgagtctagggctgaggctgctcgtatcgagggagagggaagcgtgctgcaggccaagctgaaggcgcaggccctggcgatagagaccgaggccgagcttcagcgcgtgcagaaggtccgagaactggagctcgtgtacgcccgcgcccagctggagcttgaagtctctaaggcgcagcagctggccgaagtagaggtcaaaaaattcaaacagatgaccgaagcaatcggcccatccacaattagggacttagctgtggccggacctgaaatgcaggtcaagctgcttcagtctctgggtttgaaaagtacactgataacagacggttccacccccataaatttatttaacacagccttcggcctccttggaatgggtcctgaaggccagcccttgggacgccgtgtcgcctctggaccctcacccggcgaagggatctcaccacagtctgcgcaggcaccccaggcccccggggacaaccacgttgtccccgttctccgctag

SEQ ID NO: 194048 - DNA, 480 bp, synthetic construct
  misc_feature 1..480: note = Description of Artificial Sequence: Synthetic coding sequence
  source 1..480: mol_type = other DNA
atgtgctggacccggaccgccacctgccccgtgtggcggagcggccagagacctacatcggggaggacaatgcgaggtagcgggtttggcggtaggagacacccctacggcaaagactcaccagcacctcccggaagtgctgaactacctggactacagggctcagtgccacctcactggggaggtgtggcaggcaacagcgccggacacagagggccacgagctaggtgtcccagaggtggggcaggcggatgtgctcaccatcaccccggacctccgcaactgcttcgggactcacggccctgccgtactggctggcaggagtcagcaggcgctgaagcacgcgggcaggggcgggaagtcttctttccccccgcacggagggcagcggggactaggcatccggggtgcgtgtgtgctgtgggtgccgctggcgctgccgcggaggggcccgccgcccctggcggcggaggaggttag

SEQ ID NO: 194049 - DNA, 1251 bp, synthetic construct
  misc_feature 1..1251: note = Description of Artificial Sequence: Synthetic coding sequence
  source 1..1251: mol_type = other DNA
atgagcaccaagcagatcacctgccggtacttcatgcacggcgtgtgtcgcgaaggatctcagtgtctcttttcacatgacctggccaatagtaagccaagcacgatctgtaagtactatcagaagggatactgcgcctacgggacccgctgtagatacgatcacactcgaccctcagccgctgctggtggtgcagtcgggacaatggcccattccgtgcctagccctgcgtttcactcccctcaccccccttcagaggtgacagcaagcattgttaagactaactctcacgaacctgggaagagggagaagcgcactctggtcctgcgcgatcgaaacctatccggcatggctgagaggaagacccagcctagcatggtatccaatcccggctcatgctctgatccgcagccatcaccagaaatgaaaccccatagctatctggatgctatcaggagtggactggacgatgtagaggcttcatcatcttacagcaacgagcagcagctgtgcccatatgccgccgctggcgagtgtagattcggcgacgcctgtgtctatctgcacggcgaggtgtgtgaaatttgccggctgcaggtgctgcatccattcgatcccgaacagcgtaaggcccatgagaagatttgtatgttgacatttgagcacgagatggagaaagcgttcgcctttcaagctagtcaggataaagtatgcagcatctgtatggaggtcattctcgaaaaggcgtccgccagcgaaaggcgctttggaatactgagcaactgcaaccatacatattgcttgagttgtatcaggcagtggcgctgtgcaaagcaattcgagaacccaatcataaagagctgcccggaatgcagagtcattagtgaatttgtaattcctagcgtgtactgggttgaggatcagaataaaaagaatgaactgatagaagcattcaaacaaggaatgggcaaaaaggcatgtaaatattttgagcagggaaagggaacctgcccttttgggagtaaatgtttgtataggcatgcctatcccgatggacgcctcgccgagcctgaaaagcccaggaagcagctgagcagccaggggacagtgcgatttttcaatagtgttaggctgtgggatttcatcgagaacagagagtctcgccatgtgcctaataatgaagacgtggacatgactgagctaggagacctttttatgcatctgtcaggagtggagagttccgagccttag

SEQ ID NO: 194050 - DNA, 1524 bp, synthetic construct
  misc_feature 1..1524: note = Description of Artificial Sequence: Synthetic coding sequence
  source 1..1524: mol_type = other DNA
atggaggagcccgccgcccccagcgaggcccacgaggccgccggcgcacaggcgggcgccgaagccgcaagagagggagtgtcgggccccgaccttcctgtgtgtgaacccagtggggagtcagcagcacccgactcagctcttccacatgccgctagaggctgggccccgtttcccgttgctcccgttcccgctcatttgcggcgaggcggactgcggccggcacctgctagcggtgggggggcatggcctagtcccctgccatcacgatcctccggtatctggactaaacagattatttgtcgctattatattcacgggcagtgcaaggaaggggagaattgtcgctactcccatgatctgtctggccgaaagatggccacagagggcggagtgagtccacccggcgcctccgcaggcggcggcccctctaccgccgcccatatcgagcctccaacacaggaagtcgccgaagcgccaccggctgccagtagcttgtcattacccgttatcggctccgccgctgagcggggcttctttgaagccgagagggataacgccgaccgcggagccgcagggggcgccggtgttgaatcctgggcggacgcgatagaattcgttccaggacagccataccgggggagatgggttgcctcggccccagaggctccgcttcagagttcggagactgagcgcaagcagatggctgtgggaagtggcctcagattttgctactacgcgagccggggagtgtgttttagaggagaatcctgcatgtacttgcacggcgatatttgcgacatgtgtggcttacagactctacatcctatggacgctgctcaacgggaagaacacatgcgggcgtgcattgaggcccacgaaaaagatatggaactgagcttcgccgtgcaacgcggaatggacaaggtctgcggtatctgtatggaggtcgtctacgaaaaggctaatcctaatgatcgcagattcggaattttgagtaattgtaatcattccttttgtattcgctgcattcgtaggtggagatctgcgaggcaattcgagaatcgaatcgtgaagtcatgcccacagtgtcgggttacctctgagcttgttattccatcggaattttgggtcgaggaggaagaggagaagcagaagctcatccagcagtacaaggaggccatgtctaataaggcctgtcggtatttcgctgaagggaggggtaactgtccattcggtgatacatgtttctataagcacgagtatcctgagggctggggcgatgaaccccctggccccggcgggggcagctttagcgcctactggcatcagctggtcgagcctgttaggatgggagagggcaacatgctgtacaaaagcatcaagaaagagctcgttgtcctacgtttggcctcactgctgttcaagcggttcctgagcctgcgcgacgaacttccgttctccgaggatcagtgggaccttctccactacgagctggaggagtattttaacctgattctctag

SEQ ID NO: 194051 - DNA, 462 bp, synthetic construct
  misc_feature 1..462: note = Description of Artificial Sequence: Synthetic coding sequence
  source 1..462: mol_type = other DNA
atggcccccgccgccgccaccggcggcagcaccctgcccagcggcttttccgtgttcactaccctgcctgatcttctattcatctttgagtttatttttggcgggctggtctggattctggtggcctccagtctggtgccttggccactggttcagggttgggtcatgtttgtcagcgttttttgcttcgttgcgacgactacactaatcatcctctatataatcggtgctcacgggggtgagacatcctgggtgacccttgacgcagcctaccactgtacggccgctcttttttacctgtccgcttctgtactggaagccctagcaactatcaccatgcaggatgggtttacctataggcactatcacgagaacattgccgcggtggttttcagctatatcgccacactgctatacgtggtccacgccgtgttttcgcttatcagatggaagtcctcctag

SEQ ID NO: 194052 - DNA, 168 bp, synthetic construct
  misc_feature 1..168: note = Description of Artificial Sequence: Synthetic coding sequence
  source 1..168: mol_type = other DNA
atggcccccgccgccgccaccggcggcagcaccctgcccagcggcttctccgtgtttacaacacttcccgaccttcttttcatatttgagttcgttttttcttacatcgcaactcttctctacgtagtgcacgcagtgttctccctcatccggtggaaatcttcttag

SEQ ID NO: 194053 - DNA, 336 bp, synthetic construct
  misc_feature 1..336: note = Description of Artificial Sequence: Synthetic coding sequence
  source 1..336: mol_type = other DNA
atggcccccgccgccgccaccggcggcagcaccctgcccagcggcttttcagtctttacaacgctaccagatctcttgtttatttttgagttcatattcggcggcttggtgtggattcttgtggccagctccctagttccttggcctctggtgcaggggtgggtgatgttcgtgtcagtgttttgctttgtggccacaacaactttaatcatcctctatataattggagcacacggcggtgagactagctgggtgaccctggtgttcagctatattgcaactctgctgtatgtagtgcacgcagtcttttcattaatccgctggaaatccagctag

SEQ ID NO: 194054 - DNA, 294 bp, synthetic construct
  misc_feature 1..294: note = Description of Artificial Sequence: Synthetic coding sequence
  source 1..294: mol_type = other DNA
atggcccccgccgccgccaccggcggcagcaccctgcccagcggcttctccgtttttactactcttcccgacttgttgttcattttcgaatttgatgctgcctaccactgcactgccgccctcttctatctgagtgctagcgtgttagaagctctggctactataactatgcaagatggttttacctataggcattaccacgagaatatcgcagccgtcgtattttcctacatcgcgacactcttatacgtagtgcatgcagtattctcccttattcgttggaagtcttcctag

SEQ ID NO: 194055 - DNA, 462 bp, synthetic construct
  misc_feature 1..462: note = Description of Artificial Sequence: Synthetic coding sequence
  source 1..462: mol_type = other DNA
atggccagccccgacccccccgccaccagctacgcccccagcgacgtaccatccggcgtggcgctgttccttacaatcccgttcgcgtttttcctgcccgagctaattttcggatttctggtttggactatggtggctgcaacgcacattgtataccccctgctgcagggctgggtaatgtacgtgagcttaacttcctttttaatttctctcatgttcctgctcagctaccttttcggattttataagcggttcgaatcgtggcgagtacttgactcattgtaccatggcacaacggggatactgtacatgtcagctgctgtccttcaagtacacgccaccattgtttccgagaagctgcttgatccccgcatttactatattaacagcgccgctagcttttttgctttcatagcaaccctcttgtatatcctacatgccttcagtatttactatcattag

SEQ ID NO: 194056 - DNA, 6216 bp, synthetic construct
  misc_feature 1..6216: note = Description of Artificial Sequence: Synthetic coding sequence
  source 1..6216: mol_type = other DNA
atggagctggcccacagcctgctgctgaacgaggaggccctggcccagattacagaggcgaagagaccggtgttcattttcgagtggcttcgcttcctggacaaagtgctggtggccgccaacaaaacagatgtaaaggagaaacagaagaagttggtggagcaactgacaggactgatttcatcctctcctggcccaccaacgaggaagttgctggcaaagaacctggcagccctgtacagtataggggacacctttacagtcttccagacactcgataaatgcaacgatataataagaaacaaggatgatactgccgcatacctacctaccaagctggctgcggtcgcatgcgtgggagccttttacgagaaaatgggtagaatgctgggttccgccttccctgaaactgtaaacaaccttttaaaatcccttaagagcgcggaatctcaggggcgctccgaaatactaatgtctctgcaaaaagtgctgtccggcttaggaggcgcagccgcatcttcacatcgcgacatctacaagaacgccaggagcctccttaccgacaggtctatggccgtgcgctgcgccgtcgcaaagtgcctgctggagctgcagaacgaagcagttttcatgtggacagctgaactggaaaacattgcaacactgtgcttcaaagcgctcgaaaacagtaactacggagtgagggttgccgtgtcaaaactgcttggcacagtcatggctactgctttgatgccaaagcaggccactgtcatgcgacagaacgttaagagggccacatttgacgaggtgctggagttaatggctaccggtttccttagggggggctctggattcctgaaatctgggggggagatgctgaaggtcggcgggagcgtgaatagggaggttagagtgggcgtgacgcaagcctatgtcgtgtttgtgacaacccttggtggacaatggctggagcggagcttcgcaaccttcctctcccatgtcctggacctcgtgagtcacccacgggcaactcagacccacgttgaggccgtttattcacgccggtgcgtctccttcatattgagggctactgttggctccctactgggtgagaaggcgcaaattgctgctgctaaggagatctgtcaggccattggcaagcagatgaaagccgtagaggccgtagtcaacgatacatccggcgaaaacaagtccggcgccgcggatatcgccgcttcccagcatgttatggtgtgcgcccttcaggaactgggctccttggtacagtcacttaacgctaccgcgtcccctcttatacaggaggccagcattggcttacttgaaatagtcacttcagtgctgctgcatccgtctatggctgcgaggttggctgccgcttggtgcttgcggtgcgtggccgtggctttgccatttcagttgacccccttcttggaccgctgtgccgaacgtttgaacaacctcaaaacaagccccgaggccgttagcggatactctttcgctatggccgccctcctagggggggtccatcaatgtccgctaggaattccgcacgcgaagggcaaaatggtggtgagtatcgcggaggacttgttgcgcacagccgcccagaattcacggctgtccttgcagcgaacccaggccggatggctgctgctgggtgccttgatgacactaggacccagtgtggtcaggtatcacttgcctaaaatgcttctcctgtggcgcaacgtgttcccccgctccctcaaagagctggaggcagaaaaagcccgtggtgacagcttcacgtggcaggtgactctcgaggggcgagccggggctctgtgcgccatgaggagctttgtggctcactgtccagagctgcttacggaggacgtgattcggaagttaatgacacccatagagtgtgccatgaccatgatgagccacatcccttcagtgatgaaggctcacggcgcccaccttaaggcaagtgcggcaatggttagactgagactgtacgacatcctggcccttctgccccccaagacctatgaaggctcattcaacgctctgttgcgagaactcgtagcggagtttacgcttaccgacaattcagccaatactacaaccagccttcttaggtctctttgccactacgacgacagtgtgctgttgggcagctggctgcaggagacagaccacaagagtattgaagaccaactgcagcctaacagtgcttcgggttccggagccctcgaacacgatcccagtagcatctaccttcggataccagccggggaagcggtgcctggtccgctccccttgggagttagtgttattgacgccagcgtcgccctttttggagtggtattccctcacgtctcttataagcatagactgcaaatgctggatcacttcgccgaatgtgtcaagcaggccaagggcgtgcgccagcaagccgtgcagctgaacatcttcaccgccgttctgtcagccctcaagggcttggctgagaacaagagcaccctgggcccggaggaagttagaaaatctgccctgactttggtcatgggtcccctggataatcctaatccaattttacggtgcgccgccggcgaggccctggggagaatggcacaggtggtcggggaagctacatttatagcccgcatggcccagtactcctttgataagttaaagagcgcgcgagatgtggtgagccgcaccggacattccttagccctgggttgcttacacagatacgtaggaggcattggcagtggacaacacttgaagacttctgtctcaatcctgttagcactggcccaagacggcacgagtcccgaggtgcagacctggtccttgcactctttggcactaatagtggatagtagcggcccaatgtaccgcgggtatgtggaacccacgctgagcttagtgctcactcttctcctgaccgtgcctcccagtcataccgaggtgcaccagtgtttgggccgatgcctgggagccattattacaaccgtgggcccggaattgcaaggaaatggggcaaccaccagcacaatcagatcatcttgtcttgtgggctgcgccataacccaggaccattccgactcactggtgcaagcagctgctatcagctgtctgcagcagctgcatatgttcgcccctaggcacgtgaaccttagctctctcgttccttctctgtgcgttcacctgtgcagctcgcacctactcctgcgcagagcggcggttgcctgcctgagacagctagcccaaagggaagcggccgaggtctgtgaatacgctatgagcctagctaagaacaccggagataaagagtcgtcttcagccaacgtcagcccgtttgcacctggagtctcctccaggactgacatccattgtaggcatcagggggttaatatcactgaaacgggcctggaagggttgctctttggtatgctggatcgtgaaaccgaccggaaactctgttcagacatccatgacacgctgggacatatgctctccagtctggctgtggagaagctgagccactggctgatgctttgtaaagatgtgcttgccgcttcaagcgacatgtctactgctacgctgttgtctagcggcaaggacgaagaggcagagaaaaaggacgaaatggacgatgacacgatgttcacaactctcggagaggaggataaatcaaagccttttgtggctcccaggtgggctacgcgcgtatttgcggccgattgcttgtgtaggatcatcaacttgtgtgagaatgccgatcaggctcactttgacctggcacttgcgagaagtgcaaaactgcgtaacccgaccaacgatctgctcgttctgcatctatctgatttaattaggatggcctttatggctgctaccgaccactctaatcagctgcgtatggctggtctccaggctctggaagatatcataaagaaattcgcctccgtgcctgagccagagttcccaggtcacgtcatcctcgagcagtaccaggcaaacgttggagcagcattgagacctgcatttagtcaagacacccccagcgatataatcgctaaagcctgccaggtctgtagcacttggattggtagtggggtcgtgtctgatctaaatgacctgaggcgcgtacacaacctgctggtatcatctctggataaagttcaggcgggtaagggatcctcctcccagctttatcgcgaaagtgccacaaccatggaaaaattggctgttctgaaggcctgggccgaggtatacgtggtggcaatgaacattaaaaaggaagctgaatcaaagccaaaacgtgctatcaagaacactgatgatgatgatgatgactgtggcactattgacgagcttccacccgacagtctgattaccttggtgcagcctgagctgccaacccttagtcgtctgtggcttgcagcactgaaggactacgcactccttacactgccagcagagttctcttcccagttgcctcctgatgggggtgctttctataccccggaaacgatagacactgcaaggttacactatcggaactcctgggcccccatactccatgcagtagccctctggcttaattctacggggttcacatgctccgagtcaaccgaggccgcagccatctctgggcttcagaagagaagcacaagcgtgaacttgaaccaggccagcggagccgtgggaagcgcaaagtctctccccgaaatcaacaaggacaggatgcatctcatcctcggtgtttcaattcagtttctatgcagcccgcggccggaagaacccattgagcacgtcaccgcgtgtctccaggccctacacacgctgctggattccccctacgcccgcgtacacattgctgaggaccagctcattggagtcgagcttttgtcagttctacatagacttttactgacctggaacccttcttccgtgcagctcttggtgactggagttgtgcagcagattgtacgtgccgcacaggattatctacaggaaaagagaaacactctgaatgaggatgatatggagaaagaggcatgcaccgtcctcggtgagggcggggacagtggaggcctcatccccggcaagtcccttgtattcgccaccatggagctgctgatgttcattctggtgcgacacatgccacacctctctactaaggtctctgattctccgagccacatcgcaaccaagacccgtctcagtgaggagtctgcccggttagttgccgctacagtcactatcttgtctgatttgccctccttgtgcagcccggctggatgtatgacaattttgccgaccatcctcttcttgattgcacggatactgaaggacactgccataaagtcagcggacaaccaggtcccaccacctgtgagtgcagcactgcaggggataaaaagtattgtcacattatccatggccaagactgaagcgggtgttcaaaaacagtggacagcccttatcaggagcacccttgcatgcatactggagtacagtcagcccgaggattccgttcccacccccgatgaggtcagcatgctgacagccatcgccctcttcttgtggtcagccagcaacgaaatcatcggtgttcaatccttacaaaacggttgcatgaatcgtttcaaaaatgccttaaatagctgtgatccatgggtgcaagccaaatgctaccagctccttttgtccgtgtttcagcacagtaacagggccctgtctaccccatatatacacagcctcgctccgatcgttgttgagaagctgaaggctgtggaaaggaaccggccagcttctaatattgaactgttagccgttcaagaggggatcaaggtgctcgaaaccctagtggctttaggtgaggagcagaatagggttcagttgcttgcactgctggtgcctacgttgatctcctacctgctcgacgaaaacagtttcgcatccgcttcaagcgcctccaaggacctgcacgaatttgccctccagaacctgatgcacatcgggcctctgtacccccacgcgttcaaaaccgtgatgggtgcggcacctgaactgaaagttcgcctggagaccgctgtccgtgccagccaggcaagcaaggctaaggctgccgctcgccagccagccccagcaatccatagcgctcccacaatcaaactcaaaacaagtttcttctag

SEQ ID NO: 194057 - DNA, 1005 bp, synthetic construct
  misc_feature 1..1005: note = Description of Artificial Sequence: Synthetic coding sequence
  source 1..1005: mol_type = other DNA
atgagcgagcccatccgggtgctggtgaccggcgccgccggccagattgcctattccctgctgtacagtatcgggaatggatctgttttcggtaaggaccagcctattattctcgtcttactggacataacaccaatgatgggtgttctggatggagtactaatggaacttcaagactgcgccctgcctctgcttaaggacgttatcgcaaccgataaagaggacgtggcatttaaggacttggacgtggcaattttggtgggcagtatgccacgtcgtgaaggtatggaaagaaaggacctcctgaaagccaatgtgaaaatatttaagtcacagggggccgctctggacaagtacgcgaagaaatcagtcaaagtcatagttgtcggcaaccccgccaataccaattgcctgaccgcttccaagtccgctccaagcatacccaaggaaaacttcagttgcctcacacggctggaccataaccgagcaaaagcccaaattgctctcaagctcggcgtgactgctaacgatgtgaaaaacgtgattatttggggcaaccatagttccactcaatacccagacgtgaaccatgcaaaagtaaaattgcagggaaaagaggtcggggtctatgaggccctcaaggacgatagctggttaaagggcgagttcgtaactaccgtacagcagagaggagctgcagtgatcaaggctcgcaaactgagctctgccatgagtgccgctaaggcgatctgtgaccatgtgcgtgacatatggttcggcaccccggaaggtgaatttgtctccatgggcgttatctccgatggcaacagctatggggtgcctgacgacctgttgtactcattccccgttgttatcaagaataagacctggaagttcgttgagggccttccgattaatgattttagtagggagaagatggaccttactgcaaaggaactaactgaagaaaaagaaagcgcctttgagtttctgtcctctgcgtag

SEQ ID NO: 194058 - DNA, 1059 bp, synthetic construct
  misc_feature 1..1059: note = Description of Artificial Sequence: Synthetic coding sequence
  source 1..1059: mol_type = other DNA
atgcggcggtgcagctacttccccaaggacgtgaccgtgttcgacaaggatgataagtctgagccgattcgtgtcttggttacaggagccgctggtcagatagcttactcactcttgtactctataggcaacggatccgtgtttggaaaggaccagcctatcattttggtgttactagatatcactccaatgatgggcgtcctggacggcgtgttaatggaactccaggactgcgcactgccactgctcaaggatgtgatcgctactgataaggaagatgttgcttttaaagatctcgacgtggctatcctggtcggcagcatgccacggcgggaaggcatggaaaggaaggatttgctgaaagccaatgtgaagattttcaagtcacagggggccgcccttgataagtatgccaagaagtccgtgaaggtaatcgtagtcggaaaccctgctaacaccaactgtcttaccgcaagtaaatcagcgcccagcatcccaaaggagaattttagttgccttacccgattggatcataatcgagctaaggctcagattgcgctcaaactgggagtgacggcaaacgacgtaaaaaatgtgattatatggggaaatcattcctctacccagtatccagacgtcaaccacgccaaggttaagctacaaggaaaggaagtcggcgtttacgaggccctgaaagatgactcgtggcttaaaggcgaattcgtgaccacggtgcagcagcggggcgcagccgtaattaaggctaggaaactgtccagcgcaatgagtgccgccaaagccatttgcgaccatgttagggatatttggtttggcaccccagaaggtgagttcgtatctatgggagtgatcagcgacgggaattcctacggtgtgccagatgatctgctatacagtttcccggtggtgattaaaaataagacttggaaattcgtcgaaggcttacctattaatgatttcagccgggaaaaaatggaccttacagccaaggaacttactgaagagaaagaaagcgccttcgagttcctgtctagtgcatag

SEQ ID NO: 194059 - DNA, 738 bp, synthetic construct
  misc_feature 1..738: note = Description of Artificial Sequence: Synthetic coding sequence
  source 1..738: mol_type = other DNA
atgccccggcgggagggcatggagcggaaggacctgctgaaggccaacgtgaagattttcaagtcgcaaggggccgccctcgacaaatacgcgaagaaatccgtgaaggtcatcgtagtagggaacccggctaacacaaactgccttacagcttcaaaatctgctccatcgataccaaaagagaatttcagttgtctgacccgactggatcataaccgagcgaaagctcagatcgcactgaaacttggagtgacggctaacgatgtcaaaaatgttatcatttggggcaaccatagcagcacacagtaccccgacgtgaatcatgctaaagtcaaactgcagggaaaggaagtgggggtgtatgaagcgctgaaggatgatagttggctgaagggggaattcgtgacaacagtccagcaacgcggtgccgccgtcataaaggccaggaagctgagctccgccatgtccgccgctaaggccatttgcgatcacgtgcgcgacatttggttcggcacaccggagggggagttcgtttcaatgggcgtgatctcagacgggaattcctacggagtgcccgacgacctgttgtacagcttccccgtggttatcaaaaacaagacatggaaatttgtcgagggcctgcccatcaatgatttttcaagggaaaaaatggacctgactgctaaagagctgaccgaggagaaggaaagtgccttcgagttcctcagtagtgcctag

SEQ ID NO: 194060 - DNA, 1017 bp, synthetic construct
  misc_feature 1..1017: note = Description of Artificial Sequence: Synthetic coding sequence
  source 1..1017: mol_type = other DNA
atgctgagcgccctggcccggcccgccagcgccgccctgcggcggtcgttcagcaccagcgctcagaataacgcaaaggtggctgttttaggcgcctcaggagggattgggcagcctctcagcctgcttctcaaaaacagtcccctcgtgtctcgccttactctttatgatattgcccacacccccggggtcgcggcagatctgtctcacattgaaacaaaggctgcagtgaaaggatacctgggccccgaacagcttcccgattgtctcaaaggctgtgacgtagtggtgattcctgccggagttccacggaagcccgggatgacacgggacgacttgtttaataccaatgctactatcgtcgccaccttgactgcagcgtgcgcacagcattgcccggaagctatgatatgcgtgatcgctaaccccgtaaattccacaatcccaattacagctgaagtgttcaagaagcacggggtgtacaacccaaataagatctttggcgtcacaaccctagatattgtccgggcaaataccttcgtggctgagctgaaaggcttggatccagccagagtcaatgtgcctgtcataggggggcacgctggcaagacgatcatcccactgatttctcaatgcacacccaaggtagattttccccaggaccaattgacggccttgactggaagaatacaggaagcagggaccgaggtcgtgaaagctaaggcgggtgccggtagcgctacgttgtcaatggcttacgccggcgcccgtttcgtgttctccctcgtggacgctatgaatgggaaagagggcgttgttgagtgcagtttcgtaaagtctcaagagacagaatgcacgtacttttcaactcccctgctgctggggaagaaagggattgaaaaaaacctagggatcggtaaagtctcttcattcgaagagaaaatgataagcgacgccatccctgagctgaaagcaagcataaagaaaggcgaagatttcgtgaaaaccttgaagtag

SEQ ID NO: 194061 - DNA, 1872 bp, synthetic construct
  misc_feature 1..1872: note = Description of Artificial Sequence: Synthetic coding sequence
  source 1..1872: mol_type = other DNA
atgaaccggtacaccaccatgcggcagctgggcgacggcacctacggttccgttcttatgggaaaatccaatgagagtggggaactggtcgctattaaaaggatgaaacggaagttttacagttgggatgaatgtatgaatctgcgcgaagtcaaatctttgaagaaattgaatcacgcaaatgtcattaaattgaaagaggtaatacgagagaatgaccatttgtatttcatcttcgagtacatgaaagaaaacttgtatcagctcatgaaagatcgtaataagctgttccccgagtcagtgattcggaatattatgtatcagatattacagggtcttgcgtttatccataaacacgggttctttcatcgcgatatgaaaccagaaaatctcctgtgcatgggccctgagctcgtcaaaatagccgactttgggctcgcacgtgagctgaggtctcagcccccttatacagactatgtgtccacccggtggtaccgtgcacctgaggttctcctgaggtcaagcgtgtattctagcccaatcgatgtatgggccgttggctcaattatggctgagctttatatgctcaggcctctattcccggggactagcgaggtggacgagatatttaaaatttgccaagtgcttggcactcctaagaaaagtgactggccagagggttaccagctagccagttcaatgaatttccggtttcctcaatgtgtgcccatcaacctaaaaacacttatccccaacgctagtaatgaagcaatccagttgatgaccgaaatgctgaactgggatcccaagaaacggcctaccgcgagccaagctctaaagcatccctacttccaggtgggacaggttctcggtccaagctctaaccacctggagagcaaacagtccctgaataagcagctgcaacctctcgaatcaaaaccttccctggtggaagtagagcccaaacccctccctgatatcattgatcaagtggtgggccaacctcaacctaagacgtcccagcagcctctgcaacccatccagcctccccaaaacttgagtgtacagcagcctccaaaacaacagtcccaagagaagccaccccagactttgtttcccagtatcgtaaaaaatatgcccaccaagcccaatggcactttaagccacaaaagtggtcggcgaagatggggccagacgattttcaagtccggagactcctgggaagaactggaggattacgacttcggcgcttcccacagcaagaagccatctatgggagtttttaaggaaaagaggaagaaggatagcccgtttcgccttcccgagcccgtgcctagtggctccaaccactctactggcgaaaacaaaagtcttccagcagtgacttcgctgaagagcgattctgagcttagtaccgctccgaccagcaagcagtattatctgaaacaaagccgctacttgcctggcgtaaaccctaaaaaagtgagcctgattgcctcagggaaggaaatcaatcctcacacatggagcaaccagctgtttcccaagtcattgggtcccgttggggcagaattggccttcaaaagatctaacgcaggtaatctgggctcatacgccacttacaaccagagcggttatattccatccttcctaaagaaagaggtgcaaagcgccggacagaggatccacctggcccccttgaatgctactgcctcagagtatacctggaacactaaaactggtcgcgggcagtttagcgggcggacctataatcctacagcaaaaaaccttaatattgtgaaccgggcacagcctataccttcagtacacggtcgaaccgattgggtggctaagtacggaggccaccggtag

SEQ ID NO: 194062 - DNA, 1872 bp, synthetic construct
  misc_feature 1..1872: note = Description of Artificial Sequence: Synthetic coding sequence
  source 1..1872: mol_type = other DNA
atgaaccggtacaccaccatgcggcagctgggcgacggcacctacgggagtgttctaatggggaaatccaatgagtccggagagctggtggcaattaaacgaatgaaacgaaaattttactcctgggatgagtgtatgaaccttagggaagttaagtctctgaaaaaacttaaccacgcaaacgtgattaaattgaaagaagtgatccgcgagaacgatcacctgtactttatttttgaatacatgaaagagaacttataccagttgatgaaggacaggaataagttgtttccggaatctgtgatacgcaatatcatgtaccagatcctgcaggggcttgcctttattcataaacatgggttctttcatagagacatgaagcccgagaatttgctgtgtatgggccccgagttagtcaagatcgcagatttcggcctggcacgagaactgcgcagtcagccaccgtatactgattatgtcagcacgcgatggtatagggcccctgaggtgctcctgcgatcctctgtgtacagttccccaatcgacgtttgggcggtcggatcgatcatggcggagctctacatgctcagaccacttttcccaggcacctctgaggttgatgaaattttcaaaatatgccaggtattggggacccctaaaaaaagcgattggcccgaaggttatcagctggcttccagcatgaatttccggtttccccagtgcgtgccgattaacctcaagactctcatcccaaacgcatcaaacgaggctatccagctcatgacagagatgctgaactgggatccgaagaagcgacccacagctagccaggccctaaaacatccctacttccaggttgggcaggtgctgggcccaagtagcaaccaccttgagagtaagcagtcactgaacaagcagctccagcctttagaatctaaaccttccctggtcgaggttgaacccaaaccactccctgacatcatcgaccaagtggttggacagcctcagcccaagacatcccagcagcctctccagccaatccagcctccccagaacctctcagttcagcagcctccaaaacagcagtctcaagagaaacccccccagacattatttccatctatcgtcaagaatatgccaactaaaccaaacggcaccttgagtcacaaaagcggcaggaggagatggggtcagactatttttaagagcggcgattcttgggaagagctcgaggattatgacttcggggcgtcacattccaagaaaccgtcaatgggagtgttcaaggagaagcgtaaaaaagactcaccgttccgcttgcctgaacccgtcccatccgggagcaaccactcaacgggggaaaacaagtctctgcccgcagtgacatcccttaagtcagacagtgaactatccactgcgccgactagcaagcagtactatttgaagcagagcaggtacttacccggcgtgaaccctaagaaggtgagcttgattgccagtggaaaggagattaacccacacacatggagtaaccagctttttccaaaaagtctagggcccgttggggctgaactcgccttcaagcggagcaacgcaggcaatttaggaagctacgcaacatacaaccagtccggatatatcccaagctttctgaaaaaggaggtgcaatcggcaggacagcgcattcacctggctcccttgaatgccacagcctccgaatacacctggaatacaaaaacgggccgagggcagttcagcgggcgaacttataacccgacagctaagaatctcaacatagtaaatcgcgctcagcccattccctcggtgcatgggagaacagactgggtcgccaaatacggcggtcacagatag

SEQ ID NO: 194063 - DNA, 867 bp, synthetic construct
  misc_feature 1..867: note = Description of Artificial Sequence: Synthetic coding sequence
  source 1..867: mol_type = other DNA
atgaaccggtacaccaccatgcggcagctgggcgacggcacctacggctccgtcctgatgggtaaatctaacgaatcaggggagctcgtagccatcaagaggatgaaacggaagttttatagttgggatgaatgtatgaacctccgagaagtgaaatctctgaagaagttgaaccacgctaacgtgatcaaattgaaagaggtgatccgggaaaacgatcacttgtatttcatatttgaatacatgaaagagaacctctatcagctcatgaaggatcgcaacaaactcttccccgagagcgtgattcggaatataatgtaccagattcttcagggactggcatttattcacaaacatggattcttccaccgcgacatgaagcctgaaaatctgttgtgcatgggaccagagctcgttaagattgccgactttgggctggcccgggagttacgtagccagcctccttatacagactatgtgtccactcggtggtatcgagctcctgaggtgttgctgcggagttctgtttacagcagccccattgacgtctgggcagtgggatccattatggccgagctgtacatgcttcggcctttattccctggcacaagcgaagtggatgagattttcaaaatatgtcaggtcctggggacacccaaaaagagcgactggcctgaaggctatcaattagcttcctctatgaactttagatttccacagtgtgtgcccattaacctgaaaactcttatccctaacgcatcgaatgaggccatccaactgatgacagagatgctaaactgggatcccaaaaaaaggcccacggcctcccaaccctgttttcttgtggaagtcgagagacccaactag

SEQ ID NO: 194064 - DNA, 1374 bp, synthetic construct
  misc_feature 1..1374: note = Description of Artificial Sequence: Synthetic coding sequence
  source 1..1374: mol_type = other DNA
atgaaccggtacaccaccatgcggcagctgggcgacggcacctacggaagtgtactgatggggaagagcaacgaaagtggggaacttgtcgctatcaaacggatgaagagaaagttctattcatgggacgaatgcatgaatttacgggaggtgaagagcctgaaaaaactgaatcatgctaatgtaatcaagctgaaggaagttattcgggagaacgaccatttgtatttcatttttgagtacatgaaagagaacttgtaccaactcatgaaagatagaaacaaactttttcccgagtcagtcatcaggaatattatgtaccagattctccaaggtctggctttcattcacaagcacggattttttcatcgcgatatgaagcccgaaaatctcctatgtatggggcccgaattggtgaagattgctgactttggcctggcaagggagcttcgaagccagcctccctacaccgattatgtaagcacccgatggtaccgcgcccctgaagtcctcctgagaagctctgtgtatagctctcccattgatgtgtgggctgtgggctcaatcatggccgaattatatatgttgcgcccacttttcccaggcacttcagaggtcgatgagatttttaagatttgccaggttctgggaaccccaaaaaagtcagactggcctgaggggtaccagcttgctagttctatgaacttccggtttccccagtgtgtgcctatcaatcttaagactctgatacccaacgcctcgaatgaagcgatacaactgatgactgagatgctgaattgggatcctaagaagaggcctacggcttcccaagcactgaaacacccttactttcaggtgggccaagtcctggggccatcctccaaccacttagagtctaaacagtcactgaataagcagctccagccactggagagcaagccgtccctggttgaggtggaacctaaaccactgccagatattattgatcaggttgtaggacagcctcaaccaaaaactagccaacaacctctgcagcctatccaaccaccacagaatcttagtgtgcaacagcccccaaaacaacagagccaagagaaaccgccgcagaccctatttccttccattgtcaaaaatatgcctacaaagccaaacgggactctctcacataagtcaggcagaagacggtggggccagaccatattcaagagtggtgatagttgggaagagcttgaggactacgactttggagcctcgcacagtaaaaaaccttctatgggcgtgttcaaggagaagaggaagaaagactccccattccggcagcaggtgaaaatggccgttatttccctctccgcccaccagtttcctacattatag

SEQ ID NO: 194065 - DNA, 942 bp, synthetic construct
  misc_feature 1..942: note = Description of Artificial Sequence: Synthetic coding sequence
  source 1..942: mol_type = other DNA
atggaggagatgagcggcgagagcgtggtgagcagcgccgtgcccgccgctgctacccgcactacttccttcaaagggaccagtccttcctctaagtacgtgaagttaaacgtcggcggagcactttactacaccacgatgcagactctgacaaagcaagacaccatgttgaaagccatgttttcagggcggatggaggtactgactgattccgagggttggatccttattgacagatgtgggaagcacttcggtaccattctgaattacttgcgtgacggagccgttcccttaccagaaagcagacgcgaaatcgaagagctccttgccgaggcaaaatattacctggtgcagggcctagtcgaggaatgccaagccgccctccagaacaaagacacttacgaacccttttgtaaggtccctgtgatcacctcaagtaaagaagagcaaaaattaattgcgacttctaataaaccagccgtcaagctgctctacaaccgttccaataacaaatattcatacactagcaattcagacgataacatgctaaagaatattgagctgttcgacaagctgagtctccgatttaacggccgcgtgctgtttataaaggatgttatcggcgacgagatttgctgttggagcttttacggccaggggcggaagatcgcggaggtgtgctgtacttcgatcgtgtacgcaaccgagaaaaaacagactaaagtggagtttcctgaggcaagaatctatgaggagacactgaatatccttctctatgaagctcaagacggccgcggccctgacaacgccctactggaagcgacaggaggtgcggcaggtcgcagccaccacctcgacgaggacgaagaacgcgaacgcatcgagcgtgtccggagaatccacattaaaaggccagatgacagggcacatcttcatcagtag

SEQ ID NO: 194066 - DNA, 558 bp, synthetic construct
  misc_feature 1..558: note = Description of Artificial Sequence: Synthetic coding sequence
  source 1..558: mol_type = other DNA
atgggccccgagcggcacctgagcggcgcccccgcccggatggccactgtcgttttaggaggagacactatggggcctgaacggatcttcccgaatcaaacagaagagttagggcatcaggggccaagtgaaggcaccggggactggagtagtgaggaaccagaggaggagcaggaagagaccggttccggcccagcggggtacagttaccagcctctaaatcaggatcccgaacaagaagaggtggagctcgcgccagtgggcgatggtgatgtggttgctgacatccaagatcgtatccaggctctcggcctccacctgccagatcctccgctggaatcagaggacgaagatgaggagggagcaactgctctgaacaatcacagctcaatccctatggaccctgagcacgtagagttggttaagcgcacgatggctggcgtaagccttccggcacctggcgtgccagcgtgggccagggagatctctgacgctcaatgggaagacgttgtgcagaaagcactgcaggcccgtcaggccagcccggcttggaaatag

SEQ ID NO: 194067 - DNA, 1719 bp, synthetic construct
  misc_feature 1..1719: note = Description of Artificial Sequence: Synthetic coding sequence
  source 1..1719: mol_type = other DNA
atggagcccgaggccccccggcggcggcacacccaccagcggggctatctcctcactcgcaacccccatcttaacaaggatttagctttcacgcttgaggagcgacagcaactcaacatccacggcctactgcccccctctttcaactctcaggaaatccaggttttaagggtggtaaaaaacttcgaacatctaaactctgattttgaccgatacctgctgctgatggatctccaagatagaaatgaaaaactgttctaccgtgtgcttacttcagacattgagaagtttatgcccatcgtctacactcctactgtcgggctggcctgccagcaatatagtctcgtatttaggaaacctaggggcctgtttattacaattcacgaccgaggacacatagcatccgtccttaatgcatggcctgaggacgtgattaaagctatcgtggttaccgatggtgaacggattctgggcctgggggaccttggctgcaatggcatgggcatccctgttggtaagttggccctttataccgcttgtggaggcatgaaccctcaagagtgtcttccagtcattctagatgtgggtacagaaaatgaggagctcctgaaggatcccctgtacatcgggctgcggcagagaagagttaggggaagcgagtatgatgatttccttgatgaattcatggaggccgtctcgtcaaagtatgggatgaattgcctcattcaattcgaggactttgccaacgtcaatgcttttcggctgctgaacaagtaccgcaatcaatactgtacttttaacgacgacatacagggcacggctagtgtcgccgtagcaggcttgctggctgccctccgcatcacaaaaaataagctgagcgatcagactatcctctttcaaggcgctggtgaggcggcactcgggatcgctcacttaattgttatggcattagaaaaagaaggactgcctaaggaaaaggccatcaagaaaatctggctggtggatagcaagggtctcatcgtgaagggacgcgcctccctgacacaggagaaggagaagttcgcacacgaacacgaggaaatgaagaacctggaggctatagttcaagaaatcaaacccacggcattgataggagtcgcagccatcggcggcgccttctccgaacagatactgaaagacatggcagctttcaatgaaagacccatcatttttgccttgtccaatcctacctccaaagcagaatgttcggctgagcagtgttacaaaattaccaagggaagagcaatttttgcctccggtagtccgtttgacccagtgaccctgcctaatggccagaccttgtatcccgggcagggtaataatagttatgtgttccccggggtcgcgctgggcgtagtagcctgtggtctgaggcagatcaccgataacattttcctgacaactgccgaagttattgctcagcaggtgagtgataagcacctggaagaggggcggctttatcctcctttaaacaccatccgggatgtctccctgaagatagccgaaaaaatcgttaaagatgcttatcaagagaagaccgcgactgtataccctgaacctcaaaacaaagaggcttttgtccgcagccagatgtattccacagactatgaccaaatccttccggattgctatagctggccagaagaggttcagaagattcagacaaaggtcgaccaatag

SEQ ID NO: 194068 - DNA, 699 bp, synthetic construct
  misc_feature 1..699: note = Description of Artificial Sequence: Synthetic coding sequence
  source 1..699: mol_type = other DNA
gtgaagggccgggccagcctgacccaggagaaggagaagttcgcccacgagcacgaagaaatgaagaacctagaggccattgttcaagagataaagccaaccgcattaattggcgtggctgccatcggcggagcattctccgagcagatactgaaagacatggctgcctttaacgaaagacccataattttcgccctgtcaaatcctacttctaaggctgagtgttcagccgagcagtgctacaagatcacaaaggggagagctattttcgctagtgggtctcccttcgacccagtgaccttgccgaatggacagactctctatccgggacaggggaataacagctacgtatttcccggcgtggctcttggcgttgtggcatgcggcttgaggcaaatcaccgacaacattttcctcacaacggcagaagttatcgcacagcaggtgagtgacaagcatctggaggaggggcgcctgtacccccccttgaatactattcgcgatgttagcctgaagatcgctgaaaagatcgttaaggatgcataccaagagaagactgccacggtctaccctgaaccccaaaataaggaggcctttgtccgaagccagatgtattctaccgactacgatcaaatcttgccagattgctactcgtggccagaggaggttcagaaaattcagactaaggtcgaccaatag

SEQ ID NO: 194069 - DNA, 1221 bp, synthetic construct
  misc_feature 1..1221: note = Description of Artificial Sequence: Synthetic coding sequence
  source 1..1221: mol_type = other DNA
atgggcatccccgtgggcaagctggccctgtacaccgcctgcggcgggatgaacccgcaggagtgcctcccagtaatcctcgacgtcggaacggaaaacgaggagctgcttaaagacccattgtacatagggcttaggcagcggagggtgagagggagcgagtacgacgacttcctggatgaatttatggaggcagtcagctcaaaatacggcatgaattgtctaatacaatttgaggacttcgccaatgtgaacgccttccgcctcttaaataaatacagaaaccagtattgtaccttcaatgacgacattcagggaacggccagcgtcgctgtggccggactgctcgccgccctgcgcatcaccaagaacaagctcagtgaccaaaccattttatttcaaggagccggagaggctgctctaggtattgcccatttaattgtgatggcactggagaaagaaggacttcctaaggaaaaggctatcaagaagatttggctggttgactccaaaggcctgatcgtcaaaggacgcgcctctttgacgcaagaaaaagagaagttcgctcatgaacacgaggaaatgaagaatctggaagcaatcgttcaggaaattaaacccacagcactgataggagtggctgcaattggcggagcattctcagagcaaatcctgaaggacatggctgcttttaacgagaggcccatcatcttcgctctgtccaaccctaccagcaaagccgagtgtagcgccgagcagtgttataaaatcactaagggccgtgccatattcgcttccgggtcccccttcgatcccgttactctgcctaacgggcagaccctttatcctggccagggcaacaacagctatgtgtttcctggtgttgcgctgggcgttgtggcctgtggacttcggcagatcactgataacatttttctaacaactgccgaggtgatcgcccaacaggtgtccgataagcacctggaggagggacggctgtacccccctctaaacaccatacgcgacgtgtctctcaaaatcgccgagaaaatcgtaaaagatgcctatcaggaaaagaccgcaaccgtgtatccggagccccaaaataaggaggcattcgtcaggtcccaaatgtactccaccgactacgaccaaatactgcccgactgctactcatggcctgaggaggtgcaaaagatccagaccaaggttgaccagtag

SEQ ID NO: 194070 - DNA, 1494 bp, synthetic construct
  misc_feature 1..1494: note = Description of Artificial Sequence: Synthetic coding sequence
  source 1..1494: mol_type = other DNA
atggacctgcaggaccggaacgagaagctgttctaccgggtgctgacgtccgatatagagaaatttatgcctattgtgtacactcctaccgtgggcttggcctgccagcagtacagccttgtgttccgtaaaccccgcggcctttttatcacaattcatgacagggggcacattgcctcagtgctgaacgcctggcccgaagatgtcatcaaggcaattgtcgtgacagatggagaacgcatacttggactgggagatttggggtgtaacggcatgggcattccggtgggtaagctggcattgtacaccgcctgcggcgggatgaacccccaggagtgcttgccagtaatacttgacgtcggcacagagaatgaagagctcctgaaagatcccttgtatatcggtctacgccagagaagagtgagaggatcagagtacgacgacttccttgacgagtttatggaggccgtgtcttcaaagtatgggatgaattgtctcatacaatttgaggattttgcaaacgtgaatgcgttccggctgctgaataagtacaggaaccaatactgtacctttaacgacgatatccagggcacagcttctgttgcagtggccgggctcctggcagcactgcggattaccaagaataaactcagcgaccagactatcctattccagggcgctggggaagcagctctgggtattgcacatctcatagtcatggctctggagaaggaaggcttgcctaaagagaaagctatcaagaaaatttggctggtcgattccaaaggcttaatcgtgaagggacgagctagccttacacaggagaaagaaaagtttgcacatgaacatgaggagatgaagaatcttgaggccatcgtccaggaaattaagccaactgcattaatcggcgtggcagctattggcggggcattctctgagcagattctcaaagatatggcagccttcaatgagcgccctatcattttcgcgctgtccaatccgacatcaaaagccgagtgttccgcagagcagtgttacaagattacaaaaggccgtgcaatctttgccagtggatccccatttgaccccgtaaccttgccaaatgggcagaccctgtatccgggccaggggaataattcatacgtgtttcctggggtggcacttggcgtggtcgcatgcggcctgcgacagataaccgacaacatcttcctgactacggccgaagttattgcacagcaggtgtccgacaagcatctcgaagaaggccggctgtacccaccactcaacaccattagagacgtttccctgaagatcgccgaaaagatcgtcaaagatgcatatcaagagaagacggctacagtctatcctgaaccacagaacaaggaggcgttcgtgaggtcacagatgtacagtactgactatgaccagatcctgcccgactgttacagctggcccgaagaagttcagaagattcagacaaaggtagatcagtag

SEQ ID NO: 194071 - DNA, 1755 bp, synthetic construct
  misc_feature 1..1755: note = Description of Artificial Sequence: Synthetic coding sequence
  source 1..1755: mol_type = other DNA
atgctgagccggctgcgggtggtgagcaccacctgcaccctggcctgtcgccaccttcatattaaggaaaagggcaaacccctgatgctgaacccacggacaaataagggcatggcatttaccctccaggagagacagatgctcggactccagggactcctgccaccgaaaattgagactcaggacatccaggccctgagatttcatagaaacctcaagaagatgacaagtcctctcgaaaaatatatctacattatgggaatccaggagaggaatgaaaagttattttaccgtatactccaggacgacatcgaaagtctcatgccaatcgtctacacaccaacagtgggactggcctgctcccagtacggacacatctttaggagaccaaaggggctgtttatctctatcagtgaccgagggcatgtgcgtagcatagtcgacaactggcccgagaaccacgtcaaggctgtagtggtcactgatggtgaacggatcttgggcctaggggatctaggggtgtacggaatgggaatccccgtggggaagttgtgcctttacacagcatgtgcagggattcggccagaccgctgcctgccggtgtgcattgacgtgggtactgataatatagcccttctcaaggaccccttttatatggggttataccagaagcgcgacaggacccagcagtacgacgatctgattgacgagttcatgaaagctattaccgacaggtatgggcgcaacactctaatccaatttgaggatttcggcaatcataatgcttttaggttcctgcggaagtatagggaaaagtactgtaccttcaatgacgatatccaggggactgccgcagtcgcccttgcagggctgctagctgctcagaaggtcatctccaaacccatcagcgagcataagatactgttcctgggagccggtgaggcagccctgggtatagcaaacttaattgtcatgagcatggttgaaaatggtctttccgaacaggaggctcaaaagaaaatctggatgtttgacaaatatggactgctggttaagggcaggaaagcaaaaatcgactcctaccaggagcctttcactcactcagcgcccgagtcaatccccgatacattcgaggacgccgtgaacatccttaagcccagcaccattattggcgtggcaggtgccggcagactgttcaccccagacgtgattcgtgccatggcatccatcaacgagcgtccagtgatcttcgctttatcaaatcccaccgcacaggccgagtgtactgctgaggaagcctacactctaaccgaaggccgctgcttgttcgcgtctggatccccgtttggcccagtcaagctgactgacggccgagtattcacacccggccagggaaacaacgtatacatttttccaggtgtcgcactggcagtgatcctgtgcaatactagacacatctcggacagtgtctttttggaagctgcaaaagctctgaccagccagctcaccgacgaggagcttgcacaaggacggctgtatcctcccctagcaaatatccaggaggtgagcatcaacatcgccatcaaggttaccgagtatctatatgccaataagatggcattccggtatcccgaacccgaggacaaagcaaagtatgtaaaggagaggacatggcgtagcgagtacgattctctccttcccgacgtctatgagtggcccgaatccgcatccagccctcctgttataactgaatag

SEQ ID NO: 194072 - DNA, 1440 bp, synthetic construct
  misc_feature 1..1440: note = Description of Artificial Sequence: Synthetic coding sequence
  source 1..1440: mol_type = other DNA
atgctgagccggctgcgggtggtgagcaccacctgcaccctggcctgccgacacctgcacatcaaggaaaagggaaagcccctcatgttgaacccccgaactaataagggaatggcctttactttgcaggaaaggcagatgttgggcctacaggggttgctgcctcctaagattgagacacaggacatccaagcattacgcttccaccgcaatttgaagaagatgacaagtcctctcgagaagtatatctatatcatgggaatccaggagcggaacgagaagctcttttatcggatccttcaagacgatatcgagtcactcatgccaatcgtctacacacccacagtgggcttagcatgcagccaatacggacatatctttcgccgacctaaaggattgttcatctccattagcgatcgtggccatgtgcggtcaattgtggacaactggccagagaaccacgtgaaagcggtggtggtgacagatggggaaaggattctggggctgggtgatttgggcgtgtatggaatgggcatacccgtggggaagctgtgtttatacacagcttgcgccgggatccggccggacagatgtctgccagtgtgcatcgatgttggaactgacaacatcgctctgctgaaggatccattctacatgggtttataccagaagagagatcggacccagcagtatgatgatttgattgatgagttcatgaaggcgataacagaccgctacggacggaacactctaatccagtttgaggatttcgggaaccataatgcctttaggtttctcagaaagtaccgggagaagtattgtacgttcaacgacgatatccagggcaccgctgcagttgcgcttgccggcctgctcgcggcccagaaggttatctccaagcccatttcggagcacaaaattctgtttcttggagcaggagaggccgccctgggaattgcgaacttgatcgtcatgagcatggtggagaacggactcagcgagcaggaggctcagaaaaagatttggatgtttgacaagtatggtctcctggtaaaaggaagaaaggcgaagattgattcttaccaggagccctttacccattccgcccccgaaagtatccctgatacctttgaagatgctgtgaacattttgaagccatccaccatcattggggtcgctggagcaggcaggctgttcaccccagacgtcatacgcgccatggctagcatcaatgagagacccgttatcttcgccctgagtaaccctacagcgcaggcagaatgtacagccgaggaagcttataccctgaccgaaggtcggtgcctgtttgcctccgggagcccctttggacctgtcaagctgaccgacggccgcgtgtttacccccggtcagggaaacaacgtgtacatcttccctggatatcgaatccccatctgctag

SEQ ID NO: 194073 - DNA, 780 bp, synthetic construct
  misc_feature 1..780: note = Description of Artificial Sequence: Synthetic coding sequence
  source 1..780: mol_type = other DNA
atggccttcaccctggaggagcggctgcagctgggcatccacggcttgatcccaccctgttttctctcccaggatgtccagctcttacggattatgagatactatgaaagacagcaaagcgacttggataaatatattatcctcatgacattacaggatcgcaatgagaaactgttctatagggtgttgacaagcgacgtggaaaaatttatgccaatcgtttacaccccaaccgttggactagcttgtcagcactacggcctgacctttcgacgaccgagagggctgttcatcaccatacacgataaagggcacctggccactatgcttaacagctggcccgaggacaacattaaggctgttgtcgttactgatggggagagaatcctggggctgggagacctggggtgctatggtatgggcatacccgttggcaaactggccctgtatacggcgtgcggtggggtcaacccgcagcagtgcctcccagttctcctggacgtgggtactaacaatgaagagctcctccgggaccccctgtatatcggacttaagcatcaaagggtgcacgggaaggcctatgatgacctgctggacgaattcatgcaggcggtgacagacaagttcggaattaattgcctgattcagtttgaggactttgctaatgccaatgcttttagactcctgaataaatatagaaacaaatattgcatgttcaatgatgacattcaggacgattttagtcggggacccaagagatcccagctcttcttcaagtag

SEQ ID NO: 194074 - DNA, 1815 bp, synthetic construct
  misc_feature 1..1815: note = Description of Artificial Sequence: Synthetic coding sequence
  source 1..1815: mol_type = other DNA
atgggcgccgccctgggcaccggcacccggctggccccctggcccggacgtgcttgtggggccctccccaggtggacccccactgccccagcacaaggttgccatagcaagcccgggcctgctcgtccggttccactgaaaaaacgtggctacgacgtgacacgcaacccccaccttaacaaagggatggcgttcacactggaagaaagactgcagctggggattcatgggctcatacccccctgctttttgtctcaagacgttcagctcttgaggattatgaggtattacgaacggcagcagagcgacctggataagtacattattctaatgacgctgcaggacagaaacgaaaaattattctatcgggtcctgactagcgacgtcgaaaaattcatgccaatcgtgtataccccaacagtgggcttagcttgtcagcactacggactgacattccgacgcccacgaggcttatttattaccattcacgataaggggcacctcgcgacaatgctgaattcttggcctgaggacaatattaaagcggtggtggtcacagatggagagagaatccttggtctgggcgaccttggctgttacggaatgggaatcccagtgggaaagttggccttgtatactgcttgtggcggagttaacccgcaacagtgcttaccagtgctgctggatgtgggcaccaacaacgaggagcttctcagagatcctctgtacatcggcctgaagcatcagagagtgcatggcaaagcctacgatgatttacttgacgagttcatgcaggccgtgaccgacaagttcggcatcaattgtctgatccagttcgaagactttgccaatgccaacgccttccggcttctgaacaagtaccggaataagtactgtatgtttaatgatgatatccaaggtaccgccagcgtggccgtcgccggcattctggccgccctgcgcatcacaaaaaacaagctatctaatcacgtctttgtcttccagggagcaggcgaagctgccatgggcattgcccacctactcgtgatggcacttgaaaaggagggagttcctaaggctgaggctactcgaaagatctggatggtcgatagcaaaggcttaattgttaaggggcggagccaccttaaccatgagaaggaaatgttcgcccaggaccaccccgaagtgaattcactagaagaagtggtccggttggtcaagcctactgctattattggcgtcgccgccatagctggtgcgttcacagaacagatcttgagggatatggcctccttccacgagcgcccaattatctttgcattgtccaatcctacgtctaaggcagagtgcacagctgagaagtgttaccgtgtaaccgaggggaggggaatttttgcgtccggcagcccttttaaatcggtaaccctggaggatggaaaaacctttatccctgggcagggcaacaatgcttacgtgttccccggagttgccctgggtgtgatcgccggcggtatccgccacatccctgacgagattttcctgctaacagccgagcagatagcccaagaggtcagtgaacagcatcttagccaaggaagactttatcctcccctgagcactatcagagacgtgagtctcaggatcgcaataaaagttctggactatgcctataagcacaacctggccagttattaccccgaacccaaagataaggaggccttcgtaagatcgcttgtatacactcccgattatgactcctttactcttgattcctacacctggccaaaggaagcaatgaatgttcaaaccgtgtag

SEQ ID NO: 194075 - DNA, 1815 bp, synthetic construct
  misc_feature 1..1815: note = Description of Artificial Sequence: Synthetic coding sequence
  source 1..1815: mol_type = other DNA
atgggcgccgccctgggcaccggcacccggctggccccctggcccgggcgcgcatgtggtgcccttccccgctggaccccaaccgcgcccgcccaagggtgtcacagcaagccaggccctgcccgaccagtgcctttgaaaaaaaggggctatgacgtgactcgcaaccctcaccttaataagggaatggccttcacattggaggaacggctccagcttggcatccatggcttaatccccccctgttttttgagccaggacgtgcagttgctgaggatcatgcgctactacgaacgccaacaaagcgaccttgataaatacatcatccttatgaccttacaggaccggaatgaaaagctattttatcgcgttctaacgtccgacgtggaaaagttcatgcccatcgtctacacacccactgttgggctagcctgtcagcactacggactgacatttcggagacctagaggcctgttcattacaatacacgataagggtcacctagccactatgctcaatagctggccggaggacaacattaaggctgtggtggttacagacggggagcgaatcttgggtctgggcgacttggggtgctatggcatgggcatccccgtaggtaagttggccttatacactgcttgtgggggagtaaatcctcaacagtgtctgcctgttctgttagacgtgggaactaacaatgaagagcttttgcgagacccattgtatattgggctcaagcatcaaagggtccatggcaaagcgtacgatgacttacttgacgagttcatgcaggccgtgacagacaagttcggcatcaactgcctgatacagttcgaagatttcgctaacgctaatgcatttcgcctgctgaacaaatataggaacaaatactgtatgttcaacgatgacatacaggggaccgccagcgtggccgtggctggcatcctggccgcgctccgcatcaccaaaaataagctttctaaccacgtgttcgtgttccaaggggccggggaagcggctatgggaattgcacacctgttagttatggccctggaaaaagagggcgtgcctaaggccgaagccaccagaaagatctggatggtggattccaaggggctgattgtaaagggacgatctcacctgaaccatgaaaaagaaatgttcgcacaagatcatcccgaggtaaattcactcgaagaggtggtgcgcctggttaagccgacagcaatcattggagtggcagcaattgctggtgccttcacagaacagatcttaagagatatggccagctttcacgaaaggccaattattttcgcactgagtaatcctacctcgaaggcagaatgtacggccgagaagtgttatagagtcacagaagggagagggatcttcgcctccggatcgcccttcaagagtgtgactttggaagacggcaagaccttcataccaggccaaggtaacaacgcatacgtatttcccggggtggccctgggggtaatcgctggcgggattagacacattcctgatgaaatctttctgctgaccgccgaacagatcgctcaggaagtgagtgaacagcacttgtcacagggtcgcttgtacccacctctgagtaccatacgggatgtgtccctgcggatcgctattaaagtgctcgactacgcttataagcataacctggccagctactatcctgaacctaaagacaaggaggcctttgtgcggagcctggtttataccccagactacgattcattcacattggatagttatacttggcctaaggaagctatgaatgtgcagacagtttag

SEQ ID NO: 194076 - DNA, 1746 bp, synthetic construct
  misc_feature 1..1746: note = Description of Artificial Sequence: Synthetic coding sequence
  source 1..1746: mol_type = other DNA
atgggcgccgccctgggcaccggcacccggctggccccctggcccggccgcgcgtgtggggcattgcctagatggacacctaccgcccccgctcagggctgccactctaagccgggacctgcccggccagtccctctgaaaaagaggggctacgatgtcactcggaacccccacctcaacaagggcatggcctttacactggaagaacggctacagcttggcatccacgggctgatacccccttgttttctgagtcaggacgtgcaactgctcagaattatgagatattatgaaagacagcaaagtgaccttgataaatacattattctgatgaccctacaagacaggaatgaaaaactgttctatcgagtgctaacctccgacgtggagaaattcatgccaatcgtgtacacaccaactgtaggcttggcttgtcagcactacgggcttacgtttagacgtccgcgaggtcttttcataaccatacatgataaagggcacctggccactatgttgaacagttggccagaggataacataaaagcagtggttgtgaccgatggcgaacgaatacttggacttggagatctgggatgctacggcatggggatacccgtgggcaagttggccttatatacggcctgtggtggtgttaaccctcagcagtgtcttcccgtactgttagacgttggtactaacaatgaagagctgcttcgcgacccactgtacattggtctgaagcaccagagggtgcatggcaaagcatacgacgatctgcttgacgagttcatgcaggctgttacagataaatttggcatcaactgtctgatacaatttgaagatttcgccaatgctaacgcatttagactcctgaacaaataccggaacaaatactgcatgtttaacgacgacatacagggcaccgcatctgttgctgtagcgggcattttggccgccctgaggatcacaaaaaacaagttaagtaatcatgtcttcgtgttccagggcgccggagaggcagctatgggcatcgcccatttattggtgatggccctggaaaaggagggagtcccaaaagctgaagctacacgcaagatttggatggtcgactcaaaaggactgattgtcaagggtagatcccacttgaaccacgagaaagaaatgttcgcccaagatcacccagaagtcaactccttagaggaagttgtacgtctcgtgaagcctactgcgataattggggtcgctgccatcgccggagcattcaccgaacagatcctacgggatatggcctccttccacgagagaccaatcattttcgcattgtcaaaccccaccagtaaagcagagtgcaccgctgaaaagtgctaccgggtcactgaaggtaggggcatatttgccagtggaagtcccttcaaatctgtcactctcgaagatggcaagacatttattccaggacagggtaataatgcatacgtgttccccggcgtggccctgggggttatcgccggaggtattcgacacatccctgacgagatcttcctccttaccgcggagcagatcgcacaggaggtgagtgaacagcacctctcacagggccgtctttatcctccactgagcacaatccgcgacgtgagtttgcggatcgctataaaggtgctggactacgcctacaaacataacctcgcttcatattatcccgaaccaaaggataaagaggccttcgttcgtagcctggtgtacacatag

SEQ ID NO: 194077 - DNA, 1029 bp, synthetic construct
  misc_feature 1..1029: note = Description of Artificial Sequence: Synthetic coding sequence
  source 1..1029: mol_type = other DNA
atgggcgccgccctgggcaccggcacccggctggccccctggcccggaagggcttgcggcgcactgccgcgatggacgcctacagccccagcacagggttgccactcaaagcctggtccggccaggccggtacccttgaagaagcggggctatgacgttacccggaatcctcacctgaataaagggatggccttcactcttgaagagcgtctacagctaggcatccatggtctgattcccccttgtttcctgtctcaagatgtacagctcctcagaattatgcggtactatgaacggcagcagagcgatcttgacaaatatataatactcatgacgctgcaggacagaaacgagaagctgttttaccgtgtactgacatccgacgtggagaagtttatgccaatcgtttacacgcccacagtaggattggcctgccagcattacggcttaacctttcgcagaccaaggggattattcattactatacatgataagggccatctggctacaatgctcaactcgtggcccgaggataacattaaagcagtggtggtgacggacggcgagcgcatcctggggcttggggatctcgggtgttacgggatgggaatcccggtcgggaaattagctctttataccgcctgtggcggagttaacccacagcagtgccttcctgtgttgctggacgtgggcactaacaacgaagaactgcttcgcgaccccctctatatagggcttaagcaccagagggttcacggtaaggcctacgacgacctgctcgacgagttcatgcaagcagtgacggacaagttcggtattaattgcctgatccagttcgaagacttcgccaacgcgaacgccttccgccttctgaacaaataccggaataagtattgcatgtttaacgacgatatccagggcacaacctgccataccttctcatgcccctggcatctttgggcacaggtcatgttccagcacattcccgggcccatggggttcagcgaatggttacccagaaacagctag

SEQ ID NO: 194078 - DNA, 189 bp, synthetic construct
  misc_feature 1..189: note = Description of Artificial Sequence: Synthetic coding sequence
  source 1..189: mol_type = other DNA
atgggcgccgccctgggcaccggcacccggctggccccctggcccggtcgcgcctgtggagccttgccgcgatggactcccaccgcccctgcccaaggttgccacagtaagcccggtccggctaggcctgtgcccctgaagaagcgtgggtacgacgtcactcgcaacccccacctcaataaagtgtag

SEQ ID NO: 194079 - DNA, 186 bp, synthetic construct
  misc_feature 1..186: note = Description of Artificial Sequence: Synthetic coding sequence
  source 1..186: mol_type = other DNA
atgggcgccgccctgggcaccggcacccggctggccccctggcccggtcgagcctgcggcgcccttcctcgctggactcccaccgccccagcccaggggtgtcactccaaacccggccccgcacgacccgtgccgctgaagaaacgcggatatgatgtcaccaggaacccacacctcaacaaatag

SEQ ID NO: 194080 - DNA, 456 bp, synthetic construct
  misc_feature 1..456: note = Description of Artificial Sequence: Synthetic coding sequence
  source 1..456: mol_type = other DNA
atgggcgccgccctgggcaccggcacccggctggccccctggcccggaagggcttgcggtgccttgccccggtggacacctacggcacctgcccagggctgtcattcgaagccaggtcccgctagaccagtgcccttgaagaaacgcgggtacgacgtgacaaggaacccacatctcaataaggggatggccttcaccctagaagaaagactccagttaggcatccacggactgattcccccttgcttcctttcgcaggacgtgcaactcctgcggattatgaggtattacgaacgccagcagagcgatctggataaatacatcattctgatgacgttgcaagataggaatgagaaactgttttacagggtactgaccagcgatgtcgagaaattcatgcccattgtgtacactcctaccgtgggcctggcctgccagcactatggactgacgtag

SEQ ID NO: 194081 - DNA, 240 bp, synthetic construct
  misc_feature 1..240: note = Description of Artificial Sequence: Synthetic coding sequence
  source 1..240: mol_type = other DNA
atgggcgccgccctgggcaccggcacccggctggccccctggcccggtagggcgtgcggtgcactcccccgctggacgccaaccgcacccgcccagggatgccactctaaacctggacctgcacggcctgtgcccttgaagaaacgaggatacgacgttacacggaatccccatctgaacaaggtcatggggcaacgcgccggccgcccagcgctccgcagtagaggatgtaggaagtag

SEQ ID NO: 194082 - DNA, 1815 bp, synthetic construct
  misc_feature 1..1815: note = Description of Artificial Sequence: Synthetic coding sequence
  source 1..1815: mol_type = other DNA
atgggcgccgccctgggcaccggcacccggctggccccctggcccggccgggcctgtggggcactccctaggtggacgccaaccgcccctgctcagggttgtcattctaaacccggacccgcccggcctgtccccctgaagaaacgggggtacgatgtcactagaaacccccatctgaacaaaggaatggctttcaccctggaagaacgcctgcagctaggcatccacgggctgattcctccttgcttcctctcgcaggatgtgcagctcctgagaattatgcgatactatgaacgccagcagtcggatctcgataagtacattatcttgatgaccctgcaggaccggaacgaaaagttgttctatagggtgttgacatctgacgtagagaaattcatgcccatagtctacacccctactgtgggactggcctgtcagcactacgggctgacattcaggcggccgcgcggtctcttcattacgattcatgacaagggacacctggcgaccatgctcaatagttggcctgaggacaacataaaggccgtagttgttactgatggagaacgaatactcggcctgggcgacctgggatgctatggcatgggcatcccagtaggtaaactggcattgtacaccgcgtgcggcggggtgaacccccagcaatgtttgcccgtgcttcttgacgtcggtacaaacaacgaagaactgctgcgtgacccactttatatagggctgaagcaccagcgagtccatggcaaggcatacgacgatttgctagacgagtttatgcaagccgtaactgacaaattcggcataaattgtctgatacagtttgaggacttcgcaaatgctaatgcctttcggcttctgaacaagtaccgtaacaagtactgtatgtttaacgacgatattcagggcaccgcctcagtggcagttgccggaattcttgccgcactgcgaatcaccaagaataaactgagcaatcacgtgttcgtttttcagggggccggggaagccgctatgggaattgcgcacctccttgtgatggccctggaaaaggaaggggtgcctaaggccgaggcgacaaggaagatctggatggttgattccaagggcctcatcgtaaagggcagatcacacctcaatcatgagaaggagatgtttgcccaggaccatcctgaagtaaacagcttggaggaggtcgttcgcctggtcaagcccacagccatcatcggagtcgccgcaatagccggtgctttcacggagcagatccttagagatatggccagctttcacgagagacccatcattttcgcactgagtaacccgacatctaaggccgaatgtaccgccgagaaatgctaccgcgtgacagagggccgagggatttttgcatcaggaagtccattcaagtcagtgacactcgaagacgggaaaacatttatccccggccagggcaacaacgcctatgtgtttcccggcgtcgccctgggtgtgattgccggagggatacgacacattcctgacgagatcttcctcctcaccgctgaacaaatcgcccaggaggtttctgagcagcatctgtcgcagggcagactctaccccccactcagcaccattagagacgtgtcacttaggatcgccatcaaagtcttggattatgcttataaacacaacctggctagctattacccggagcctaaggacaaagaagcttttgttagatcactggtgtacaccccagactatgatagctttacactcgacagctatacttggcctaaagaggctatgaatgtgcagacggtttag

SEQ ID NO: 194083 - DNA, 759 bp, synthetic construct
  misc_feature 1..759: note = Description of Artificial Sequence: Synthetic coding sequence
  source 1..759: mol_type = other DNA
atggccttcaccctggaggagcggctgcagctgggcatccacggcctgattccgccctgcttcctgtcccaggatgtgcagcttctccgcatcatgcgctattatgaacggcagcagagcgacctggacaagtacattattttgatgacgcttcaggatcgtaatgaaaaactcttctatagagtcttaactagcgatgttgaaaagttcatgcccatagtgtatacgcctaccgtcgggctcgcctgtcagcattatggactgacctttagacggccccgaggtctctttatcaccattcacgataaaggccatcttgcaactatgcttaattcatggcccgaagacaacatcaaggccgtcgtggttaccgatggtgagcggattctgggattgggtgacctcgggtgctacggaatgggcatccccgttggcaaactagccctgtatacagcctgcggcggcgtgaatccccaacagtgcctgcctgtgctgctggacgtaggtacaaataacgaagagctgcttcgagacccactttacatcggactgaagcaccaacgagtgcacgggaaggcatatgacgatctgctcgacgagttcatgcaagcagtgactgataagttcggtatcaactgcctgatccagtttgaggatttcgcaaatgcgaacgcgtttcgcctcctgaacaaatacagaaacaagtactgcatgttcaatgatgacatccaggcgccctccacagccccagccacttag

SEQ ID NO: 194084 - DNA, 1482 bp, synthetic construct
  misc_feature 1..1482: note = Description of Artificial Sequence: Synthetic coding sequence
  source 1..1482: mol_type = other DNA
atgcggggcttcggccccggcctgaccgcccggcggctgctgcccctgaggctgcccccacgtccccctggaccgaggctggcctctggccaagcggctggcgccttagaaagggctatggacgaactgctgcggcgcgcagttccaccaactcccgcctacgagctccgggaaaagacacccgcacctgctgagggccagtgcgctgacttcgtcagcttctacggagggctagcggagaccgctcagcgagccgagctgctggggcgacttgcccgaggctttggggttgatcacggacaggtggctgagcagtccgccggcgtgctgcatctgagacagcagcagagggaagctgctgtccttctccaggctgaagaccgattgcgctatgctttggtaccacggtaccgcggtttgtttcatcacatatctaaactcgatgggggtgttcgtttcctagtccagttaagggctgacctcttagaggctcaggcacttaagctagtggagggacctgatgtcagggagatgaacggagtgctgaaggggatgctcagcgaatggttctcctcaggctttctgaatctagagcgcgtgacatggcactccccctgcgaggttcttcagaagatttccgaggcagaggccgtccatccggtgaagaattggatggacatgaaaagacgggttggcccctatcggagatgctacttttttagccactgtagcacaccgggcgagcctctcgtcgtacttcacgtcgccctgacgggggacattagcagcaatatccaggccattgtgaaagagcacccaccgtccgagaccgaggagaagaataaaattacagccgctattttttactccatttcgctcacacaacaggggctccagggggtagaacttggaacattcctgatcaaacgcgtggtgaaggagctgcaaagagagttccctcatctgggagttttttcctccctgagcccaattcccggattcacaaagtggctgctcggcctgctaaattcacaaactaaggaacacggcaggaacgagctctttacagactccgagtgcaaggaaatttcagaaatcacaggcggccccataaacgagactctgaaactcctgctgtcttcttctgaatgggtccagagtgagaaactggtgcgtgctctccagacacctctgatgagactatgcgcatggtatttgtacggcgagaagcaccggggttatgcactcaaccctgttgctaacttccacttgcagaacggtgccgttctctggcggatcaactggatggcggatgtgtctctccgcgggattactggtagctgcggattgatggcaaattatcgttattttttagaggagaccggcccaaactctacttcctacctgggctccaagatcatcaaagcctccgagcaagttctgtcgctcgtggcacagttccagaaaaacagtaagttgtag

SEQ ID NO: 194085 - DNA, 558 bp, synthetic construct
  misc_feature 1..558: note = Description of Artificial Sequence: Synthetic coding sequence
  source 1..558: mol_type = other DNA
atggcccggaagaagctgaagaagttcaccaccctggagatcgtgctgagcgtgttactattagtgttgtttatcatcagcatagttctcattgtcctattggctaaagagagcctaaaaagcaccgctccagatcccggaactaccgggacccccgatcctggcactacaggcacacctgatccaggcacaactggtacaacacacgcccgcaccaccggcccacctgatcccggcacaacaggtactacacccgttagtgctgagtgtcctgtggtgaatgagctcgagcggatcaactgcattccggaccagccccctaccaaggccacatgtgaccaacgcgggtgctgctggaatccccaaggtgcagtgtccgtgccttggtgctactactccaaaaatcattcttatcatgtcgagggcaatctggtgaatacaaatgccggtttcactgccagactcaagaaccttcctagctcaccagtgttcggctccaatgtggacaatgtgctacttactgcagagtatcagacatctaataggtttcacttctag

SEQ ID NO: 194086 - DNA, 4989 bp, synthetic construct
  misc_feature 1..4989: note = Description of Artificial Sequence: Synthetic coding sequence
  source 1..4989: mol_type = other DNA
gccgtgagcgtgccctggtgctactacagcaagaaccacagctaccatgtggaaggcaacctggttaacaccaacgccggattcacagcacgcctgaagaatcttccatccagcccagtattcggaagcaatgttgataatgttttgctcacagccgaataccagacctcaaatcggttccattttaagttgacagatcagaccaacaaccgctttgaagtcccacatgagcatgtgcaatcctttagcggcaacgcagccgcctccctgacatatcaggtcgagattagtcgccagccattcagcatcaaggtaacgcgccgctctaataaccgcgttctattcgattccagtatcgggcctctcttgtttgcggatcagttcctgcaactctcaacgcgtctaccctctaccaacgtgtacggtctcggggagcacgttcaccagcagtacagacacgatatgaattggaagacatggccaatcttcaatcgagacaccacgcccaatgggaatggtactaacttgtatggagcccagaccttcttcctgtgccttgaagacgcatccgggctgagtttcggcgtcttcctgatgaacagcaatgccatggaggttgtgctgcaaccagccccagctattacatacagaactatcggagggatcctggatttctacgtgtttttgggaaacacccccgagcaagtcgtccaagagtacctggagctgatagggcgaccagctctgccctcatattgggcacttggctttcacctctcccgctacgagtacggtaccctggataacatgcgggaggtggtcgagcgaaaccgtgccgctcaacttccatatgatgtgcaacatgccgacatcgactacatggatgaacgacgcgatttcacctatgattcagtcgatttcaagggatttccagaattcgtgaatgagctacacaataacggccagaaactagtgataatagtggatcctgcgatttctaacaacagctcatcgagcaaaccgtatggcccctacgaccggggatctgatatgaaaatttgggtgaacagttcggacggagttaccccacttataggtgaggtgtggcctggccagacagtgttccccgactatacaaaccccaactgtgcggtgtggtggacaaaggagttcgagctgttccacaatcaagttgagttcgacgggatttggatcgatatgaacgaggtgtcgaatttcgtcgacggctcagtgtctggttgttctaccaataacctcaataatccccccttcacaccgcggatcctggacggctacctcttctgcaagaccttgtgcatggacgccgtgcaacattggggcaaacagtatgacatccacaacttgtacggatactcaatggcagtggcaacagctgaggctgccaagacagttttccccaacaaaaggagcttcatcttgacccgatccacctttgcaggctccggcaaatttgccgctcattggcttggggataatactgccacatgggatgatctgagatggagcattccgggtgtcttggaatttaacctgtttggcattccaatggttgggccagatatttgcgggtttgctctggacacccctgaagaactgtgtcgccggtggatgcagctcggggcgttttatcctttttctaggaaccacaacgggcaaggatataaggatcaggacccagccagttttggtgccgattccctgctgctaaacagttctcggcactacctgaacatccgatacactttgttgccctatttgtatacgctcttctttagagcccacagccggggcgacactgtcgcgagaccattgttacatgagttttatgaggataatagcacttgggatgtgcaccagcagttcctgtggggacctggattactgattacccccgtgttagatgagggtgctgaaaaggtgatggcatacgtacctgacgccgtttggtatgactatgagacaggtagtcaggtgagatggagaaaacagaaagttgaaatggagttgcccggtgacaagatagggctgcacctgcgagggggctatatttttcccactcaacagcccaacactactacactggcctcaagaaagaaccccctggggctgatcatcgctctggacgagaataaggaagccaagggagagctgttttgggataatggggagacaaaggacaccgtcgctaataaagtttatctcctgtgtgaattcagtgtgacacaaaatagactggaagtgaatattagccagtcaacctacaaggatcccaacaacctcgcgtttaatgagatcaagattcttggaactgaggaaccatctaatgtgactgtcaaacacaatggtgttcccagtcagacttctcctacagtgacatacgattctaacctgaaagttgctataattactgatattgatttactgttaggcgaggcgtatacggttgaatggtctattaaaattcgcgatgaggaaaagatcgactgctacccggacgaaaatggcgccagtgccgagaattgcacagccaggggatgcatctgggaagctagcaactccagcggagttccattttgctacttcgtgaatgacctgtatagtgtcagcgacgtgcagtacaactctcatggagcgacggctgacataagtttaaaatcttcagtctatgccaacgcatttccaagcacgccggtgaaccctctgaggctcgatgtcacctaccacaaaaacgaaatgctacaatttaaaatctacgaccccaataaaaacagatatgaagtacccgttcccctgaatattccaagcatgccttctagtacacccgaaggtcagctgtacgacgttctaattaaaaaaaatcctttcggaatcgagataagacggaaaagcactggaaccatcatttgggattcacagctgcttggctttactttcagcgatatgtttattcgcatcagcacccggcttccatctaagtacctctatggttttggggagacagagcatcggtcctatagaagagacctcgagtggcatacttgggggatgttctcgcgtgatcagcctccagggtataaaaagaattcctacggggttcacccctactacatgggcctagaggaggacggatcagcccatggggtccttctgctaaactctaatgcaatggatgtgaccttccagccgttgcctgcattgacataccgcaccactggtggagtgctcgacttctacgtgtttctgggccccactcctgagctagtgacccagcagtataccgaactaatcggtagacccgtcatggttccttattggtctctaggattccagttatgtaggtacggttatcagaacgactcagagattgcctccttgtatgacgagatggtcgctgcgcagatcccctacgatgtccagtactccgatatcgactacatggaacgtcagctggacttcacgctctccccaaagttcgctgggtttccggccctgattaatagaatgaaggctgatggcatgagggtgatcctgattctcgatccggctatctcaggtaatgagacacagccctacccggcgttcacacggggagttgaagatgatgtgtttattaagtatcccaatgacggcgacatagtttggggcaaggtttggcccgattttcctgatgttgtggtgaacggatcgctggactgggatagccaggtcgagctctacagagcatacgtggcttttcctgactttttcagaaacagcaccgctaaatggtggaagagagagatcgaggaactgtataacaaccctcagaaccctgaaagatctctgaagtttgatgggatgtggattgatatgaacgagcccagcagtttcgttaatggcgcagtctccccaggctgccgggacgctagcctgaatcatcctccgtatatgccacacctagaaagcagagacagaggcctgtcaagtaagacgttgtgcatggagtcacagcagatactgcctgatgggagcttagtgcagcattacaacgtgcacaatctgtacggctggtcccaaacacgtcccacttacgaggccgtccaagaggtgacagggcaacggggagttgtcattacacgttccactttcccctcatctggcaggtgggccgggcattggctcggagacaacactgcagcctgggatcagttgaagaagtccatcatcgggatgatggagttcagcctcttcggtataagctacaccggcgccgatatttgtggcttttttcaggatgccgaatatgagatgtgcgtgcggtggatgcagctcggggcattctatcccttttctcggaaccacaacacaattggcacgagaaggcaggaccctgtctcctgggacgctgcctttgtgaacataagcagaaacgtcctgcagaccaggtataccctcctgccatatctttataccctcatgcaaaaggcccacaccgagggcgtgaccgtggtcaggccactcctccatgagttcgtcagtgatcaggtaacatgggacatagactcgcaatttctgttaggccccgctttcctggtgtcacccgtgttggaaagaaatgccaggaacgtgaccgcttacttcccgcgcgctcggtggtatgattactacacgggagtggacatcaacgccaggggcgagtggaaaactttgcccgctcctttggatcacatcaacctgcatgtacgaggtggttacatacttccatggcaggagcctgcactaaacacgcacctttccagaaaaaatccgttagggcttattattgcattagacgagaataaagaggcaaaaggagagttgttttgggatgacggacagactaaagacacagtggccaagaaagtgtacctgctgtgcgagttttccgttacacaacaggtggtatttttaaatatcgtgttcaactag

SEQ ID NO: 194087 - DNA, 5574 bp, synthetic construct
  misc_feature 1..5574: note = Description of Artificial Sequence: Synthetic coding sequence
  source 1..5574: mol_type = other DNA
atggcccggaagaagctgaagaagttcaccaccctggagatcgtgctgtctgttctactcctagtacttttcataatcagcatcgtcctgattgtcctgttggctaaagaaagtctgaagagcactgcacccgaccctggtacaaccggtacgcccgacccagggacgaccggcacgccagatcctgggaccaccggcacaactcatgcacggacaacaggtcccccggacccaggaacaacaggcaccaccccagtgtccgctgaatgccccgtcgtgaatgaactggagagaattaactgcattcctgatcagcctccaactaaagccacttgtgatcagaggggatgctgttggaatccccagggagccgtctcagtgccatggtgctactacagtaaaaatcacagctaccatgtggaagggaacttggtcaacactaacgccgggttcacagctaggctcaagaatctgccctcctcccccgtgtttggtagcaatgtcgacaacgtgctgctgaccgctgaatatcagacttcaaatcgattccactttaagctgacggatcagactaataatagatttgaggtcccccatgaacatgttcagtcgttttccggcaacgccgctgcctcactcacataccaggtcgaaatcagtcgacagccttttagcattaaagtcacccgacgctctaacaatcgggtactcttcgactctagcattggccccctgctgtttgctgaccagtttctgcagctgtccactcggctgccctccaccaatgtgtatggcctgggagagcatgtgcatcagcaataccggcatgatatgaactggaagacctggcctatatttaatagggacacaacaccaaacggcaatggaaccaatctgtacggggcccaaaccttcttcttgtgcctggaggacgccagcggactgtcttttggtgtcttcttgatgaattccaacgccatggaagtagtgttacaacctgcacccgccatcacgtatcgaacaattggcggcatcttggatttctacgtttttctcggaaacacacctgaacaggtggtccaggaatacctcgaattgattggaaggccagctctccccagttactgggcactgggattccacttgtccagatacgagtacgggaccctagataatatgcgtgaagtcgttgagagaaaccgggctgcccagctgccctacgacgttcagcatgcagacattgattacatggacgaaaggcgcgattttacctacgatagcgtcgatttcaaaggattccccgaattcgtaaacgagttgcataataatggacagaaactcgtcatcattgtcgacccagctattagcaataattcttcgtcctctaaaccttatgggccttatgaccggggctcagatatgaagatctgggtgaattcgtcggacggggttaccccgctgatcggtgaggtgtggccaggccagacagtgttccctgactacacaaaccccaattgcgcagtctggtggacgaaggagtttgagttgtttcataatcaggttgaattcgacggtatttggatcgatatgaatgaggtgtccaattttgttgacggaagtgtgtctggatgtagtaccaataacttaaataatccaccatttactccccggatactcgatggctaccttttttgcaaaactctgtgtatggatgccgtccagcactgggggaagcagtatgacatccataatttgtatggctatagcatggccgtcgctactgcagaggccgctaaaacagtatttccgaacaagcggtctttcatcctgacccgctcaacctttgctggaagtgggaagttcgccgcccactggctgggcgacaacaccgcgacctgggacgatttgagatggagcattccaggagtgctcgagttcaatctgtttggtatccccatggtgggacctgatatttgcggtttcgcattggacacaccagaagagctgtgtcgaaggtggatgcagctaggcgccttctatcctttctcgagaaatcacaacggacagggctataaagaccaggacccggcctcatttggtgctgatagcctgctcctcaactcatcccgccattatctgaatatcaggtatactttgctgccgtacttatacacgctgttctttcgtgcgcacagcaggggtgacacagtagcccgcccccttttacacgaattttacgaagacaatagtacctgggacgttcaccagcagttcttatggggtccaggcctattgatcaccccagttctcgatgagggcgcagaaaaggtgatggcatacgttccagacgccgtgtggtatgactacgagaccggcagccaagtacgctggcgaaagcagaaggttgagatggagctgcccggagacaagatcgggttgcacctgcgcggcggatatatatttcctactcagcaacccaataccaccacccttgcttctagaaaaaacccccttggtctgattatcgccctcgacgagaacaaggaggctaagggcgaactgttctgggataacggtgaaacgaaagatacagtagctaataaggtgtatttgctctgcgagttctccgtcactcagaaccgcctagaggttaacatctcgcaaagtacctacaaggacccaaacaatttggccttcaacgagataaaaatcttaggcactgaggagccctccaacgtgacagtaaagcacaatggagtaccatcccagacatcccccaccgtgacctacgacagtaacctcaaggtcgccatcatcacagatatcgaccttctcctgggagaagcttataccgtcgaatggtctatcaaaattcgcgacgaggaaaaaatcgactgctaccctgacgaaaacggagcctctgccgaaaactgcacggcccgcggatgcatttgggaggcctccaatagctccggcgtgcccttctgctactttgtcaacgacctgtactccgtaagcgatgtacagtacaactcccatggtgcaaccgccgatatctctcttaagtccagtgtttatgccaacgcgtttccatccacaccagttaatccgctacgactcgatgtgacataccacaaaaacgagatgttacagtttaaaatttatgatccgaacaagaatcgttatgaggtaccggtaccactcaatattcctagtatgccctcctcaaccccagagggccaactgtacgatgtactcattaaaaagaaccctttcggcattgagatacgccgaaaatccacaggcacgatcatttgggacagccagttgctggggtttaccttctccgatatgtttatcagaattagcacaagactaccttctaagtatctctacgggtttggcgagaccgaacatcgctcctatcgtcgcgacctcgagtggcacacatggggcatgttcagtagagatcagcccccgggttacaagaaaaacagttacggagtccatccgtactacatgggcctcgaggaggatggatccgcccacggcgtgctgctactcaatagcaatgcaatggacgtgacatttcagcctttgcccgccctaacctatcgaactactggcggtgtactagatttttacgtttttttagggcccactcccgaactagtgacccagcaatacacagagctgatcggccggccggtcatggttccttattggagtctaggcttccagctgtgccgttatggataccagaacgactctgagatcgcctcactctacgatgagatggttgccgcacagatcccctacgatgtgcagtactcagatatagattacatggagaggcagctcgacttcactctaagtccaaaatttgctggatttccggcactcataaacagaatgaaagcagatggcatgcgtgtgattctgattctcgacccagctatttctggaaacgaaactcagccatatcctgccttcacaagaggagttgaagatgacgtgtttattaagtaccctaacgacggcgacatcgtgtggggaaaggtgtggcctgatttccctgatgtggtcgtgaacggatccttagactgggattcccaggtagaactatatcgcgcctacgtggctttccccgacttcttccggaattccaccgctaagtggtggaagagggagatcgaggagctgtacaacaaccctcagaaccccgagcgctctctgaagttcgacggtatgtggattgacatgaacgagcccagttcctttgtgaacggagccgtctcacccgggtgccgagatgcatccctgaatcacccaccctatatgccccacctggagtccagagaccgcgggctgtcttcgaaaaccttgtgcatggagtcacaacagattttgcccgatgggtctctggtacagcattacaacgtgcacaacctctatggatggtcccagacccgcccaacatacgaagccgtccaggaggtgacaggccagcgcggcgttgtcataacccggtcaacattccctagttccggtaggtgggctggtcattggctgggtgataataccgccgcatgggaccagttgaaaaaatccatcatcggcatgatggagttttcattgtttggaatctcttacacaggagctgacatatgtgggttcttccaggacgccgaatacgagatgtgcgtgcgctggatgcagctgggcgctttttaccctttcagtcgcaatcacaatacaattggcacccgccgccaagaccctgtctcatgggacgttgccttcgtaaacataagccgaacagtcctacagacccgatataccctcctgccttatctttacacacttatgcacaaggcgcataccgagggagttacggttgtccgtccattgctccacgaatttgtgtccgaccaagtgacctgggacatcgattcgcagtttctgctagggcccgcatttctggtcagccctgtgctggaaagaaacgcccggaacgtgacagcttacttcccccgggccagatggtacgactactatacgggcgtcgatataaacgctagaggcgagtggaaaactctacctgctcccctagatcacattaaccttcatgtcagaggcgggtacatcctcccgtggcaggagccagcactaaatacccacttgagcaggcagaagtttatggggtttaagatcgctttggatgatgagggaacagccggcggctggctcttctgggatgatggtcagagtatcgatacatatgggaagggcctctactacctggcgagcttctccgccagccagaatactatgcagagtcatattattttcaataactacattacaggaaccaatcctctgaaactcggctatatcgagatttggggagtgggaagtgtgcctgtgaccagcgtgtctatttcagtttctggtatggtcatcacaccgtcttttaataatgacccaaccacacaggttctgtcaattgacgtcactgacaggaacatttccctgcataacttcaccagcctcacgtggatctcaacactgtag

SEQ ID NO: 194088 - DNA, 2061 bp, synthetic construct
  misc_feature 1..2061: note = Description of Artificial Sequence: Synthetic coding sequence
  source 1..2061: mol_type = other DNA
atgctgctgcggggcgtgctgctggccctgcaggccctgcagctggctggagccctcgacctccctgcaggaagctgtgccttcgaggaaagcacctgcgggttcgattccgttctggcgtcactgccctggatcttgaacgaagagggccactatatttacgtggacacatcattcggtaaacagggcgaaaaagctgtgctcctctccccagatctccaggctgaagagtggtcctgcctgagactcgtgtatcaaattacaacctcatctgaatctctgagcgatccctcccaattgaatctctacatgcgatttgaggacgaaagtttcgacaggctactttggagtgctaaggaaccaagcgattcctggcttatcgctagtttggacctgcagaactcttcaaagaagtttaaaatcttaattgagggggtgctagggcagggcaataccgccagcatcgctctgttcgaaatcaaaatgacaacaggatactgcatcgaatgtgatttcgaggagaatcacctctgtggattcgtcaatagatggaatccaaatgtcaattggttcgttggcggtggatccattaggaacgtgcattctatcttgccacaggatcataccttcaagtctgagcttggacattacatgtacgtggactcagtttatgtgaagcacttccaggaggtcgcccagctcatcagtccacttacaacagcccctatggcggggtgcctgagcttttactatcagatacagcaggggaatgataacgtctttagtctttacactcgggatgtggccggcctttacgaggagatatggaaagctgacaggccaggaaatgcagcgtggaaccttgccgaggtcgagttctccgcgccctatcccatggaggtaatcttcgaggtggcatttaacggccctaaagggggatacgtcgctctggatgacatatctttttcacctgtgcattgccagaaccagactgaactgctgtttagcgcagttgaagcctcgtgtaacttcgagcaggacctttgcaacttctaccaggacaaggagggcccaggatggactcgcgttaaagtaaaaccaaatatgtacagggcaggtgatcacactacaggcctgggctactatctgctggccaacaccaagttcacatcacaacctggttatattggcagactctatggaccttctctgccgggaaacctccagtactgcttaagattccactatgccatctatggattcctcaaaatgagtgacacgctggcagtatatattttcgaggaaaaccacgtagtccaggaaaagatctggtccgtgttagaatctccgagaggcgtttggatgcaggccgaaattacgtttaagaagccaatgccaacaaaagtggtgtttatgagcctctgtaagtcattttgggactgtgggcttgtggcactagacgatattactattcagcttggcagttgttcgagctcagaaaagctgccacctcctcctggtgagtgtacgtttgagcaagacgaatgcacctttacccaggaaaagcggaatcggtcttcttggcataggaggaggggcgagactccgacctcttataccgggccaaaaggcgaccacactaccggagtgggatactacatgtatattgaggcaagtcatatggtttacggccagaaggccagacttctctcacgtcccttgagaggagtttctggcaagcactgtttgacttttttttaccatatgtacgggggcggcactggcctgctctctgtctacctgaagaaagaggaggattctgaggaaagtctgctgtggaggagacgaggtgaacagagtatctcatggctgcgcgcactgattgagtattcatgcgaaagacaacaccagattatatttgaggcgatcagaggggtctcaattagatctgacattgccatcgatgacgtgaaatttcaggctggaccctgcggggagatggaggacactactcagcagtcctccggatatagcgaggatcttaatgaaatagagtattag

SEQ ID NO: 194089 - DNA, 2880 bp, synthetic construct
  misc_feature 1..2880: note = Description of Artificial Sequence: Synthetic coding sequence
  source 1..2880: mol_type = other DNA
atggaggtgacctgcctgctgctgctggccctgatccccttccactgccgaggtcaaggcgtgtatgccccggctcaggcccagatagtacatgccggtcaggcatgtgtggtgaaggaggacaatataagcgagagagtctacaccattcgggagggggacacactgatgctgcagtgcctagtcaccggccacccgcggccacaggtgcggtggacgaaaacagccggaagtgccagcgataagtttcaagaaacatcagtgttcaacgagaccctacggatcgagcggattgccaggacacaaggggggcgatattattgcaaagccgagaatggtgtgggggtgcctgcaattaagagcatccgggttgatgtccagtaccttgacgagccgatgttgacagtgcatcaaaccgtctcggatgtccgaggcaatttttatcaggaaaagaccgtgtttctcaggtgtacagtgaactccaatccaccggctcggttcatctggaagcgaggaagtgataccctgagccattcgcaggacaatggcgttgacatctatgagcctctatatacacagggcgagacaaaagtgttgaagctgaagaatctccgcccgcaggattacgcctcctatacatgtcaggtatccgtgagaaacgtgtgcggtattcccgataaggcaatcacatttcgactgacgaatacaacagctcctcccgccctgaagttgagcgtaaatgaaacactcgtggtgaaccccggtgagaacgtcaccgtgcaatgtctgctaaccggcggcgatcccttgccccagctgcagtggtcgcatggccccggccctctgccattaggcgccctcgcccaggggggtacactgagtatcccttctgtccaggcacgagattctggctattataattgcaccgcaaccaacaacgtgggaaacccggctaaaaaaactgtaaacctgcttgtccgctccatgaaaaacgcaacctttcagatcacgccagatgttattaaagagtctgagaacatccagctcggacaagatctcaaactgagctgtcacgtggacgccgtgccccaagagaaggtgacttaccagtggttcaagaacggaaaacctgccagaatgagcaaacggctgctcgtgacgcgcaatgatccagaactgcctgccgtgacatcttctcttgagctgatcgacttacacttttcagactacggcacctacctgtgcatggcaagctttcccggggcccccgttcctgatcttagcgtggaggtgaatataagttcggaaacggtgccacctacaatcagtgtgcctaaaggacgcgcagtggttactgttcgtgaaggatcccctgcagaacttcagtgtgaggtgcgtggcaaacctcgccctcccgttctgtggtcccgagtagataaagaggctgcattgctgccctcaggattgccacttgaggagacccccgacggtaaactgcgcctagagcgcgtgtcaagggacatgtccggaacttatcggtgccaaacagctaggtacaacggttttaatgtcagacccagggaagcacaggtgcaattaaacgttcagtcaccctgctttcctccggaagtggaacccagcagccaggatgtgaggcaggccctcggtaggcccgtgctcctcagatgcagcctgctgcgtggtagccctcagcggattgcttcagcggtgtggaggttcaagggacagctgctgcctcctccccctgtggttcctgctgcagctgaggcacctgaccacgcggagctccgactggatgctgtaacaagagactcaagcggaagttacgagtgctccgtgtctaacgatgttggtagtgcggcttgcctgtttcaggtctcggcaaaggcgtacagccccgaattctacttcgacacgccgaatccaactcgaagccacaagctctccaagaactactcctatgtgctgcaatggacccagagggaacccgacgcagtcgatccggtgctgaactatagactctctatccgccagcttaaccagcataacgcggttgttaaggctattcctgtcagaagggtagagaaaggacagctactcgaatatatactgaccgatctgcgtgtccctcactcttacgaggtgcgactgactccttacacaacattcggcgcaggagatatggcctctcgcatcatacattacaccgagctcctggcccttcgaacactgtccagcgataatacgtgccactttgaagatgaaaagatctgcgggtacacacaggatctgacagacaactttgactggacccggcagaatgctctcacacagaatccaaaacgttctccaaatacgggcccgcctactgatatttctggaactccggagggatattacatgtttattgaaacaagccggccccgcgagctgggtgatcgtgcaagactggttagccccctatacaatgctagcgcaaagttttattgtgtttcctttttctatcatatgtacggtaaacatattggatctctgaatctgcttgtcaggtcccgcaacaaaggggcactggacacccacgcctggagtctgagtggaaataagggcaatgtctggcagcaagcccacgtgccaatcagccctagcggtcccttccagattatcttcgagggcgtacggggaccaggctaccttggggatattgccatcgacgatgtcaccctgaagaagggggagtgtcctcgcaaacaaacagaccctaacaaggtcgtggttatgccaggcagtggcgctccgtgccagtcctctccacaactgtggggcccaatggccatttttctactcgcactgcagcgctag

SEQ ID NO: 194090 - DNA, 2868 bp, synthetic construct
  misc_feature 1..2868: note = Description of Artificial Sequence: Synthetic coding sequence
  source 1..2868: mol_type = other DNA
atggaggtgacctgcctgctgctgctggccctgatccccttccactgcagagggcaaggggtgtacgcccctgctcaagcgcaaattgttcacgcagggcaggcctgcgtcgtcaaggaagataacatcagcgaacgcgtctacacaattcgggaaggagacacactgatgttacaatgcctggtcactggacaccccagaccacaagtcaggtggactaaaaccgccggcagcgctagcgataaatttcaagagactagcgtgtttaacgaaacgctcaggatcgagcggattgccagaactcagggaggacgctactattgcaaggccgagaatggcgtgggagtccctgcgatcaaatccattcgggtggacgttcagtatctggacgaaccaatgctaaccgtccaccagactgtgtccgacgtgagaggaaacttttaccaggagaaaactgtctttctgcgctgtacagttaacagcaacccacccgctcgtttcatttggaagaggggttctgatactttatcccatagtcaggacaacggcgttgatatctacgagccactgtatacacagggggagaccaaggtattgaagctgaaaaacttgcgcccacaagattatgcttcctacacctgtcaggtgtctgttcgaaatgtctgcgggatccctgacaaagccatcaccttccgattgactaatactaccgcccccccagcgctcaaattgtctgtcaatgaaactttggtagtcaaccctggagaaaatgtcactgttcaatgtttactcactggtggggatccactacctcagctacaatggtcccacgggccgggtcctctcccactgggcgctttggcccaagggggaactcttagcataccaagtgtgcaggccagggattccgggtactacaattgcacagctaccaacaacgttgggaaccccgccaaaaagaccgtgaaccttttggtgaggtccatgaaaaacgcaacctttcagatcacacctgatgttataaaggaatctgaaaacattcagctaggccaggacctgaagctgtcatgccatgtggacgcggtgccgcaggaaaaagtgacataccagtggttcaaaaatggaaaacccgcccgcatgagcaaacggttgctcgtgacaagaaacgatcccgagctgccagctgtcactagcagtcttgagcttattgatctccatttttctgactatgggacatatctctgcatggcctccttccctggagcccccgttccagatctctcggtggaggtgaatatttcaagcgaaactgtccccccaaccatctcagtcccaaaaggcagggccgtcgttacagttcgggagggaagtcccgcagaactacagtgcgaggtgagggggaagcctcgtcctcctgtgctgtggtccagggttgataaagaagcagctttgctgccttctggactgccactcgaggaaactccagacggcaaattgcgcttagagagggtgtcccgagacatgtccggtacctatcgctgccagaccgcccggtataatggcttcaatgtacgaccgcgagaggcacaagtacaactgaatgtccagttccctcccgaagttgagcccagttctcaagacgtcaggcaggctttgggccggccagttcttttacgctgttcactgctcaggggatctcctcagcgtatagcctcagccgtctggcgcttcaaaggccagctcctgcctcctccccctgtggtgcccgctgcagccgaggcaccggatcacgccgaactgagattggatgccgttaccagggattcctcggggtcttacgaatgttctgtgtccaatgatgtgggctctgcggcctgtctctttcaagtgtcagccaaagcatacagtcccgagttctactttgacaccccgaatcccacaaggtcacacaaactgagcaaaaactacagctatgtgttgcagtggactcagagagagccagacgccgtggatccagtgctaaattatcggctttctattcggcagctgaaccagcacaatgctgtggttaaagcaattcctgttcgccgagtggagaaagggcagctcttggagtacatcctaactgacctcagagttccgcactcctacgaagtcagactaaccccctacacgacctttggggctggtgacatggcctcacgcatcatccactacaccgagccaattaacagccctaatctgtccgacaacacatgtcacttcgaggacgagaagatttgtgggtacacacaggatcttaccgacaatttcgattggactcgtcaaaacgctctgacacagaatccaaaaagaagtccaaacaccggaccaccaactgatatttccggtacccccgaggggtactacatgttcatcgaaactagccggcccagggagcttggagatcgcgcaaggttagtaagcccattatacaatgctagcgcaaaattctactgtgtgtcttttttctatcacatgtatgggaagcacatcggatcactgaatctcctggtacggtctcggaacaagggggccctcgatacccatgcgtggtccctgagcggaaacaaaggcaacgtatggcagcaggcccacgtgccaatttcgccttccggcccctttcagatcatcttcgagggtgttaggggacccggatacctcggcgatatcgcaatagatgatgtgactctcaagaagggcgagtgccctcggaaacagactgaccccaataaggtcgttgtgatgccgggatctggggcgccatgtcagtcgagccctcaactttggggccctatggccatattccttttggcactgcagagatag

SEQ ID NO: 194091 - DNA, 2922 bp, synthetic construct
  misc_feature 1..2922: note = Description of Artificial Sequence: Synthetic coding sequence
  source 1..2922: mol_type = other DNA
atggaggtgacctgcctgctgctgctggccctgatccccttccactgcaggggccagggggtgtatgcacctgcccaggcacaaatagttcatgcagggcaggcctgtgtagtgaaagaggacaatatatcagagagagtgtacacgatccgtgaaggggatacactcatgttgcagtgccttgtaaccggacacccccggccacaggtgcggtggacgaagaccgcggggagtgcaagcgataagtttcaggaaacaagcgtgtttaacgagaccctgcggattgaaagaatcgcacggacccagggcggacgctactactgcaaagccgagaatggggtgggcgtccctgcgattaagtccatcagggtggacgttcaatacttagatgagcccatgctcactgtgcaccagactgtgagcgatgtgcgcggaaatttctatcaggaaaaaacagtctttctgcgctgcactgtgaacagcaacccccccgcccggtttatatggaagcgcggcagtgatacgctgtcacacagccaggacaatggcgtcgacatttatgaacctttgtacacacaaggcgaaacaaaggtgttaaagctaaaaaacctgagaccccaagattacgcatcatacacctgccaggtgtctgtccggaatgtgtgcggcattcctgataaagcgatcactttccgactcaccaacactaccgcaccaccagccctcaagctcagcgtcaacgaaacattggtggtgaatcctggcgaaaatgtaaccgttcagtgccttttgaccggcggggatccactgccgcaactacaatggtcccatgggcctggtccattaccgctcggggccctcgcccagggcggtaccctgagcattccgtctgtgcaggccagagacagcggctactataactgcactgctactaataacgttggcaatcctgccaagaaaaccgtgaacctgctggttcggagcatgaaaaatgctacattccaaatcacaccagatgtgatcaaggagtccgagaatattcaactaggtcaggaccttaaactgtcatgtcacgtagacgccgtgcctcaagaaaaagtcacatatcaatggtttaagaatggcaagccagcgagaatgagcaagcggctccttgtaactagaaatgaccctgagctccccgcagtcacgagctccttggaactcatcgatcttcactttagtgactatggcacctacttgtgcatggcatcattcccaggggccccagtgccagatttgagcgtcgaagtgaatattagctctgaaaccgtgccccctacaatctcagtcccaaaggggagagccgtggtaaccgtgagagaaggatccccagctgagcttcagtgtgaagttaggggtaagccccggccaccggtactttggtctagagtcgacaaggaggccgctcttctgccttcaggtctgccgctcgaggaaacacctgacggtaagcttagactggagagagtgtcccgtgacatgtctgggacataccgatgtcagaccgcacgctacaatggatttaacgtgcgccccagagaggctcaggtgcagctgaatgtgcagtttccacccgaggtggaaccaagctctcaagacgtgaggcaggccctgggcagacctgtccttctgcgctgttccttactgcgggggagccctcagcgcattgcctctgctgtctggcgctttaaagggcagttgctcccaccacccccagtcgtacccgcagccgcagaagccccagaccacgctgagcttcgactggacgcagttactagggactctagcggatcgtacgagtgtagtgtgagcaatgacgtggggtcagctgcctgcttgtttcaggtgtctgctaaagcatactcccccgagttctacttcgacactcccaatcctactagatcccacaaactatctaaaaactactcctacgtgttgcagtggacgcagcgggagcctgatgccgtcgatcctgttctgaattaccggctttcgataagacagctaaatcagcacaacgcagtggtgaaggcgatccctgttagacgggttgagaaggggcaattgctggaatacattctcacagatctgcgcgttccgcactcctacgaggtaagactcactccatacacaaccttcggagcgggagacatggcaagccgtattattcactataccgagccaatcaattctcccaacctttctgacaacacatgtcactttgaagatgagaagatttgtggctacacacaggatctcaccgacaacttcgactggacacggcagaacgctcttacgcagaatccaaagcgtagccctaacactggccccccaactgatatttcgggcacgcccgaaggctattacatgttcatagagaccagccgcccaagggagttgggcgatagagcccgtctcgtgtcccccctgtacaatgcgtccgcaaagttttactgtgtgagttttttctatcacatgtatggcaagcatatcggctcgcttaacctacttgtccggtccaggaacaaaggagcactggatacacacgcttggagtctgtcagggaataaaggcaatgtctggcaacaagctcacgtgccaatcagtcccagcggcccctttcagatcatcttcgagggcgtgcggggcccaggctacctgggggatatcgccatcgacgatgtcactcttaaaaaaggcgagtgcccacgcaagcaaactgatcccaacaaaggagcccgcagggaggggggtggcggcgccgagtctggaggtagctgtgcttggcgtggctttctttcggtcgagggcggatgcctgggcctgaaccggggctctgagtgtctctctgatgggaatcatgtcgccctcaccgtgtag

SEQ ID NO: 194092 - DNA, 2184 bp, synthetic construct
  misc_feature 1..2184: note = Description of Artificial Sequence: Synthetic coding sequence
  source 1..2184: mol_type = other DNA
atggtgagcttccggctgagcaacaagaccgccagccccagcatcaagcttttggtggacgatcctatcgtggttaacccaggtgaggccatcacactggtgtgcgtgaccacaggcggagaaccagctccaagcctgacatgggtgcgatccttcggaaccctccctgagaagactgttcttaatggtggcacacttaccatcccagctattacatcagacgatgctggaacttatagctgtatcgcgaataataatgttgggaatccagccaagaaaagcacaaacatcattgttcgcgctcttaaaaagggaaggttctggatcacaccagacccataccacaaggatgacaacatccagatcggaagagaggtgaagatcagctgccaagtggaagcggtgccgtcggaggagctcaccttttcatggttcaagaacggccgccctctgcggagttcagagcgcatggtgatcacgcaaacggatcccgatgtgagtccaggcacaacaaacctggacataatcgatctgaaattcactgatttcggaacttatacctgtgttgctagcctgaaaggaggaggtatctctgatataagtatcgatgttaatatctcaagcagcactgtgccacctaatctgaccgttcctcaggaaaaatcaccgttagtgacaagggagggtgatacaattgagctccagtgccaggtgacagggaaaccaaagccaatcatcctttggagtagagcagataaggaagtggccatgcctgacggatctatgcagatggagagctacgacggcaccctgcgcatagttaacgtcagtagggaaatgtctggaatgtatcgatgtcagacctcccagtataatgggttcaatgtaaaacccagagaagctctggtgcagctgattgtccagtacccccccgccgtggagcctgctttcctagaaattcggcaggggcaggacagatctgttacgatgtcatgccgcgtactgagggcctaccctatccgcgttctgacctacgaatggcgcctcggcaataagcttctcaggaccggccaattcgattcgcaagaatataccgagtacgccgttaaaagtctgagcaatgagaattacggcgtgtacaattgcagcattatcaatgaggcgggcgcaggccgctgcagtttccttgtgaccgggaaagcatacgctccggagttttactatgacacttataaccccgtatggcagaatcggcatcgtgtgtactcttactctctccaatggacccagatgaatccagacgccgtcgacagaatcgtcgcctacagactcggcattcgccaggcgggacaacaacggtggtgggaacaagagataaagataaatgggaacatccagaaaggcgagctgattacatataacctgactgagctcattaagcccgaagcatacgaggttcgtctgacccctctgacaaagtttggcgaaggggactccactattcgggtgatcaaatattctgcccctgttaatccccatcttcgcgagtttcattgtgggttcgaggacggaaatatctgcctcttcacccaggatgacacagacaactttgactggactaagcagtctacagcaaccaggaacacgaagtatactcccaacaccggtccaaacgctgacaggagtggatctaaggaggggttctacatgtacattgagaccagcaggccccgcctggagggggaaaaagcccgactcctgagccctgtcttctccatcgctcccaaaaatccatacggaccaacgaacactgcctactgttttagcttcttttaccacatgtacggccaacatataggggtgcttaacgtgtacctccgtcttaaaggccagactacgatagaaaaccctctatggtcatcttctgggaacaagggccagaggtggaacgaggcgcatgttaacatctatcccatcaccagtttccagctcattttcgagggtattcggggccctgggattgagggggacattgctatcgatgatgtgtccatcgcagagggcgaatgcgccaagcaagatctcgccactaagaacagcgttgacggcgcagtgggaatactagtacatatctggttatttccaattatagtgttaatttccattctgtctccacgacgttag

SEQ ID NO: 194093 - DNA, 477 bp, synthetic construct
  misc_feature 1..477: note = Description of Artificial Sequence: Synthetic coding sequence
  source 1..477: mol_type = other DNA
atgtacatcgagaccagccggccccggctggagggcgagaaggccagactgttgtcaccggtcttttccatagcccccaaaaatccgtatggcccgacgaatacagcatactgtttcagtttcttttatcacatgtacggccagcatattggtgtgctgaatgtgtatcttcggttaaaaggccagaccaccattgaaaaccccctgtggagttcttcgggaaacaagggtcagcggtggaacgaggcccacgtaaatatttacccaattacaagcttccagctcatcttcgagggcatacgcggccctggcatcgagggggacatagccatcgacgatgtaagcatcgctgagggcgaatgtgccaagcaagatctggccacaaagaatagcgtggacggcgcagtcggcatactcgtccacatctggctatttcccatcattgtgcttatcagcatcctttctccaagaaggtag

SEQ ID NO: 194094 - DNA, 3078 bp, synthetic construct
  misc_feature 1..3078: note = Description of Artificial Sequence: Synthetic coding sequence
  source 1..3078: mol_type = other DNA
atgagcgtgtggagcgccggcctgctgcggagcgcccggcggcggagacggggacggacagacggccggagatttcttctaagaagggcagtgccagggcacctcggccttgccagagctcgggtcgaaagggcctggctggccgcgggactacttaaggtgccacttcggacaccgtgggccggttacgtgcacgtgcacgtgaagatggacctcttgtacgggttagtatggctgttgaccgttctgctggagggtataagcggacagggcgtttacgcccctcctaccgttagaattgtgcacagcgggttggcatgtaacattgaagaggagagatactcagagcgcgtttacaccatccgggagggggaaaccctggagctgacttgcctcgtcactgggcaccctcggccgcagattcgatggacaaagaccgctgggtccgccagcgacagatttcaagatagtagcgtgtttaacgagacccttaggattaccaatatccagagacatcaggggggaaggtattactgtaaggcagaaaacggtctgggcagtcctgcgattaaatcgatacgcgtagacgtgtattacctagacgatcccgtggtgacagtgcaccagagcatcggagaagctaaagaacagttctactatgaaaggaccgtgttcttgaggtgtgtggctaatagtaatcccccggtaagatacagctggaggagaggccaagaggtcctgctgcagggctctgacaagggggtggagatttacgaaccgttcttcacacaaggagagactaagattctcaaactcaaaaatctgagacctcaggactacgccaactattcctgcattgcgtccgtgcgcaatgtatgcaacataccggacaaaatggtgagtttcagactgtctaacaaaactgcatccccatcgatcaaactgctggtggacgatcccatcgtggtgaatccgggggaggctattacgcttgtctgcgtgactaccggcggcgaacctgccccaagcctcacttgggtgagatcgttcggtactctgcccgaaaaaacagtcctgaatggggggaccctcacaattcccgccatcactagcgacgatgctggcacgtacagttgtatagccaacaacaacgtcgggaaccccgcgaaaaagtcaacgaacatcatcgtgagagcgctcaagaagggacggttctggataacacctgatccttatcataaggatgataatattcagatcgggagagaggtgaaaatctcctgtcaggttgaggccgtgccttcggaggagctcacatttagttggtttaagaatggaagaccactgagatcttccgagaggatggtaattacacaaacggaccccgacgtaagtccaggaacgaccaatctggacatcattgatctgaagtttactgatttcggaacatatacgtgcgtagccagcctgaaaggaggggggattagtgacatttccatcgatgtgaacataagttcatctaccgtcccacctaatctgacagtccctcaggaaaagtctccgctggtaacgcgagagggagataccatagaactacagtgtcaggtgaccggcaaacccaagccgatcattctgtggtctagagccgacaaagaggtggctatgcccgacggaagcatgcagatggaaagctatgacggaaccctgaggattgtgaatgtctcccgagagatgtccggcatgtataggtgccagacttcacagtacaatggatttaacgtgaaacctagagaagcattggttcaattaattgtgcagtatccaccagccgtcgagcccgcgttcttagagataaggcaggggcaggaccggtcagtgaccatgagttgtcgcgtccttagggcataccctattagagtgttaacctacgaatggcggctgggcaacaagctgctgcggaccggccagttcgatagccaggagtacaccgaatacgccgttaagagtttatccaacgagaattacggagtctataattgctccattatcaatgaagccggcgctggtaggtgctcatttctcgtgaccggaaaagcttacgcccctgaattctattacgacacatacaatccagtttggcagaatcggcatcgtgtgtattcctactcactgcagtggacccagatgaatcccgatgctgtcgatcgcatcgtggcttatcggctcggcataagacaagccggacagcagaggtggtgggaacaagagatcaaaatcaatggcaatatccaaaaaggagaactgattacctataatctgaccgaacttatcaaacccgaggcctacgaggtgcgcctgactcccctcacgaagtttggggagggtgactccacaatccgggtgatcaaatactccgcgcccgtcaacccccatcttcgggagtttcattgcggcttcgaggacggtaatatttgcctcttcacccaggacgacacggacaatttcgattggacaaagcaaagcactgctaccagaaatactaaatacacccctaacactggtcctaacgcagaccggtcaggctctaaggagggcttttatatgtacatagaaaccagtcggccacggctcgaaggagaaaaggcacgccttttatcgcccgtattctctattgcaccgaaaaacccgtacggccctacgaacactgcctattgtttcagtttcttctaccacatgtatggacagcatatcggcgtacttaacgtgtatctgcggctgaaggggcagactaccatcgagaaccccctctggtcctccagcggcaataaagggcagaggtggaatgaagctcacgtgaacatttaccccattacttcattccagctcatttttgagggaatcagagggcctggcatcgagggagacatcgccatcgacgatgtgtcaattgcagaaggggagtgcgccaagcaggacctggccactaagaattctgtggatggcgctgtcggcatcctagtgcacatttggctgtttcctattatcgtgttaatctctatcctgtctccaagacgctag

SEQ ID NO: 194095 - DNA, 2184 bp, synthetic construct
  misc_feature 1..2184: note = Description of Artificial Sequence: Synthetic coding sequence
  source 1..2184: mol_type = other DNA
atggtgagcttccggctgagcaacaagaccgccagccccagcatcaagcttcttgtagacgatcccatcgttgtgaaccctggcgaagccataactcttgtatgtgtgacaaccggtggcgaacctgcgccgtccctaacatgggtcaggagttttgggaccttgcctgagaaaactgtgcttaacggtgggaccttgaccataccagccatcacctccgatgacgctggcacgtattcctgtattgccaacaacaacgtcgggaatcctgctaaaaaaagtaccaatatcatcgttcgcgctttgaaaaaggggaggttctggattacccccgacccttaccacaaggatgataacatccagatcggaagagaggttaagattagctgtcaggtcgaggctgttccttctgaagagctgaccttctcatggttcaaaaatggacggccgttaagatccagtgagcgaatggtgattactcagaccgatcctgacgtgagtcctggaacaacaaacttggacatcattgacttgaaattcactgattttggaacctacacatgcgtcgcttctttaaaaggaggcggcatctccgacatctcgatcgatgtcaatatttccagctctaccgtgccgccgaacctcactgtgccacaggaaaaatcccccctggtgacaagagagggcgatactatcgaacttcaatgccaggtgacaggtaagccaaagcccattattttgtggagccgggccgacaaggaggtcgcaatgcctgacgggagcatgcagatggaaagttatgatggcactctcagaatcgtgaatgtgtcccgagagatgtctggtatgtatcgatgtcaaacctcacaatacaacgggtttaatgtgaagcccagagaagccctggttcagttgatcgtccagtacccacccgccgtggagccagcttttctcgagatacgccagggtcaggatcggtcagtgactatgtcttgcagagtgcttcgggcataccccatacgggtgctgacatacgaatggcgactgggcaacaagctgcttcgcacaggccagtttgatagccaggagtatactgagtacgcggtcaaatccctaagcaacgagaactatggtgtttataactgtagtatcatcaatgaggccggagccggcagatgttctttccttgttactggaaaggcttacgctccagagttttactacgacacttataatccagtgtggcaaaataggcaccgggtgtatagttacagcctgcaatggacccagatgaacccagacgctgtggataggattgtcgcttacagactaggtattaggcaggcgggacaacagcggtggtgggaacaggaaattaagattaatggcaatatccagaaaggagagcttattacctacaatctgactgagctgatcaagcctgaagcgtacgaggtgaggctcacgcctctgacaaaattcggggagggggattcaaccatcagggtgatcaagtactctgctccagtcaatccacaccttcgcgagtttcattgcggctttgaggatggcaatatttgtctcttcactcaagacgacacggacaacttcgactggacgaaacaatcaaccgccactcggaacactaagtacacccctaacaccggcccaaatgccgataggagtggttccaaggaagggttttacatgtacattgagacgtccagaccaaggctggaaggcgagaaggcccggttgttgtctcctgtgttcagtatagcccctaagaatccctacggcccgaccaacaccgcctactgctttagtttcttttaccatatgtatggccagcacatcggtgtgctcaacgtatatctgagacttaaagggcagaccacaatcgagaacccgctttggagctccagcggaaataaggggcaaagatggaatgaagcacacgtgaacatctaccccatcacctctttccagctaatatttgaaggcatccggggccctgggattgaaggtgacatcgccatcgatgacgtctccatagccgaaggcgagtgtgctaagcaggatctggccactaagaatagcgtggatggagccgtcgggatactggttcacatctggctgtttccaattatcgtgctgattagtatcttatccccgagacgctag

SEQ ID NO: 194096 - DNA, 2871 bp, synthetic construct
  misc_feature 1..2871: note = Description of Artificial Sequence: Synthetic coding sequence
  source 1..2871: mol_type = other DNA
atggacctgctgtacggcctggtgtggctgctgaccgtgctgctggaggggattagtggccaaggagtgtatgccccaccaaccgttcggattgtccactcgggattagcctgtaacattgaagaggagcggtatagcgagcgcgtatataccatcagagaaggcgagacactggagctcacctgcctggtaactgggcaccctcggcctcagatacgctggacaaagactgcgggatctgcctccgaccgttttcaggactcctccgtctttaatgagaccctcagaattaccaatattcagcgccaccaggggggccggtactattgtaaggcagagaatgggctgggctcacctgctatcaaaagcattcgggtggacgtttactacctggacgatccagtggtgaccgtgcatcagtccatcggtgaggccaaagagcaattttactatgagcggacagtctttctgcgctgcgtggccaactcaaatcccccggtcaggtattcgtggagaaggggtcaggaagtgcttttgcaaggctctgataagggagtggaaatttacgagcctttctttacccagggcgagacgaagatccttaagctgaagaatttgaggccccaagactatgccaactactcctgcatcgcaagcgttaggaacgtgtgtaacatccccgacaagatggtgagcttccgtctgagcaacaagactgcctccccatctattaagctattggtggatgaccctatcgtagttaaccctggcgaagctataaccctggtgtgtgtaaccaccggcggagaacccgccccatctctgacttgggtgcgatcctttggcacactgcccgagaaaaccgttctcaacggcggcacactgacaatcccagcgatcacgtcagatgacgccgggacatactcctgcattgcgaacaacaacgtgggaaatcctgctaaaaagtccaccaacatcatcgtacgggcgctgaaaaagggtaggttttggatcacaccagacccttaccataaagacgataatattcagatcggccgagaggtcaagatatcttgccaggtcgaggccgtgcccagtgaggaactgactttttcctggtttaagaacggccgacccctccgctcaagtgagagaatggtaattacccagacagaccctgatgtaagccctgggaccaccaatctggatatcatcgacctcaagtttacagatttcgggacatacacgtgcgtcgcgagtttaaaaggaggcggcatcagcgacatctcaatcgacgtgaacatatctagctccacggttcctcctaacctgacggtgccgcaggaaaaatcacccctggttacaagagaaggtgataccatcgagctgcagtgtcaggtgaccggtaaaccaaaaccaattatcttgtggagcagggcagataaggaggtggcaatgcctgacggctcaatgcagatggagtcctacgatggaacgctgcgtatcgtgaatgtgtcccgagagatgagtggcatgtatagatgtcagacatcccaatacaatggctttaatgtaaagccaagggaagctttggtccagctgattgtccagtacccaccagctgtcgagcccgcttttctggaaataagacaaggccaagacagaagcgtgactatgtcctgtagagttttacgcgcttatcccatacgagtactgacgtacgaatggcgcctgggcaacaaactcttgcggaccggccagttcgacagtcaagagtataccgagtatgcagtaaaaagtctgtccaatgaaaattacggtgtgtataattgctctatcataaacgaagccggggcaggacggtgcagtttcttggtcaccggaaaggcttacgcgcctgagttctactacgacacatacaatcccgtgtggcagaaccgacaccgtgtttactcttattccctgcagtggactcagatgaatcctgacgcagttgatagaattgtggcgtatcgcctgggaataaggcaagcaggtcagcagcgctggtgggaacaagagattaagattaacgggaatattcagaagggcgaactcataacctataacctaaccgagcttattaaacccgaagcttatgaggtgcgcttgacaccgctgacaaagttcggtgaaggagactctaccatcagagtgatcaaatactccgcacccgttaatccccatcttcgtgaatttcactgcggattcgaggacgggaatatctgcttatttacccaagatgacacggataactttgactggacgaaacagagcacggctactcggaacactaaatacacccccaacacaggacccaatgccgataggagcggatccaaggaagggttttatatgtatatagaaacatcccgccctagactcgagggggagaaagcacgtttgctaagtcctgtgtttagcatcgcccccaaaaatccctacgggcccaccaatacagcatactgcttcagttttttctaccatatgtacggacaacacattggcgtgcttaacgtttacctgcgattgaaaggacaaactaccattgaaaaccctctctggtcatccagtggaaacaaaggccaaagatggaacgaggctcatgtcaatatttatcccatcacctcgtttcaattgatcttcgaggggatcagaggaccagggatcgaaggagacatcgccatcgatgacgtgtccattgccgagggggagtgtgccaaacaggacctagctaccaagaactctgtagatggtgctgtcgggattctcgtgcatatctggctgttcccaattatcgttttaattagcatcctgtccccaaggaggtag

SEQ ID NO: 194097 - DNA, 1143 bp, synthetic construct
  misc_feature 1..1143: note = Description of Artificial Sequence: Synthetic coding sequence
  source 1..1143: mol_type = other DNA
atgcggtggctgctgctgtactacgccctgtgcttcagcctgagcaaggcctcagcacatacagttgaactcaacaatatgttcggccagatccagagccccgggtaccccgactcctatccatccgattccgaggttacctggaatataacagtgcccgacgggttcagaatcaaactgtactttatgcacttcaaccttgagagctcctatctgtgcgagtacgactacgtgaaagtggaaacagaggatcaggtcctcgccaccttctgcgggcgcgaaacaaccgacactgagcaaactcccggacaggaggtggttctgtcacctggttcatttatgtccatcacctttagaagcgatttttctaacgaggaacgcttcactggctttgatgcccactacatggcggtggatgttgatgaatgtaaggagagggaggacgaggaactgtcttgcgaccactactgccacaactatatcggggggtattattgcagctgtcgttttggatacatcctccacactgacaatcgaacctgtcgcgtagagtgttcagacaatctgtttactcagcgaaccggggtgattacttccccagacttccctaacccttaccccaagtcttcggagtgcctatacactattgaattggaggaaggcttcatggtgaatctgcagtttgaggacatatttgatatagaagaccacccagaggtaccctgtccctacgattatataaagatcaaagtgggcccgaaggtgctgggcccgttctgcggcgaaaaggcccccgaaccgattagcacacagtctcacagcgtcctgatcctcttccattctgacaactctggagagaatcgtggctggcgcctgtcctacagggccgcaggaaatgaatgtcctgaactgcaacctccagtacacggaaaaattgaaccgtcacaggccaaatactttttcaaagatcaggtgctggtgtcctgcgacactgggtataaggtactcaaagataacgtggaaatggatactttccaaattgagtgcttgaaggacggcacgtggtccaataagatccccacgtgtaaaaaaaatgagatcgatctggaaagtgagctgaagtcagagcaagtcactgaatag

SEQ ID NO: 194098 - DNA, 2187 bp, synthetic construct
  misc_feature 1..2187: note = Description of Artificial Sequence: Synthetic coding sequence
  source 1..2187: mol_type = other DNA
atgcggtggctgctgctgtactacgccctgtgcttcagcctgagcaaggctagtgcacacactgtagaattaaacaatatgttcgggcagatccagtcccccggctatccagacagttatccatccgacagcgaggtcacttggaacatcactgtccctgacgggttcagaatcaagctgtattttatgcattttaacctggagtccagctacctctgtgaatatgactacgtgaaagtggaaacagaggaccaggtgctcgccacgttctgtggtagggagaccactgataccgaacagactcccggccaggaggtggtgctgtcccctggttccttcatgtctatcactttccgctctgatttcagtaacgaggaaaggtttacggggtttgacgcccattacatggctgttgatgtggacgaatgtaaggaacgtgaagacgaagagcttagctgcgatcactactgccacaattacatcgggggatattattgttcctgtaggttcggatatattttacatactgacaatcgcacttgtagggtcgagtgcagtgacaatttgtttacacaacggacaggggtcattaccagtcccgactttccaaacccataccccaagtctagcgaatgtctttacacaatcgaattagaagaggggtttatggtaaacctgcagttcgaggacatctttgatatcgaagatcaccctgaggttccctgcccatatgactacattaaaatcaaggttggtccaaaagtgctgggccccttctgtggagaaaaagcacctgagcccatttctacgcaatcgcatagcgtgcttatattgtttcatagcgacaactctggggagaatagagggtggcgactgagctatcgggccgcgggcaatgagtgtcccgagctgcagccccctgtgcatggaaaaatcgagccctcccaggccaagtactttttcaaagatcaggtcttagtttcctgcgatacggggtataaggttctgaaggataacgtggaaatggacaccttccagatcgagtgtttgaaggacggcacttggagcaataagattcccacctgtaaaattgttgattgccgggcccccggtgagctggaacatgggcttatcactttctccactcgtaacaacctgactacttacaagagcgagatcaaatacagctgtcaggaaccgtactataagatgttgaataataacactgggatctacacctgcagtgctcaaggcgtctggatgaacaaagtccttggccggtccttgcccacatgtctacctgaatgcgggcagcctagcaggagtctgccctctctggtgaaacgtattattggagggagaaacgctgaacccggtctatttccctggcaggccttgatcgtcgttgaggatacgtcccgcgtgccaaatgacaagtggtttggtagcggcgcactgttgagcgcctcttggatccttacagcggcacatgtgctccgctcccagagacgggatactacagtcatacccgtgagcaaggaacatgtgaccgtgtatctcggactgcatgacgttcgagataaatcaggggccgtaaactcctctgcagccagagtcgtgctccatcctgactttaatattcagaactataatcacgatatcgcgttggtacagctccaggaaccagttccactgggtcctcatgtgatgccggtttgtctgcctcgtctggagccagagggtccagccccacatatgctggggcttgtggccgggtggggcatttctaatcctaatgttaccgtcgatgagatcattagctcaggtactcgcactttgtcagacgtcttacagtacgtcaagctacccgtggtgccgcacgccgagtgtaagacttcctacgaatctcgtagcggtaactattccgtgaccgagaatatgttctgtgctgggtattacgagggaggcaaagatacgtgcctcggcgactcggggggtgcgtttgtgatctttgacgacctgagccagaggtgggtggtgcagggcctggtatcctggggcggccccgaagagtgtggatcgaagcaggtttatggggtttacactaaggtgtctaactatgttgactgggtgtgggaacagatgggcctccctcagagcgttgtcgaaccccaggtggagcgttag

SEQ ID NO: 194099 - DNA, 2100 bp, synthetic construct
  misc_feature 1..2100: note = Description of Artificial Sequence: Synthetic coding sequence
  source 1..2100: mol_type = other DNA
atgcggtggctgctgctgtactacgccctgtgcttcagcctgagcaaggccagcgcacacacagtagagttgaacaatatgtttggacagatccagagtcccggatatccagactcttatcccagcgattccgaggtcacttggaatatcactgtgccagacgggttcagaatcaaactgtacttcatgcattttaacctcgaatcatcctatctgtgcgaatacgactatgtaaaagtggagacagaagaccaggttttggctacgttctgcggacgcgaaactaccgacactgagcagactccggggcaggaagtggtgctgtcccctggaagtttcatgtccatcacctttcggtctgacttcagtaacgaggaaagattcaccggtttcgatgcccattatatggccgtggatgtggacgagtgcaaggaaagagaggatgaggagctgagctgcgatcattactgccataattacatcggtgggtattactgttcttgtagattcggttacatcctgcatacagataatcggacatgccgcgtggaatgttcagataacctgtttactcagagaacaggcgtgattacatctccggatttccccaacccctatcctaaatcctccgagtgcctctataccatcgaattggaggagggcttcatggtcaacctgcaattcgaggacatttttgatattgaagatcatcccgaggtaccttgtccctatgattacatcaaaatcaaggtggggccaaaagtgcttggccccttttgtggggagaaagcgcccgaacctatcagcacccagtcgcactctgtcctcatactttttcattccgataattccggagagaaccgtggctggcggctgtcctacagggcagccggaaatgagtgcccagaactccagcccccggtacacgggaagattgagcccagccaggccaaatacttctttaaggaccaggtattggtgtcatgcgatacgggatataaagtgttgaaggataatgtggagatggacacgtttcagatcgagtgcctgaaagacggcacatggagcaataaaatccccacgtgcaaaattgtagactgtcgcgcccctggagagcttgaacacggtctcattactttctcgaccagaaataacctgacaacttataagtccgagatcaaatacagctgccaggagccatactacaagatgttgaacaacaatacaggcatttacacatgctccgctcagggcgtttggatgaataaggtactgggccgcagtctgcccacctgcctgcccgtatgcggactgcccaaattctcaaggaaactcatggcacgaattttcaatggcagacctgcgcagaagggcactaccccttggattgccatgctgtcacatctcaatgggcaaccattttgtggaggaagcctcctaggctcttcctggatcgtcacagcagcacattgtctgcatcaaagcctggatccagaagatccaaccctccgcgactctgacctgctgtccccctcagactttaagatcattctcggcaaacactggcgattgaggtccgatgaaaacgagcagcacctgggtgtgaaacacaccaccttacacccccagtacgaccctaatacctttgaaaatgatgtggcgctcgtggaactattggagtccccagtcctcaatgcatttgttatgccaatttgcctgcctgaagggcctcagcaggaaggcgcgatggtcattgtatccgggtggggcaagcagtttctacagcgattccctgaaaccctgatggaaatcgagatcccaatagtcgatcatagcacatgccagaaggcatatgcaccgctaaagaagaaagtgacacgtgacatgatttgtgccggggaaaaggaagggggtaaagatgcatgtgcaggggacagtgggggtccaatggtgacccttaatagagagagaggccagtggtatttggtgggcaccgtgtcgtggggggatgattgtggcaagaaagaccgttacggggtctactcatatattcaccacaacaaagattggattcagcgggtaacaggtgttcgcaactag

SEQ ID NO: 194100 - DNA, 1848 bp, synthetic construct
  misc_feature 1..1848: note = Description of Artificial Sequence: Synthetic coding sequence
  source 1..1848: mol_type = other DNA
atgagcatcaccttccggagcgacttcagcaacgaggagcggttcaccggattcgacgcccactatatggccgtggacgtcgatgagtgtaaagagagagaagacgaagagctaagctgtgaccattattgtcacaactacattggaggctactactgttcatgtcgattcgggtatattctccataccgataataggacctgtagggtggagtgtagcgacaatctcttcacacagcgaaccggagtgatcaccagccccgacttccccaacccctatcctaagtcaagcgaatgcctgtatacaattgaactggaagagggtttcatggttaatctgcagtttgaagacatcttcgacattgaggatcatcccgaagtcccgtgtccttacgattacatcaagattaaggtcggccctaaagtcctgggcccattctgcggagagaaagcaccagagccaatatctacacagtcccactctgtgctgattctgttccattccgataattctggtgaaaacagggggtggagactctcatacagggctgccggtaacgagtgtcctgaattgcagccccccgtgcatggcaaaatagaaccatcccaggcgaaatatttttttaaggatcaggttttagtgtcctgcgatactggctataaggtgctcaaggataatgtggaaatggacacatttcagatcgagtgtctgaaagacggcacctggtctaacaagatccccacctgcaagattgtggactgtcgggcaccgggtgagttggagcacgggctcattacattcagcacccgtaataacctgaccacatacaaatcagaaattaagtactcttgtcaggagccctactacaaaatgcttaataacaacacggggatatacacctgtagtgcacagggggtatggatgaacaaggtgttagggcggtccctcccaacttgtctccccgagtgtgggcagccctcaagatctctgcccagcttggtgaaaaggattatcggcgggagaaacgccgagccaggtctgttcccttggcaggccctcatcgtggtggaagacacctccagggttccaaacgataaatggtttggctccggtgctttactttccgcctcatggatccttacagcagcccacgtgctcaggagccaaaggcgcgacaccacagtcatccccgtctcaaaggaacacgtaaccgtctacctggggttgcatgatgtcagggacaagagcggagcggtcaactcttccgctgctcgagttgtccttcatccagatttcaatatccaaaactataaccacgatatcgccctggtccagctgcaggaacctgtgcctttgggtcctcacgtcatgccggtgtgtttgcccaggcttgagcccgaaggtcccgcaccccacatgcttggccttgttgcaggttggggtatctcaaatcccaacgtgactgtggatgagattatctcaagcggcaccagaactctgtccgatgtgctccagtacgtgaagcttccggtcgttccccatgctgaatgcaagacatcttatgagagccggtccggaaactattccgtgacagagaacatgttctgtgcagggtactatgagggtgggaaagatacatgtctcggcgattctggaggggcctttgtgatttttgatgatctttctcagcggtgggtggtgcaggggcttgtgagctggggcggcccagaagaatgtggttcaaagcaggtttacggggtctatactaaggtgtccaactatgttgattgggtctgggaacagatgggcctcccccagtcagttgttgaaccccaggtggagaggtag

SEQ ID NO: 194101 - DNA, 249 bp, synthetic construct
  misc_feature 1..249: note = Description of Artificial Sequence: Synthetic coding sequence
  source 1..249: mol_type = other DNA
atgttctgcgccggctactacgagggcggcaaggacacctgcctgggcgattccggaggagcttttgtgatctttgacgacttgtcacagcggtgggtggtgcaggggctggtctcctggggcgggcccgaagagtgtggtagcaaacaggtgtacggagtgtataccaaagtgtcgaactacgttgattgggtgtgggagcagatggggcttcctcagagcgtggtggagccccaggtcgaacgctag

SEQ ID NO: 194102 - DNA, 1443 bp, synthetic construct
  misc_feature 1..1443: note = Description of Artificial Sequence: Synthetic coding sequence
  source 1..1443: mol_type = other DNA
atgagcatcaccttccggagcgacttcagcaacgaggagcggttcactggttttgatgcacactatatggccgtggatgtggacgaatgtaaagagagagaagacgaggagctgtcttgcgaccactactgccataattacattggaggatactattgcagttgcaggtttgggtatatactgcacaccgacaacaggacctgtcgggttgaatgctctgataacctgttcacccagcggaccggtgtgattactagcccagattttcccaacccatatccaaagtcctccgaatgcttatacacaatcgagctggaggagggattcatggtcaacttacagttcgaagacatttttgatatcgaagatcaccctgaagtgccgtgtccctatgattatatcaaaatcaaagttggacccaaggtgttggggcctttctgcggtgaaaaggcccctgaacctatcagcactcagagtcactcggtcttaatcctcttccattctgacaacagcggtgagaatcgcggttggcgcttgagctatagagctgccggcaatgaatgtccagaactgcaaccaccggtgcatgggaaaatcgaacctagccaggccaagtactttttcaaggaccaggttttggtttcctgcgatactggttacaaagtgctgaaggacaacgtcgagatggacacattccaaatcgagtgtctgaaagatggaacctggtccaataagattcctacgtgcaaaatagtggactgtcgggcccctggagaattggaacacgggctcattaccttttcaacccggaataacctgaccacatacaaatctgaaatcaagtactcatgtcaagagccttattacaagatgctcaataataatacgggaatatacacatgtagtgcacagggcgtttggatgaacaaagtgttgggccggagcctgcctacgtgtctgccagaatgcggacagccctcccggtctctccccagtttagtaaaaaggatcatcgggggtagaaatgcagaacccggtctgttcccatggcaagccctcatcgtagtagaggatacctctcgcgtaccgaacgataagtggttcggcagcggtgctctcctgtcagcatcttggattcttacagctgcacacgtccttcgcagtcagcggagggatacaactgtcattccagtcagtaaggagcatgttactgtttacttgggccttcacgacgtgagagacaagtctggcgctgtcaactcatcagcagctcgggtcgtgctgcacccagatttcaatattcaaaactacaatcatgatatcgcactcgtccaattacaggagccggtgcctttaggcccccacgtgatgcccgtttgcttaccaagactggagccccccggagggcggcttggtcacctgcagagccaatgcgatagttag

SEQ ID NO: 194103 - DNA, 2061 bp, synthetic construct
  misc_feature 1..2061: note = Description of Artificial Sequence: Synthetic coding sequence
  source 1..2061: mol_type = other DNA
atgcggctgctgaccctgctgggcctgctgtgcggcagcgtggccacacctctgggccctaaatggcctgagcccgtgtttgggaggttagcctcaccaggcttcccaggtgaatacgctaacgatcaggaacggagatggacccttaccgcacccccaggatacaggctgcgactgtacttcacacattttgatctggagctgtctcacctgtgcgaatacgattttgtgaaactgtcctctggagccaaggtgttggcaaccctctgcggacaagagagcaccgacactgagcgagcacctggaaaggacactttttatagcctcggcagttccctcgacattactttccggtctgactatagcaacgagaagcctttcaccggcttcgaggcattctacgccgccgaagatatagacgagtgccaggtggcacctggagaggctcccacctgtgatcatcattgtcacaatcacctaggcggattctactgctcctgccgggctgggtacgtacttcatcggaacaagcggacttgctccgcgctctgctccggccaggttttcactcaacgttcaggggaactgagtagccccgagtaccctcgcccataccctaaactgtcatcatgcacctactccatctccctcgaagagggcttcagtgtgatactggattttgtagagtcatttgatgttgaaactcatcctgaaacattgtgcccgtacgactttttgaaaatccaaactgatcgtgaggaacacggacctttctgtggaaagactctaccccaccgaatagagaccaaaagcaacacagtgacaatcacattcgttacagacgaatccggggaccacacaggctggaaaatacattatacttcaactgctcaaccctgtccctatccaatggccccccccaacgggcacgtcagccctgttcaggctaagtatattctaaaagactcctttagtatattctgcgaaaccggctacgagctgctccaagggcacctgccactgaagtcctttactgcagtgtgtcagaaggatggatcttgggatagacctatgcctgcctgcagcattgtggattgtggcccccctgacgacctcccgtccggcagggtagagtatatcacgggtccaggtgttacaacctataaggccgtcatccagtatagctgcgaggagaccttttatactatgaaagtgaatgacggtaaatacgtatgcgaagccgacggcttctggacatcctctaagggtgagaagagtctccccgtttgtgaaccggtgtgtggactttctgcccggactaccggcggccggatctatggaggccagaaggccaagcccggtgacttcccgtggcaagtgttgatcttagggggtactactgctgcgggagcactcctttatgacaactgggtgctgactgctgcacatgccgtgtatgaacaaaagcacgatgcctcagctttggacatacgaatgggcactctaaaacggctctctcctcactacacgcaggcgtggagtgaagccgtttttatacatgaaggatacacccatgatgccggcttcgataatgatatagccctgatcaaactgaacaataaagtagtcatcaattccaacattaccccgatctgccttccaagaaaagaagcagagagctttatgcgcactgatgatattggcaccgcctccggatgggggctgactcaaaggggattcctggcccgtaatttgatgtacgtagatatccccattgtagaccatcaaaagtgcactgctgcctatgaaaagccaccatatccgcgcggatctgtcaccgcaaatatgttatgcgcgggcctggagtcaggagggaaggattcctgtcggggcgactcaggaggagcgctcgttttcctggatagcgaaacggaacgctggtttgtggggggaattgtgtcatgggggagcatgaattgcggcgaggccggacaatacggcgtgtacaccaaagtaatcaattacatcccctggatcgaaaacatcatttccgatttttag

SEQ ID NO: 194104 - DNA, 558 bp, synthetic construct
  misc_feature 1..558: note = Description of Artificial Sequence: Synthetic coding sequence
  source 1..558: mol_type = other DNA
atgcggctgctgaccctgctgggcctgctgtgcggcagcgtggccacaccactgggccccaaatggccggaacccgtgtttggccggctggccagccccgggtttcccggtgagtatgcaaatgaccaagagagacgctggaccctgacggcaccccccggctacagactccgcctgtacttcacacacttcgacttagaactgtcacatctttgtgaatacgattttgttaagctgagcagcggagctaaagtgttggcaaccctgtgcgggcaggaaagcacggacaccgaacgcgctcctgggaaggacaccttttattccctcggttcctctctggacattacgttccggagtgactacagcaatgagaaaccctttacgggcttcgaggctttttacgccgccgaagacatcgatgagtgtcaggtggccccaggagaggcccccacctgcgaccaccattgtcacaaccacctagggggtttttattgttcgtgccgcgcaggttacgtcttacatcggaataagagaacatgcagcgaacagtctctctag

SEQ ID NO: 194105 - DNA, 1089 bp, synthetic construct
  misc_feature 1..1089: note = Description of Artificial Sequence: Synthetic coding sequence
  source 1..1089: mol_type = other DNA
atggccgccccccgggtgttccccctgagctgcgccgtgcagcagtacgcctgggggaagatgggatccaacagtgaagtggcccgacttcttgcgagctctgatccgttagctcaaatcgccgaagataaaccatacgcagagctctggatgggtactcatccacggggtgacgcaaagattctagacaaccggatcagtcagaagaccctctcccagtggatcgccgagaatcaggactcactcgggagtaaggtgaaggacacctttaatgggaacctgccctttttgttcaaagtgctgtccgttgagacgcctctgtcgattcaggcacaccccaataaggaattagctgaaaagctgcacctgcaggctccccagcactacccagatgctaatcacaaaccagagatggccatagccctgaccccttttcagggattatgtgggtttcgacccgttgaggaaatcgtcaccttcctgaaaactgctgctggcaataatatggaggatatcttcggggaacttttactccagctgcatcagcaatacccaggggatatcgggtgctttgccatctatttcctgaatctcttgacactcaagcccggcgaggccatgttcctagaagccaacgtaccgcatgcttatctaaagggagactgtgttgagtgcatggcctgctcggacaatactgtccgtgctggtcttacacccaagttcatagatgtgccaaccctatgcgaaatgttatcctatacaccaagctcctctaaagacagattgtttctccctacacggtctcaggaggacccgtatttaagcatatacgatcctccagtgccggacttcacaattatgaagactgaagttccaggatccgttactgaatataaagtcctggctctggactctgcgtccattctccttatggtacagggtaccgtcatcgctagcacccccactacacagacaccgattcctcttcaaagaggcggagtacttttcatcggagctaatgagagtgtctcactgaaactgacagaacccaaggatttactgatcttccgtgcatgctgtctcctgtag

SEQ ID NO: 194106 - DNA, 1272 bp, synthetic construct
  misc_feature 1..1272: note = Description of Artificial Sequence: Synthetic coding sequence
  source 1..1272: mol_type = other DNA
atggccgccccccgggtgttccccctgagctgcgccgtgcagcagtatgcttggggcaagatgggttctaactccgaggtggcaaggctgctagctagctctgacccactggcacagattgctgaggacaaaccttacgcggaactgtggatgggcacccaccctcgcggcgacgccaaaatattggataaccggatcagtcagaaaacactatctcagtggatcgcggagaaccaagattccctgggttctaaggtcaaggatacattcaatggcaatcttccttttctgtttaaggtcctcagcgtggagacccccttgtccattcaagcccacccaaataaggagctggctgaaaagctacacctacaggctccccaacattatcctgacgccaatcacaaaccagaaatggcaatcgctttaacacctttccaaggcttatgtgggttccggccagtggaggaaattgtcacctttctaaaaaaggttcctgagtttcagttccttattggagacgaagccgccacacacctaaagcagactatgagccacgacagccaggcagtggcctcatcccttcagtcttgcttctctcacctgatgaagtccgaaaaaaaagttgtggtcgagcagctgaatctgcttgtgaaacggatttcgcaacaggctgcggctgggaacaacatggaggacattttcggcgaattgttactgcagctgcatcagcaatacccaggcgatattggctgcttcgcgatttactttctaaacttactgaccctgaagcctggcgaggcgatgttcttggaggccaacgtgccacacgcgtacctaaaaggtgactgcgttgagtgcatggcttgcagcgataatactgttcgcgccggcctcacacccaaatttatcgacgtgcctacgctgtgcgaaatgctctcgtacaccccctcatcctccaaggacagactatttctcccgacaaggagtcaagaggacccttacctctctatctacgatcctcccgtcccagacttcacaatcatgaaaacagaagtgccagggtcagtgactgagtacaaagtgctggctttagattctgcctctattctactgatggtgcaggggacagtgatcgcaagtacaccaaccactcaaacacccattcctctgcagcggggcggcgtgttgttcattggcgcgaatgaatccgtcagtctgaaactaaccgagccaaaggacctactgatcttccgggcctgctgtctcctgtag

SEQ ID NO: 194107 - DNA, 804 bp, synthetic construct
  misc_feature 1..804: note = Description of Artificial Sequence: Synthetic coding sequence
  source 1..804: mol_type = other DNA
atgggcagcaacagcgaggtggcccggctgctggccagcagcgacccactggcgcagatcgcagaggacaagccttacgccgaactgtggatgggaacacaccccaggggtgacgctaagatacttgacaatcgaattagccaaaaaactctgtcacagtggatcgccgagaaccaggatagcttgggttcgaaggtcaaagacacttttaatggcaatttgccattcctattcaaggtgctgagcgtggagacccccctgtccattcaggcccatccgaataaggagctcgcagaaaagctgcacttgcaggctccccagcattatccggatgcaaaccataaaccggagatggctatcgcccttacaccatttcaaggtctctgcggtttccggcccgtcgaggagattgtgaccttcttgaaaaaagtgcctgagttccagttccttatcggcgatgaggcagccacacacctgaagcaaactatgagccacgatagccaggcggttgccagcagtttgcagtcatgtttcagccacctgatgaaaagtgaaaagaaggtggttgtggagcaacttaatctccttgtgaaaaggatcagccagcaggccgccgcggggaacaacatggaggacattttcggggaactcctgcttcaactacatcagcagtatcccggggatatcggctgtttcgctatctatttcctcaacctgttgaccttgaaacctggagaggccatgttcttggaggccaacgtcccccatgcttatctcaagggcggaccttggctctgccactag

SEQ ID NO: 194108 - DNA, 1122 bp, synthetic construct
  misc_feature 1..1122: note = Description of Artificial Sequence: Synthetic coding sequence
  source 1..1122: mol_type = other DNA
atgggcacccacccccggggcgacgccaagatcctggacaaccggatatcgcagaagaccctgtctcagtggattgccgaaaatcaagattcactggggagcaaggtgaaggacactttcaacgggaatttgccttttttgtttaaagtcctctctgtggagacgcccctcagcatccaagctcaccccaacaaagagctcgcggaaaagctgcatcttcaggccccacaacattatcctgatgccaaccacaaaccggagatggcaatcgctcttaccccttttcagggtttatgtgggtttcggccagtggaggagatcgtaacatttctcaaaaaggtccctgagtttcagtttctgataggagatgaggccgccacccatttgaaacagacaatgagccatgatagccaggccgtcgctagctccctacagtcctgcttctcccacctgatgaagtcagagaagaaggtggtcgtcgagcagctgaacttgctggtgaagaggatttcacaacaggctgccgctggcaacaatatggaggacattttcggggaattacttttgcagttgcaccagcagtatccgggcgacataggctgcttcgctatctacttcctgaatttgctgacgctcaaacctggcgaggccatgtttttggaggctaacgtgcctcatgcctatcttaaaggtgactgtgtagaatgcatggcctgcagcgacaacaccgtgcgggcgggactcacccctaaattcatcgacgttccaacactctgcgagatgctgtcttacaccccttcatcaagcaaagatagactgtttctgccaaccagaagtcaggaagacccatatctgtccatctatgatccaccagtgccagatttcactatcatgaaaacagaggtccccgggtctgtgacggaatacaaggtgctggctctcgatagtgccagcatcctcttgatggtgcaaggcaccgttatagctagcacaccaacaacccaaaccccaatcccactgcaaaggggtggagttttgtttataggtgcaaatgaatcagtttccctaaagctgacagagcccaaagatctgcttatcttccgggcgtgttgcttgctctag

SEQ ID NO: 194109 - DNA, 4371 bp, synthetic construct
  misc_feature 1..4371: note = Description of Artificial Sequence: Synthetic coding sequence
  source 1..4371: mol_type = other DNA
atgcggctgcccctgctgctggtgttcgccagcgtgatccccggcgcggtgctgctgcttgacactaggcagttccttatttacaatgaggatcacaaacgatgtgtagacgcagtgagcccatctgccgtgcagacggccgcttgtaaccaggatgctgagtcccagaaattccgctgggtgagcgagtcacagattatgagtgtggccttcaagctgtgtctgggagtgccatcaaaaaccgattgggtagcaattacactgtatgcctgtgacagcaaaagtgagtttcagaagtgggagtgcaagaacgacaccctattgggtatcaaaggagaagacctctttttcaactatggaaaccgccaggaaaaaaacattatgctgtataagggcagcggcttgtggtcccggtggaagatctatggtaccaccgataacctgtgctcccgcggttacgaagccatgtacacactgctcggaaacgccaatggcgctacttgtgccttcccattcaagtttgagaataaatggtacgctgactgcacctccgcaggcagaagtgacggatggctgtggtgtggtactaccacggactatgacaccgacaagctgttcggctattgtcctcttaaattcgaggggagtgagtcgctgtggaataaagatccactaacatctgtgagttatcaaattaactccaagtcagccctcacatggcaccaagcacgcaagtcctgtcagcagcagaatgccgaactcctgagtattacggagatccacgagcaaacatatctaaccggactgacatcatccctgactagtggcctctggatcggcttaaactctctcagtttcaatagtggatggcagtggtcagatcgaagccccttccgatacctaaattggctgcctggatctccaagcgcagaaccgggcaaatcctgtgtgtcactcaatccagggaaaaatgctaaatgggagaaccttgaatgcgtgcagaagctggggtatatttgtaagaaaggcaacaccactctgaactccttcgtgataccaagtgaatcagatgtgcctacacattgcccgtcacagtggtggccgtacgctggacactgctacaagattcatagagacgagaaaaaaatacaacgcgacgcgctcacaacttgcaggaaggaggggggggacctcacgagtatccatactatagaggagctcgatttcatcatatctcagctgggctatgaacccaacgatgaactctggatcggcctcaacgatattaagatccagatgtactttgaatggtcggatggcacgcccgtgaccttcacaaagtggctgcgcggagagccgagccacgaaaataataggcaggaggactgcgttgttatgaagggcaaagacggatactgggcggaccgtggatgcgagtggccgctaggatatatttgcaaaatgaaaagcaggtcccagggccccgaaatagttgaagtggaaaaaggctgtaggaaaggctggaagaagcatcacttttactgctatatgatcgggcatactcttagtacgttcgccgaagctaatcaaacctgcaacaatgagaatgcttacttaaccactatcgaagatagatatgaacaggccttcctgactagttttgttgggctgaggccggagaagtacttctggactggcctatctgatatacagaccaaggggacttttcagtggacaattgaggaggaagtgcggtttactcactggaacagtgatatgcctgggaggaagcctgggtgcgttgccatgcgtacaggaatcgcaggaggcctgtgggacgtattgaagtgtgacgaaaaagctaagtttgtctgcaaacactgggcggagggggtgacacaccccccgaaacccactactactcccgagccaaaatgcccggaagattggggcgcatcctctaggacctcattatgctttaaattgtatgccaaagggaaacacgaaaagaagacttggttcgagagtagggacttttgccgcgcactcgggggtgacctggccagcattaataataaggaggagcagcagacaatatggcggctcattactgctagcggatcctaccacaagctattttggctcggactgacctacggatcacccagcgaagggttcacctggagtgacggctctcctgtgtcctatgaaaattgggcatatggagaaccaaacaactaccaaaatgtagaatactgtggcgagctcaaaggagatcccaccatgtcttggaatgacatcaactgcgaacacctgaacaattggatctgccagatccagaagggacagacccccaagcccgagcctacacctgccccacaggacaacccgcccgtcaccgaagacggctgggtgatttataaagactaccagtactactttagcaaggaaaaagagacaatggacaacgccagagctttctgtaagcgaaacttcggggatctggtgtcaattcagtcagaatcagagaaaaagtttttatggaagtacgtgaaccgcaacgatgcacagagcgcttattttataggcctactcatcagcctggacaaaaagtttgcgtggatggacggcagcaaggtggattacgtctcatgggccacaggcgagccaaatttcgccaacgaggatgaaaattgcgtcacgatgtactcaaacagtggcttctggaacgatatcaattgtgggtatcccaacgctttcatttgtcagagacataattcgtccatcaacgccacgaccgtcatgcccactatgccctccgtgccgagtggttgtaaggaaggctggaacttttactcaaacaaatgttttaagatcttcggttttatggaagaggagagaaaaaactggcaggaggctcgcaaggcttgcattggttttggcggcaatcttgttagcattcagaatgagaaggaacaagctttcctaacgtaccacatgaaagactctactttcagcgcctggactggactgaacgacgtaaacagtgagcatacattcctttggactgacgggagaggtgtccattacacaaattggggtaagggctatcctggcggccgccgtagttcgctttcctatgaggacgcagactgcgtggtgattataggaggggcatcgaacgaagcgggtaagtggatggacgacacctgcgattctaaacggggatatatttgccaaacacgtagcgatcccagcttgaccaatcccccagccacaattcagactgatgggttcgtaaagtatggcaagtctagctacagcttgatgaggcagaaatttcagtggcatgaagccgagacatactgtaagctgcataacagtctcatcgcttccatcctggacccatacagtaacgctttcgcttggcttcagatggagacgtccaatgaaagagtgtggattgcattgaacagtaaccttacggacaatcagtatacgtggacagataagtggagggtgcggtacacgaattgggccgcggatgaaccaaagctgaaatccgcctgcgtgtatctagacctggatggctattggaaaaccgcacactgtaacgagtctttttattttctgtgtaaaaggtcggacgaaatcccggccaccgagcctcctcagctgcccggacgttgcccagaatctgaccacactgcctggatccccttccatggacactgctattatattgaatctagttatacgcggaattggggccaagcatctctggagtgcctgaggatgggttccagtctggtgtcaatcgagagtgctgccgagtcctcctttttatcttatcgcgtcgaacctctgaagagtaagaccaacttctggatcggcctgttccgaaacgtggagggcacttggctgtggatcaataattcccccgtcagcttcgtcaattggaacactggcgatccgagcggcgagagaaatgattgcgtcgccctccacgcgtcttccggcttttggtcaaacatccactgttctagttataaggggtacatatgcaagagacctaagattattgacgctaagcccacccacgagttgctgactacaaaggctgacacgcgtaagatggatccatcaaaaccctccagcaacgtcgcgggtgtggtgatcatagtgatcctcctgatccttacaggcgcagggcttgccgcttactttttttataaaaaacggcgcgtgcacttgcctcaggagggggcgttcgaaaacacactatatttcaatagccagtcttccccagggacctcagatatgaaggacctggtggggaacatagagcaaaacgagcattccgtaatctag

SEQ ID NO: 194110 - DNA, 4440 bp, synthetic construct
  misc_feature 1..4440: note = Description of Artificial Sequence: Synthetic coding sequence
  source 1..4440: mol_type = other DNA
atgggccccggccggcccgcccccgccccctggccccggcacctgctgcgctgcgttttgctcctgggctgtctccatctggggagacctggagctcctggggatgccgcactgcccgaaccaaacgtgttcctaatattctcccacgggctgcagggctgcctcgaggcccaaggaggccaggtacgggtgacaccagcctgcaatacaagcctccccgcccagagatggaaatgggtctcacggaaccggcttttcaacctaggaacgatgcagtgcttagggactggctggccaggaaccaatacgacagcctcattgggcatgtatgagtgcgatcgcgaagcactcaacctacggtggcactgtagaactctgggcgaccaattaagcctcctgctgggcgccagaacttcgaatatttcaaagcccggaaccttggagagaggagatcaaacacgaagtggccaatggagaatttacggatccgaggaggacctctgcgccttaccataccacgaagtctatacgatccagggtaattcgcacgggaaaccatgtacgatacccttcaaatacgataaccaatggttccacgggtgcacatctaccgggagagaggatggccacctttggtgtgcaaccacccaggattacggcaaggatgagagatggggattctgtcccataaagtccaatgactgcgagacgttttgggacaaggaccagctgaccgattcctgttatcagtttaacttccaatccactctgtcatggagagaggcgtgggctagttgcgagcagcagggcgccgatctgctttcaatcacagagatacacgagcagacctatataaatggtctgcttactggttatagttcgacactgtggatcgggctgaacgacctcgatactagcggcgggtggcagtggtctgacaattcccccttgaagtacctaaactgggagtctgatcagccagacaacccatcggaggaaaattgcggagttatccgcacggaatccagtggcgggtggcaaaatcgggactgctctatcgcgcttccatacgtctgtaaaaagaagcccaatgccactgccgagccaacaccgcctgataggtgggccaacgtcaaggttgagtgcgaacccagctggcagcctttccagggccactgttatcgccttcaagcagagaagagaagctggcaggagagtaaaaaggcctgtcttagaggcgggggcgacttggtttctattcacagcatggcggaacttgagtttattaccaagcagatcaagcaggaggtcgaggaactgtggatcgggctgaatgacctcaaactgcagatgaactttgagtggtccgacggttctctggtgagttttactcattggcatcccttcgaaccgaataattttcgcgacagtctggaagactgcgtgactatctggggcccagaggggagatggaatgactccccctgtaaccaaagcctgcccagtatctgtaagaaggctggccagcttagccaaggcgcggcagaagaggatcacgggtgtaggaagggttggacctggcattccccctcctgctactggctgggagaggaccaagtcacgtacagtgaggcgcgccggctctgcaccgaccatggaagtcaactggtgaccatcacaaatcgtttcgaacaggccttcgtcagctcactcatctacaattgggaaggcgaatacttctggaccgctctgcaggatttgaacagcacaggatcctttttctggctctcaggtgacgaagtcatgtacacacactggaatcgcgaccaacccggatactctcggggcggatgcgtagctttggctaccggaagcgccatggggctctgggaggtgaagaattgtacctcctttagggctcgatatatctgtaggcagtctctaggtactccggtcaccccagagctgcccgggccagatccgacaccttctctgacgggatcttgcccacagggctgggcctccgacacaaagctgagatattgctacaaagtctttagttctgagaggctgcaggataagaaatcttgggtgcaggcccagggagcatgccaggagctcggggcgcagctgctgagcctcgctagttacgaagaggagcactttgttgccaatatgcttaataaaatcttcggagaatctgaaccagaaattcatgaacagcactggttctggatcggactgaatcggcgggaccctcggggcggtcaatcttggcgctggtcagatggggtcggatttagttatcataattttgaccggtcacggcatgacgacgatgacataaggggatgcgccgtgctggaccttgcctctctccagtgggtcgctatgcaatgtgacacccagctggattggatttgtaaaatcccacggggaaccgacgtgagagaacccgacgattctccacaggggcgccgggagtggctgcgcttccaagaggctgagtacaaattcttcgaacaccattctacctgggcgcaagcccagagaatctgtacatggttccaggccgaactgaccagtgtgcactcacaggcggagctggacttcctcagtcacaacctacagaagttctcgagagcccaagaacaacactggtggatcggcttacacacctccgagtctgacggcagattccgctggaccgacgggtcaatcattaactttatctcctgggctcccgggaaaccaagacccgtgggtaaagacaaaaagtgtgtgtatatgacagcatccagagaagactggggagatcaacgctgtttaactgcactcccatatatctgcaagaggagcaacgttacaaaggaaacacaacctcctgatttgcctactaccgccttgggcggctgcccctctgattggatccagtttttgaacaaatgcttccaggtccaaggtcaggagccccagagtcgggtgaagtggtccgaagcacagtttagttgtgagcagcaagaagctcagttggtgactattaccaatcctcttgaacaggcatttatcactgccagcctgcccaacgtcacatttgacctctggattggcctgcacgcctctcaaagggactttcagtgggtggaacaggagcccttaatgtacgctaactgggcacctggcgagcctagcggcccgtctcccgcccctagcggcaacaaacccacaagttgcgccgtagtgctgcacagcccaagtgctcattttactgggaggtgggacgacagaagttgtacagaagaaacccacggcttcatctgccagaagggtacagacccctcactgagtccgtctccggcagcactgcctcctgcccctggtaccgagctctcttacctgaacgggacctttcggttgttacagaaaccacttcggtggcatgatgccctgctcctgtgtgagtctcggaatgcttctctggcatacgtgccagatccctatacgcaagcttttctaacacaggccgcccgaggcctgcgcacacccctctggatcggtctggcaggcgaggaaggcagccgccgttacagttgggtgagcgaggaacccctgaactacgttggttggcaggatggtgagccacagcagcctggtggatgcacttatgtcgacgtagatggtgcttggcggaccaccagctgtgatacaaaactgcagggcgcggtctgcggcgtctctagtggaccccctccgcctcgccggatttcataccacgggagctgtcctcagggcctcgccgattcggcatggatcccgtttagagagcattgctattcgtttcacatggagctgctgctgggtcacaaggaggccaggcagcggtgccagcgcgccgggggcgcagtgctgtcaattctggatgagatggaaaatgtgtttgtgtgggaacaccttcagtcatacgaagggcagagtaggggagcctggctgggcatgaatttcaaccccaagggggggactctcgtctggcaggacaatactgccgttaattatagtaactggggtccccccgggctgggaccatctatgctgagccataacagctgctactggatccagagcaactcgggcttgtggcgccccggtgcatgcaccaatatcaccatgggagtagtatgtaaattgcctagggcagagcagtcatcattttctccgtccgcccttccggagaatcctgcggcacttgtggtggtccttatggccgtgctcctcctactagccctgttaaccgctgcactcatactgtatagacggcggcagagcattgagcgcggcgcttttgaaggcgccaggtacagccggagttcctcctcccctacagaggctacggagaagaatattctagtgtccgatatggaaatgaacgagcagcaggaatag

SEQ ID NO: 194111 - DNA, 1038 bp, synthetic construct
  misc_feature 1..1038: note = Description of Artificial Sequence: Synthetic coding sequence
  source 1..1038: mol_type = other DNA
atgcccaccggccacctgggcagccccctggccctggccctgctgcctgttgccaccaaccggcccgcagttcaatggtcatgtactgccccccagcctacatccctcgccgccggcaccatcggcgccgcacgaaggaggcctatggcctccagcgcccgccgggcaagaggcagccgtaggtattcctgggtctcagaggagcccctaaactatgtgggatggcaggacggcgagccccagcagccaggcggctgtacctatgtcgatgtcgacggagcctggaggacgaccagctgcgacaccaaacttcagggagccgtttgcggagtatcaagcggtcccccacctccgagaagaatctcatatcacggctcctgtccccaaggtttagccgactctgcctggatcccctttagggagcactgctactcttttcacatggagctgctgctgggtcacaaggaagctcggcaaagatgtcagagagctggaggggctgtgttgtcaatcctcgatgagatggagaacgtatttgtgtgggaacatctgcaatcctacgagggccagagccgtggtgcgtggctcggtatgaactttaaccccaagggcggaaccctcgtgtggcaggacaacacagcagttaattactcaaactgggggccacccggattaggtcccagcatgcttagccacaacagttgctactggatacagagcaacagcggtctctggcggcccggcgcttgcaccaatattacgatgggcgttgtgtgcaagcttcctagggccgaacaaagcagtttcagccctagcgcactacccgagaaccctgccgcgctggtggtagtgttaatggccgtcttgttactactggctctccttaccgcagctctcattttatatcggagaaggcagtcaatagagagaggggccttcgaaggagcccgctattcccgctcaagctcttctcccactgaggcaaccgagaaaaacatcttggtgtctgacatggaaatgaacgaacaacaggagtag

SEQ ID NO: 194112 - DNA, 834 bp, synthetic construct
  misc_feature 1..834: note = Description of Artificial Sequence: Synthetic coding sequence
  source 1..834: mol_type = other DNA
atgttccccttctacagctgctggcggaccggcctgctgctgctgctgctggcagtggcagtacgcgaatcatggcagaccgaagaaaagacctgtgacttggtcggcgagaaggggaaagaaagcgagaaggagctggctctggttaagagattaaagccactcttcaacaagtcttttgagagcacagtggggcagggatcagatacatacatttacatttttcgggtatgccgcgaagcaggaaatcacacttccggcgctggcttagtgcagatcaacaagtctaacggaaaggagacagtcgtagggaggttaaacgaaactcatatatttaatggctccaattggattatgctgatttacaagggcggagatgaatacgataaccactgcggaaaagagcagagaagggcggtcgtcatgatttcatgcaatcgacataccttggccgataacttcaatccagtctctgaggagcgtggcaaagtgcaggattgtttttacttgttcgaaatggattccagtcttgcgtgctccccagagatctctcacctgagcgtgggctcaatcctcctggtcaccttcgcttcattggtggcagtgtatgtggtcgggggatttctgtaccaaagactggtcgtgggggcaaaagggatggaacagtttccccatctggcattctggcaagatttagggaacctcgtggcagatggctgcgactttgtgtgtcggtctaaaccccggaacgtgcccgctgcataccggggtgtaggagatgatcagctgggggaggaatcagaagagcgggacgatcacttgctcccaatgtag

SEQ ID NO: 194113 - DNA, 279 bp, synthetic construct
  misc_feature 1..279: note = Description of Artificial Sequence: Synthetic coding sequence
  source 1..279: mol_type = other DNA
atgttccccttctacagctgctggcggaccggcctgctgctgctgctcctggccgtcgctgtaagggagtcctggcagaccgaggaaaaaacatgcgacctggtcggagagaagggtaaggaatccgaaaaggagttagcgcttgtgaaaaggctgaagcctcttttcaataaaagcttcgagtcgaccgtgggacaggggagcgatacctacatatatatctttcgcgtatgcagggaagcaggcaaccatacttccggagccggcttagtgcagtag

SEQ ID NO: 194114 - DNA, 330 bp, synthetic construct
  misc_feature 1..330: note = Description of Artificial Sequence: Synthetic coding sequence
  source 1..330: mol_type = other DNA
atgttccccttctacagctgctggcggaccggcctgctgctgctgcttctcgccgtcgccgtgagggagtcgtggcagactgaggaaaaaacttgcgacctcgtgggtgagaagggaaaagagtcggagaaagaactggccctggtgaaaagactgaagcccctatttaacaagagttttgagagtaccgtggggcaggggtctgatacctacatctatattttccgtgtctgccgtgaggcaggcaaccacacaagtggggcagggttggttcagatcaacaagtccaacgggaaggagactgtagtgggacggctgaatgagacctag

SEQ ID NO: 194115 - DNA, 747 bp, synthetic construct
  misc_feature 1..747: note = Description of Artificial Sequence: Synthetic coding sequence
  source 1..747: mol_type = other DNA
atgagcctgttccccagcctgcccctgctgctgctgagcatggtggccgcttcttactctgagactgtcacctgtgaggacgcacagaaaacatgtcccgcagtgattgcatgcagctccccgggaattaatgggtttcctggaaaggacgggcgcgacgggactaaaggcgagaaaggtgagcctggacagggattgcgcggactccagggaccacccggaaaattgggccctccaggtaacccagggccaagtggatctcctggccctaaaggccagaaaggggatcccggaaaatcccccgacggtgactcttccttggcagcatccgagcgcaaggccctccaaacagagatggcccgtatcaaaaagtggttgacattttccctgggcaagcaggtggggaacaaatttttcctgaccaatggggagataatgacatttgaaaaagtaaaggctctctgcgtcaagtttcaggctagcgtggcaactcctcggaacgctgcagagaacggagcgatacaaaacctcatcaaggaggaggcctttcttggcattacagacgagaaaacagagggtcagttcgtggacctaactggcaatagactgacatatactaactggaacgagggagaacctaacaatgccggctctgatgaggattgtgtcctgctgctgaagaatggacagtggaacgatgtcccttgtagcacttcgcatttagcggtatgtgagtttccaatttag

SEQ ID NO: 194116 - DNA, 744 bp, synthetic construct
  misc_feature 1..744: note = Description of Artificial Sequence: Synthetic coding sequence
  source 1..744: mol_type = other DNA
atggccgccgaggccgacggccccctgaagcggctgctggtgcccatcctcctgcccgagaaatgttatgaccaactgttcgtgcaatgggatctgcttcacgtcccttgcctgaaaattttgctaagcaaaggactgggtctgggcatagtggcagggtccctgctggtcaaactgccgcaggtgttcaagatcttgggggccaagagcgccgagggcctatcgttgcagagtgtgatgcttgagctggtggcactaacgggcacaatggtgtactcaatcactaataactttccattcagcagctggggggaagccctgttcctgatgctgcaaactattacaatctgcttcctggtgatgcactacagaggtcagactgtgaagggggtggctttcctagcctgctacggcctcgtcttgttggtgctgctgtccccacttacacccctcaccgtcgtgaccctgctccaggcaagcaacgtgcccgcagtcgtggtgggccgattactccaggccgcgactaattaccacaacggacataccggtcaattgtctgctatcacagtgttcttactgtttggcgggtcccttgcacgtatcttcactagtatccaggagaccggagacccccttatggccgggacctttgtagtgtccagtctgtgtaatggtctgattgcagcacaacttcttttttattggaacgccaagccgccacataaacaaaagaaagctcaatag

SEQ ID NO: 194117 - DNA, 381 bp, synthetic construct
  misc_feature 1..381: note = Description of Artificial Sequence: Synthetic coding sequence
  source 1..381: mol_type = other DNA
atggccgccgaggccgacggccccctgaagcggctgctggtgcccatactcctgccggagaagtgttacgaccaattgttcgtccagtgggatctgcttcacgtcccctgcctgaaaatactacttagcaagggccttggcttgggcatagttgccggctctctcttggttaagctgccacaggtcttcaagattttgggggctaagtctgcggctggcctgaagaaggaagatgaggccagaccagtacgctccgctagcatgagagttagaggcggactgggcgcttggggccatcagcagggggaagggtgcatggagtgggagagccagggggcgggttccggctaccgctgggccgcagtgccccccggagcttag

SEQ ID NO: 194118 - DNA, 900 bp, synthetic construct
  misc_feature 1..900: note = Description of Artificial Sequence: Synthetic coding sequence
  source 1..900: mol_type = other DNA
atggccgccgaggccgacggccccctgaagcggctgctggtgcccatcctcttacccgaaaagtgttacgatcagctctttgtccagtgggacctgctccatgtgccctgcttgaaaattttgctgagcaagggcctagggcttggcattgttgcaggctcactgttggtgaaactcccacaggtctttaagatccttggggcaaaatctgcggagggcctcagcctccagtccgtcatgctggagttagtagcactgaccgggacaatggtgtacagtatcacaaacaattttccattctcttcatggggggaagccctgttccttatgctgcagaccatcaccatttgcttcttggttatgcactataggggccagaccgtgaaaggggttgccttcttggcttgttatggattagtgcttctggtcctgctctccccactcacacctctcacagtggtcccctgtagcgggctgcagtgcgcatgctgtggcgggggagaggcatctcccggatcgcatcagctgccccagcgggcgcaccggccagcattatctcatcactctcttcccgctgtttggggattaccaggtcctaacctgcattttcattcggggaacaggcgaagccccgatggctgggacctttgtggccttctctcccttcaaaggccacatagaaggccagccgcccttttgctcgaatgtaaagcttcccctcaggccgaaaaaggggccgttgagcccgccacaggggtaattccctttcccctgatccaccccacttccgggtttagtccttcggagccagcatgttggtgtgaccttcttatattgcactcttctgccttggccgatttcctgtctcagggattcctgttggtcgaaacgaatggctag

SEQ ID NO: 194119 - DNA, 636 bp, synthetic construct
  misc_feature 1..636: note = Description of Artificial Sequence: Synthetic coding sequence
  source 1..636: mol_type = other DNA
atggccgccgaggccgacggccccctgaagcggctgctggtgcccattctgctccctgagaagtgctacgaccaattgtttgtccagtgggatctgctccacgtgccctgtcttaagattctgctttccaagggtctgggactgggcatcgtggccggatcactgctagtgaaattaccacaggtgttcaagatcctgggagctaaatctgccgagggtttgagcctccagtccgtcatgctggagttggtcgctctgaccggaacaatggtgtacagcatcaccaataacttccccttcagttcatggggcgaagcgttattccttatgctccagacaattactatctgcttcctggtgatgcattacagaggacagaccgtcaagggggtcgcctttctggcttgctatggcctcgtgcttctggtgctgttaagccctctaacgcccttaacagtcgtgaccctactacaggcctcaaatgtgccggcagtagttgtgggcagactgttgcaagctgccactaacactacgactggaacacaggcctcctcccaaccgagtcagagtagctgctgccttggcgccccctggcctgagtcatccctgccatttcggaagcccgaaattccttag

SEQ ID NO: 194120 - DNA, 561 bp, synthetic construct
  misc_feature 1..561: note = Description of Artificial Sequence: Synthetic coding sequence
  source 1..561: mol_type = other DNA
atggccgccgaggccgacggccccctgaagcggctgctggtgcccattctgcttccggaaaagtgctacgatcagttgtttgtgcagtgggatctcctacacgtgccatgcttgaagattcttttgtccaaggggcttgggctgggtatagtggccgggagtttgttagtgaagctgccccaggtctttaaaatcttgggcgctaagtcagccgaggggctcagcctgcagagtgtaatgcttgagctcgtggcccttactggcactatggtgtattcaataactaataacttcccttttaggtgccgctttccacgcctgctgcggcccggcccagccggagcgagtctgacgagcgatgccttggactgctcccacccagcccccgggctgcagtgcgcctgctgcggcggcggtgaggctagtcccgggtctcaccaactgccgcagcgcgcacatcgcccagcacttagccatcactccctgccggctgtctggggactgcccgggccaaatttgcactttcactccggagtgtctattccctttagccaactctag

SEQ ID NO: 194121 - DNA, 2826 bp, synthetic construct
  misc_feature 1..2826: note = Description of Artificial Sequence: Synthetic coding sequence
  source 1..2826: mol_type = other DNA
atggccgccgcccccgccctgaagcactggcggaccaccctggagcgagtggagaagtttgtcagtccgctttactttactgattgtaatctgcgggggcggctttttggggccagctgccctgtcgccgtgctgtcttcctttctaaccccggagagactcccttatcaggaagccgtgcagcgcgatttcaggcccgcccaggttggagactcatttggcccaacctggtggacttgttggttccgcgtggagctgactatcccagaggcctgggtcggacaggaggttcatctctgttgggaatcagatggtgagggattggtgtggcgggatggggagcccgttcagggccttactaaggagggagagaagactagttatgtgcttacggatagactgggcgaacgtgacccacgctcgctcacactgtacgtcgaggtagcctgcaatgggctactcggtgcaggaaaaggatcaatgatcgcagctccggaccccgaaaaaatgttccagctgagccgcgctgagttggccgtgttccatcgcgacgttcacatgctcctggtggatttggagttgctgcttggtatcgcaaaagctcagcagctggagtgggtgaaatcacggtacccaggcctctactcacggattcaggaattcgcatgtagaggccagttcgttcctgtgggggggacatgggtggaaatggatgggaatctgccatctggagaagcaatggtgagacagttcctgcaggggcagaacttttttttacaggaattcgggaaaatgtgttctgaattttggcttccagatacatttggatattccgcacagttgccgcagattatgcatgggtgcggaatacgaagattcctcactcagaagctatcctggaacctggttaactctttccctcatcacacttttttctgggaggggctggatggctccagagtgctggtccacttccctcccggggactcatacggtatgcagggctccgtcgaggaggtcctcaaaaccgtagccaacaacagggacaaggggagagccaaccatagtgcatttcttttcgggttcggggacggaggcggagggcctacgcagaccatgctggatcgcctgaagagattaagcaacactgacgggttgccccgggtgcagctttccagcccaaggcagttgttcagtgcactggaatctgattccgaacagttgtgtacttgggtgggggaactatttctcgagctgcacaacggtacgtatactacacatgcccagatcaaaaaagggaaccgagagtgtgaacggattctgcatgacgtggagctgctgtcctctctcgctctggcccgttccgcacaattcctataccccgccgctcagctgcaacacctgtggaggttactgctgttaaatcaattccacgacgtggtcactggttcctgtattcaaatggtagctgaggaggcgatgtgccattacgaagacatacgcagccacggtaataccctgctgagtgcagctgctgcagcgctgtgtgccggcgagcccggacctgaaggactgctgattgtgaatacactaccgtggaagcggatcgaggtgatggctttgcctaaaccgggaggagctcatagcctggctctcgtgacggtgccctctatgggttacgccccagtccccccccccacaagcctccagcctctgctgccacagcagcccgtctttgttgtccaggagacagatgggagtgtgacattggataacgggatcattcgagtcaagctggatccaactgggagattgacatcactggttctcgtcgccagcggacgggaggcgatagctgagggcgcggtgggtaaccagttcgtgctattcgatgacgtgcccctgtactgggacgcctgggacgtgatggactatcatctcgaaacacgaaagcccgtgctgggccaggctgggaccctcgccgtgggcacggaggggggcctacgtggatctgcatggtttctcctccagatctcaccgaactcgcgcctgagccaggaagtcgtcctggatgttggttgtccatatgtgcgctttcatactgaagtgcactggcatgaggcccataagttcctaaaagtggaattcccggcaagagtcagaagtagccaagcgacatacgaaattcagtttggacacctacaaaggccaactcactataacacctcgtgggactgggcccgatttgaagtctgggcccatcgatggatggacctcagtgaacacgggttcggcctcgcactcctgaacgattgcaaatacggggccagcgtccgtggctctatcctgagtctttccctgcttagggctcccaaagcccccgatgctactgccgacaccgggcggcacgagtttacctatgcgcttatgccgcataaggggtcattccaagatgcaggagtaatacaggccgcctacagtctgaattttccactgttggccctgcctgcaccatccccagcacctgccacaagctggtccgcattttccgtttccagccccgcggttgtcctcgagacagtcaagcaagctgaatctagtccgcagagacgatccttagtgctgcgtctgtacgaggcgcacggatctcatgtggactgttggctgcacctgtctctacctgtccaggaggctatcctgtgtgaccttctggagcggcctgatcccgctggacatctgaccctgcgagataatcggctgaagctgacatttagcccctttcaagttctctccctcctcctggtccttcagcctccacctcactag

SEQ ID NO: 194122 - DNA, 3174 bp, synthetic construct
  misc_feature 1..3174: note = Description of Artificial Sequence: Synthetic coding sequence
  source 1..3174: mol_type = other DNA
atggccgccgcccccgccctgaagcactggcggaccaccctggagcgggtggaaaagttcgtgtcgccactgtacttcactgactgcaatctgaggggaagactgttcggcgcttcgtgtccagttgctgtgctgtcctccttcctgactcctgagcgactcccctatcaagaggccgtccagcgggacttcaggcccgcacaggtcggagattcttttgggccaacctggtggacctgttggtttagagtggagctcactatcccagaggcctgggtggggcaggaggtccatctctgctgggagtccgatggggaaggacttgtatggcgcgatggagaaccagtgcagggcctgaccaaggaaggggagaagacgtcctatgtgctgacagataggctgggagagagagacccccgctcactgacactctatgtcgaagtggcctgcaacggattactgggcgctggcaaagggtccatgatagccgccccagatcctgaaaagatgtttcagctgagtagagccgaactggccgtgttccatagagacgtgcacatgctactcgtggacctggagctcttattaggcattgctaagggacttggaaaggataatcaacgcagtttccaggccctgtacaccgcaaaccagatggtaaacgtatgtgatcctgcgcaacccgaaacattccctgtggcccaggcactcgctagcagattctttgggcagcatggcggagagtcacaacataccatacatgcgacaggacactgccatatcgacaccgcctggctgtggccctttaaagaaacagtaaggaagtgcgcccggagttgggttacagccctccagctgatggagaggaaccctgagtttatctttgcctgctcgcaggcccaacaattggagtgggtcaagtcccgctacccaggcttgtactccaggatccaggagttcgcctgccggggccaatttgtgcccgtgggaggaacttgggtggagatggatggaaacctcccaagtggagaggcaatggtgcgccagtttctgcagggacagaacttttttttacaggagttcggtaaaatgtgctccgagttctggttgcctgacactttcggatacagcgcgcagttgcctcaaatcatgcacgggtgcggaatacggcgattcctaacacaaaagcttagctggaatttggtaaacagctttccccaccatacgtttttctgggagggcctagacggctctagagtgctggttcactttcctcccggggacagctacggaatgcagggcagcgtggaggaagtgctgaagacagtcgccaacaaccgcgacaaaggcagggctaatcacagcgcttttctcttcggcttcggggatggcggaggcggcccaacgcagactatgctggacaggctgaagcgtctttcaaatactgacggactgccacgagtgcaactctcctcgcctcgtcagctgttcagcgctttggagtcagattcagagcagctgtgcacctgggtgggcgaactgttcttggaattacacaatggcacgtatacaacccatgcccagatcaaaaaaggcaacagggagtgtgaacgaattcttcatgacgtggagctgcttagtagccttgcgctggcccggagtgcccagttcctttatcctgctgcgcaactgcagcacctgtggcgcctcctgctgcttaaccagttccatgatgtggtgacagggagttgcatccagatggtagcagaggaggccatgtgccactatgaggacatccgatcacacggcaacacgctcttgtcggccgcagctgccgcgctgtgtgcaggtgagccgggaccggagggactgcttatcgttaacaccctcccatggaagcgtatcgaggtgatggcccttcctaaacccgggggggctcacagtctggggcttacgccatccccaggagacagcgctcaacacgggctttgcagctgttctagcccccacttaactgccgcgccagccgctcctgcagcatgcgtgcgaagtgcccgcgctccaaccgactcagcgagccggccgccccctaccaaaactgatgggtctgtaacactagacaacggcattattcgagttaaattggatccgactggtcgcctcactagcctggttctggtggcctcaggaagggaggcaattgcagagggtgcagtgggcaaccaatttgtcctcttcgacgatgtacctctgtactgggacgcctgggacgtaatggactatcacttagagacacggaagccggtgctggggcaggctggaacccttgctgtgggaactgaaggtggactgcggggaagcgcctggttccttctacagatctccccgaactccagacttagtcaggaggtcgtgctggatgtcggctgtccgtacgtacgctttcacaccgaagtgcactggcacgaagcccacaaatttcttaaagttgagttccccgccagagtgagatcctcccaggctacttatgagatccagttcggccacttgcagcgaccaacccactataatacttcctgggattgggccagatttgaagtgtgggcccaccggtggatggaccttagcgagcacgggttcgggctggccctgctcaacgattgtaagtacggagctagtgtaagggggagcatcctgagcctaagcctgctgagagctccaaaagctccagacgcaactgccgatactggccggcacgagttcacatacgccttgatgccacataaggggtcttttcaggatgccggggtgatccaggctgcttactccttgaactttcctttacttgcactgcccgcccccagtcccgcaccagccacctcctggtctgctttctcagtgtcttctcccgccgtcgtgctggaaacagttaagcaggccgagtcttccccacagaggagatcacttgtccttcgcctttacgaggcccatggttcccacgtggattgctggctccatctcagcctgcctgtgcaggaagctatcctgtgcgatctgctggagagacccgacccagccggccatctgacattgcgcgataaccggcttaaactgaccttttctccctttcaggttctctcgctgctcctggtgctacagcctccccctcactag

SEQ ID NO: 194123 - DNA, 3054 bp, synthetic construct
  misc_feature 1..3054: note = Description of Artificial Sequence: Synthetic coding sequence
  source 1..3054: mol_type = other DNA
atggccgccgcccccgccctgaagcactggcggaccaccctggagcgggtggagaaatttgtttctccactgtattttaccgactgcaacttacgagggaggttattcggggccagctgtcctgtggcagtgttgtcctccttccttacacccgagcggttaccctatcaggaggcagtacagcgggattttcggccagcccaggttggtgactcatttggacccacttggtggacctgctggtttagagtcgaactaacaattccagaagcttgggttggccaagaggtgcatctgtgttgggagagtgatggagagggcctggtgtggcgcgacggagaacccgttcagggcctcacgaaggagggcgagaaaacctcatacgtcctcacagacaggctgggcgagagagacccccggagtttgacattatacgtagaggtggcttgcaacgggctgttaggtgcaggaaagggttccatgatcgcagcgcccgaccccgagaagatgttccagctctccagagcggagttggcagtgttccaccgggatgttcacatgctgctggtcgatcttgaactgctgctcggcatcgccaaagggctaggtaaagacaatcagagatcttttcaagccctctatacagcaaatcagatggttaatgtgtgcgatcctgcgcagcctgaaacatttcctgtggcccaggccctggcgagtcgcttctttggccagcatgggggtgaatcccagcacacaatacatgccacaggccactgccatatagacactgcctggttatggcccttcaaggagaccgtgaggaagtgtgcccgctcttgggtcactgcactgcaattgatggagagaaatccggaattcattttcgcctgtagtcaggcgcagcagctggaatgggtgaagtctaggtacccaggactgtactcgcggatacaggagtttgcatgccgcggccagtttgtgccagtggggggtacatgggtcgagatggatggcaatttaccatctggcgaggcgatggtccggcagtttcttcagggacagaattttttccttcaggaattcggaaaaatgtgttctgagttttggctgcccgacaccttcggatactctgctcagttgccacagatcatgcatgggtgtggcattagacgattcctgacacagaagctgtcttggaaccttgtgaactcctttccgcaccatacatttttttgggaaggccttgatgggagtcgtgtgctcgttcacttccccccaggagactcttacggaatgcagggtagtgtggaggaggtgctcaaaaccgtcgccaataatagggataaaggccgcgccaaccacagtgccttcctgttcggattcggagacggcggtggggggccgacacagaccatgctggatagacttaagaggttgtcaaatacagacggactgcctagggtacaactgagctcgccccgccagctattcagcgcgttagagagtgactcagagcagctctgcacttgggtgggtgaactcttccttgaactacataacggaacttacaccacccatgcccagattaagaagggaaacagagagtgcgagaggattctgcatgacgtggagctccttagctctctggccctggccagaagtgctcaattcctctacccagccgcccagctgcaacacctgtggcgacttctactgctcaaccagttccacgacgtggtcaccggatcatgtatccagatggtcgcagaagaggccatgtgccattacgaggacatcaggagtcacgggaatacactcttgagcgctgctgccgccgcactgtgcgcaggcgaacccggacccgaaggcctcctcattgtcaacacactgccatggaagagaatcgaggttatggcgcttcctaagccaggcggcgctcatagcttggcattagtcacagtgccgtccatgggctatgcacctgttccccccccaaccagcctccaacccctacttccacagcagcctgtcttcgtcgtacaggagacagatggctctgtgacactagataatgggatcatacgggtgaaacttgatcccacgggcagactgaccagcctcgtcctcgtagcctctggcagggaagcaatcgccgagggcgctgtaggcaaccagttcgtactttttgacgacgtgccattatattgggatgcatgggatgtgatggactaccatctcgaaacccggaaaccagtcctggggcaggccggtacactcgctgtaggaactgaggggggacttcgtgggagcgcttggttcctcctgcagatttcgcctaactctagactgtcccaggaggtggtactcgatgtcggatgcccctatgtgcggtttcacacagaggtgcattggcacgaggcccacaagtttttgaaagtggagttccccgccagagtgagatccagccaagccacttacgagatccaattcggacacttgcagagaccgacccattataacacctcttgggattgggcgcgattcgaagtgtgggcccatcggtggatggatctcagcgagcacggattcgggctggctttgctgaacgactgcaaatatggagccagcgtccgcggtagcatcctaagcctatcgctgcttcgggctcctaaagctcctgatgccaccgccgacacaggtcggcacgagtttacatacgctctgatgccgcacaaagccccatcacctgcccccgccacctcatggagcgccttttccgtgtctagtccagcagtcgtactcgagactgtgaagcaggctgagagtagtccacagcgcagaagcctcgttctaaggctctatgaagcccatggttcgcatgtggactgctggctgcacctgagtttgcctgtgcaggaggcaattctatgtgacctgctggagaggccggacccggccggccacctaaccctgagggacaatagacttaaactgaccttttcgcccttccaggtgctgtctctgctactggtgctgcagcctcccccgcactag

SEQ ID NO: 194124 - DNA, 1104 bp, synthetic construct
  misc_feature 1..1104: note = Description of Artificial Sequence: Synthetic coding sequence
  source 1..1104: mol_type = other DNA
atgcccgtgggcggcctgctgcccctgttcagcagccccgccggcggcgtcttgggcggaggcttaggcggcggaggtggtagaaaaggtagtggccctgcggcgttacgcctgaccgagaaattcgtgctcctgcttgtgttttcagctttcattactctttgttttggggctatctttttcctccccgactcttccaagctgttgtccggggtgctctttcactcaagtcctgcgctgcagcctgcggcagaccacaagcccggccccggcgcacgagccgaagatgccgcggaggggcgcgctaggaggagggaggagggtgcacccggtgaccccgaggcagctttggaggataacctggctagaattagagagaatcacgagcgagccctgagggaggccaaggagactctgcagaagctgcccgaggagattcaaagagacatcttgctggaaaagaagaaagtagcccaagatcagttacgcgacaaagctccttttcgggggctgccccctgtcgactttgttccgcccataggggtcgagagccgtgagccagccgacgctgccattcgtgagaaaagagccaaaataaaggaggagatagaggcaagaaaggggcaggccaactgtcccggcagctccagctcttgtgaggtcgagattcagatgatgaaacacgcctggaacaattataaaggctacgcatggggcctgaacgagttgaagccgatttcaaaaggggggcattcttcttccctattcggaaatatcaaaggggctacgattgtcgatgccctcgatacccttttcataatggagatgaagcatgaatttgaggaggctaaatcgtgggtggaagagaatctagacttcaatgttaatgcagagatttccgtgtttgaggttaatatacgttttgtcggaggcctattgtcggcctattacctatccggagaagaaatcttcagaaaaaaggctgtggaactgggcgtgaagttgctccctgcgtttcacactccaagcggtattccttgggctctgctcaacatgaagcgctggatgtgcaacattccacgagccatggaagccacaatttag

SEQ ID NO: 194125 - DNA, 1962 bp, synthetic construct
  misc_feature 1..1962: note = Description of Artificial Sequence: Synthetic coding sequence
  source 1..1962: mol_type = other DNA
atgcccgtgggcggcctgctgcccctgttcagcagccccgccggcggcgtattaggtgggggactgggaggaggaggagggcgaaaaggctctggcccagctgctctgaggctgaccgaaaaattcgtgctactgctggtgttcagcgcgtttattacactgtgcttcggtgcgatcttctttttgcctgattcctccaagctgttaagcggcgtgctgttccattccagcccggctctgcagccagcggccgaccataaacctggaccaggcgctagggccgaagatgcagctgaagggcgcgcgaggcgccgcgaggaaggggctccaggggaccccgaggctgcgctagaggacaatctggcccggatccgcgaaaatcacgagagggctctgagagaagccaaggaaacattacagaagctgcccgaagagattcaacgcgacatcttgctggagaaaaaaaaagtcgcacaggaccagctcagggataaggcccccttccggggtctcccacctgtggacttcgtccctccgatcggcgttgagagcagggagcccgctgatgccgccatcagggagaaaagagcaaaaataaaagaaatgatgaagcacgcgtggaataattacaaaggctatgcctggggtttgaacgaactgaagccgatcagcaagggaggacacagttctagtctgtttgggaacatcaaaggagccacaattgtggatgccctggacaccctgtttattatggaaatgaaacacgaattcgaagaggccaaaagttgggtcgaggagaaccttgactttaatgtaaatgcagagataagtgttttcgaagtgaatatcaggttcgttggtggactgctttccgcatactacctgtcgggtgaagagatatttagaaagaaggcggttgaactcggggtaaagttgctgccagccttccatacaccctccggtatcccatgggccctgctaaatatgaaatctgggattggaagaaactggccatgggcatccgggggctctagcattctcgctgaattcgggactctccacttggagtttatgcacttgtcacacctgtcgggcaaccccatctttgcggaaaaggtgatgaacatccgtacagtgcttaacaagttggagaagccccagggattgtatccaaactatcttaacccctcttctgggcagtggggacaacaccatgtctcagtgggcggcctcggggacagcttttatgagtatctactcaaagcatggctcatgtctgataagacggatctcgaggctaaaaaaatgtattttgacgcagttcaggccatcgagactcatttgattagaaagagctcgtcgggcttaacttatattgccgagtggaagggaggacttctcgaacataaaatgggacacctcacttgcttcgcaggtggcatgttcgccctaggagcagatgccgcccccgagggcatggcccaacattatttggagctaggagctgaaatcgcccgcacatgccacgagtcatacaaccgaacattcatgaaactgggacctgaagcctttcgtttcgatggcggcgtggaggcgatcgccaccagacagaatgaaaagtactatattctgcgccctgaagtgatggaaacctacatgtacatgtggcgactgactcatgaccccaaatatcggaaatgggcctgggaggctgtggaagctttagagaaccattgtcgggtgaacggcgggtattccgggctccgagatgtgtacctgctgcatgaaagctatgacgacgtgcagcagtcttttttcctggcagagactctgaagtatctgtatttgatcttctctgatgatgatttactgcctctggagcattggatcttcaacagcgaagcacatcttctgccgattctgccaaaagacaagaaagaagttgagatccgagaagaatag

SEQ ID NO: 194126 - DNA, 579 bp, synthetic construct
  misc_feature 1..579: note = Description of Artificial Sequence: Synthetic coding sequence
  source 1..579: mol_type = other DNA
atgttcgccctgggcgccgacggcagccgggccgacaaggccggccattacctggaattaggcgccgaaattgcaagaacctgccatgagtcctacgaccgaacagccctgaagctaggcccagagtccttcaagttcgacggtgctgtggaagcggttgccgtcaggcaggccgagaagtactatatattgagacctgaagttattgagacatactggtatctgtggcgtttcactcatgatcccagatatcggcaatggggctgggaagctgctcttgcgattgagaaatattgtagagtgaacggtggattttcaggtgtgaaggacgtgtatagcagcacccccacacatgatgatgtgcaacagagcttttttctcgccgaaacacttaagtacttataccttctttttagcggggacgacttactaccattggaccactgggtttttaatacagaggcgcatccgctgccggtcttgcatctagctaataccaccttgagcggaacatcccaggggatgcgaaggcaaaatccttacttccaggtgctctacctgtactatcctgatgattag

SEQ ID NO: 194127 - DNA, 1926 bp, synthetic construct
  misc_feature 1..1926: note = Description of Artificial Sequence: Synthetic coding sequence
  source 1..1926: mol_type = other DNA
atgaccacccccgccctgctgcccctgagcggccggcggatccccccactgaacttaggccccccatcttttccccatcatcgcgccacactgagattgtcagagaaatttatcctactgctcattctgagtgcttttatcactctgtgctttggtgcattcttcttcctaccggactctagcaagcacaaaaggttcgatctggggcttgaggacgtattaatccctcatgttgatgcgggaaaaggagcgaaaaatcctggcgttttcctgatacacggccctgatgagcaccgacatcgagaggaagaggagcggctgagaaacaagatccgcgccgaccatgagaaggcgcttgaggaagctaaagagaagttgcgaaaatcacgcgaagagatccgggctgaaatccagacagagaagaataaggtcgtccaggaaatgaagattaaagaaaataagcccctgcctccagtaccaattccgaacctcgtcggtatcagaggaggagacccggaagacaacgacatccgagaaaagagagagaaaattaaagaaatgatgaagcacgcctgggacaactacagaacttatgggtggggccataatgaactgcgtcctatcgctcggaaagggcatagtccaaatatattcggttcatcccagatgggggccaccatcgtagacgctcttgacacgctgtacatcatgggattacatgacgagttcttggacggccaaagatggatagaggacaacctggattttagcgtcaattcagaggtgtccgttttcgaggtgaacattagatttattggggggctgctggccgcctattatctcagcggcgaggaaattttcaagataaaggccgtgcaactggctgagaagctattacctgccttcaacaccccgacaggaattccttgggccatggtgaatctgaagtctggcgtgggccgtaattgggggtgggccagcgcaggatcttctatcttagccgagttcgggaccctgcacatggaatttatccacctctcctatttgacaggtgacttgacatactacaaaaaggtgatgcatattagaaaactgctgcaaaagatggatcgcccaaatggactgtaccccaactacctgaaccccagaaccggtagatggggtcagtatcacacctcagtcggaggactgggagactccttttacgaatatctgctgaaggcctggctgatgagcgataaaacagaccacgaagccaggaagatgtacgacgatgccattgaggcaatcgagaaacacctcattaagaagtccaggggtggcctgacttttataggggagtggaaaaacggacacctggaaaaaaaaatgggccacctggcctgtttcgctggcggaatgttcgcactgggcgctgacgggtccagggcggacaaagccggacactacctggagttgggggcagagattgccagaacttgccatgagagctatgacaggactgcactgaagctaggccccgagtctttcaagtttgacggggctgtagaagccgttgcagttcggcaggctgaaaagtattacatccttcggcccgaggtgattgaaacatattggtacctgtggaggttcactcacgatccccgctatcgccagtggggatgggaggcggctttagcgatcgagaaatactgtcgagtgaacggggggtttagcggcgtgaaggatgtctatagctcaacccccacccatgatgatgtacagcagagcttcttcctcgcagaaaccctcaagtatctttacctccttttctccggcgacgatctgctgcccctggatcactgggtgttcaatactgaggcgcatcctctgcccgtgcttcacctggctaacaccacgttaagcgggaacccagctgtgagatag

SEQ ID NO: 194128 - DNA, 1128 bp, synthetic construct
  misc_feature 1..1128: note = Description of Artificial Sequence: Synthetic coding sequence
  source 1..1128: mol_type = other DNA
atgggcctgcacgacgagttcctggacggccagcggtggatcgaggacaaccttgatttctccgtgaatagtgaggtttctgtgtttgaggtaaacataagatttattggtggtttactggctgcatactatctttctggagaagaaattttcaagatcaaggcggtgcagctggctgaaaaactactccctgccttcaacacccctaccggaatcccctgggctatggtgaatcttaagtccggggtcggaagaaactggggctgggcctccgctggatcgtccattctagcagagtttggcacccttcatatggagtttatccaccttagctacctgacgggcgatctaacctattataaaaaagtaatgcacatacgcaagcttctacaaaagatggaccggcctaacggactgtatcctaactacctgaacccccggacaggccggtggggccagtatcatacctcggtgggcggtcttggcgacagcttctacgaatacctgctcaaggcctggctaatgagcgacaagaccgatcacgaggctcggaagatgtacgacgacgccattgaggcgattgagaagcatctgattaaaaagagccgcggggggttgacattcatcggagagtggaagaacggacatttagagaagaagatgggtcacctggcatgtttcgcaggcggcatgttcgccctaggtgctgatgggtcgagggccgataaggcaggccattatcttgagttgggcgcagagatcgctagaacatgtcatgagagttatgatagaaccgcacttaagcttggacccgagagtttcaagtttgacggagcggtggaggcggtcgcggtccgccaagcagagaagtactacattctgcgccccgaagtgattgagacgtactggtatttgtggcgatttacccatgaccccaggtaccggcagtggggctgggaggccgctctcgccattgaaaaatactgcagagtcaacggcggttttagcggtgtgaaggatgtatattcctccaccccaacgcatgatgatgtgcaacagtccttttttctggccgaaactttaaaacttgccagctaccatgaacgcaccgtatttcccgcgggttag

SEQ ID NO: 194129 - DNA, 615 bp, synthetic construct
  misc_feature 1..615: note = Description of Artificial Sequence: Synthetic coding sequence
  source 1..615: mol_type = other DNA
tgaatcaagaagagccggggcggcctgaccttcatcggcgagtggaagaacggacacctcgaaaaaaagatgggccacctggcatgcttcgcaggcgggatgttcgcattgggtgccgacggcagtcgcgcagataaggccggacattatctggaacttggcgccgagatcgctagaacatgccatgaatcctatgacaggaccgctcttaagttaggtcccgagagtttcaaattcgatggagcagtagaagcggttgctgtgcggcaagccgaaaagtattacatattacgcccagaagtgatcgaaacctattggtatctgtggagattcacccacgatccacgttatcgtcaatggggctgggaagccgcgctggctatcgagaaatactgcagagtgaacggtgggtttagtggcgttaaggacgtgtactcttccactcccacccacgacgatgtacagcaatcttttttcctggccgagacactcaaatacctttacttgctgttctcaggagatgatctattgcccctggaccattgggtctttaatacagaagctcacccactgcctgtgctccatcttgctaacaccactctttccgaatcctag

SEQ ID NO: 194130 - DNA, 294 bp, synthetic construct
  misc_feature 1..294: note = Description of Artificial Sequence: Synthetic coding sequence
  source 1..294: mol_type = other DNA
gagaagtactgccgggtgaacggcggcttcagcggcgtgaaggacgtgtactcttccaccccgactcatgatgacgtgcagcagagttttttcctggccgagacgctcaaatatctgtatctgctcttctctggagacgacttgctacccctggatcattgggtgtttaacacagaggctcaccccttgcccgtacttcatctcgcaaatactactctgtcaggaacttcacaaggcatgcgcaggcagaatccctattttcaggtgctgtacctgtattaccccgatgactag

SEQ ID NO: 194131 - DNA, 1035 bp, synthetic construct
  misc_feature 1..1035: note = Description of Artificial Sequence: Synthetic coding sequence
  source 1..1035: mol_type = other DNA
tgaatccggttcatcggcggcctgctggccgcctactacctgagcggagaggagatctttaaaatcaaggccgtacagctggccgagaagctacttcccgcattcaacaccccaaccggaattccatgggcaatggtgaacctgaaatctggggtcggcaggaattggggatgggccagtgccggctcctcgatacttgctgagttcgggacactgcacatggagttcatacatctgtcgtacctcaccggggacctgacgtattacaaaaaagtaatgcacatccgaaagcttctacagaagatggatcgtcctaacggattatacccgaattacttgaacccccgaacgggccgctggggtcagtatcataccagcgtgggtggcctcggcgattcattctacgagtacctacttaaggcttggcttatgtccgacaaaacagatcatgaggccagaaaaatgtatgacgatgcgattgaagccatcgaaaaacatctgattaagaaaagtaggggagggctaacctttataggagagtggaagaacggacacctcgagaaaaagatggggcatctggcctgtttcgccggcggcatgttcgctctgggggctgatggtagtcgtgccgataaagccggccattaccttgaattaggcgccgaaattgcaagaacatgccacgaaagttacgacaggactgcacttaagctcggacccgaatcttttaaattcgatggtgccgtggaagcggtggccgtgcggcaggccgagaagtattacatcctgcgacctgaggttatcgaaacatactggtacctgtggcgatttacacacgatcctagatatcgccaatggggatgggaggccgctctggcaatcgaaaagtattgtcgggtcaacggaggcttctcgggggtcaaagatgtctactcctctaccccgacccacgatgacgtgcagcagagtttcttcctagcagagacattgaagctcgcttcctaccatgaaaggacagtgttcccggccggatag

SEQ ID NO: 194132 - DNA, 2100 bp, synthetic construct
  misc_feature 1..2100: note = Description of Artificial Sequence: Synthetic coding sequence
  source 1..2100: mol_type = other DNA
atggccgcctgcgagggccggcggagcggcgccctgggcagcagccaaagtgactttctaactccccctgttggaggtgccccatgggctgttgccacaactgtagtgatgtatccaccgccgcctcctccccctcaccgcgacttcatttcggtcaccctgagttttggagaaaattacgataactccaaatcatggagaaggagaagttgttggagaaaatggaaacagctgagtcggctgcagagaaatatgatactgtttctgctggcattcctcctcttctgtggcttgctcttctatataaacctcgccgatcactggaaggcccttgcatttcgcctcgaagaggaacagaaaatgaggcccgagatagcgggcctgaaacctgccaatccccccgtgctgccagcccctcagaaggctgacactgaccctgagaatcttccagaaatctcttcccagaagacacagcgtcatatccaacgcggccctcctcacttacaaatacggcctcctagccaagatttgaaggatggtacccaagaagaggcaacaaaacggcaggaggcccccgtggaccccaggccagaaggagacccccagaggaccgttatctcctggcgaggggctgtcatcgagccagaacagggcacagaacttccgtcaagaagggctgaggttcccaccaagcctccattgccccctgctagaacccaggggactcctgttcatctgaactataggcaaaaaggagttatcgacgtcttcctgcacgcctggaaaggttacaggaagtttgcttggggacacgacgaactgaagcccgtgtccagatcctttagcgaatggtttgggctgggcctgaccttgatcgatgcacttgacacaatgtggatcctgggcctgcgcaaggagtttgaggaggcgagaaaatgggtcagcaagaaactgcattttgagaaggacgtggacgtgaatctcttcgagtctacaatccggatccttggcgggctgctgtccgcatatcatttaagcggtgactctttgtttctgaggaaggccgaggatttcggcaaccgcctcatgcctgcattccgcaccccctccaagataccatactccgatgttaatatcgggactggggtcgcccacccgcctcggtggacgagtgacagcacagtcgccgaagttaccagtattcaattggagttcagggaactatcacgcctgaccggcgacaaaaagtttcaggaggccgtagagaaagtgacacagcatatacacggcctgtctggcaagaaagacgggctggtgcccatgttcatcaacacgcatagcggactgtttactcatctgggcgttttcaccctgggcgccagggctgacagctattatgaatacctgctgaagcagtggatccagggggggaaacaagagacccagttgcttgaggattacgtagaggccatcgagggtgtccgcactcacttgcttcgccatagcgagccttctaagctcacatttgttggagagcttgcccacgggcgtttttccgccaagatggatcacctggtgtgcttcctgccagggacactcgcattgggagtctatcacggcctccccgccagccatatggagctcgcacaagaactgatggagacctgttatcagatgaatcgccagatggaaacgggcttgtccccggagatcgtccactttaacctgtaccctcagcccggcaggcgcgatgtagaggttaagccggcagaccggcataacctgcttagacctgagacggtggagagtctgttttacctgtatagagtgactggagataggaagtaccaagattggggctgggagatcctgcagtctttcagcagattcacacgggtaccctctgggggatatagttctatcaacaacgttcaggatcctcagaagcccgaaccccgagacaaaatggaaagctttttcctaggggagactctcaagtacctgtttctcctctttagtgatgacccaaacttgctaagcctcgacgcctacgtttttaatactgaggctcacccgctccctatatggactcctgcctag

SEQ ID NO: 194133 - DNA, 1209 bp, synthetic construct
  misc_feature 1..1209: note = Description of Artificial Sequence: Synthetic coding sequence
  source 1..1209: mol_type = other DNA
atgtggatcctgggcctgcggaaggagttcgaggaggcccggaagtgggtgtcgaaaaagcttcatttcgagaaggatgtagacgtcaatctgtttgagtctactatccggatcctgggtggcctgctgtccgcctaccatctcagcggagattccctctttctcaggaaagccgaggattttggcaatcgcctgatgcccgcctttagaacccccagcaaaatcccatacagcgatgttaacattggaactggcgttgcacatcccccccgctggacttccgactcaacggtggccgaggttacaagcatacaacttgaattccgggaattatcccgcctcactggcgataaaaagttccaggaagcggttgaaaaagttacccagcacatccacggcctctccggaaagaaggatggacttgtaccgatgttcattaacactcattctgggctgtttacccatttaggcgtgttcacccttggcgcaagggctgattcgtattatgagtatttgctgaagcaatggattcagggcgggaagcaagaaactcagctgctggaagactatgtcgaggctattgagggggtacggacccacctgttgaggcattccgagccaagtaaattgaccttcgtgggggagctggctcacggcaggttctctgcgaaaatggatcacctggtgtgtttccttccaggaacccttgctttaggcgtgtaccatgggctgcccgcctcacacatggagttagctcaggagctcatggaaacctgttaccagatgaatcgtcagatggaaacgggattgagtccagagatcgtacactttaacttatatccgcagccaggccgcagagatgtggaggtgaaaccagctgatcgtcataacctcttaagacccgagaccgtggagtctttgttctatctgtacagggtgacaggcgaccgaaaataccaagactggggttgggagatcctgcagtccttcagcagatttacacgcgtgccatcagggggctactctagcatcaacaacgttcaggacccccagaagcccgaaccaagggataaaatggagagcttcttcttgggggagacgcttaagtacctttttcttctcttcagtgatgaccccaacctgttgagtctggatgcttatgtattcaatactgaggctcaccctctccccatatggacacctgcctag

SEQ ID NO: 194134 - DNA, 2118 bp, synthetic construct
  misc_feature 1..2118: note = Description of Artificial Sequence: Synthetic coding sequence
  source 1..2118: mol_type = other DNA
tgaccctgggccgtggccaccaccgtggtgatgtaccccccccccccgcctccaccccatcgcgatttcatctctgtgaccttatcatttggagaaaattatgataactcaaagtcttggcggagacgcagttgttggcgcaaatggaagcagctgagtcggctgcagaggaatatgatcctattccttctggccttccttctgttctgtggtttactcttctacatcaacttggccgatcattggaaagctttggccttcaggctcgaggaggagcagaaaatgagacccgagatcgcgggactgaagcctgccaatccaccggtgctgcccgccccccaaaaggccgacacagatcccgagaacctaccggagatctcatctcagaaaacacagcgccatatacagaggggaccaccccacctacagatacgcccgccttcacaagacctgaaagacggcacacaagaagaggcgaccaagcggcaggaggctcctgttgatccccgacccgagggggacccccaacgcacagttattagctggaggggggcagtgatagaaccagaacaagggacagagctgcctagcaggcgcgccgaggttcccaccaaacctcccctccctccagcaagaacacagggaaccccagtgcaccttaattacagacagaagggcgtgattgacgtgtttctgcacgcatggaaaggttacagaaaattcgcatgggggcatgatgagctcaaacctgttagtaggagcttttccgagtggtttggcctcggcctgacattgatcgacgctctcgacacaatgtggattctgggactgcggaaggaattcgaagaagcccgcaagtgggtcagcaagaaacttcattttgagaaggacgttgatgtgaacttattcgagagcaccatacggatcctaggcggactccttagtgcttaccatctgagcggggactctctctttctgagaaaggctgaggatttcgggaaccgcctgatgccagcgtttagaaccccctccaagatcccatatagtgatgtgaacataggaactggcgtagcacatccaccacggtggacatcagactccaccgtggctgaggtcactagcatccagttggaatttcgggagctgagccggctgactggagacaagaaatttcaggaagcagtcgaaaaggtgacccagcatatacatgggctgtcaggaaaaaaggacggcctggtgccgatgttcattaatacccattccggcctattcacgcacctgggggtctttaccttaggcgcccgtgcagactcctactacgagtacctgcttaagcagtggatacagggaggtaagcaagaaactcagttgctcgaggactatgtggaggctatcgaaggagttcgcacccatcttctacgtcactccgagccatctaagctgacctttgtaggcgaactcgctcatggaaggttctcggcaaagatggaccacttggtgtgcttcctgcccggcactctcgcgctgggggtttatcacggtctgccggcatcccatatggagctggcccaggagctgatggaaacatgttaccagatgaacaggcagatggagacaggactgtccccagaaattgttcattttaatctataccctcagcccggaagacgagacgtggaggtgaaaccggcagatcgccacaatttattaaggcccgaaacagtagaatccctgttctatctgtacagggttactggtgaccggaagtaccaggattggggctgggaaatcctgcaaagcttctcccgatttaccagggtcagcacgtgccctaggccagcttggtcgcgcccacccggccatcggcacggctgggcagttgggctcagactggctcccttattagttgttgctgtcacttggattcgcgagggacgagcctgcagatccttgggcgtcgccacactacagttggggggtcccggaattcctatcccaaccgaactgcacggctgtggtactcaatccacatggcgtgggtgggcaccactcattttcatctcccaggggctgagcagagaagggctgtgctgcgggccaagtatccccccagtctag

SEQ ID NO: 194135 - DNA, 3435 bp, synthetic construct
  misc_feature 1..3435: note = Description of Artificial Sequence: Synthetic coding sequence
  source 1..3435: mol_type = other DNA
atgaagctgagccggcagttcaccgtgttcggcagcgccatcttctgcgtggtaatcttctccttatatttgatgctggataggggtcacctggactacccacggaacccccggagagagggttcatttccccagggacagttaagtatgttacaggagaaaatcgatcacctggagcgcctccttgcggagaataatgaaatcatctcgaatatccgcgacagtgttattaacctttctgaatctgtggaagacggccccaagtccagccagtctaacttctctcagggcgctgggtctcacttgctgccttcgcagctatccctgagcgtagacactgccgattgcttgttcgcgagccagtccggcagccataactctgacgtgcagatgctggacgtctattccttaataagttttgataacccagatgggggcgtctggaagcagggatttgatatcacttatgaatctaatgaatgggatacagagccgctgcaggtatttgtcgtgccccattctcacaacgaccccggttggctgaaaacatttaatgattactttcgcgacaaaacccagtacatattcaataacatggtgctcaaactcaaagaggacagtaggcgtaaattcatctggtctgagatctcctatctgagcaaatggtgggatattatcgacatccagaagaaggatgcagtgaagagccttattgaaaatggccagcttgaaattgtcacaggcggttgggtaatgccggacgaggccacccctcattatttcgccctcatagaccaactaattgagggccaccagtggctcgagaataacataggggtgaagccccgttcaggatgggccattgatccattcggtcattctcccaccatggcctacctactcaacagggcaggtctgtcgcatatgctgatacaacgagtgcactacgcagtcaaaaagcattttgctctccacaagaccctcgagtttttttggcgccagaattgggatttaggttcagtgacggatatcttatgccatatgatgcctttctattcgtatgacattcctcatacctgtgggcctgacccaaagatctgttgtcagtttgatttcaagagactccccggcggacgattcgggtgcccttggggagtgcccccagaaacaatccaccccgggaacgtgcagtctagagcgaggatgttattggatcagtataggaaaaaatctaagctgtttcggacgaaagtgttactggcaccactgggcgacgatttcaggtactgtgagtatacagagtgggatctgcagttcaaaaattatcagcaactcttcgattatatgaactcccagagcaaattcaaggtcaagattcagtttggaacgctgagtgacttcttcgacgcacttgacaaggccgacgaaacccagcgcgataaaggacaatcaatgttccccgtcctgtcaggtgactttttcacttatgccgatcgcgatgatcattattggagtggatactttacttctagacctttttacaagcggatggatcgaataatggaaagtcatctgagggccgcggaaattttatactacttcgccctgcgacaagcccacaaatataaaattaacaagtttctcagttccagcctgtacacggctctgaccgaggccaggagaaacttggggctgttccaacatcatgacgcaataacagggactgctaaggactgggtggtcgttgactatgggacaaggctctttcacagcctgatggtgctggaaaagatcatcggcaattcagcgtttctcctgatcctgaaggacaaattgacctacgattcctactcgcccgacaccttcctggagatggacctcaaacagaaatctcaggatagcctccctcagaagaacatcatacgcctgtccgccgaacccagatatctcgtcgtgtataatcccctcgaacaggatcggatctccctggtgtcagtttatgtgtctagcccaactgttcaagtcttcagtgctagcggaaagccagtagaggtgcaggtttccgcagtctgggataccgccaacaccatctcagagacagcatatgaaatctccttccgcgctcatataccgccactaggcctcaaggtgtacaaaatactagagtcagctagctccaatagtcacctcgcagattatgtactgtacaagaataaggtggaagacagtggcattttcactatcaaaaacatgatcaatactgaggagggtatcacattggagaactcgttcgtcctcctccgcttcgaccagacaggtttaatgaagcaaatgatgaccaaagaggatggtaagcaccatgaagtgaatgtgcagttcagttggtatgggacaactatcaaacgggataaatccggcgcttaccttttcctgcctgatggcaatgctaaaccatacgtgtatacaacccccccttttgtgagagtgacccatggtagaatttactcagaggttacttgtttctttgaccacgtaacacaccgggtccgtctgtatcacattcagggcatcgagggccagagcgtggaggtgagcaatatagtggacattaggaaggtgtataatcgggagattgccatgaagatttccagcgatatcaagtctcagaaccggttctacacagatctgaacggataccaaatacagcctcgaatgacgctgtcgaaactgcccctgcaggccaatgtgtaccccatgaccaccatggcatatatccaagatgcaaagcatcggctaaccctgcttagcgcgcaaagcctcggggtgtcatcactgaacagcggccagattgaagttatcatggatcggaggctaatgcaagacgataaccggggactcgagcagggaattcaggacaataaaatcactgccaacctgttcagaatcctgctggaaaagaggtcagccgtgaacaccgaagaagaaaagaagagcgtgagctatccttctctgctgtcccacatcaccagtagtctgatgaatcatcccgtaattcccatggccaataagttctcttctcctaccctagaattgcaaggcgagttttcgccgctgcagagttcgctaccctgtgacatccatttggtgaacctgcggactatccagagtaaggtcggcaatggccactcaaacgaggctgcactgattctgcacagaaaaggattcgattgtcggttttcctccaaaggcaccggcctgttttgctccaccacacaaggaaagatactagtgcagaagttgcttaataaatttatcgtggagagcctgacccccagctcgttgagccttatgcattctccaccaggaacccagaacatttccgagatcaatctgagtcccatggagatttccacgtttaggatccagctgcggtag

SEQ ID NO: 194136 - DNA, 3453 bp, synthetic construct
  misc_feature 1..3453: note = Description of Artificial Sequence: Synthetic coding sequence
  source 1..3453: mol_type = other DNA
atgaagctgaagaagcaggtgaccgtgtgcggcgccgccatcttctgtgtggccgttttcagtctatacctgatgctggaccgggtccagcacgatccaaccagacaccagaatggtggcaacttccctcggtcccaaatttcagtgttgcagaatcggattgagcagctagagcaactcctggaggaaaaccacgagattatttctcacattaaggattctgtgcttgaactcacagctaacgccgagggccccccagccatgctaccttattatacggttaatgggtcttgggtggtaccacccgagccccgtccctcatttttcagtatctccccccaagattgtcaattcgccttgggtggacggggtcaaaagcctgagctgcagatgctcaccgtttccgaggagctgccttttgacaacgtagacgggggcgtgtggagacaggggttcgacatctcttatgaccctcacgattgggacgctgaggatctccaagtcttcgttgtccctcattctcacaatgatccagggtggataaaaaccttcgataagtactatactgagcagactcagcatatacttaatagcatggtctctaaactgcaagaagacccacgccgtcgttttctctgggccgaagttagtttcttcgccaaatggtgggacaacattaacgttcagaagagagccgctgtgcgcaggctggtggggaacgggcagctcgagatcgcaactggcggctgggtaatgccagatgaagcgaattcacattattttgctctgattgaccaattgatcgaggggcaccagtggctagaaagaaatcttggggccacccctcgtagcggctgggctgtcgatccctttggctattcctctactatgccttatctacttcgcagagctaatctaacatcgatgctcatccagcgagtccactacgcaattaaaaaacacttcgcagcaactcactcactggaatttatgtggaggcagacgtgggactctgactcctctaccgacattttctgtcatatgatgcccttctactcatacgatgtgccacatacttgtggacctgaccccaagatatgctgtcagtttgacttcaaaagacttcccggaggtcggattaactgcccgtggaaggtacctccgcgtgcaatcacggaagccaatgtggccgagcgggctgcccttctgcttgatcagtatagaaaaaaaagccagttattcaggtccaacgtgctgctggtccccctgggagatgactttagatacgacaaaccgcaggagtgggatgcccagttcttcaattaccagagactatttgatttctttaattcaagaccaaacctccatgtccaggcccagttcggcacactgtcagactatttcgatgcactgtacaaacgaacgggagtcgaaccaggtgctcgcccacccggtttccccgttctgtccggcgactttttcagttatgcggaccgggaagaccactactggactggctactacactagccggcctttctacaaatcgctggacagggtgttggaggcccacctgcgcggcgccgaggtcctgtatagcttggccgccgctcatgctcgccgctccggcctggccggccgctatccattatctgatttcaccctgctaactgaagctcgtcggacacttggattgttccaacaccatgacgctatcacggggactgcgaaggaagcggtggtcgttgattacggggtgaggttgcttcggagtctggttaacctgaagcaggtaattattcacgccgcacactatctggtacttggagacaaagaaacataccatttcgacccagaagcaccattccttcaggtggacgatacccgcttgagccacgatgctctgcctgagagaactgttatccagttggatagctccccgcgattcgttgtgctgttcaacccactggagcaggagcgattctccatggtttccctgctcgttaactcgccccgtgttcgggtcctgagtgaagagggccaacccttggcagtgcagatttctgcccattggtctagcgcgacagaggcagtcccggatgtataccaggtatcagtgccagtgagacttccagccctcgggttgggcgtgctgcaactgcagctgggtctagacggacacaggacactcccgagctcggtgcgcatctatctgcatggcagacaactctccgtcagccggcacgaagctttcccgttgagagtcatcgactcaggcacgtctgattttgctctctcaaaccggtatatgcaagtgtggttcagcggtctgaccggactgctcaaatccataagaagggtggatgaggagcatgaacagcaggtggatatgcaggtgctggtatacgggacccggacgtctaaagacaaatctggagcttacctgtttctgcctgacggcgaagccaaaccctatgttcctaaggaaccccccgtactgagagtgactgagggaccctttttcagtgaagtggtggcctactatgaacatattcaccaagccgtgcggctatataatctccccggtgtagagggactatccctggacatctcttcattggtcgacatacgcgattacgtgaataaggaactggccctgcacatccatacggatattgattcacagggcatttttttcacggatttgaatggcttccaggttcagcccagacgatatctgaagaagctccccctgcaagcaaacttctaccccatgcccgttatggcctacattcaggacgctcagaagcgcctgacactgcacacggctcaggctctcggagtgtcttctctgaaggatgggcagctcgaggtcattctcgatcgtcggctgatgcaggatgataataggggtctgggccaagggctgaaagacaataaaagaacatgtaatcgctttcgcctccttcttgaaaggcgaacagtggggagtgaggtgcaagatagccactctacctcatatcctagtctgctttctcacctgaccagtatgtatctcaatgcgccggctctagccctgcccgtggctagaatgcagctccccggacctggcctgcgcagctttcacccattggcctcttcactaccatgtgacttccacctgttgaatctaagaactctccaggctgaagaagataccctcccgtccgccgagacagctttgattctacacagaaaagggttcgattgcggcttggaggctaagaatctgggtttcaactgtaccacttcccagggaaaggtcgcccttggatcgctgtttcacggactggatgtggtcttcctgcagcccacctccctgaccctcctctatcctctggcctccccatccaactccaccgacgtgtatctcgaacctatggagatcgccacatttcgcctgagacttggctag

SEQ ID NO: 194137 - DNA, 1023 bp, synthetic construct
  misc_feature 1..1023: note = Description of Artificial Sequence: Synthetic coding sequence
  source 1..1023: mol_type = other DNA
atgcaggtgtggttcagcggcctgaccggcctgctgaagccctacgtacctaaggaacctcctgttttgcgcgtgaccgagggcccctttttttctgaagttgtcgcttactatgaacatattcaccaagctgtgagactgtacaatctgcccggtgtcgagggcctgtctctggacatttccagtctggtggacataagagactacgtgaataaagaacttgctctgcacatacacaccgacattgattcacagggcatttttttcaccgatcttaacggtttccaggtgcagccccgacggtatctgaagaagctaccactgcaggccaatttctacccaatgcccgtcatggcctatattcaagacgctcagaaaaggttgactcttcataccgcccaggcactgggcgtgtccagcttgaaagacggccagctggaagtgatcctcgataggagattaatgcaggacgacaaccgcgggctggggcaggggttgaaggataataagaggacctgtaatagattccgcttgttgctggagcggcgcaccgtaggtagcgaggtacaggattctcactcaacgtcctatcctagcctgctctcacacctcacctccatgtatttgaatgccccggctctagcgctaccggtggccaggatgcagttgcctggaccagggttgcgctccttccacccattggcaagtagcctgccgtgtgactttcatttactcaatctgaggacactgcaggctgaggaggacacactgccctctgcagagacagctttgattctccacagaaagggtttcgattgtgggctcgaggctaagaacctcggttttaactgcacaacctcgcaggggaaagttgctttgggcagcctgttccacggcctcgatgttgtgttcctccagcctacttcattgaccttgctctaccctctcgcttctccttctaattcaacagatgtatatttagagcctatggaaatcgctacctttcgccttcggctgggttag

SEQ ID NO: 194138 - DNA, 1977 bp, synthetic construct
  misc_feature 1..1977: note = Description of Artificial Sequence: Synthetic coding sequence
  source 1..1977: mol_type = other DNA
atgaccagcgacatgaccagcccccggagcggcatgcccagcagctcaaccactaacggctcactgacatcctctaccgctgggcttacgagcatgtgccgtggggccgaagtgctttacagcctggcagccgcccacgccaggagatcagggttggccggaaggtatcctctttccgattttacactcttgacagaagcccgccggactcttggtctcttccagcaccatgacgcaattaccggcaccgccaaagaggcagttgtggtggactacggtgtgcgactattaagatcactcgtcaacctgaaacaagtaataatccatgctgcccactatctagttctgggggataaggagacataccatttcgacccggaagctcctttcctgcaggtggatgacacgcgactttctcacgacgctctgcccgaacgtactgtgatccagctggattcctctccgcgatttgtcgtgttgtttaatccacttgaacaggaacggttcagtatggtttctctgttggtgaactctcccagagtgcgcgtcctgtcggaggaggggcagccacttgccgtgcagatcagtgcacactggagtagtgccaccgaagccgtacccgacgtctaccaggtgtccgttccggtcagacttccggccttagggttgggtgtgctccagctccaactgggcctagatgggcaccggactttgcccagcagtgtacggatctatctgcatggaaggcagttatctgtgtcccggcacgaggccttccccctgcgcgtgattgacagcggcacctctgactttgccctgagcaaccgctacatgcaagtctggttctctgggttgaccggcctgctcaagagcattcgtcgcgtggacgaggagcacgagcaacaggtggacatgcaggtgctggtgtacggcactcgaacgagtaaagacaagagcggcgcatatctgttcttgcccgatggagaagctaagccttacgtgcccaaagagcctcccgtcctgcgcgtgacagaaggtccgttcttctctgaggtggttgcatactacgagcatatccaccaggctgtcaggctctacaacttgcccggagtggaggggcttagccttgatatcagttccctcgtcgacattcgggattatgtgaacaaggagctggcacttcatatccacacagacatcgactcccaggggattttcttcacggacctgaatggcttccaggtgcagccacgcaggtaccttaagaaactgcctctgcaagcaaacttttatcccatgccagtaatggcctacatccaggatgcccagaagagactgaccttacacacagctcaggccctcggggtctccagtttaaaagacggacagcttgaggtcatcctggaccgccgactaatgcaggatgataacaggggactgggccaaggattaaaggacaacaaaagaacttgtaaccgtttcaggcttctcctagagcgcagaaccgttggttcggaagtgcaggattcacattccacctcgtatccctccctgctgtctcaccttacctcaatgtacctgaacgccccagcattggcacttcccgtagcccgcatgcagctacccgggccaggacttaggagcttccacccgcttgccagttcgctcccctgtgatttccatctcttgaatcttaggaccttacaggcagaggaggatactctgcccagcgccgagacggctctgattctgcaccgcaaggggtttgattgcggacttgaggctaagaatctcggatttaactgtaccacctctcagggcaaggtggcgctaggatccctgttccacgggctggacgtggtcttcttgcagcccacctccttaacactcttgtaccctctggcttccccatcaaatagcaccgacgtctatctggaaccaatggaaattgcaacattcagactgagactggggtag

SEQ ID NO: 194139 - DNA, 219 bp, synthetic construct
  misc_feature 1..219: note = Description of Artificial Sequence: Synthetic coding sequence
  source 1..219: mol_type = other DNA
atgaagctgaagaagcaggtgaccgtgtgcggcgccgccatcttctgcgtggcagtttttagcctgtatctaatgcttgaccgtgtgcagcatgaccccacgcgacaccagaacggtggtaatttcccacggagtcagatctccgttttacaaaacagaattgagcaactggaacagcttctggaagaaaaccacgaaattatctcgcatataaaatag

SEQ ID NO: 194140 - DNA, 153 bp, synthetic construct
  misc_feature 1..153: note = Description of Artificial Sequence: Synthetic coding sequence
  source 1..153: mol_type = other DNA
atgaagctgaagaagcaggtgaccgtgtgcggcgccgccatcttctgtgtggcagtgttttcgctgtatttgatgcttgaccgggtgcagcatgatcccactaggcatcaaaatggtggcaattttccgcgttcccagatcagcgtgctttag

SEQ ID NO: 194141 - DNA, 3192 bp, synthetic construct
  misc_feature 1..3192: note = Description of Artificial Sequence: Synthetic coding sequence
  source 1..3192: mol_type = other DNA
atgctgccctactacaccgtgaacggcagctgggtggtgccccccgaaccgcggccctctttcttttctataagccctcaggactgccagtttgccctgggcggccggggtcagaaacctgaactgcagatgctcaccgtctcagaggagttgccctttgataacgttgacggcggcgtctggaggcagggcttcgatatctcctacgatccgcatgactgggacgccgaggacttgcaggtttttgttgtgccccacagccacaatgatcccggttggatcaagacctttgacaagtactacaccgaacaaacacagcacattttgaacagcatggtcagcaagctgcaggaagatcccagacgtcgcttcctctgggctgaggtatctttctttgccaaatggtgggacaatatcaatgtacagaagcgggctgccgtgcgccggttagttggcaacggacaattggaaattgcaactggtggctgggtgatgcctgacgaagctaactcccattacttcgccctgatagaccaactgatcgaggggcatcagtggttggaacggaacttgggcgccacgccacgttctggttgggcggtcgacccctttggctatagtagcacaatgccttacttactccgccgagcgaatctcacctctatgcttatccaaagggtccattacgcaatcaagaagcacttcgctgctacccatagtttggaatttatgtggcgccaaacatgggacagcgatagtagtactgacatcttctgtcacatgatgccgttctactcttatgatgtcccccacacatgcggtcctgatcccaagatctgttgccagttcgactttaagcggctgcctggaggacgcatcaactgcccatggaaggtaccgcctcgtgccataactgaggccaatgtggctgaaagagcagccctgttactagaccagtaccggaaaaagtcccagctgttccggtccaatgtgcttctggtgcccctcggcgatgactttagatacgacaagccacaggagtgggacgcacagttcttcaattaccagcgcctattcgacttctttaatagtcgcccaaacctccatgtgcaggcccagtttgggaccctgagcgactactttgacgccttgtacaaacggacaggggtagaacccggagcccggccgccaggatttccagtactgtccggcgatttcttcagctacgcagaccgggaagaccattactggacaggttactacacgtcacgaccattctacaagtcgctggaccgcgttctggaggcccatttaagaggagccgaggtgctctactctctggccgccgctcacgcacgccgctcgggattggccgggcgataccctctgtccgatttcaccctgctgaccgaagcccgtcgcactttaggactgttccagcatcacgatgccatcaccggaaccgccaaggaagcggtcgttgtggactacggcgtgcgcctgctgaggtccctggtcaacctcaaacaggtcatcatccacgccgcgcattacctcgtactgggggacaaggagacataccatttcgaccctgaggcgccatttctgcaagtcgatgacacccggttatcccacgacgcgctgcccgaaagaaccgtgatccagttagacagttcccctcgattcgttgtgttgttcaacccactggaacaggaacggttctccatggttagtctgctggtcaacagccccagagtgagggtcctcagcgaagaggggcagccgctggctgtgcagatttccgcccactggtcatccgctacagaggccgttccagatgtttaccaagtttctgtaccagtacggcttcccgcactggggctgggcgtgctgcagctgcagttaggacttgatggacatcggaccctgccctcgtcggttagaatctatctgcatggccggcagctgagcgtgtcaaggcacgaagcgtttcctttacgggtgatcgattctggcactagtgatttcgccctgagcaacaggtacatgcaagtatggttctccggccttaccggactgctgaagtcgatcaggcgcgtggacgaagaacacgaacagcaggtggatatgcaggtgctcgtatacggcaccaggacctctaaggataagtctggagcatacttatttcttccagatggagaggcaaagccatatgtgcccaaggagccacccgtcctgagagtaaccgaggggcccttttttagcgaagttgtcgcttattatgaacacatacatcaagccgttcgactgtataacttgccgggcgtagagggtctttcgctagacatatcttccctggtggacatcagagattacgtcaacaaagagttagcacttcatattcacacggatatcgacagccagggcatcttttttaccgacctgaacggttttcaggtacagcctcgaaggtatctgaagaagctaccactgcaggcaaacttttaccctatgcccgtgatggcatacatccaagatgcccaaaaacgtctcaccctccataccgcccaggcgctgggcgtctcatccctaaaagatggccaactcgaggtgatcctggaccggcgcctgatgcaggatgataacagggggctgggccaaggcttgaaggacaataaacggacatgtaacaggttccggctgttgcttgagcggcggaccgtcgggtccgaggtgcaggattcccactctacctcctatccaagtcttttatcacatctgacttccatgtacctgaacgccccagcactcgctctgccggtggcccggatgcagctgcccgggcctggcctgcgctctttccatcctttggcatcttcactgccgtgtgacttccacttgcttaaccttcgcacattgcaggctgaggaagatactcttccctctgcagaaacagctcttattctgcacagaaaaggatttgactgcgggctggaggcgaaaaacctagggttcaattgtactacatcacagggtaaagtcgcccttggctccttatttcatggactggatgtcgtgtttcttcagccgactagcttgactttactctacccactcgctagtccttcaaattctacagacgtatatttagagcccatggagatagccactttcaggctgaggcttgggtag

SEQ ID NO: 194142 - DNA, 231 bp, synthetic construct
  misc_feature 1..231: note = Description of Artificial Sequence: Synthetic coding sequence
  source 1..231: mol_type = other DNA
atgaagctgaagaagcaggtgaccgtgtgcggcgccgccatcttctgcgttgctgtctttagcctctatctcatgctggatagggttcagcacgaccctacgagacaccagaacggtggaaactttccacgctcgcaaatcagcgtgctccagaatagaattgaacagctggagcagctgctggaggaaaatcacgaaattattagccatatcaaagacagcgtcctttag

SEQ ID NO: 194143 - DNA, 363 bp, synthetic construct
  misc_feature 1..363: note = Description of Artificial Sequence: Synthetic coding sequence
  source 1..363: mol_type = other DNA
atgaagctgaagaagcaggtgaccgtgtgcggcgccgccatcttctgtgtggccgtgtttagtttatatcttatgctggacagagtgcagcacgaccccacccgtcatcaaaacgggggcaatttcccccggagccagataagcgtgctccagaacaggattgagcagttggaacaattactggaggagaaccatgagataattagtcacatcaaagacagcgtcctggaactcaccgctaacgcagagggccccccagctatgctgccttattatacagttaacggaagctgggtagtgccgcctgaacctagaccttcctttttcagcatatccccacaggactgtcagttcgctctatag

SEQ ID NO: 194144 - DNA, 3123 bp, synthetic construct
  misc_feature 1..3123: note = Description of Artificial Sequence: Synthetic coding sequence
  source 1..3123: mol_type = other DNA
atggccgccgcccccgccctgaagcactggcggaccaccctggagagagtggagaagttcgtttctccactctactttactgactgcaacctcagaggaaggctgtttggcgcttcctgcccagtggccgtccttagttcattcctcaccccagagcggctcccttaccaggaggccgtacagcgagactttcgacccgcacaggtgggtgacagcttcggacctacttggtggacctgctggtttagggtggaactaaccattcctgaggcctgggtagggcaggaggttcacctgtgttgggagtcggacggggaggggctggtttggagggatggagagccagtgcagggcttaacgaaggaaggtgaaaaaaccagctacgttctgaccgaccgactgggggagagggatccgagatcccttaccctatacgtcgaggtggcttgcaatgggcttcttggcgctgggaaaggctccatgatcgcagcacccgatcccgagaagatgttccagctatctcgcgctgagctggccgtgtttcacagagacgtgcacatgttactagtagatctggaactgctccttggaattgccaaaggattgggtaaggataatcagagaagcttccaggctctgtataccgcaaaccagatggtcaatgtctgcgaccctgcgcagccagaaaccttcccggtagctcaggctctggcctccagatttttcgggcaacatggtggggagtcccagcataccatacatgcaactggtcactgccacatcgacacggcctggctgtggccctttaaagagaccgtgcgcaaatgtgccagatcgtgggtgaccgcactccagttaatggagcgaaatcctgaattcattttcgcctgttctcaggcccagcaattggagtgggtgaagtctaggtaccccggtctctattctagaatccaggaatttgcttgcagaggtcagtttgtacccgtcggaggtacctgggtggaaatggacggaaacctgccttcaggcgaggcaatggtccgacagtttcttcagggacaaaattttttcctgcaggagttcggcaagatgtgctccgaattctggttgcccgacacttttggatactccgctcagcttccacagatcatgcacggttgcggaattcggaggttcctgactcagaaactgtcttggaacctggtgaactcctttcctcaccacacgttcttttgggaaggactcgacgggtcaagggtgctcgtccacttccccccaggtgatagttacggcatgcagggaagcgtggaggaggtattgaagacagtggccaacaatcgggacaaaggtagggccaaccacagcgcgttcttgttcggattcggcgacggaggaggaggccccacccagactatgctggataggctgaagcgactgtcaaacaccgatgggctgccccgagttcagttgtcatcccctcgccagctttttagcgctctggagtcagattccgaacagctatgcacctgggtgggcgagctgttccttgaactccacaacggcacctacaccacccatgctcaaatcaagaaagggaatcgggagtgtgagcgaatcctgcacgacgtggagctcttaagcagcttggccctggcacgatcagcccagtttctgtatcccgctgctcagctccagcatttgtggcgcctccttctgttgaatcaattccacgacgtagttacaggatcctgcatccagatggtggcagaagaagccatgtgtcattacgaggacatcagatcacacggaaacactctactgtcagcagccgcagccgccctgtgtgcgggagaacccggcccagagggcttgctgattgtcaataccctgccttggaagcggatcgaggtcatggctttacccaagcccggcggagctcacagcctagcattagtgaccgtccctagcatgggctatgcacccgttccgcctccaacctccttgcaaccgctgctgccccaacagcctgtgtttgtggttcaggagactgacggaagcgtgactctggacaacggcataatcagagtgaagctggatccaacgggcagactgacatccctggtcttagtcgcaagcggcagagaggccattgccgagggcgctgtcggaaaccaatttgtgctgttcgacgatgtgccattgtattgggacgcttgggacgtgatggactatcatcttgagacgcggaaaccggttctcggccaggctggcacgctggctgttggcacagaggggggtctccggggatcagcatggtttttactccagatcagtcctaatagtcggctttcccaggaggtggttttggacgtcggatgcccctatgtgcgattccacaccgaggttcattggcacgaagcacacaagtttctgaaagttgagtttcccgccagggtcaggagttcgcaggccacttatgagatacagtttggacacctccaacgccctactcactacaacaccagctgggactgggcacggtttgaagtctgggcacaccggtggatggacctttccgagcatggtttcgggctggccctgctgaacgattgtaaatacggtgcatcagtccgtgggtcaatcctgtcactgtcattacttcgggccccaaaggcgcctgacgcaacagccgataccggacgccacgagtttacttatgccctcatgcctcacaaaggtagtttccaggacgctggggtaattcaggccgcgtactctctcaatttccctctccttgctctgccagctccaagccccgcaccagcaacctcctggtctgcattcagcgtgtcgtcccctgctgtggtgctggagacagtcaagcaggctgaatcttcgccgcagaggaggagtcttgttttgagactgtacgaggcacatggttcacacgttgattgttggttgcacttgtccctgcctgtgcaggaagccatcctgtgtgacttgctcgaacggccagatcccgccgggcacctcacactgagagataatcggcttaaacttaccttcagcccctttcaggttctgagccttctacttgtactgcagccgcctccacactag

SEQ ID NO: 194145 - DNA, 630 bp, synthetic construct
  misc_feature 1..630: note = Description of Artificial Sequence: Synthetic coding sequence
  source 1..630: mol_type = other DNA
atggccgccgcccccgccctgaagcactggcggaccaccctggagcgggttgagaagtttgtcagccccctatacttcacagattgtaacctgcggggtcggttgttcggggcctcgtgccctgtagcagtcttgtcctcatttctcacgcccgagcggcttccctaccaggaggccgtgcaacgagacttccgccctgcgcaagtcggggactcctttggccctacttggtggacatgttggtttcgcgtcgaactgactattcctgaagcttgggtaggccaagaagtgcacctatgttgggaaagcgatggcgaaggcctggtgtggagagacggcgagcctgtccagggcttgacaaaggaaggtgagaagacgtcctacgttcttactgatcggctcggggagagagatccgcgatcgttgactctctatgtagaagttgcgtgtaatgggctcctgggagcagggaaggggagcatgattgccgcccctgatccagagaagatgtttcagctcagtcgagccgaactggctgtatttcaccgagatgtgcacatgcttctggtggacctggagctgctcctcggcatagctaaacccggctttgggccatccaagagactgtag

SEQ ID NO: 194146 - DNA, 2910 bp, synthetic construct
  misc_feature 1..2910: note = Description of Artificial Sequence: Synthetic coding sequence
  source 1..2910: mol_type = other DNA
atggccgaggacgacccctacctgggccggcccgagcagatgttccacttagaccccagcctgacccataccatatttaaccctgaggtgtttcaacctcagatggcactgcctacagcagatggaccttatttgcagattctggagcagccaaagcagaggggtttcaggttccgctacgtctgtgagggcccaagccacggagggttgccaggagcttccagcgagaagaacaagaaaagctacccacaggttaagatctgcaattacgtggggcccgcaaaggtgattgtgcagctggtgacaaacgggaagaatatccacttgcatgcccattctttagtgggaaagcattgcgaagatggaatttgcactgttacagcaggccccaaggacatggtcgtgggcttcgccaacctcggaattctgcacgtgactaagaaaaaggtttttgaaacactcgaagcacgcatgacggaggcatgcattcggggctataatcccggcctgcttgttcacccggatctggcctacctgcaagctgagggaggaggtgaccggcagctgggtgaccgcgaaaaagaattgattcgccaggccgcgcttcagcagaccaaagaaatggacctctccgtcgtgagactgatgttcaccgccttcttacccgacagcactggaagtttcactcgccgactggagcctgttgtatctgacgctatctacgatagtaaggccccgaacgcctccaatcttaaaatcgtcagaatggatcgcacggcagggtgcgtcactggaggcgaggagatatacctcttgtgtgacaaggttcagaaggacgatatccagatccgtttctacgaggaggaggagaacggtggcgtctgggagggattcggcgattttagtcctacggatgtgcaccggcagttcgcgatcgtgtttaaaacacccaagtacaaagatatcaatataactaaacccgcaagcgtgttcgtgcagctgaggagaaagagtgatctggaaacttccgagcccaagccatttctgtattaccccgaaatcaaggataaggaggaggtgcaaaggaagcgccaaaaactgatgccaaactttagcgactcctttgggggcggctctggcgccggagctggcgggggcggcatgtttggctcgggggggggcggcggcgggactggttccaccggccccggctacagcttcccccattatgggttcccaacttacggcggcattacatttcatccaggcactacgaaatccaatgccggaatgaagcatggaacaatggatacagagagcaaaaaggatcccgaaggatgcgataaaagcgatgataagaacacggttaaccttttcggcaaggtgatagagacaaccgagcaggaccaggagccatccgaagctacggtgggcaatggggaagtaaccctaacttatgctacggggactaaagaagagtcagccggcgtccaggataatctgttcctcgaaaaagctatgcagctggccaagcggcacgccaacgccctgttcgattacgctgtgaccggagacgtcaaaatgctcctggcggtgcagcgccatttgaccgcggtgcaagacgagaacggtgactccgtgttacatctcgccattattcacctgcactctcaactggttcgcgatctgctggaggtaactagcgggctgatttctgatgacatcattaatatgcgcaacgatctgtatcaaacacccctccacctggccgtgatcaccaagcaggaagatgtggttgaggacctgctgagggccggggcagatttaagcctacttgatcggttaggaaattctgttctgcatctagcagcaaaggaagggcacgacaaggtgctgtctatcttgcttaaacataagaaagcggccctgctcttagaccaccccaacggcgacggtctgaatgccatccacctggcgatgatgagcaattcccttccctgcctgcttcttctggttgctgcgggggcggatgttaatgcacaagagcagaaatccgggcgtaccgcactgcatctcgctgttgaacatgataatatttcactggcagggtgcctacttttagagggtgatgcacacgtcgactcgaccacatacgatggtacaactcccttgcatatcgcagccggcagggggtcaaccaggctggccgctttactcaaggcagcaggcgccgatcccctcgttgaaaacttcgagcccctctatgacctggacgatagttgggagaatgccggggaagacgagggagtggtccccggcactacccccttggatatggccacctcgtggcaagtttttgacattctgaatggaaagccgtacgagcccgaatttacaagtgacgacctcctggcacagggggatatgaagcagctagctgaagatgtgaaactacagctgtacaagctcctcgaaatccctgatcccgataagaattgggctaccctcgcccagaagctgggcctgggcattctcaataatgcatttagactaagtcctgcacctagtaagaccctgatggataactacgaggtgtccggcggcactgttcgcgagttagtagaagccctgaggcaaatgggttacactgaggccatcgaggtaattcaggcagcctctagccctgttaagaccacctcacaggcccattcgctgcccctgtcaccagcttcaacacggcagcagattgatgaattaagagactcagactccgtatgcgacagtggcgtcgaaacctcgtttcggaaactttccttcaccgagtcacttaccagtggggcctccttgctaacgctgaacaagatgccgcatgactacgggcaagagggcccgttggagggaaaaatttag

SEQ ID NO: 194147 - DNA, 1389 bp, synthetic construct
  misc_feature 1..1389: note = Description of Artificial Sequence: Synthetic coding sequence
  source 1..1389: mol_type = other DNA
atggccaagttccggcggcggacctgcatcatcctggccctgttcattctgtttatattttccctgatgatgggattaaaaatgctgcggccgaatacggctacctttggcgcacctttcggactagatcttcttcctgaactgcaccagcgtaccatccacctcggcaagaacttcgacttccagaaaagtgataggataaactctgaaaccaacaccaaaaacctcaagtccgtggagatcaccatgaagccttcaaaagcaagcgagttaaacctcgacgagttaccacccttgaacaattacttgcacgtcttttactattcctggtacggtaaccctcagtttgacggcaaatacatccactggaaccatccagtgctggagcactgggatccccgtatcgccaagaattacccccagggacgacacaacccgcccgatgacatcggaagttccttttatccagaactcggctcttatagttcacgcgatccttcggtgattgagactcacatgaggcagatgcgcagtgcctccatcggtgttctcgctctgtcttggtatcctcccgacgttaatgatgagaatggcgagcctaccgacaacctcgtgcctactatcctggacaaggctcacaagtacaatctaaaagtgacgttccatattgagccctattctaacagagatgatcagaacatgtataagaatgtgaagtacatcattgacaagtacggaaaccaccccgctttttatagatataagacgaagactggaaacgcactgcccatgttctacgtttacgacagttacattactaagccggagaagtgggccaatctcctcacaactagcgggtcaaggtccatcagaaactcaccctatgatggactcttcattgctctgctggtggaagaaaaacacaaatatgacattctccagtcgggatttgacggaatttacacctatttcgccaccaacggttttacgtatggttcctcacaccagaactgggcgagtttaaagctgttttgcgacaagtataatcttatctttatcccctctgtgggcccaggctatatcgatacctcaatccggccttggaacacccagaatacaagaaaccggattaacggtaaatactacgaaattggactctctgcggcgctgcagacccgccctagcctgatcagtataacaagtttcaacgagtggcatgagggtacacagatcgaaaaggcggttccaaaaaggaccagcaataccgtttatctcgattacagacctcataaacccggactgtatctggagctaaccaggaagtggtccgagaaatatagcaaggaacgtgccacatacgcactggatcgacagctgcccgtgtcatag

SEQ ID NO: 194148 - DNA, 597 bp, synthetic construct
  misc_feature 1..597: note = Description of Artificial Sequence: Synthetic coding sequence
  source 1..597: mol_type = other DNA
atggccaagttccggcggcggacctgcatcatcctggccctgttcattctcttcatcttctctctgatgatgggtctgaagatgctacgccccaacacagctacattcggcgccccgttcgggttggacctgctccctgagttgcaccaacggacgatacacctaggaaaaaattttgatttccagaaatctgatcgcatcaactctgaaacaaacacgaagaatcttaagagtgtggaaatcacgatgaagcctagcaaggcgtccgagctgaacctggatgaactgcctccactgaacaattacctccatgtgttctactactcctggtatggtaatccccagttcgatggcaagtacattcactggaaccatcctgtgctcgaacactgggatcctcgcattgccaagaactatccccaaggtcggcacaaccctccagatgatattggatcctccttctatcccgaattaggatcatactcaagtcgcgatccttctgtaattgaaacacacatgagacagatgagatccgcatcaattggaaactattgtatttacatctacgtgtgtctgtgcctgtatatctgcatttag

SEQ ID NO: 194149 - DNA, 624 bp, synthetic construct
  misc_feature 1..624: note = Description of Artificial Sequence: Synthetic coding sequence
  source 1..624: mol_type = other DNA
atggccaagttccggcggcggacctgcatcatcctggccctgttcatcctgtttatcttctccttgatgatgggcctaaaaatgctgagaccaaatacagcaacatttggcgcaccattcggactggatttactcccagagctccatcagcggaccattcaccttggcaaaaattttgattttcagaagagcgatcgtatcaacagcgagacgaacacaaaaaaccttaaaagcgttgagatcactatgaaacccagcaaagcttcagaacttaatctggatgagttaccaccactaaacaactaccttcatgtattctactactcctggtacggcaatccacaattcgacggtaagtatattcattggaatcatccagtgctggaacactgggacccccgcatcgccaagaactacccccaaggccgacataatccccccgacgatatagggtctagcttttatcctgagctggggagttactcttcccgcgacccctctgtcatcgaaacccatatgagacagatgcggtctgcatctattgggaattattgcatctatatctgcgtattcgtctcggtgtatatgcatatcaacgatttcctatgcaattttaccagttag

SEQ ID NO: 194150 - DNA, 2379 bp, synthetic construct
  misc_feature 1..2379: note = Description of Artificial Sequence: Synthetic coding sequence
  source 1..2379: mol_type = other DNA
atgatcaccgtgaaccccgacggcaagatcatggtgcggcggtgcctcgtaacactgagaccgtttagactcttcgttctaggtattggcttctttactctatgcttcctgatgacctcgttaggcggccaattctcagcgcgccgactgggagactcgcctttcaccattcgaacggaggtgatgggcgggcccgagagtagaggagtgctccgcaagatgagcgatctgcttgagctgatggtaaaacgtatggacgccctcgctagactcgagaatagctctgaactccatcgggccggaggcgatcttcattttcctgccgacaggatgccccccggggccggtctcatggaaaggattcaagccatcgcacagaatgtttccgacattgcggtgaaggttgatcaaatattgcgccattctctcctgttacatagcaaggtcagcgagggccgacgggatcagtgcgaagccccctcggatccaaaattccctgactgttccggaaaagtggagtggatgagggcccgatggacttcggacccctgttatgctttctttggagtggacggtaccgaatgctcattcctcatttatctgtccgaggtggagtggttttgccctcctctgccctggcgaaaccagaccgctgcacagcgcgcacccaagcccctgcccaaagtgcaggccgtatttagatccaacctttctcacctcttggacttgatggggtctggtaaagagagcttgattttcatgaagaagaggaccaagcggctgacagcgcagtgggcactggctgcccagaggctggcccaaaagctgggggctacccagagggaccagaagcagatattggtccacataggtttcttgacagaggaatctggggacgtgttctccccaagagtcctaaaaggcggccctctcggcgagatggtgcagtgggctgatatcctgaccgcactctacgtgctgggccatggccttagagttacagtgtccctaaaggagctccagagtaacctgggtgtgcctcccggcaggggaagctgcccactgacaatgcccctgccttttgacttgatctacactgactaccatgggctgcagcagatgaaacggcacatgggattatctttcaagaagtaccggtgcaggattcgcgtgatcgatacgttcggaaccgaacctgcatacaaccatgaggaatacgcaacacttcacggctatcgaaccaattggggatactggaatctcaaccccaagcagtttatgactatgttcccacatacgcctgacaactcatttatgggattcgtgagtgaggaactgaacgagactgaaaagaggctcatcaagggtgggaaagcttccaatatggccgtggtttatggcaaggaagcatccatttggaaactgcagggaaaggaaaaatttctggggatccttaataaatatatggaaattcatggaacagtatactatgagtcacagcggccccctgaagtgccagcatttgtgaagaaccatggcctgctaccccagcctgagtttcagcagctgttacggaaggccaagctcttcatcgggttcggctttccgtatgaaggcccagctcctttagaggctattgctaacggatgcatattcctgcagagcaggttctcaccaccgcactcaagtttgaaccacgagtttttccgggggaaacccacctcacgagaggtattttctcaacacccttatgccgagaactttatagggaagcctcacgtttggacagtggattataataactcagaggaatttgaggccgccatcaaggccatcatgcgtacacaagttgatccttacctcccttatgaatacacctgtgaagggatgcttgagaggatccacgcctacatccaacaccaggatttttgtagggctcccgaccctgctttacccgaggctcacgcccctcaatctccattcgtcctcgcccccaacgcaacacatctggagtgggctaggaacaccagcctcgctcccggagcctggcccccagcccacgctcttcgggcctggctggccgtgccaggtagggcttgcactgacacctgtcttgatcatggtctgatctgtgagccatcttttttcccattccttaacagtcaagacgccttccttaaacttcaggtgccttgcgatagcaccgagtcagagatgaaccatctgtaccctgcgttcgctcagcctggccaggaatgctacctgcagaaggaacctctgctgttcagttgcgccggcagcaacacgaagtatcgcagactatgcccttgtcgggactttcggaagggccaggtagcactgtgccaggggtgtctttag

SEQ ID NO: 194151 - DNA, 1338 bp, synthetic construct
  misc_feature 1..1338: note = Description of Artificial Sequence: Synthetic coding sequence
  source 1..1338: mol_type = other DNA
atgctgaagaagcagagcgccggcctggtgctgtggggcgccatcctctttgtcgcctggaatgctctactgctgctttttttttggactcggccagcccccggcagacccccatcagttagtgccctcgatggagacccggcaagccttacgcgggaagtaattcggcttgcccaagatgcggaggtggaattggagcgccagagaggcctgctgcagcagatcggggatgccctgagctctcagaggggacgtgtcccgactgcggcgccaccagctcaacccagagtccccgtgactcccgccccagccgtgatccccatccttgtgatcgcttgcgacaggtcaaccgtgcgccggtgcctggataagctgttgcactacagaccctccgccgagctgtttccaataatcgtgtctcaagattgcggccacgaggagacggcacaagccatcgcctcttacggaagtgcagtgacacatatccgccagcccgatctgtcctctatcgccgtgcctcccgatcaccgtaaattccagggctattacaaaatcgctcgccattaccggtgggccctggggcaggtcttccgacagtttcgatttcccgctgctgttgtggtggaggatgatctcgaggtggcccctgatttttttgaatacttccgggctacctacccactgttgaaggccgacccaagcctatggtgtgtttctgcttggaacgacaacggaaaggaacagatggtggacgccagccggcccgaactgttgtatcggaccgactttttccctggcctgggatggctgttgctggcagagttgtgggccgagctggagcctaaatggccaaaagcattctgggacgattggatgcgccggcctgagcagcgccaaggccgagcctgtatcaggccggagatctccagaaccatgacttttggacgcaagggagtctcccatggacagttcttcgatcagcacttaaagttcatcaagttgaatcagcagttcgtgcactttacccagctggacctgtcctacctgcagcgagaggcctacgatagagatttccttgctcgagtctatggcgcgccacaactgcaggtggagaaagttaggactaacgatagaaaagagttaggggaggtgcgcgtgcagtacactggtagagacagtttcaaagccttcgcgaaggctttgggagtcatggacgacctgaagtctggagtgcctcgggcgggttacaggggcattgtaacatttcaatttaggggccgccgagtccacctggccccaccactgacttgggagggatacgatccttcttggaattag

SEQ ID NO: 194152 - DNA, 1338 bp, synthetic construct
  misc_feature 1..1338: note = Description of Artificial Sequence: Synthetic coding sequence
  source 1..1338: mol_type = other DNA
atgctgaagaagcagagcgccggcctggtgctgtggggcgccatcctcttcgtggcttggaacgctctactgctgctttttttttggacacgaccagccccaggccgtcctccgagcgtctcagcattggacggtgatcctgcgtctcttacacgcgaggtcatcaggctggcccaggacgccgaagtggagctggagaggcagcggggactactccagcagattggagatgctctttcttcccagcggggacgagtccccaccgcagctcctcctgcacagccccgcgtccccgtaacccccgcccctgcagtgattcccatcctggttattgcttgtgacagaagcaccgtgcgcaggtgcttggacaagttgttgcattaccgcccctctgcagagttgttcccaattatcgtatctcaggattgcggccacgaagaaaccgctcaagccatcgcctcctacggaagcgccgttacccatattaggcagcctgatctgagttctatcgccgtcccccctgatcacagaaagttccaggggtattataaaatcgcccgacattaccgctgggcgctcggtcaggtatttcgtcagttcagatttcctgctgccgtagtggtggaggacgacctggaagtggccccagatttctttgagtactttcgcgctacatatcccctgctgaaggcagaccccagcttatggtgtgtgtctgcatggaacgataatggtaaggagcagatggtggacgcctcccgccctgaacttctctatcggactgatttttttcctggccttggctggctattgttggcagagctatgggccgaactcgaacctaaatggcccaaggcattctgggacgactggatgaggagacctgagcaaagacaaggacgagcatgcataaggcctgaaataagcaggacgatgacattcggaagaaagggcgtgtcccatggacagtttttcgatcagcacctcaagttcatcaaactcaaccagcagtttgtccactttacgcagcttgatctctcctatctccagcgggaggcctatgaccgtgactttctggcacgcgtctacggtgccccccaactgcaagtggagaaggtgagaacgaatgacaggaaggaactgggggaagtgagagtccagtacaccggacgtgattcttttaaagccttcgctaaagcccttggtgtcatggacgacctgaaatccggtgtgcctagggcaggttatcgggggatcgtcacgtttcagtttagagggcgccgggtgcatctggcaccacccttgacctgggaggggtacgatcctagctggaattag

SEQ ID NO: 194153 - DNA, 1338 bp, synthetic construct
  misc_feature 1..1338: note = Description of Artificial Sequence: Synthetic coding sequence
  source 1..1338: mol_type = other DNA
atgctgaagaagcagagcgccggcctggtgctgtggggcgccatcctgttcgtggcatggaatgcactgcttctgttattcttctggacacgccccgctcccggccgaccgccttccgtgtcagcactggacggcgaccccgcatctctgacaagagaagtgatacgactcgcacaagacgccgaggtggagctggagcgacaaaggggcttgcttcagcagatcggggatgccctatcctctcaaaggggacgggtgccaaccgcagccccacccgctcagccacgggtccccgtgacgcctgcccctgccgttatacccatcttggtgatagcctgcgaccggagtacagtacgaagatgtctggacaagttgcttcactaccggccgtctgccgagctgttcccgatcattgtgtcacaagattgcggacacgaggaaaccgcccaggccatagcatcctacggctcagcggtgactcatattcggcagcccgacctaagttccattgcagttccacccgaccatcggaaatttcaaggctattataaaattgctcgccactatcggtgggccttaggccaggtgtttaggcagtttaggttccctgcagccgttgtcgtcgaggatgacctggaggttgcccccgacttttttgagtatttccgagcgacataccccttattaaaggctgacccaagcctctggtgcgtgtccgcctggaacgacaacgggaaagagcagatggttgatgcttccagaccagagctgctttaccgtacagatttcttcccgggactgggctggctgcttctggccgaattgtgggcagagctcgagcctaaatggcctaaggcgttctgggacgattggatgaggcgcccagagcagcggcaaggacgcgcctgtattcgccctgaaattagcagaacgatgaccttcggccggaagggggtgtcacacggccagttttttgatcagcacctaaagttcatcaagttgaatcaacagtttgtccacttcacccaactcgatctcagctacctccagcgcgaggcttatgaccgcgactttcttgcacgagtctacggtgccccacaactccaagtagagaaggttaggactaatgaccggaaggagctgggcgaagtgagagtgcaatatactggcagggacagttttaaggcctttgccaaggctttgggtgtgatggatgatctcaagtctggcgtcccaagagcaggctaccgcggaatcgtgacgtttcaatttcgaggaagacgggtgcacctggcccctcctctcacttgggaaggatacgatccttcttggaactag

SEQ ID NO: 194154 - DNA, 1338 bp, synthetic construct
  misc_feature 1..1338: note = Description of Artificial Sequence: Synthetic coding sequence
  source 1..1338: mol_type = other DNA
atgctgaagaagcagagcgccggcctggtgctgtggggcgccatcctgtttgtcgcatggaacgcccttcttctgttgtttttttggactaggcccgcccctggtcgcccaccatccgtgtctgcactggacggcgatccggcctcgttgactcgcgaagtgattcgcctggctcaggatgccgaagtggagctcgagcggcagagaggattgttacaacaaatcggcgacgcactgtctagccaacgcggacgggtcccaactgctgctccccccgctcagccccgtgtgcccgtcacaccggcccctgctgtgatccccattctggtgatcgcatgtgatagaagtaccgtgagacggtgcctcgataaactgctccactaccggccaagcgccgaactgttccccatcatcgtgagccaggactgtggacacgaagaaactgcacaggctattgcctcgtacgggagcgcagtcacacatattcgccagcccgacctcagctctattgctgtgcccccggaccatcgaaaattccagggctattataagattgccagacactaccgctgggccttgggccaggtgttccgacagttcagattccccgcagcggtggtggtggaggacgacctggaagtcgccccggacttcttcgagtactttcgtgccacatatcccctgctgaaggccgacccatctctgtggtgcgtgagtgcttggaacgataacggtaaagagcagatggttgacgccagccgtcccgaactgctgtaccgcacagactttttccccgggttaggctggcttctcttagcggagctctgggccgaactggagcccaaatggcctaaagccttctgggacgattggatgcgacgccctgagcagcgacagggacgcgcatgcatccgtccggagatttcgcggacaatgacattcggaaggaaaggggtttcccatgggcagttctttgatcaacatctcaagttcatcaaactcaatcagcagtttgtccactttacacagctggatttgtcctatcttcagcgcgaggcttacgatagggactttcttgcacgggtgtatggcgctccccaacttcaagtggaaaaggttaggacaaatgatcgtaaggagttgggggaggttcgggtgcaatacacaggaagagatagtttcaaggctttcgctaaagccttgggggtaatggatgacttaaagtccggagtgccccgcgcgggataccggggcatcgtgacgtttcagtttcgcggaagacgggtgcatctagcacctcctttgacctgggagggttacgacccatcgtggaattag

SEQ ID NO: 194155 - DNA, 1338 bp, synthetic construct
  misc_feature 1..1338: note = Description of Artificial Sequence: Synthetic coding sequence
  source 1..1338: mol_type = other DNA
atgctgaagaagcagagcgccggcctggtgctgtggggcgccatcctttttgtggcctggaacgcgctgcttttgctctttttttggacaaggcccgccccagggcgcccgcccagcgtttccgccctggatggagatccagcaagtctcactagagaggtgatacgactcgcgcaggacgcagaagtggagctggagaggcagaggggcctcctgcagcaaataggagacgccttgtcgtcacagcggggtcgcgtcccaacagcggccccacctgcccagcccagagtccccgttacaccagcccccgccgtgatccctatcctcgttatcgcgtgtgaccgcagtaccgtaagacggtgcttagataaactcttgcactaccgacctagtgcagagctgtttcccataatcgtgtctcaggactgtgggcacgaggagacagcccaggcaatcgcttcttatggctccgcagtcacgcacattcgccaaccagacctttcctctatcgctgttcctcctgatcaccgtaagtttcaggggtattacaagatagctagacattataggtgggccctaggccaggtgttccgccagtttcgtttccctgccgcggttgtggttgaagacgacctggaggtggctcctgattttttcgagtacttcagggctacgtacccacttttgaaggctgacccatccctttggtgtgttagcgcatggaacgacaacgggaaggaacagatggtggatgcatccaggcctgaactgctgtaccgcaccgacttcttccccggactcggttggctcttgctggcagagctttgggccgagctagaacccaagtggccaaaggcattctgggacgactggatgcgtcgtcctgaacaacgccagggtagggcgtgtatcaggccagagatctcccggacaatgaccttcggcagaaagggcgtttcgcacggacagttctttgaccaacatcttaagtttattaaactcaaccagcagttcgtccattttactcagttagacctctcttatctccaacgagaggcctatgatcgcgactttctggcacgggtctatggggccccccagttgcaggtagagaaggtgcgtaccaatgaccgaaaggagctcggggaagtgcgagtccagtacacaggacgggattcttttaaggctttcgccaaggcgttaggcgtcatggacgatctcaaaagtggcgtcccccgagccggctatcgaggcatcgtgacttttcagttccgtggccgtcgggtgcatctggccccaccactgacatgggagggttacgatccctcctggaactag

SEQ ID NO: 194156 - DNA, 909 bp, synthetic construct
  misc_feature 1..909: note = Description of Artificial Sequence: Synthetic coding sequence
  source 1..909: mol_type = other DNA
atgctgaagaagcagagcgccggcctggtgctgtggggcgccatcttgtttgtcgcgtggaacgctctgctgctgttgtttttttggacaaggcctgctcctgggaggcccccctccgtctccgcactagacggtgatcctgccagcctcacaagggtttttcgtcagtttcggttccctgctgccgtagttgtggaggacgatctagaggtagcacctgactttttcgagtatttccgggcgacttacccactacttaaagcggacccttctctgtggtgcgtcagcgcttggaacgataatgggaaggaacagatggtggacgcttctcgcccagagttgctctatcgcaccgatttcttccccggcttaggctggcttctcttggccgagttatgggcggaactggaaccaaaatggcctaaggctttttgggacgattggatgcgacgtccagaacaacgccagggccgcgcctgtatccgccctgagatcagtcgcactatgaccttcggccggaagggagttagtcacggtcagttttttgaccagcacctcaaattcattaaactgaaccagcaattcgttcactttacacagcttgatctttcatatctccagcgcgaagcctatgacagggatttcctagcccgagtttacggggcacctcagttacaggttgagaaggtcagaaccaacgacagaaaggagctgggtgaagtgcgagtacaatatacaggaagagacagcttcaaggcttttgcgaaggccctgggcgtaatggacgacctgaaaagcggcgtcccccgggcaggataccgaggaattgtgactttccagtttaggggtcgacgggtgcacctggctccccccctgacctgggaggggtatgatccaagttggaactag

SEQ ID NO: 194157 - DNA, 312 bp, synthetic construct
  misc_feature 1..312: note = Description of Artificial Sequence: Synthetic coding sequence
  source 1..312: mol_type = other DNA
atgctgaagaagcagagcgccggcctggtgctgtggggcgccatcctattcgtggcctggaatgcccttcttcttcttttcttctggacacgccctgccccggggagacccccgtcagtgtcagcacttgacggcgaccccgcctccttgactcgggaagtaatcaggctagcacaggacgctgaagtagagttggagcggcaaaggggattactgcaacaaatcggtgacgctttatccagccagagaggcagagtgcccaccgcagccccccctgcccagccaagagtcccagttactccagcaccttag

SEQ ID NO: 194158 - DNA, 600 bp, synthetic construct
  misc_feature 1..600: note = Description of Artificial Sequence: Synthetic coding sequence
  source 1..600: mol_type = other DNA
atgctgaagaagcagagcgccggcctggtgctgtggggcgccatcctgttcgttgcttggaatgctcttttgctactgttcttctggactaggcccgcccccgggcggcccccctcggtctccgccctggacggtgaccctgctagtctcacacgcgaagtcatccgactggcacaagatgccgaggtggagctggagcggcagcggggcctactacagcagatcggggacgccctgtcttcccaaagaggacgcgtgcccacagccgcacctcccgcacagccaagagttccggtcacccccgcacctgctgtgatcccaattctagtgattgcctgtgacagatccacagttaggaggtgcctggacaagctgttgcattaccggcccagcgctgaactgttccctatcatagtatctcaagattgcggccatgaagagacggcacaggccatagcatcttacgggagcgccgtcactcacattcggcagcctgatctctcctcaattgccgttccgccggaccatagaaagttccagggctactacaagatagctcggcattataggtgggccctgggacaagtgttcaggcagtag

SEQ ID NO: 194159 - DNA, 336 bp, synthetic construct
  misc_feature 1..336: note = Description of Artificial Sequence: Synthetic coding sequence
  source 1..336: mol_type = other DNA
atgctgaagaagcagagcgccggcctggtgctgtggggcgccatcctgttcgtggcctggaacgccttgttgcttttattcttttggacccggccagcccccggtcgccctccctctgtcagtgctctggatggagacccagcgtcgctgacccgggaagttatccgcctggcacaggatgctgaggtggaactcgaacgacaacgcggcctgctgcagcagattggagacgctctctcctctcagcgaggccgggtgcccacagctgcccctcctgcacagccaagagttcctgtgactcctgctcctgccgttatcccaattctggtgatttag

SEQ ID NO: 194160 - DNA, 465 bp, synthetic construct
  misc_feature 1..465: note = Description of Artificial Sequence: Synthetic coding sequence
  source 1..465: mol_type = other DNA
atgctgaagaagcagagcgccggcctggtgctgtggggcgccatcctctttgtggcctggaatgccctgctgctcctgttcttctggacacgccccgctccaggtcgtcctccgtcagtgtcagccttagacggggaccctgcttctctgaccagggaagtcattagactcgcacaagacgccgaggtcgagctggagagacaaaggggcctcctacagcagattggcgatgcattgtcctcccagcggggccgcgtaccaacggcagcaccgcctgcacagccaagagtgcccgtgactcctgcaccagctgtgataccgatactagtgatagcttgtgatcgatcgacggtgcgcaggtgcctggataagctgctacactaccgcccatcagccgaactcttcccaattatcgtgtctcaggactgtggacacgaagaaaccgcccaggcgatcgccagttag

SEQ ID NO: 194161 - DNA, 105 bp, synthetic construct
  misc_feature 1..105: note = Description of Artificial Sequence: Synthetic coding sequence
  source 1..105: mol_type = other DNA
atgctgaagaagcagagcgccggcctggtgctgtggggcgccatcctgttcgttgcatggaatgcactgttgctgttattcttttggacacgccccgcaccttag

SEQ ID NO: 194162 - DNA, 348 bp, synthetic construct
  misc_feature 1..348: note = Description of Artificial Sequence: Synthetic coding sequence
  source 1..348: mol_type = other DNA
atgctgaagaagcagagcgccggcctggtgctgtggggcgccatcctgttcgtggcctggaatgctctgctgctcctatttttttggacaagaccagccccagggcgacctcctagcgtctcagctcttgatggtgatcctgctagtttgactcgggaagtgatcagactggctcaggacgccgaagtggagttggagcgccaacggggcctgctacaacagatcggagatgccctatcaagtcaacgaggccgtgttccaacagcggcacctcctgcgcagccccgggtgccagtaacaccggcccctgcagtgatcccaatcttagtgatcgcctgtgatcgatag

SEQ ID NO: 194163 - DNA, 288 bp, synthetic construct
  misc_feature 1..288: note = Description of Artificial Sequence: Synthetic coding sequence
  source 1..288: mol_type = other DNA
atgctgaagaagcagagcgccggcctggtgctgtggggcgccatcttgttcgtcgcttggaacgcgctgcttctactcttcttctggacccggccggccccagggcgccctcccagcgtatctgccctggatggagacccagcatctctgactagagaggtgatacggctggctcaggatgccgaggtggagctggagcgccagagaggactcctgcagcagattggggacgctctcagtagccagcggggtagggtaccgacggccgctccccctgcccaaccttag

SEQ ID NO: 194164 - DNA, 384 bp, synthetic construct
  misc_feature 1..384: note = Description of Artificial Sequence: Synthetic coding sequence
  source 1..384: mol_type = other DNA
atgctgaagaagcagagcgccggcctggtgctgtggggcgccatcctgttcgtcgcctggaatgccctgctcctgttgtttttttggactcgccctgctcctggacgccccccatcagtgtcagccctggacggtgatccagcatctttgacaagggaagttataaggttggcacaagacgccgaagtagagctagaaagacagcggggcctcctgcaacagattggggatgcactgagcagccagcgaggacgtgtgccaacggctgctcccccagctcagcctagagtgccggtgacgccagcacccgccgtgatccccatcctggtgattgcatgcgaccggagcactgtgcgccgatgtttagacaagcttcttcattag

SEQ ID NO: 194165 - DNA, 318 bp, synthetic construct
  misc_feature 1..318: note = Description of Artificial Sequence: Synthetic coding sequence
  source 1..318: mol_type = other DNA
atgctgaagaagcagagcgccggcctggtgctgtggggcgccatcttgttcgtcgcgtggaacgcactcctgttacttttcttctggactcgacctgccccaggaaggccccccagcgtgagcgccctagatggtgacccggcatctctgacccgcgaagttatccgtcttgcccaggacgcggaagtggaattggaaaggcaacggggattacttcaacagatcggagatgccttgagcagtcaaagagggcgcgtaccaaccgccgccccacccgcccagcccagggtgcccgttacccccgcgcctgctgtttag

SEQ ID NO: 194166 - DNA, 1608 bp, synthetic construct
  misc_feature 1..1608: note = Description of Artificial Sequence: Synthetic coding sequence
  source 1..1608: mol_type = other DNA
atgcggctgcggaacggcaccgtggccaccgccctggccttcatcacctctttcctcaccctcagctggtataccacctggcagaacggcaaggagaagcttatagcctatcagcgtgaattccttgcgttgaaggagagattgcgtattgcagagcacaggatcagtcagcggtctagtgaactgaataccattgtgcagcaatttaaaagagtcggcgctgaaacaaatggatcgaaggacgccctcaacaagttctctgacaacaccctgaaactgctaaaggagctcaccagcaagaaaagcctgcaggtgccttcgatctactatcatctgcctcacctgctgaagaacgaaggctcgctacagcccgccgtacagatcggtaacggacggaccggcgtgtctatcgtgatgggtatccccactgtgaagagggaagttaagtcctacttgatcgaaaccctgcattcacttatcgataatctgtaccctgaagaaaagctagactgtgttatcgtggttttcattggggagactgatattgactacgtgcacggggtggttgcgaacttggaaaaggaattcagtaaagagatatcctccggactggtggaagtcatctctcccccagagtcatactaccctgatctgaccaatctgaaggaaacctttggcgattccaaggagagagtacgctggagaactaagcagaacttagactattgcttcctgatgatgtacgctcaagagaagggcatttactacatccagctggaagacgatatcatcgtcaagcagaattactttaatactatcaagaatttcgctcttcagttgtcctctgaggagtggatgatcctggaattcagtcagttgggcttcattggtaagatgttccaggctccagatcttactttgattgttgagttcatcttcatgttctataaagagaaacccatcgattggctcctggaccacatcttatgggtcaaagtttgcaatccggagaaggacgcaaagcattgtgaccggcagaaagctaatttgcgcattcgcttcaggccttcgctcttccagcacgtcggtcttcacagctcactcagcggcaaaattcagaaactgaccgacaaggactatatgaagcccttgctgctgaagatccacgtgaaccctcctgcagaagtcagtactagcttgaaagtgtaccaagggcacacactggaaaaaacttatatgggcgaggatttcttctgggctattactccgattgcgggcgattacattctgtttaagttcgataagcctgtgaatgtggagtcttacctgttccactccgggaatcaggagcatccaggcgatatcctgttgaacactaccgttgaggtgttgccctttaagagcgaaggcctcgagatcagcaaagagaccaaggataagcggctggaagatggatattttcgtatagggaaatttgagaacggagtggctgagggtatggtcgatcctagcctgaaccctatcagcgccttcagactaagtgttatccaaaacagcgccgtctgggctatcctgaacgaaattcacatcaagaaggccaccaactag

SEQ ID NO: 194167 - DNA, 1608 bp, synthetic construct
  misc_feature 1..1608: note = Description of Artificial Sequence: Synthetic coding sequence
  source 1..1608: mol_type = other DNA
atgcggctgcggaacggcaccgtggccaccgccctggccttcatcacttcctttctgacgctctcctggtacaccacgtggcagaatggaaaggaaaagcttattgcctatcagagggagtttcttgctttaaaagaacggctcagaatagccgagcatcgcattagccagcggagttctgaactgaatactatcgtgcaacaattcaaaagggtgggcgccgagaccaacggttccaaagacgcactcaacaaattttcagataacaccctcaaactcctcaaggagctcacctcaaagaaaagcctgcaggtccccagcatttactatcatctcccccatttgctgaaaaacgagggttcactgcagcctgctgtacagattgggaatgggagaaccggggtatcgatcgttatgggaattcctacggtgaagcgggaagtgaagagctacttaatcgaaacattgcatagcctgatcgacaacctctacccagaggagaagctcgactgcgtgattgtcgtctttattggtgagacagacatcgactatgttcatggagttgtggctaacctggagaaggagttcagtaaggaaatatcaagcgggctcgtagaggtgattagcccccctgaatcttattacccagatctcacaaaccttaaagagaccttcggcgactctaaagagagggttcggtggcggactaagcagaatctcgattactgctttctgatgatgtacgcacaagagaaaggaatatactatattcaattggaagatgatattatcgttaaacagaattacttcaacactattaagaacttcgccctgcaactgtccagtgaagagtggatgattctggaattctctcagttggggtttataggtaaaatgtttcaggcgccggacctgaccctcattgtggaattcatcttcatgttttacaaggagaagccaattgattggctcctagaccatattctctgggtgaaagtgtgtaatccagaaaaagatgctaagcattgtgatcgtcagaaggcaaatctgagaattaggtttcgcccctcactcttccagcacgtgggactacattcttccctctccgggaagatccagaaactgaccgacaaggactatatgaagcctctgctgctgaagattcatgtgaaccctcctgctgaagtgtccaccagtctcaaagtgtatcagggccataccctcgagaagacgtatatgggcgaggactttttttgggccattactcctatcgcaggagattatattttgtttaaattcgacaaacccgtgaatgtggagagctacctcttccacagcggcaaccaagagcaccccggggatatcctcctgaatactaccgtagaggtgctgcccttcaagtctgaagggctggaaatcagtaaggagacaaaggacaagcgccttgaagacgggtacttccggatcgggaagttcgaaaacggtgtcgcagaaggtatggtggacccttccttgaaccccatttcggccttcaggttatccgttatccagaactctgctgtgtgggctatcctcaacgagatccacatcaagaaagctacaaactag

SEQ ID NO: 194168 - DNA, 1608 bp, synthetic construct
  misc_feature 1..1608: note = Description of Artificial Sequence: Synthetic coding sequence
  source 1..1608: mol_type = other DNA
atgcggctgcggaacggcaccgtggccaccgccctggccttcatcacctctttcctgaccctctcatggtacactacttggcagaatggcaaggagaagctgattgcctatcagagggagtttctggcactgaaagaaagactgcgaattgcggaacatagaatatctcaacgctcctcagaactgaatacaatcgtgcagcagtttaaaagagttggcgccgagactaatggttccaaagacgccctgaataagttttcagacaacaccctcaaactgttaaaagagcttactagcaagaagtccctccaggtgccctcaatttactatcatttgccacacctcctgaagaacgagggttctctgcaaccggcggtgcagatcggcaatggcagaacgggggtgagcattgtaatgggtatcccaactgtaaagcgtgaagttaagtcatatctgatcgaaacactgcacagcttgattgataatctgtatccagaagagaaactggattgcgtcattgtggtgtttattggggagacagatatagactacgtgcatggtgtggtggcgaatctcgaaaaagaattctcaaaagagatctctagtggactggtagaagtgatctctccccccgagtcatactaccctgacctcaccaacctcaaggaaacgtttggcgactccaaggagcgtgtacgctggagaacaaagcagaacctggactactgctttttgatgatgtacgcacaagaaaaggggatttattatattcagcttgaggatgatattatagttaagcagaattattttaataccattaaaaatttcgcgttgcagttgagcagtgaagaatggatgatcctcgaattttcccagcttggctttatcggaaaaatgtttcaggccccagatttgaccctcatcgttgaattcattttcatgttttacaaagagaagccgattgattggctcttggaccatattctgtgggttaaggtgtgcaatccagaaaaggatgcaaagcattgtgacagacaaaaggcaaatctgagaatacgatttaggcctagtctattccaacacgtgggcctgcactcctccctgagtggcaagattcaaaagctgacggacaaagattatatgaaaccactgcttctgaagatccatgtgaatccgcccgctgaggtgtctactagcctgaaggtctaccagggccacacactggaaaaaacctatatgggggaggactttttctgggctattaccccaatagcaggagactacattcttttcaagtttgacaagccggttaatgtggaaagttacctctttcattccggcaatcaggagcatcccggagacatcctgttgaacaccacagtggaggttctaccgttcaaaagcgagggactcgaaatttccaaagaaacaaaagataagcgactggaggatggatactttaggattggcaagtttgagaacggggtagccgaaggcatggtagacccatctttaaatccaatttccgcttttcggttgtcagtgattcaaaattctgccgtgtgggccatactgaacgagatccatatcaagaaggccaccaattag

SEQ ID NO: 194169 - DNA, 1272 bp, synthetic construct
  misc_feature 1..1272: note = Description of Artificial Sequence: Synthetic coding sequence
  source 1..1272: mol_type = other DNA
atgaactacagcatcaccgtgagcatcgtgatgggcatccccaccgtgaagagggaggtaaagagttacctgatcgaaactctccactctctgatcgacaatctctatcctgaggagaagctagactgcgtgatagtggtctttattggcgagacagacatcgactacgtgcatggggtcgtcgcaaacctggagaaggaattttccaaagagatatcctccggtctcgtcgaggtgatctccccacccgagtcctattacccagacctgacgaatctaaaggagacctttggcgattccaaggaaagggtgaggtggcggaccaaacagaacctggactattgcttcctgatgatgtatgcccaggaaaaaggaatctactacatccagctggaagatgatatcattgtgaaacaaaactactttaacaccatcaagaattttgcgttacagttatccagcgaggagtggatgattctcgagttcagtcagttagggttcatcggaaagatgttccaggcaccggacctcactctgatagtcgagttcatcttcatgttctacaaagaaaagccaattgactggctgctggatcatattctgtgggttaaggtgtgcaatcccgaaaaagatgcgaagcactgtgaccggcagaaggccaacctgcgtattagatttcgtccaagcctgttccagcacgtgggcctccactcatcactgtcaggaaagatccagaagttgacagacaaagattatatgaagcccctcttactcaagatccatgtgaaccctcctgctgaggtatccacttccttaaaggtgtatcagggacataccctggaaaaaacatatatgggcgaggacttcttttgggccattaccccaattgctggcgattacattctctttaaattcgataagcccgtgaatgtggagtcctacctgtttcatagcggaaatcaggagcaccctggagacattctgctgaatacaacggtcgaagtcttgccattcaaatctgaggggctggaaattagtaaagaaaccaaggacaaacggttggaggatgggtatttcaggattggcaagtttgaaaacggggtggccgaaggaatggtggatccgtcactaaaccccataagtgccttcagactgagcgtcatccaaaactcagcagtttgggcaatcttgaacgaacaacgcgtgttttcaggatggtggcagaaatcaagggataaggcggagggaccacaggctcctttactgttctag

SEQ ID NO: 194170 - DNA, 1647 bp, synthetic construct
  misc_feature 1..1647: note = Description of Artificial Sequence: Synthetic coding sequence
  source 1..1647: mol_type = other DNA
atgcggctgcggaacggcaccttcctgaccctgctgctgttctgcctgtgtgcctttctttccctgtcctggtatgctgcactgagcggacagaagggtgacgtggtggatgtttaccagagggaattcctggctctgagagacaggctgcacgccgctgagcaagaatcactcaagcggagtaaggagctcaatctggtgctagatgaaatcaaacgcgccgtttcagagcggcaggccctgagagacggcgacggaaacaggacctggggtcggctcacagaagatccacgacttaagccatggaatggtagtcaccgtcatgtacttcacctgccaacagtatttcaccacctgccccacctcttggccaaagaaagttcattgcagcctgccgtccgtgttggtcaaggtagaactggcgtcagcgtggtaatgggtattcccagtgtgaggcgagaggtgcactcctacctgacagatacattacattctttaatctccgaattatctccgcaagagaaggaggattctgttattgtggtgctaattgcagaaaccgattctcagtatacctcagcagttaccgagaatatcaaggcacttttccccacagaaatccattccggcctcctcgaagtgatcagcccttccccccacttttacccagactttagcaggctacgagagtcatttggggatcctaaggagcgcgtgagatggcggacgaaacaaaatcttgattattgctttctcatgatgtatgcacagagcaaaggcatctactatgttcagctggaggacgacatagtggctaagccgaactacctgtcaacgatgaaaaatttcgccctgcagcaaccatccgaagattggatgattttggagttttcacaactggggtttattggaaagatgtttaagtctctagacctcagcttgatcgttgaattcattctaatgttttaccgtgacaaacctattgattggctgctcgatcatattttatgggtgaaggtttgcaatcccgagaaagatgctaaacattgcgatcgccagaaagccaatctgcggatccgttttaagccctctttgttccaacacgtaggtacgcactcaagtcttgcaggcaagattcaaaaattgaaggacaaagatttcggcaagcaagccctgaggaaagaacatgtaaacccacccgccgaggtatcaacatccctgaagacctaccagcacttcacacttgagaaggcttatctgcgggaggattttttttgggctttcacccccgccgcaggggatttcattcgttttcgcttcttccagccactaagactggaaaggtttttctttcggagtgggaacatcgagcaccccgaggataagcttttcaacaccagtgtagaggtattgccctttgataatccacagagcgacaaggaggctctacaggaaggcagaactgccacccttagatatccacggtctcccgacgggtacttacagattggatctttttacaaaggcgtcgccgaaggggaggtggatccagcttttggacccctcgaggcattaagactcagtatccaaaccgacagtccagtgtgggtgatactgagcgagatcttcttgaagaaagccgactag

SEQ ID NO: 194171 - DNA, 1692 bp, synthetic construct
  misc_feature 1..1692: note = Description of Artificial Sequence: Synthetic coding sequence
  source 1..1692: mol_type = other DNA
atgagccgggtggccggcacccggaccgacgtgaacgagctgctgcagagatggacaccccgctgtgtaaggtggcacaccggtggagcccggcgcgtggctcttgacagacccctggttacggcttgcctgcccccagccggcgacgtggttgacgtgtaccagagggagttcctggctctgagagataggctgcacgccgctgaacaggaatcccttaaacgatcaaaagagttgaatcttgtgctagacgaaatcaaacgagccgtgagcgagcgccaggcactgagggatggtgatggtaatcgaacctgggggcggctgacagaggatccaagattgaaaccctggaacggttcgcaccgccacgtgctgcacctcccaacagtttttcaccatctaccacatctgctcgcgaaggaaagctcactccagcctgccgttcgggtcggacagggaaggactggggtttcggttgttatggggattccaagcgtgcggagggaggttcacagttacctaactgacactttacactcactgatctcggagctctccccgcaggagaaggaagattctgtgattgtcgtgctgattgcagagaccgattcgcagtatacttcggctgtgaccgagaatatcaaagccttgtttccaactgagattcactcaggcttgctggaagttatctctccctcacctcatttttaccctgacttctctcgcctcagggagagtttcggggaccctaaggagcgggtccgctggcggaccaagcagaatctagactactgtttcctgatgatgtacgcccagtcgaaaggaatctactatgtgcaattagaagacgacatcgtcgcaaaacctaattatctttctacaatgaaaaacttcgctctccagcagccttccgaggactggatgatcctagagtttagtcagctaggtttcataggcaaaatgttcaagtctttggaccttagtcttatcgtggaattcatactgatgttctaccgtgacaaacccattgactggctgctggatcacatattatgggtgaaggtgtgtaatccagagaaggatgcgaaacactgtgatcgacagaaagcgaatctgcggattaggtttaagccttctctgtttcaacacgtgggcacgcatagctctctggctggaaaaatacagaagctgaaggacaaagattttggaaagcaagccctgcgtaaagagcacgtgaatccacccgccgaggtgagtacttctcttaaaacttaccagcacttcactctggagaaagcgtacttgagagaagatttcttttgggctttcacacccgcagcgggagacttcatcaggttcagatttttccaaccactgcgtctggagagattctttttccggtctgggaatatcgaacaccctgaggacaaattatttaataccagtgtcgaggttcttccgtttgacaatccgcagagtgacaaggaggccctccaagaaggccgaactgctaccctgagatacccaaggagtccagatggatacctgcagattggaagtttttataaaggcgtagcagaaggtgaagttgaccccgccttcggcccattggaggcactgcggttgtcaatccagaccgattcacccgtttgggtgattttgtccgagatatttttaaagaaagcagactag

SEQ ID NO: 194172 - DNA, 1344 bp, synthetic construct
  misc_feature 1..1344: note = Description of Artificial Sequence: Synthetic coding sequence
  source 1..1344: mol_type = other DNA
atgcggttccggatctacaagcggaaggtgctgatcctgaccctggttgtcgctgcctgcggattcgttctatggagcagcaatggccgccagagaaagaatgaagcattggccccacctctcctggacgctgaaccagcaagaggagccgggggaagaggcggggatcatccctccgtggctgtcggcatccggagagtaagcaacgtcagcgccgcctccctggtgcctgcggttccgcagccggaggccgacaatctgactttgcgctaccggtcattagtgtaccaactgaatttcgaccagactctccgtaatgtggacaaagcagggacttgggcccctcgcgaactggtattggtggtgcaggtgcacaatcggccggaatacttaaggcttttgctggactccctcaggaaggcacagggaattgataacgtactggtgatcttcagtcacgacttttggtctacagagatcaaccaactgatcgccggggtcaacttttgtcccgttcttcaggtctttttcccattctcaatccaactgtatcccaacgagttcccgggctcggacccacgggactgcccaagggacctgcctaagaacgctgccctcaaactgggttgcatcaatgccgaatatccggattcatttggccactatcgagaagccaaattctcacaaacgaagcaccattggtggtggaagttgcatttcgtgtgggagcgagtaaaaattctacgggattacgcgggcctcatcttgttcctagaggaggatcactacctggcgcccgatttttatcatgttttcaagaaaatgtggaaactgaagcagcaggagtgccctgaatgcgatgtcctatcactggggacctacagtgcttcgaggtccttttacgggatggcagacaaggttgatgtaaagacgtggaaatcgaccgagcataacatgggccttgcactgacaaggaatgcctaccagaagctgattgaatgcacagataccttttgcacttacgacgactataattgggattggactctccagtatttaactgtgtcttgcctgcccaagttttggaaggtgctggtgccccagatcccccggattttccatgccggggattgtggaatgcaccacaagaaaacatgtcgcccgtcaacccaaagtgctcagatcgaatcgctgctcaataataacaagcagtacatgtttcccgagacactgactatctccgagaaatttaccgtcgtggcaatcagcccccctcgcaagaatggtggttggggcgacatccgggaccacgaattatgtaagagttatcggcgattgcagtag

SEQ ID NO: 194173 - DNA, 1362 bp, synthetic construct
  misc_feature 1..1362: note = Description of Artificial Sequence: Synthetic coding sequence
  source 1..1362: mol_type = other DNA
atggagcggaccgagaccatgcggttccggatctacaagcggaaggttctcatccttactcttgtagtcgccgcgtgcggatttgtgctgtggagtagtaacggtaggcagagaaagaatgaagcactcgctccccctctgctagacgccgagcccgcccgcggggctggtggtcgtggcggagatcacccttctgtggcggtgggcatcaggagggtgtccaacgtgagcgctgcgtcacttgtgccggcggtaccccagcctgaggctgataatctgactctcagataccgtagcctggtctatcagctgaatttcgatcaaacattgcgcaacgtcgataaggcgggcacatgggccccgcgcgaactggtcctcgtggtgcaagtgcacaaccgccctgaatatttgcggttgctcctggattccctccgtaaagctcagggcatcgataacgtattggtcattttttctcatgacttttggtcaacagagatcaaccagctcattgccggcgttaacttctgccccgttttgcaggtcttttttccattctcaattcagctgtaccctaatgaattcccgggaagcgatccccgagattgccctagggatctgcccaagaatgcggccctcaagttgggctgcatcaacgcagagtacccagacagcttcggccattacagagaagcaaagttctcgcagaccaagcatcactggtggtggaaattacacttcgtgtgggagcgagttaagatcctccgggattacgccggtctgatccttttcctcgaggaggatcattatctggctcctgacttctaccatgtattcaagaaaatgtggaagctgaagcaacaggagtgccctgagtgtgacgtgctcagcctgggcacgtacagcgcctcacgaagcttttatggcatggctgacaaggtggatgtaaaaacctggaaaagtaccgaacacaatatgggcttggccctcacccgcaacgcatatcaaaaactcattgaatgcaccgacactttctgtacttacgatgattacaactgggactggacactccaatacctaacggtgtcctgcctgcccaaattctggaaggtgcttgtgccgcagataccgagaattttccacgcaggcgattgcggtatgcatcacaagaagacctgccgtcctagcacccagtcagctcagattgaaagtctgttgaataacaataagcaatatatgtttcccgagactttgaccatcagtgagaagttcactgtggtggccatttctccaccgcgcaaaaatggaggatggggagacattagagatcatgagctgtgcaaatcttataggcgcctgcagtag

SEQ ID NO: 194174 - DNA, 2373 bp, synthetic construct
  misc_feature 1..2373: note = Description of Artificial Sequence: Synthetic coding sequence
  source 1..2373: mol_type = other DNA
atgatcaccgtgaaccccgacggcaagatcatggtgcggcggtgcttagttactctccgtccctttagactcttcgtgctcgggattggtttttttaccttgtgctttcttatgaccagcctgggagggcagttcagtgcccgtagacttggggattccccattcactatccgaaccgaagtgatgggcggtccagaatccaggggggttctgaggaagatgagcgatctcttagagttaatggtgaagcgtatggatgccctggcaaggctggagaactcgtccgagctccatagggccggcggggacttacattttccagccgacagaatgccaccaggcgcaggcttgatggaaagaatacaagctatagcgcaaaacgtctcggacatcgcagtgaaagttgatcagatcctccggcacagtttgctgctgcattccaaggtatctgaaggccgtcgcgaccagtgcgaggcgccctcggatcccaagttccccgactgttctggcaaggtcgagtggatgcgagccaggtggaccagcgacccatgctacgcttttttcggcgttgacggtaccgagtgctcctttctgatttatttgagcgaggtggagtggttctgtcccccacttccttggaggaatcagacggctgcccaaagagcgccgaaacctttgcccaaggtccaggcagtgttcaggagtaatctttctcatctgttggacttgatgggcagcggtaaggaaagcttgatattcatgaagaagcgaacgaagcgactgaccgctcaatgggccctggccgcacaacggctggcacagaaacttggggccactcagagagatcagaagcagattctggtccacatcggctttctaactgaagaaagcggggatgtgttctctcccagggtgctgaagggtggacccttgggagagatggttcagtgggcagatatcctgactgccctctacgtcttgggccacggcctccgagtgaccgtttcccttaaagaactccagagcaacctgggagtgccccccggtagaggttcgtgcccactgaccatgccactgcccttcgatctaatatacactgactatcacggtctgcagcagatgaagcgacatatgggcctttcattcaagaaataccggtgtcgtatcagagtgatcgatacttttgggacagagcccgcttataatcacgaagagtacgcaacattgcacggttacaggacgaactgggggtactggaatcttaaccccaagcagtttatgacaatgttcccacacactccagacaatagctttatgggatttgtcagcgaggagctcaatgagacagaaaaaaggctcatcaaaggaggcaaggcatctaacatggcagtcgtctacggtaaggaagccagcatatggaagggtaaagagaagtttctcggcattcttaacaaatatatggaaattcacgggacagtttactacgagtctcagcgtccacccgaggtgcccgcattcgtgaaaaatcacggcctgctacctcaacccgaattccaacagctgttacgtaaagccaaactcttcatcggttttgggttcccttacgaaggaccggcgccacttgaagctatagctaacggctgcattttcttgcagagtaggttttcacctcctcatagctccttgaaccacgaattcttccgcggaaaaccaacctccagagaggtgttcagtcagcacccctatgccgagaattttataggtaaaccacatgtttggacggtagactacaataacagtgaagaattcgaagccgcgatcaaagccatcatgagaacacaggtggatccctacttgccatatgagtacacctgtgagggcatgctcgagaggattcatgcatatattcaacaccaagatttctgtagagctccggatcccgctctgcccgaggcccacgccccacagtctccgttcgttctcgccccaaacgccacccaccttgagtgggcgcggaacacttccctggcgcccggagcctggcctcccgcccacgcgctgcgggcctggctcgctgtgcctgggcgggcctgtaccgacacatgtctcgaccacggcttgatttgcgagccctcctttttccctttccttaacagtcaagacgcattcctgaagctgcaggtgccatgtgactcaactgaatctgagatgaatcatctgtaccctgcttttgcacagcctgggcaagaatgctacctccaaaaggaaccgcttctgttcagttgcgccgggtctaatacaaagtaccgcagactgtgtccatgccgggatttccgcaagggccaggtggctctgtgccaggggtgcctttag

SEQ ID NO: 194175 - DNA, 1185 bp, synthetic construct
  misc_feature 1..1185: note = Description of Artificial Sequence: Synthetic coding sequence
  source 1..1185: mol_type = other DNA
atgatcaccgtgaaccccgacggcaagatcatggtgcggcggtgcctggttactttgcggcccttccggctgttcgtgctgggcattggattttttacattatgctttctgatgaccagtttgggtggtcagttctccgctcgtcgccttggagacagcccgtttacaatcagaactgaggttatgggaggccctgagagtcgtggtgttcttcgaaagatgagtgacttactggagttgatggttaaaaggatggatgcactggcccgactggagaactcctctgaactgcatcgggctgggggcgatctgcacttccctgcggataggatgcccccgggagcaggccttatggagcgtattcaggctatcgcgcaaaatgtcagtgacatcgctgtaaaagtggaccagatccttagacatagtcttcttcttcactctaaggttagcgagggacggcgtgatcagtgcgaggctccatccgatcccaagtttccagactgttcaggcaaggtcgaatggatgcgggcaagatggacttcagacccatgctacgctttcttcggcgtggatggcaccgagtgctcatttcttatctatctgtccgaggtcgagtggttttgtcctccactgccttggaggaaccagacggcagcccaacgcgctcctaaaccacttccaaaagtgcaggcggtttttaggtctaacctgtctcatctgctagacctcatgggaagcggaaaagagtctttaatcttcatgaagaagcggacaaagcggctgacagctcagtgggccctggccgcccagcgcctggcccagaagctgggtgccacccagagagaccagaagcaaatcctggtccatatagggttcctcactgaagagagcggagacgtcttctcaccacgggttctcaagggcggccccctgggagaaatggtgcagtgggcagatattctgacagccttatacgtgctaggtcacggcctcagagtcacggtcagcctgaaagaactgcagagacaacgaagactccggtcgagccaggaacaagccaggtgcggggtgatgggagcatgcgagaagatgcttttggagggagatgtggctagcaatacactattgattgaaaagccttctaaaaaggagactgagaagtgtcccaagaatttagtaacttag

SEQ ID NO: 194176 - DNA, 2406 bp, synthetic construct
  misc_feature 1..2406: note = Description of Artificial Sequence: Synthetic coding sequence
  source 1..2406: mol_type = other DNA
atgcacagcttcgtgaagcacctgtgcagccggtacgtggtggagcgtcaggggacaatggccctgccggcgcttctgacgcgcctgctgcctctccgcagacttttcgttcttggaattggcttttttacactctgttttttgatgacatcactcggcgggcaatttagcgcccgtcgactgggagactctccttttactattcgcaccgaagtgatgggtggccctgagtctcgaggcgtgctgcgaaagatgtccgacctgttggagctgatggtcaaaaggatggatgccctcgctagactagagaatagctccgagctgcacagagcaggtggcgatctccattttccggctgaccgaatgcctcccggagccgggctgatggagcgaattcaggcaatcgcgcagaatgtgtctgacatcgctgtgaaggtagatcaaatcctgcgacatagtctgctcctccacagtaaagtgtctgagggcagacgtgaccagtgtgaagccccgagtgatccaaagttccctgactgcagcggcaaggttgaatggatgagagcgagatggacatcagacccttgctacgccttctttggggttgatggaaccgagtgctctttccttatctatttgagcgaggtggagtggttctgtccaccactcccctggagaaaccaaacagccgcccagcgtgctcccaagcccctgcccaaggtgcaggctgtatttaggtccaatctctcacatttgctggatctcatggggtctggtaaggaatccctaattttcatgaaaaagcgcactaagaggctcacagcccagtgggctctcgcagctcagcgtcttgctcagaagctgggcgctactcagcgcgatcaaaaacagatactggtacatattggattcttgaccgaggagtccggagacgttttttcccccagggttctaaaaggaggcccattaggagagatggtacagtgggcagacatactgactgccttgtacgtattggggcacgggctcagggtaacagtaagcctgaaagagcttcagtctaacctcggtgttcctcccggacgcggatcttgccccctgactatgcctctaccgttcgatttgatctatactgactaccatggtctgcagcagatgaaacgacacatgggactatccttcaaaaaatatcggtgtcgaatcagggtcatcgataccttcgggaccgaacctgcatacaatcatgaggaatacgctactctgcacgggtatcggacaaactgggggtactggaatttgaatccaaaacaatttatgacgatgtttccacacacccctgataatagcttcatggggttcgtgagtgaggagctcaatgaaacggagaaacgcttaatcaagggcggtaaggctagtaacatggcagtggtgtacggtaaggaggcctctatttggaaggggaaggaaaaattccttgggatactgaacaaatatatggagatccacgggacagtttactatgaatcccaaaggccacccgaggttcccgccttcgtgaaaaatcacggactgcttcctcagcctgagttccagcagttgttgcgcaaggccaagttgtttattggttttggttttccatacgaaggccccgccccactggaggcaattgcaaatggctgtattttcctccaatctcgcttttcaccaccgcacagctcgctgaaccacgagttttttcgcggaaaaccaacaagccgagaagtgttcagccagcacccttatgcggaaaactttataggtaagccccatgtatggactgtggattataacaattcagaggagtttgaggctgctattaaggctattatgcggacccaagttgatccgtatttgccgtacgaatacacatgtgagggcatgctggagcggatacacgcctacatccagcatcaggatttttgccgcgctccagaccctgcgttgcccgaggcccatgctccccagtctccatttgttttggcccctaacgccacacatctggaatgggcgcgtaatacctcgctggcacccggagcctggccccctgcccacgccctccgagcttggcttgccgtgccaggtcgtgcttgtaccgacacatgtcttgaccacggactgatctgtgagccctcctttttccccttccttaactctcaggatgctttcctgaagttgcaggtcccatgcgattccaccgagtccgaaatgaatcatctgtaccccgccttcgcccagcccggtcaggaatgttatctacagaaagagcctcttttgttttcttgcgccggcagtaatacaaaataccgccggctctgtccctgcagggatttcagaaaaggccaggtcgcactgtgtcaaggctgcctatag

SEQ ID NO: 194177 - DNA, 1602 bp, synthetic construct
  misc_feature 1..1602: note = Description of Artificial Sequence: Synthetic coding sequence
  source 1..1602: mol_type = other DNA
atgaagatgcggcggtacaagctgttcctgatgttctgcatggccggactgtgtctgattagctttttgcactttttcaagaccctcagttacgtaactttccctcgcgagcttgcgagcctgtctcctaatctggtgagtagctttttctggaacaatgctcccgtgactccccaagcaagccccgagcccggcggacccgacctgttaagaacgcccctctacagtcactcaccgctgctccaaccactacctccatctaaagccgccgaggagcttcaccgcgttgacctcgtgctgcctgaggatactactgaatacttcgttagaaccaaagccgggggcgtgtgttttaagccaggaaccaagatgctcgagaggccacccccaggcaggccggaggaaaaacccgagggagcgaatgggtcctccgcccgccggccaccccgttacctactcagtgcaagggagcgaaccggcggccgtggcgctagacgcaaatgggttgagtgtgtgtgtctgccaggctggcatggccctagctgcggcgtccctaccgtagttcaatacagcaatttgcccaccaaagaacggctggttccccgggaagtgccacgccgagttattaatgcgattaatgttaaccacgagttcgacttgctcgacgtgaggttccacgagctcggtgacgtggtcgatgcctttgtagtgtgtgagtctaattttaccgcatacggagagcctcggcctctgaaattccgtgagatgctaactaatggaaccttcgaatatatccgacataaagtgctgtacgtgttcctggatcactttcctcccggaggcagacaggatggatggatcgccgatgattatctgcgaactttcctgacacaggatggggtcagcaggctccggaatctgcgtcctgatgatgtgttcatcatcgacgacgccgacgagatccccgctcgggatggggtgctgtttcttaagttatatgacgggtggaccgagccgtttgcctttcacatgaggaagagtctctacggattcttttggaagcagcccggtacactggaagttgtaagtggatgtactgtggacatgctccaagccgtctacggcttggacggaatacggctgcgccgccgtcagtactatacgatgcctaattttcggcagtacgaaaataggaccggccatatcctcgttcagtggagtctcggatcccccctgcactttgcaggttggcattgctcttggtgtttcacaccagaagggatatactttaagctggtatcagctcagaatggagacttcccacgatggggcgattacgaagacaagcgggatttgaactatatccgggggctcataagaactggcggttggttcgacggcacccagcaagagtatcccccagcagatccctctgagcatatgtatgctccaaagtatctgctgaagaattatgatcgtttccactatctgttagataacccttaccaggaacctcggtccacagctgcaggaggctggaggcaccggggccctgaaggtaggcccccagcccgcggaaaactggacgaggcagaggtctag

SEQ ID NO: 194178 - DNA, 327 bp, synthetic construct
  misc_feature 1..327: note = Description of Artificial Sequence: Synthetic coding sequence
  source 1..327: mol_type = other DNA
atggagagctgcagctgccaccccggcagcggcgtgcagtggcgggatcatggcagtctccagcttcccccacccgggtttaagatgaagatgcgccgatacaagctgtttctgatgttttgcatggcgggtctgtgcctcatttctttcctacacttttttaagacactgagctatgtgacctttccccgcgagctcgcctctctgtcccctaacctcgtctcttcctttttttggaacaatgccccggtcacccctcaggctagccccgagccaggtggtccagacctcttgcggacacccttatatagccacagccccctgtag

SEQ ID NO: 194179 - DNA, 486 bp, synthetic construct
  misc_feature 1..486: note = Description of Artificial Sequence: Synthetic coding sequence
  source 1..486: mol_type = other DNA
atgaagatgcggcggtacaagctgttcctgatgttctgcatggccggtttatgtctcatctcattcctgcattttttcaaaacattgagctatgtaaccttccctagggagctcgctagcctctctccaaacctggtgagctccttcttctggaacaatgcacctgtgacaccacaggcatcgccggaaccaggaggccccgatctcttgaggacacctctgtatagtcacagccctctgcttcagcccctaccacccagcaaagctgcagaggaactgcatagagtcgacttggtcctgcctgaagatacaacagaatactttgttaggaccaaagcaggaggcgtgtgctttaagccgggaacaaagatgctcgaaaggcctcctcctggtaggccagaggaaaagccagaaggcgcgaacggctcctctgccaggcggccaccccgttacctcctgagcgctagggaacggaccggggggtag

SEQ ID NO: 194180 - DNA, 1044 bp, synthetic construct
  misc_feature 1..1044: note = Description of Artificial Sequence: Synthetic coding sequence
  source 1..1044: mol_type = other DNA
atggtgagcagccagaagctggagaagcccatcgagatgggcagcagcgagcccctgcccatagctgatggcgaccgccggcgtaaaaaaaaaaggagaggccgcgctactgacagcttgcccggtaaatttgaagatatgtacaagttaacaagcgaacttctgggagaaggggcgtatgccaaagttcagggcgccgtgtcgttgcaaaacggaaaagagtacgcagtgaagattatcgaaaagcaggccggccattcaagatccagagtctttagagaggttgaaaccttgtaccagtgtcaaggtaataaaaacatcttggaactgattgagttttttgaagatgatacccgcttctatctggtgttcgaaaagctgcagggaggaagcatattggcccacatccagaaacaaaaacatttcaacgagcgtgaggcaagcagagtggtgagagatgtggccgctgcactggattttctgcataccaagggtatagcgcacagagatctgaaaccagagaatatactgtgtgagtcccccgagaaggtctcaccagtgaaaatttgtgatttcgacctcggttctggcatgaaactgaataactcctgtactccaatcacaacaccagaactaacaacaccatgcgggagcgccgagtacatggcacccgaggtggttgaggtattcaccgaccaggcaaccttctatgataagcgttgcgacctgtggtctctgggagtggttttatacataatgttgtcaggctatcctcctttcgtggggcattgtggggctgactgcggatgggatcggggggaagtttgccgtgtgtgccagaataagctcttcgaatctatccaggagggaaagtatgaatttcctgacaaagactgggcgcatatcagtagcgaggccaaagatctgatctctaaattgctcgtgagggatgcaaagcaacgcctgtctgccgctcaagtgcttcagcatccatgggttcaaggcgagcaacaacacaacggtccagacgcgcttcgtagttag

SEQ ID NO: 194181 - DNA, 990 bp, synthetic construct
  misc_feature 1..990: note = Description of Artificial Sequence: Synthetic coding sequence
  source 1..990: mol_type = other DNA
atggccaagagcatgcccagcaagagcagccggaacaagcagggcactgtgggggttggttgtttcgaacgatggcggcgttgcatcagtgtgcgagaaacctctagtatcctcgcacacattcaaaaacagaaacactttaacgaaagagaagcctcccgcgttgttcgggacgtggccgccgctctggactttctgcatactaaaggcatcgctcaccgcgatttaaagcctgaaaacatcctctgtgaatctcctgaaaaggtgagcccagttaaaatttgtgatttcgatttggggtcagggatgaaactcaacaactcctgtaccccaatcactacgccagagttgaccacaccttgcggcagcgcagaatatatggctcccgaggttgtcgaggtgttcaccgaccaggccaccttctatgataaacgatgtgacctgtggtcattgggcgtcgtcctgtacatcatgctttcgggatatcctccatttgtcggccattgcggggccgattgcggctgggaccgcggcgaagtgtgtagggtgtgccaaaataagctctttgagtccattcaagagggaaagtacgagtttcccgacaaggattgggcccacatcagcagtgaagctaaagacctcatctccaagcttctagtgcgcgacgctaaacagaggttgtcagctgcccaggtgctccaacacccttgggtgcaagggcaggcaccagagaagggactgcccacacctcaagtactgcaaaggaactcatccaccatggacctgactctgtttgctgctgaagccatcgccttaaacaggcagctgtcccaacatgaggagaatgaactggcagaggagcccgaagcactcgctgacgggctttgtagtatgaagttatcccctccatgcaagagcaggctagctagaaggcgcgcccttgcccaggctgggagaggggaagataggagcccaccgaccgcgttgtag

SEQ ID NO: 194182 - DNA, 1275 bp, synthetic construct
  misc_feature 1..1275: note = Description of Artificial Sequence: Synthetic coding sequence
  source 1..1275: mol_type = other DNA
atggtgagcagccagaagctggagaagcccatcgagatgggcagcagtgagcctctgcccattgccgatggggacagacggcggaagaaaaaacgcagaggaagggcaactgactctctcccgggcaaatttgaggacatgtataagctgacctctgaactgctcggcgagggggcttacgcaaaggtgcagggcgcagtatccttacagaacggcaaggaatatgctgtgaagatcattgaaaaacaggcagggcacagcagatcgcgggtgtttcgggaagtagagaccttgtaccagtgccagggcaataagaacatactggaacttatagaattcttcgaggacgatacccgcttctaccttgtgttcgaaaagctgcaaggtggttctatactggcgcatatccagaagcagaagcactttaacgagcgggaagctagcagggtggtgagggatgtggctgctgcattagattttctccacacaaaggggattgcccatagggatctgaagcctgagaatatcttgtgcgagtctccagagaaagtatctccggtgaagatttgtgattttgaccttggaagcgggatgaagttaaataactcctgcactccgataactacacccgaacttacgacaccttgcggcagcgccgagtacatggctcccgaggtcgttgaggtgttcaccgatcaagcaacattttatgacaagagatgcgacctgtggtcacttggagtagtcctctacatcatgttatccgggtacccaccgttcgtgggacactgcggagcagactgtgggtgggataggggggaagtttgccgagtgtgccagaacaagctgttcgaatccatacaagaggggaaatatgagtttccagataaggactgggcccatatttcttcagaggcgaaagatctgatttctaaactgctcgtcagggacgccaaacagcgtctctctgcagcccaggtactgcagcatccgtgggtgcagggccaggctccagagaagggactcccaactccccaagttttgcagcggaattcttcaacgatggacctgaccctgtttgccgccgaagccatcgctctgaacaggcagctgagccagcacgaggaaaatgagctagccgaagagccagaagccctggctgatgggttgtgttccatgaagctgagcccaccctgcaagagcaggctcgcccgtaggagagctctggcccaggccggacggggcgaggatagaagtcctcccaccgccctgtag

SEQ ID NO: 194183 - DNA, 1398 bp, synthetic construct
  misc_feature 1..1398: note = Description of Artificial Sequence: Synthetic coding sequence
  source 1..1398: mol_type = other DNA
atggtgagcagccagaagctggagaagcccatcgagatgggcagctccgagcctctgccaattgcagacggtgaccggaggcgcaaaaagaagcgccgaggacgtgccacagattccctccccgggaaattcgaagatatgtacaagttgactagcgagttacttggcgagggggcctatgctaaagtgcagggtgctgtgtccctgcagaatggaaaggagtacgcagttaaaatcattgagaagcaagccggacacagccgaagccgagtgttcagagaggtcgagacactgtaccaatgtcagggcaacaaaaatatcctggaactcattgaattcttcgaagatgacacacggttctatctggtgttcgaaaagttgcaaggtggcagtatcctggcccatattcaaaagcaaaaacacttcaatgagcgggaagccagccgagtggtgagagacgtggctgctgcactcgattttctgcataccaaggataaagtgagcctctgtcatctcggctggtctgcaatggcacctagtggactgaccgctgcccccacctcactggggtcaagcgacccccccacatcagccagccaggtggccggaactactggaattgcccaccgggatctgaaacccgagaacatcctgtgcgagagtcccgaaaaggtcagccctgttaagatttgtgattttgatctgggttctgggatgaaactcaataacagctgcactcctattacgactccagaattgactaccccatgcggttccgctgagtacatggccccggaggtggtggaggtgtttaccgaccaagctacgttctatgataagagatgcgacctgtggtctttgggtgtggtattgtacatcatgctctccgggtatccaccctttgttgggcactgcggcgccgactgtggctgggatcgaggtgaggtgtgcagagtgtgccagaacaagctctttgaatcaatacaggagggtaagtacgaattcccagataaggactgggcacacatcagtagtgaggccaaagaccttatctcaaaattactggtgcgtgacgccaagcaacgcctgtcagccgctcaagtcctccagcacccttgggtccagggccaggctcccgagaagggcctacccacacctcaggtacttcagagaaattctagtaccatggacctcactctctttgcagccgaggccattgcccttaaccgccagctatctcagcatgaggagaacgagctggccgaggagccggaggcacttgccgatggcctgtgttcgatgaagttgagccccccttgcaaatcccggctcgccagacgacgtgccctggcgcaggccggccggggggaagatagatcgcctcccacagccctctag

SEQ ID NO: 194184 - DNA, 1044 bp, synthetic construct
  misc_feature 1..1044: note = Description of Artificial Sequence: Synthetic coding sequence
  source 1..1044: mol_type = other DNA
atggtgagcagccagaagctggagaagcccatcgagatgggcagcagcgaaccacttcccatagccgacggggatcgcaggcggaagaaaaaacgcagaggaagagccacagatagccttccagggaagtttgaggacatgtacaaactaacctccgagcttctcggtgagggcgcttacgccaaggttcagggagcggtctccttgcagaacgggaaggagtatgcagtcaagatcattgaaaagcaagccggccatagtcgttcaagggtcttccgggaggtggagaccctgtatcagtgtcagggaaataagaacattctggaattaatcgaattctttgaggatgatactagattctacctggttttcgaaaagttacagggtgggagcatcctcgctcacatccagaaacagaagcattttaatgaacgggaagcatcccgcgtggtaagagacgttgccgcagctctggacttcttgcataccaaaggcatcgcccaccgggatttaaagcccgaaaatatcttgtgcgagagcccagagaaggtctcacccgtcaagatctgcgattttgatctcgggtctggcatgaaactaaacaattcctgcacaccgatcactacccctgagcttaccacaccctgcgggagcgccgaatatatggcgcccgaagtcgtggaggtttttacagatcaggccaccttttatgacaagcggtgcgatctgtggtcgttgggtgtggtgctgtatattatgttaagcggttatccgccctttgtaggccattgcggggccgattgtggctgggatagaggcgaggtgtgtagggtgtgccaaaacaagctattcgagagcatacaggaaggcaaatatgagtttccggacaaggactgggcacacattagttccgaagcaaaagacctgatctccaagctactcgttagagatgctaaacaacggctgtccgctgcacaggtgcttcaacatccctgggtgcagggggagcagcagcataacggtcctgacgccctgagatcttag

SEQ ID NO: 194185 - DNA, 537 bp, synthetic construct
  misc_feature 1..537: note = Description of Artificial Sequence: Synthetic coding sequence
  source 1..537: mol_type = other DNA
atggtgagcagccagaagctggagaagcccatcgagatgggcagcagcgagcctctgcccattgccgatggcgacaggcgtagaaagaagaagaggcggggacgagcaaccgactccctgcccggtaaattcgaagatatgtataaacttacttccgagctgctgggagagggtgcctacgccaaggtacagggggccgtgagcctgcagaatgggaaagagtacgctgttaaaattatcgagaaacaggccggacacagtagaagccgggtgtttagggaggtggagaccttgtatcagtgccaaggtaacaaaaacatcctggagcttatcgaattctttgaagatgataccagattttacctcgtgtttgagaaactccagggaggctccattctagcccacattcagaaacagaagcactttaatgaacgggaagctagccgcgtcgttagagatgttgctgcggccttagatttcttacataccaagggtatagcccaccgtgacctcaaacccgaaaatatcctatgctag

SEQ ID NO: 194186 - DNA, 306 bp, synthetic construct
  misc_feature 1..306: note = Description of Artificial Sequence: Synthetic coding sequence
  source 1..306: mol_type = other DNA
atggtgagcagccagaagctggagaagcccatcgagatgggcagctcagagcccctgcctattgctgatggtgatcggcgacgaaagaagaaaaggcgcggacgcgccactgactcactacccggcaagttcgaagatatgtataaattaacttccgaactacttggggagggggcctatgccaaggtccagggggctgtttcgcttcagaatggtaaggaatatgcagtgaagattatcgaaaagcaggcagggcacagtcgtagcagagtgtttcgggaggtggagacactgtatcagtgttag

SEQ ID NO: 194187 - DNA, 303 bp, synthetic construct
  misc_feature 1..303: note = Description of Artificial Sequence: Synthetic coding sequence
  source 1..303: mol_type = other DNA
atggtgagcagccagaagctggagaagcccatcgagatgggcagcagcgaacccctgcctattgcagacggcgaccgacgcagaaagaagaaacgccggggtcgcgccactgactctctccccgggaaattcgaggatatgtataagctgactagcgagcttctcggagagggtgcctacgcgaaggtgcaaggagccgtgtctctgcaaaacggcaaggagtacgcagtcaagatcattgagaagcaagccggccattctcggagtcgcgtcttcagggaggtggaaaccctttatcagtag

SEQ ID NO: 194188 - DNA, 402 bp, synthetic construct
  misc_feature 1..402: note = Description of Artificial Sequence: Synthetic coding sequence
  source 1..402: mol_type = other DNA
atggtgagcagccagaagctggagaagcccatcgagatgggcagctccgagccactacctatcgcagatggcgatcggcggagaaaaaaaaagcggcgggggcgcgctaccgactcgctgcccgggaaattcgaggacatgtataagttgacttcggaactgcttggagaaggggcgtatgcaaaggtgcagggcgccgtttccctgcagaacgggaaagagtatgccgtgaagattattgagaagcaagctggccatagtcggtctagggtttttagggaggtagagaccctgtaccagtgccagggaaacaaaaacatccttgaactgatcgagtttttcgaggacgacacgagattctacctggttttcgaaaagctccagggcggaacatatagatag

SEQ ID NO: 194189 - DNA, 1398 bp, synthetic construct
  misc_feature 1..1398: note = Description of Artificial Sequence: Synthetic coding sequence
  source 1..1398: mol_type = other DNA
atggtgcagaagaagcccgccgagctgcagggcttccaccggagcttcaaaggccagaatcctttcgagctggcattcagcctggatcagcctgaccacggggacagcgacttcggcttgcaatgcagcgcgcgcccagacatgcctgcctcgcagcccattgacattccggatgcaaagaagagggggaaaaaaaaaaagaggggcagggccaccgattctttctcgggccggtttgaggacgtgtaccagttgcaggaggacgttctgggcgaaggcgcacacgcaagagtgcagacatgcatcaacctgataactagccaggaatacgccgttaagatcattgaaaaacagcccgggcatatccggtctagggtgttcagggaagttgaaatgttatatcagtgccaaggtcatagaaacgtgctggagctgatagaattttttgaggaggaggaccgcttttacctggtatttgaaaagatgcggggtggatccattctgagtcatattcacaaacggcgccattttaacgaactcgaggcttctgtggtcgtacaggatgttgcaagcgccctggacttcctgcacaacaagggaatcgcccaccgggacctgaaacccgagaacattttgtgcgagcaccccaaccaggttagccctgttaagatctgcgatttcgatctcggttcaggaattaaactgaacggagattgttcaccaatctccacaccagagctgctgaccccttgtggatcggccgagtacatggctcccgaggtcgtagaagcattctctgaggaggcctccatctacgacaaaaggtgtgacctgtggtctctcggagttattctatatatactcttgagcggatacccaccttttgtgggcagatgcgggtctgattgcggatgggatagaggggaggcctgcccggcttgtcaaaatatgctatttgagtcgattcaggagggaaagtacgagttccctgacaaggactgggcacacatctcttgcgccgctaaggacttgatatctaagttactggtcagggatgcgaaacaacggctttcggcagctcaggtgttacaacacccctgggtacagggctgtgctcccgagaacacactgcccacaccgatggttttacagcgaaacagctgcgcaaaggatctgaccagttttgcagcggaggcaattgccatgaatcggcaactggctcagcacgacgaggatctggccgaagaggaagcggcgggacagggtcagccagtgctcgtgcgggcaacttctcgatgtctccagctttcacccccctcacagagcaagttagctcagaggagacagcgtgcctccctcagctccgcccctgtagtgctcgtcggcgatcatgcctag

SEQ ID NO: 194190 - DNA, 1245 bp, synthetic construct
  misc_feature 1..1245: note = Description of Artificial Sequence: Synthetic coding sequence
  source 1..1245: mol_type = other DNA
atggtgcagaagaagcccgccgagctgcagggcttccaccggagcttcaagggccaaaatccattcgagctggcgttcagtctagaccagccggatcacggcgattctgacttcggtctccaatgttcagctagacccgacatgcccgccagtcagcccattgatatcccagacgctaagaaacgtggaaaaaagaaaaaacgcggtagggccaccgatagcttcagcgggcgatttgaggacgtgtatcagctccaggaggacgtactaggtgaaggagcgcatgcaagagtgcagacctgtatcaatctcatcacaagtcaggagtacgccgtgaagatcatagagaagcagcctggtcacatcagatccagagtgtttcgcgaagtcgaaatgctttatcagtgtcagggacaccgcaacgtgctggagctgattgaattctttgaggaagaagacagattctaccttgtgtttgagaaaatgcgcggcgggtcgatcctctctcacatccacaagaggcgccactttaatgagctcgaagcttcggtcgtcgtgcaggacgtggcgtctgctctggactttctccataataaggggatcgctcatcgggatctgaaacctgagaatatcctgtgtgagcatccaaatcaagtgtctccagtgaagatctgcgactttgatctgggaagtggaatcaagctgaatggcgactgttccccaataagcacccccgagcttctcacaccctgcggcagtgccgagtatatggctcccgaggtcgttgaggcattcagcgaggaggcatccatctacgataaacgctgcgatttatggagcctaggggtcatattgtatattctcctgagcggttaccccccattcgtcggcagatgtgggtctgactgcggttgggaccgcggtgaagcatgccctgcctgtcaaaacatgctgtttgaatcaatccaggaaggcaaatatgaatttccggacaaagactgggctcacataagctgcgccgctaaggacctcatctcaaagctgctggtgcgcgatgcaaaacagcggctcagcgccgcccaggtactgcagcacccttgggtccagggttgcgctccagagaacacacttcccaccccgatggtcctccagagatgggatagtcatttcctgctgcccccccacccttgccgaattcacgtacggccaggaggactggttaggactgtgactgtgaacgagtag

SEQ ID NO: 194191 - DNA, 1005 bp, synthetic construct
  misc_feature 1..1005: note = Description of Artificial Sequence: Synthetic coding sequence
  source 1..1005: mol_type = other DNA
atgctgtaccagtgccagggccaccggaacgtgctggagctgatcgagtttttcgaggaggaagatcggttttatctcgtgtttgagaagatgcgcggcggaagcatcctctcccatatccataaacggcgacatttcaacgaactagaagcaagcgtggttgtccaggatgtcgcttctgcactggacttcctccacaacaaaggcattgcccaccgggatttgaagcccgagaatatcctgtgcgagcacccgaatcaggttagtccagtgaaaatctgcgactttgacttagggtcagggataaagcttaacggcgattgctcaccaatttcgactcccgagttgctgacgccttgcggcagcgccgagtacatggcacctgaggtggtggaggcattctccgaggaggcttccatctatgataagcgttgcgacctctggtcacttggagtgatcctttacatattgctcagcgggtatcccccatttgtggggcggtgcggctctgactgtgggtgggatcgcggggaggcctgtccagcttgtcaaaacatgctttttgaaagcattcaggaaggtaaatatgaatttcccgacaaggactgggcacacattagctgcgccgcgaaggatctgattagtaagctcttggtacgcgatgctaagcagagactttcagccgcacaggtcctgcagcatccttgggtacagggttgtgctccagaaaacacactgccaacccctatggtactccaaaggaactcatgcgccaaggatttgacgagcttcgctgccgaggccattgccatgaataggcaacttgcccagcacgatgaggatttggcagaggaggaagcagccggccagggacagcctgtgcttgtgagggccacatctaggtgcttgcagctgtctcctccttcacagtccaagttagcccaaagacggcaacgcgcgtcactctcatccgctccggtggtactggtgggagaccacgcctag

SEQ ID NO: 194192 - DNA, 1218 bp, synthetic construct
  misc_feature 1..1218: note = Description of Artificial Sequence: Synthetic coding sequence
  source 1..1218: mol_type = other DNA
atgcccgccagccagcccatcgacatccccgacgccaagaagcgggggaagaagaagaagagaggtcgcgcaacagacagcttttcaggtcgcttcgaagacgtgtaccagctgcaggaggatgtcctgggcgaaggggcccacgcgagagttcagacctgcattaaccttatcacaagccaggagtacgctgtcaaaattatagagaagcagcctggacatatccggagccgtgtctttagggaggtcgaaatgctctaccagtgtcaggggcatagaaatgtgctcgaactaatcgaaaagatgcggggtggctccattctctcccacattcataaaaggcgccactttaacgagttagaggccagcgtggtcgttcaggatgtggcctctgcgcttgacttcctccacaataaagggattgcacatagagatctgaagcccgagaacattctgtgtgagcacccaaatcaggtgtcacccgttaagatctgcgactttgatctaggatctggaatcaaactcaatggggattgcagtccaatatctacccccgaacttctgacaccttgtggcagcgccgagtatatggcaccagaggtggtagaggctttctcagaagaggcctcaatctacgataagaggtgtgacctgtggtcactgggagttatactctatatcctcttatccggatatccccctttcgttgggcggtgtggtagcgactgcgggtgggatcgaggggaggcttgcccagcgtgccagaacatgctgtttgagtcaatccaggagggcaaatatgaatttcctgacaaggactgggcccacatcagctgtgcagctaaggaccttattagcaaattgctcgtgagggatgctaagcagaggcttagtgctgcccaggtgctgcagcatccctgggtgcagggctgcgcccctgagaacacacttcctactcccatggttctgcagaggaatagttgtgccaaagatctgacctcctttgctgccgaagcaatcgctatgaaccgacagttagcgcaacacgacgaggacctggccgaggaggaagccgcaggtcaagggcagcctgtcctcgtccgggccacctctaggtgcctgcaactaagtcctcccagtcagtccaaacttgcacagagacgccagagggcctcactttctagcgcccccgtcgtactggtaggtgaccatgcgtag

SEQ ID NO: 194193 - DNA, 2388 bp, synthetic construct
  misc_feature 1..2388: note = Description of Artificial Sequence: Synthetic coding sequence
  source 1..2388: mol_type = other DNA
atgagcgcccggacccccctgcccaccgtgaacgagcgggacaccgagaaccacacctctgtcgatggatatacggaaccccatatccagccaacaaagagctcaagcagacagaacatccctcgctgccgtaattctattacctccgctaccgatgagcagccccacatcggcaactatcgcctgcaaaagacaatagggaaggggaactttgccaaggtcaagttagccaggcatgtgcttactgggagggaggtcgctgtcaagatcattgataagacccagttaaaccccacatccctgcagaaacttttcagggaggtccgaatcatgaagatactgaaccatcctaacattgtgaagctcttcgaagttatcgagactgagaaaactttatatttagtcatggaatacgctagtgggggagaggtgttcgattatctagttgcgcatggtcggatgaaggagaaagaggcaagagctaagtttcggcagatcgtgtccgccgtgcaatattgccaccagaaatatattgtgcatagggacctcaaggcggagaatctacttctggacggcgatatgaacataaagatcgctgattttggctttagtaatgaattcactgtggggaacaaactggatacattttgcggatctccgccttatgccgctccagagctatttcagggtaaaaaatatgatggacctgaggtggatgtgtggagtctgggagttatcctgtacactctcgtctcaggatcattgccttttgatggccagaatctaaaggagctcagggagagggtgttgcgcggaaagtacaggattccattttacatgagcacagactgtgagaatctgcttaaaaagctgctggtgttgaatcccattaaaaggggtagcctcgagcagatcatgaaggaccggtggatgaacgtcggccatgaggaagaggagctaaaaccatatactgaaccagaccctgactttaacgacaccaagcgcattgatatcatggtcaccatggggttcgcccgggatgagatcaatgacgcgttaatcaaccagaagtacgacgaggttatggccacctacatactcctggggaggaagccccctgaattcgaagggggcgaatctctctcatcgggaaatctctgtcaacgttcccgaccaagtagcgacctgaacaatagcactctacagagccccgcacatctgaaagtccagcggtcaattagtgcaaatcaaaaacaacggagatttagtgatcatgcagggcctagtattccacctgcggtgagctataccaaacggccccaggccaattcagtggaatcagagcagaaagaggagtgggataaagatgtggctcgaaaattgggatctacgacagttggcagtaagtctgagatgacagccagtcctctcgtgggtccggagcggaaaaaatcaagcacaatccccagcaacaacgtgtacagtggggggtctatggctcgaagaaacacttacgtgtgcgagagaacaacagatagatacgttgcgctgcagaacgggaaggactcttccttgacagaaatgtctgtgtcttctatttcttctgcaggttccagcgtcgcaagcgccgtaccttcagcacgtccacggcatcagaaatccatgtcaacatcaggacaccccatcaaggtcacactgccgactatcaaggacggtagcgaggcatataggcctggaactacccagcgcgtgccagccgcatcaccctcagcccacagcatttccacagctacacccgacagaactcgcttcccacggggatcttcttctcggtccacatttcacggtgagcagctgcgggaaagaagaagtgttgcttacaacggcccccctgcatcccctagtcatgagacaggggctttcgcacacgcacgccgaggcacctccacgggcatcatttctaaaatcactagcaagtttgtgcgccgtgaccccagcgaaggggaggccagtggccgcactgacacatctcggtccaccagtggcgagccgaaagagcgggataaagaagaaggtaaagactccaagcccagatccctaaggttcacttggtctatgaaaactacaagttctatggaccccaacgatatgatgagggagattcgcaaggtcctggacgctaataactgcgactatgagcagaaggagcggtttttgctcttttgtgtgcatggagacgccagacaagactccctggttcagtgggagatggaggtgtgcaaactgcctcgcctgtccctcaacggtgtgaggtttaagagaatcagtggaacttcaatcgccttcaagaacattgctagcaaaatcgcgaatgagctcaagctgtag

SEQ ID NO: 194194 - DNA, 2277 bp, synthetic construct
  misc_feature 1..2277: note = Description of Artificial Sequence: Synthetic coding sequence
  source 1..2277: mol_type = other DNA
atgagcgcccggacccccctgcccaccgtgaacgagcgggacaccgagaaccacacctccgtggatgggtatacagagccccatatccagccaaccaagagttcctctcgccagaatattccgaggtgcaggaactccatcacaagcgcaaccgacgagcagccccatatcggaaactacaggcttcagaagactattggtaaggggaacttcgcaaaagtgaaacttgcccgtcatgtgctgactggacgtgaggtcgctgtcaagatcatcgacaagacacagctcaacccaactagcctccaaaagctgttccgagaagtgcgtattatgaaaatcctgaatcatcccaatatcggagaggtctttgattacctagttgcacacggcagaatgaaagaaaaggaagctagagctaagtttcgccaaatcgtgtctgccgtccagtactgccatcaaaaatacatcgtccaccgcgacctgaaagccgagaacctcctattggacggggacatgaatataaagatcgccgatttcggcttctctaacgaatttactgttgggaacaagctggacacgttctgcggctcaccaccttatgccgctcctgagttgttccagggaaagaagtacgacggcccagaggtggacgtatggagccttggcgtgattctctataccctggtgtcaggctcattgccgtttgatgggcagaatttaaaggaactgagagaacgcgtgctaagggggaaatatcgaatccctttttatatgtcaacggattgtgaaaatctgcttaaaaaactcttggtccttaaccccatcaagcgcggctccctggaacagattatgaaggaccgatggatgaatgttgggcacgaggaagaggagctgaagccttatactgaaccggacccagacttcaatgatactaagaggatcgacataatggtaacaatgggattcgcccgggacgagattaatgacgccctgattaatcaaaaatacgacgaagtaatggccacttacattttattgggccgcaagcctcccgaatttgaaggcggtgagtcactgagcagtggcaatttgtgccagcggagcaggccatcatcagacttgaacaactcaactctccagagccctgctcacctgaaagtccaacggtctatttcggccaaccaaaaacagaggcggttttccgatcacgcaggcccgagcatacctcccgcagtatcatatactaaaagaccacaggcaaactctgttgaatctgagcagaaagaggaatgggacaaagatgtcgcccgcaagctgggatccacaaccgtgggcagcaagtccgaaatgacggcaagcccattagtgggccccgaacgcaagaaatcctcaacgatcccctccaacaatgtctattcgggaggcagtatggcccgaaggaacacctatgtttgtgaaagaactaccgatcgatatgtggcgctgcaaaatggaaaagactcatcactgactgagatgagcgtcagtagcatcagctccgctgggtcctcagttgcgagcgctgtcccatcagcacgccccaggcatcagaagagtatgtccacctcgggtcacccaatcaaggtaacccttcccaccataaaggacggaagtgaagcctacagaccagggaccacccagcgcgttccagctgcgtccccctctgcccatagcatatcgacggcaacccccgacagaacacgcttcccacgaggctcctcatcccgcagtacatttcatggcgagcagttaagagagcggcgaagtgttgcctacaacggccctccagcttccccatcccatgagaccggggcctttgcacacgccaggcggggtacatctaccggcattatctccaagatcacgtcaaaattcgtgagacgcagtacctcaggtgagccaaaagagagagataaagaggagggcaaggactcaaaaccacggtctttgcggtttacgtggagcatgaaaactacctcctctatggaccctaacgatatgatgagggaaattcgaaaggtcctggacgctaacaattgtgattatgaacaaaaggagcgctttctcctgttttgcgtgcatggtgacgctaggcaggatagcctcgttcaatgggagatggaggtttgcaaactaccaagactgagtttgaatggcgttaggtttaagcgcatctccggcacatccatcgccttcaaaaacatcgccagcaaaattgccaatgagctcaaattgtag

SEQ ID NO: 194195 - DNA, 1938 bp, synthetic construct
  misc_feature 1..1938: note = Description of Artificial Sequence: Synthetic coding sequence
  source 1..1938: mol_type = other DNA
atggagtacgccagcggcggcgaggtgttcgactacctggtggcccatggcagaatgaaggagaaggaggcccgagctaagtttcggcagattgtctcagctgtgcaatattgtcaccaaaaatacatagttcatcgcgacttgaaagctgaaaatttgcttctcgacggcgacatgaatatcaagattgcagatttcggtttctccaatgagttcacggtgggcaataagctggacactttctgtgggtcaccaccttacgcagcccccgaactctttcagggcaaaaaatatgatgggccagaggtggatgtgtggtctctgggagtaatcctttacactttggtgtcagggtctctgccctttgatggccagaatttaaaagagctgcgtgagcgtgtcctgcgtggcaagtaccgaatccccttttacatgtctacagactgcgaaaacctgttgaaaaagttactggtgcttaatcctattaagcgaggctccctggaacagatcatgaaagaccgctggatgaacgtgggacatgaagaggaggagctgaaaccttatacggaacccgatccagattttaacgatacgaagagaatcgacattatggtaacaatggggtttgcgcgcgacgagattaatgatgcgctgattaatcagaagtacgatgaggtcatggccacctacatcctgcttgggagaaagccacctgagtttgaaggcggagagagcctgagcagtggcaacttgtgccagaggtctagaccaagttctgatttgaataactcaaccctgcagtcacccgcacacctgaaggtgcaacgctcaattagcgcgaaccagaagcagagacgcttttccgaccacgctggacctagtatacctcctgctgtcagttacactaagcgtcctcaggccaactctgtggagtccgagcaaaaagaagagtgggacaaagatgttgcgcgcaaactgggatcgactacagtaggaagcaaatcagagatgactgccagtccactcgtcggccccgagcgtaaaaagtctagtacaatcccttctaacaacgtctattctggaggctctatggcccgcagaaacacctatgtctgtgaacggactacagataggtacgtggctcttcaaaacggaaaagattcctctctgaccgagatgtcagtcagtagtatttcttctgctggctcttccgtggccagtgctgtgccatctgccagacctcgacaccagaaaagcatgtccacctcaggccacccaataaaggtgactctccccacaatcaaagacggatcagaggcgtacaggcctgggaccacccagcgtgtgccagctgctagcccatctgcgcatagcatttccacagcaaccccagatcgcactcggtttcctagggggtcctcctcccgctcaactttccacggggagcagctccgcgaacggcgttctgtggcctataacggacccccagccagcccttcccatgagaccggagcctttgcacatgcacggaggggcaccagcacagggatcattagcaagatcacctcaaaatttgtgcggagatccacctccggcgagcctaaagagcgggataaggaggaaggaaaggactctaaaccacggtcactgaggttcacctggtccatgaagacgacctcctccatggatcctaatgacatgatgagggaaattaggaaggtgttagacgctaataactgcgattatgagcagaaggagcgcttcctgcttttttgcgtgcacggggatgcaaggcaagacagccttgtgcaatgggagatggaggtgtgcaagttaccccgcttaagcctgaatggcgtgcggtttaagagaatttcaggcacgtcgatcgcatttaagaacatcgcttcgaagattgcaaacgaattgaagctgtag

SEQ ID NO: 194196 - DNA, 2340 bp, synthetic construct
  misc_feature 1..2340: note = Description of Artificial Sequence: Synthetic coding sequence
  source 1..2340: mol_type = other DNA
atgagcagcgcccggacccccctgcccaccctgaacgagcgggacaccgaacagcccactttgggtcatctggactcgaaaccctcatctaaatcaaatatgatcagaggacggaattccgccaccagcgctgatgaacaaccccatattggtaattacaggttgctaaagaccattggtaagggaaactttgccaaagttaagttggcaaggcatatactaaccgggaaagaggtggccgtgaaaatcatagataaaacccagttgaacagctcttctcttcagaagctgttcagagaagttcggatcatgaaggtgctcaaccatcccaatattgtgaaactgttcgaagtgatcgagaccgaaaaaaccctttacctggttatggagtacgccagcggtggcgaagtctttgactatctggtcgcccatggacgaatgaaggagaaggaggctcgagccaagtttcggcagattgtgagcgcagtgcagtactgtcaccaaaagttcatagtgcatcgggatctgaaggctgagaacctgcttctggacgctgacatgaatataaagatagcggactttggcttttccaacgaattcacatttggaaataaactggacactttctgtgggagtccgccatatgcggcccccgaactgtttcagggcaagaagtatgatggtcccgaagttgacgtgtggtctctcggcgtgatcctgtacaccctggtaagtggctcgctgcctttcgacggtcaaaacctgaaggagcttcgagaacgcgtcctccgcgggaagtacaggatccctttctacatgtccacggattgcgaaaacttactgaaaaaattcctgatcctcaatccaagtaagagagggactcttgagcagatcatgaaagaccggtggatgaatgtgggacatgaagacgacgaattgaagccttatgtggaacccctcccagactataaagaccctcgtcgaacagagctgatggtgtcaatgggctatactcgcgaagagatccaagactcattggtgggacagcgctacaatgaagtgatggccacatacctgctcctgggctacaaatctagtgaactggagggagataccatcactctcaaaccaaggccaagcgctgatttgaccaatagttccgctccttcccctagccacaaagtacagaggtcagtgtccgcaaatccaaagcaacggagattcagcgaccaggctgcgggtccagctatccccactagcaacagctatagtaagaagacccagagcaacaatgccgagaataaacggcccgaagaagaccgcgagtccggaaggaaagctagttctactgccaaagtgcccgcaagccccctgccaggcttggagcggaaaaagactacacctactccctcaactaactctgttctatctacttcaactaatcggtcccggaacagcccactgctagaaagagcctctctaggccaagctagtattcagaatgggaaggactcactgaccatgccagggtcccgggcttccaccgcaagcgcctctgccgctgtgtctgctgcaaggcccaggcagcaccagaagtctatgtcggcttctgtgcatcccaataaagcgtcaggcctcccgccaacggaatcaaactgcgaggtacctcgaccatccaccgccccgcagcgggtgcccgtggcttctcctagcgctcataacattagtagctcaggcggagccccagaccgcactaacttccccaggggcgtcagcagccggtccacctttcacgctggccagctgcgccaagtccgcgatcagcaaaacctaccttacggggtgaccccagcgagccccagcggtcacagccagggtcgccggggcgccagtgggtcgatcttctccaagttcacttcaaaatttgtgcgaagaaatttaaatgaacctgagtctaaagatagagtggagacactgagacctcatgtggtcggatcaggcgggaacgataaggagaaagaggagtttagggaggccaaaccacgcagtctccggttcacatggagtatgaagaccacatcctcaatggagcccaacgagatgatgcgcgaaattcgcaaggtgctggatgcaaatagttgtcaatctgagctccatgagaagtatatgctgctctgtatgcacggtacccccggacacgaagatttcgtgcagtgggaaatggaagtgtgcaaactgccccggctcagcctaaacggcgtgcgctttaagagaatttccgggacttccatggctttcaaaaatatcgcgagcaagattgccaacgaacttaaattgtag

SEQ ID NO: 194197 - DNA, 2130 bp, synthetic construct
  misc_feature 1..2130: note = Description of Artificial Sequence: Synthetic coding sequence
  source 1..2130: mol_type = other DNA
atgagcagcgcccggacccccctgcccaccctgaacgagcgggacactgagcaacctaccctgggccatctggatagtaagccttcatcaaagtctaatatgatccgaggcagaaactccgctacctctgcagacgaacagcctcatatcggaaattacaggctcttgaagacaatcgggaagggaaactttgctaaggtgaaactggcaaggcacatcctgaccggcaaggaggtggccgtgaagattatcgataaaacgcagctcaactccagcagtttgcagaagctgtttcgcgaggtgaggattatgaaagtgttaaaccatccaaacatcgtgaagctctttgaagtgattgaaacggagaaaacactgtatttggttatggaatatgcctccggtggagaggtattcgactacctggtggcgcacgggcggatgaaagagaaggaagctcgtgccaaatttcgccagatcgtgtcagcagtgcagtattgccaccagaagtttatagtgcatagagacctgaaagctgagaacctgcttcttgacgcggatatgaatatcaagattgccgatttcggattttcaaatgaattcacatttgggaacaaactcgatacattttgcggctctccaccatacgcagctccggaattattccagggtaagaaatacgatgggccagaggtggatgtatggagcctgggggtgattctatatacactcgtgtccggtagtcttccattcgacggccagaacttaaaggagcttcgtgaacgggtgctgcgtggcaagtataggatccccttttatatgtctaccgactgcgagaaccttctgaaaaaatttctgattctgaaccctagcaaacgcggaaccctggagcagattatgaaggaccggtggatgaacgtcggacatgaagacgacgaactgaagccgtacgtggagccgcttccagactacaaggatccacggaggaccgagctgatggtgagcatggggtatacccgggaggaaatccaggattctctcgtgggccagcgatacaatgaagtgatggctacctacctgttactcggatataagtccagcgagctcgagggcgatacaatcacactgaaaccaaggccttcagcagacctgaccaattcctcagccccttccccaagccacaaagttcagaggtccgtctctgctaaccctaagcagaggagattcagcgaccaggctggcccggcgatacctactagtaatagttattccaagaagacccaatcgaataacgccgagaacaagagaccagaagaagacagagagagcgggcgtaaggcctcgtcaacagctaaggtgcccgcatcacccctcccggggttggaacgaaaaaagacaacccccaccccctctacgaatagcgtcctaagcacatccactaatagatctagaaattcacccctgctggaacgcgcctctctcggccaggcctcaatccagaatggtaaggactctacagctcctcagcgcgtgcctgtggcaagcccgtcggctcacaatatttccagctctggcggcgcacccgatagaacaaatttcccaaggggcgtctcatcccgctcaacctttcacgccggacagctgaggcaggtccgcgatcaacagaacctaccctatggggtgaccccagcatctcctagcggtcattcacaaggaaggagaggggcttcagggtcaatcttttcaaagttcacctccaagttcgttcgacggcctcatgtggtcggcagtggcgggaacgacaaagagaaggaggagtttcgagaagctaaaccgcgttcactcagattcacctggagtatgaagacgacttccagcatggagcctaatgaaatgatgcgggaaatcagaaaagtgctggatgccaactcctgccaatccgagttgcatgaaaaatacatgctgctctgtatgcacggaaccccgggtcacgaggatttcgtccagtgggaaatggaggtgtgcaaactcccacgcttgtccctgaacggggttagattcaaacggatcagcgggacgtcaatggcattcaagaatatcgcttctaagattgccaacgagctcaaactctag

SEQ ID NO: 194198 - DNA, 2160 bp, synthetic construct
  misc_feature 1..2160: note = Description of Artificial Sequence: Synthetic coding sequence
  source 1..2160: mol_type = other DNA
atgagcagcgcccggacccccctgcccaccctgaacgagcgggacaccgagcagcccaccctgggtcatctggatagcaaaccttcgagtaagagtaacatgattaggggcaggaactccgctacctctgcagacgaacagccgcacatcgggaactacaggctgctgaagacaatagggaagggcaatttcgctaaggttaaactagcccgccacatcctcaccgggaaggaagtggccgtgaaaataatcgataagactcaactgaattcaagctcgctgcagaagctgttccgtgaagttcgaataatgaaggtcctgaaccaccccaacattgttaagctcttcgaagtgatagaaacagaaaaaaccctgtatctcgtgatggaatatgcctctggaggagaggtgttcgactacttagtggcccacgggagaatgaaggagaaagaagctcgggctaagttcaggcagatcgtatcagcagtccaatactgtcaccagaagtttattgtccaccgagatctgaaggctgagaaccttctactcgatgccgatatgaacattaaaatcgcagacttcggctttagcaatgagttcactttcggtaacaaactcgacaccttttgtgggagtcccccgtacgccgccccagagcttttccaaggcaaaaagtacgatggcccggaggtagacgtctggagtctcggggtgattctatatacgctggtgagtgggtctctcccttttgacggccagaacctgaaggaactgcgtgagcgggtgctccgaggcaaatacagaatcccattttacatgtctaccgattgtgagaatctgctgaagaagttcctcatcttgaacccgtcgaagagagggaccctcgagcagattatgaaagatcggtggatgaacgtgggccacgaagacgacgagcttaaaccctacgtggagccactccctgattacaaggacccgaggagaacagagctgatggtgtcaatggggtatactcgcgaggaaattcaggattccctggtgggtcaacgctacaatgaggtaatggcaacctatcttctgctgggttacaagtcctcagaactagagggggatacaatcactctcaagccccgtccaagtgcggacttgactaattcgtccgccccgtctccatctcacaaggttcagcgctccgtgtccgccaatcctaagcagcggcggttttccgaccaggccgccggacccgccatcccaaccagtaattcatactcaaagaaaacccagtctaacaacgcagagaacaaacgaccagaagaggaccgggagtccgggcgtaaagcctcaagtacggccaaagtccctgcctcccctctgccggggctggagaggaagaaaacaacccctacccctagtacaaatagtgtcttaagcacatctacaaaccgatcacggaactcacctctgttggagagagcaagcctcggacaggccagtatacagaatggaaaggacagtactgcgccgcagcgggtgcctgtggcttcacctagtgctcacaatatttcctccagcggcggagcacctgatagaaccaactttcctcgcggagtttctagccgcagtacgttccacgcaggacagctcagacaggttcgggatcagcagaatttgccgtatggagttacccccgcttctcctagtggtcactctcagggaaggaggggagctagtggcagcatcttctctaaattcacatcaaaatttgttagacggaatctgagttttaggtttgccagacgcccccacgtagtcgggtctggcggcaacgacaaagaaaaagaagagttcagagaagcaaagccccgcagcctccgctttacttggagcatgaaaaccacaagtagcatggagcctaacgagatgatgcgagagatccgcaaggtattagatgcaaacagttgtcaatcggaattgcacgaaaagtatatgcttctgtgtatgcacggtaccccaggccatgaggattttgtacagtgggaaatggaggtgtgcaagttgcccaggttatcattaaatggcgttcgctttaagcgcattagcggtactagcatggcatttaaaaacatagcaagcaaaatcgcaaacgagctcaaattgtag

SEQ ID NO: 194199 - DNA, 2322 bp, synthetic construct
  misc_feature 1..2322: note = Description of Artificial Sequence: Synthetic coding sequence
  source 1..2322: mol_type = other DNA
atgagcagcgcccggacccccctgcccaccctgaacgagcgggacaccgagcagccaacccttggccacctggactctaagccgtcatcaaaaagtaacatgatccgtgggagaaacagcgccacctctgcggacgaacagcctcatatcggaaattatcgcctgttgaaaactataggcaaaggcaattttgccaaggttaaactggcccgccacattctcactggcaaggaggtggccgtgaagatcatcgacaaaacccagctgaattcaagctccctccaaaaactgtttagagaggttagaatcatgaaggtgctcaatcaccctaacattgtgaagctgtttgaagttatcgaaaccgaaaaaactctgtacctggtcatggaatacgcctcagggggggaagttttcgactacctggttgcccatgggagaatgaaggagaaggaggccagagcaaagttccgccaaattgtgagcgccgttcagtattgccaccaaaaatttatcgtgcatcgcgacctgaaagccgagaacttgcttttggatgcagatatgaacatcaaaattgctgatttcggcttttccaacgaatttaccttcgggaataaactcgataccttctgcgggagccctccatatgccgcaccagagctgttccaggggaaaaaatacgacggaccggaagtggatgtgtggtcgcttggagtgatcctttacacccttgtcagcggaagtctcccttttgatggacagaacttgaaggaactgagagaaagagtcctgcggggcaagtaccggatccccttttacatgagtaccgattgtgagaaccttctaaagaagtttctgatcctcaatccatctaagcgaggaacactcgaacagattatgaaggaccggtggatgaacgtgggccatgaagatgatgaactgaaaccatacgtcgagcctctgcctgactacaaagatccaagaaggacggagttgatggtcagcatgggatacactcgcgaggagattcaggattctctggtcgggcagaggtacaacgaagtgatggcgacctatctgctgctcggttacaaatctagcgaactagaaggcgacactatcaccctgaagcctcgcccgtcggctgatctgaccaacagctctgccccctcgccctcacataaagtccagcgctccgttagtgccaaccccaagcagcggcgtttctccgaccaggccgccgggcccgccatccccactagcaattcttactcaaagaagacccaaagtaacaatgccgagaataaaagacccgaggaggatcgggaatccgggcgcaaagcctcctccactgctaaagttccggccagccctctgcccgggcttgaaaggaagaagaccacccccactccgtccaccaactcggtgctgagcacttccactaacaggagtaggaactcccccctgctggaaagagccagtctgggtcaagcatcaattcagaatgggaaggattcgctcaccatgccaggttcacgagccagtactgcatctgccagtgctgccgtcagcgctgcccgtccacggcagcatcagaagtctatgagcgcaagcgttcatccaaataaagcttccggtttacctccgacagagagcaactgtgaggtcccacgcccaagcacggcaccccagagagtgcccgtagcatcgccaagcgcccataatatctcatcctctgggggtgcccccgaccggactaattttcctcggggagtatcctcccggagcacctttcatgcagggcagttacgacaggtgcgggatcagcaaaatctgccgtacggggtgacccccgccagcccatctggacacagccaggggcggcgcggtgccagcggttccatcttttcaaagtttacgtcaaagttcgttcgcaggaacctgagttttcggtttgcaagacgcccacacgttgtgggctcaggaggcaatgacaaggaaaaggaggagttccgagaagccaagccgcgttccctgcgctttacatggtccatgaaaacaacctcgagcatggagcctaacgagatgatgagagagatccggaaggtactggacgccaactcctgccagtctgagttacacgaaaagtacatgctgttgtgcatgcacggaacaccaggtcacgaggacttcgtccagtgggagatggaagtctgtaagctgcctcgcctgtccctgaatggcgtgagatttaaacgcatctctggaacctctatggccttcaagaacattgcctccaaaattgcaaacgagctgaaattgtag

SEQ ID NO: 194200 - DNA, 2076 bp, synthetic construct
  misc_feature 1..2076: note = Description of Artificial Sequence: Synthetic coding sequence
  source 1..2076: mol_type = other DNA
atgatccggggccggaacagcgccaccagcgccgacgagcagccccacataggcaactatcggctcctgaagacaatcgggaagggcaattttgccaaagtgaagcttgcccgccacatactcaccggtaaagaggtagccgttaaaatcatcgacaagacacagcttaactcatcgagcctccagaagctgttccgtgaggttcgtatcatgaaggttctaaatcaccccaatatcgtcaagctgttcgaagttatcgagactgaaaaaaccttgtatcttgtcatggaatatgcgtctggcggagaagtgtttgactacctggtggctcatggcagaatgaaggagaaggaggccagggcgaagttccggcagattgtctcggcagtacaatattgtcatcagaagttcatcgtccatcgggatctgaaggctgagaacctgcttttggacgccgatatgaatatcaaaattgccgattttggcttctctaacgaattcactttcggtaacaagttagacaccttctgcggcagcccaccttacgctgcccccgagttattccagggaaagaaatacgacggacctgaagtagatgtgtggagcttaggagtgatactttacacattggtgtccggaagtttgccattcgatggacagaacctaaaggagttgcgcgagcgcgtgcttagagggaaatacaggatccccttttatatgagcaccgattgtgagaacctgctaaaaaaattcctaatcttgaacccctctaagcgggggactctggagcagattatgaaagatcgctggatgaacgtcggacacgaggatgatgaactcaagccctacgtcgagcccttgcccgattataaggatccgcggcggactgaactaatggtgtccatgggctacacacgggaagaaatccaagactccttagtgggacagcgttacaacgaagtcatggccacctatcttttactcggttacaagtcatccgaattggaaggggacaccatcaccttaaaaccacggccctcagcggacctgacgaatagttctgccccctcgccatcccacaaagtacaacgatcagtgtcagctaacccaaaacaacgccggtttagtgaccaggctgggcccgcaatacccacctcaaactcctacagcaaaaagactcagagcaacaacgcggagaataagaggccagaggaagatcgcgaaagcgggaggaaggcttcgagcaccgcaaaggtgcctgcctctccgcttcctggattggagcgcaagaaaacgactcctacgccaagcactaattcagtgctctcgacttctaccaataggtccagaaattcccctctgttggaacgggctagcctggggcaggcgtccatccagaacggtaaggacagcacagctccacaacgcgtgcctgtagcatcccctagcgctcataatatttcctcttccggcggagcacccgataggactaactttcctaggggggtgagctctaggtccaccttccatgctggtcaactcaggcaggttagagaccagcaaaatctaccctacggagtgactcccgcctctccttcagggcacagccaggggcggcgcggggcctctggctcaatctttagcaaatttactagtaagtttgtgagacggaacctgaatgagcccgagtctaaggaccgggtagagacactgaggcctcacgttgtgggaagcgggggcaatgataaggaaaaggaagaattcagggaagccaaaccacggagcttgcggtttacctggtccatgaagaccactagttccatggagcccaatgagatgatgcgcgagatccgtaaagtgttagatgcgaacagctgccagtctgaactccacgagaaatatatgctgctttgtatgcacggcacgcccgggcacgaggattttgtgcagtgggagatggaggtctgtaagcttccacgtctgtctctgaacggtgtgcgcttcaaacggatcagcgggacttctatggcattcaagaatatcgctagtaagatagcaaacgagctgaagctgtag

SEQ ID NO: 194201 - DNA, 2367 bp, synthetic construct
  misc_feature 1..2367: note = Description of Artificial Sequence: Synthetic coding sequence
  source 1..2367: mol_type = other DNA
atgagcagcgcccggacccccctgcccaccctgaacgagcgggacacagagcaacctacactgggtcaccttgattccaaaccgtcttccaaaagcaacatgatccgcggcaggaacagcgctactagcgccgacgaacagccacatatcgggaactacaggctcttaaagactattgggaaaggtaactttgccaaagtgaagcttgctcggcacatcttgacaggcaaggaggtggcagtgaagattattgacaagacccagctaaattcttcgagcttacagaagctgtttcgggaagttagaataatgaaggtgctgaaccacccaaacatagtaaagctttttgaggtgatagaaacagaaaagacactttatctcgtcatggaatacgctagcggcggcgaggtgttcgattacttggtggctcatggccggatgaaggagaaggaggcgagagcgaagtttcgacagattgtcagcgccgtccagtattgtcaccaaaagttcatagtccacagggatcttaaggccgaaaatctgctgctggacgctgatatgaacatcaaaatagcagactttggctttagcaacgagttcacatttgggaacaaacttgataccttttgcggttcccccccatacgctgctcccgaattgttccaggggaagaaatatgacggccccgaggtggatgtctggtcgctcggcgtcattctgtacaccctggtatctgggtctcttcctttcgacggccagaacttaaaagaactgagggaaagagtgctccgtggcaaatataggatccccttctacatgagtactgactgcgagaatctacttaagaagttcctgatactcaaccccagcaaacgaggtacactggagcaaattatgaaagaccgctggatgaatgttgggcacgaggatgacgaactgaagccctatgtcgaacccttgcccgattacaaggaccctcggagaactgaactgatggtttccatgggatatacgagagaggagatccaggattctctcgtcggacagagatataatgaggtgatggctacctacctgctgctgggctacaaatctagtgagctcgagggggacaccattactctgaagcctaggcccagtgcggatcttaccaattcgtcagcacccagcccttcacacaaggttcagaggtctgtgtccgcaaatcctaaacagagacggttctcagaccaggccgcgggacctgctataccgacgagtaactcttacagcaagaagacacagtctaataatgccgagaacaaaaggcccgaagaggaccgcgagtctggacggaaggctagctcaactgcaaaggtcccagcaagtcccctccccggactggaacggaagaaaacaactccaacccctagcaccaactcagttttgtctacgtctacaaacagaagccgcaactcccccttactggaacgggcatccctgggacaggcatccattcagaacggaaaagattccctgaccatgcccggttccagagcgtctactgcaagcgcttcagctgccgtgtctgcggcccgcccccgtcaacatcaaaagagcatgtctgccagtgtgcatcccaacaaggcctccgggctgcctcccaccgaatccaattgcgaagtccctaggccatcgactgctccccaacgggtccccgtggcaagcccaagtgcacacaatatcagtagctctggcggtgcgccagaccgtaccaactttccccgcggggtgtcctcgaggtcaacattccacgccggacagttgcggcaggtgcgtgaccagcagaatctcccctatggagtgacacccgccagccccagcggccatagccaaggccggcgtggtgcctccggctcaattttcagcaaatttacaagcaaattcgtgcggcgcaatctgtcttttagattcgcccgacgcaacttgaacgagcctgaatcaaaagaccgggtagagacgcttaggccccacgttgttggctcaggtggtaatgacaaagaaaaagaggagtttcgagaagcaaagcctaggtcactacgattcacctggtccatgaagactaccagtagtatggagccaaacgagatgatgcgcgaaatccgcaaggttctggacgccaactcttgccagtcggagcttcatgaaaaatatatgctcctatgcatgcacgggacaccggggcacgaggacttcgtccagtgggagatggaggtctgtaaattgcctcggctctctcttaatggggtacgcttcaagcgaatcagtggcacaagtatggcattcaaaaatatcgcaagtaaaatagcgaatgaactgaagctttag

SEQ ID NO: 194202 - DNA, 2076 bp, synthetic construct
  misc_feature 1..2076: note = Description of Artificial Sequence: Synthetic coding sequence
  source 1..2076: mol_type = other DNA
atgatccggggccggaacagcgccaccagcgccgacgagcagccccacattgggaattatcggcttttaaagactattggcaaggggaattttgcgaaggtgaaattggcccgtcacatccttactggcaaagaagtggctgttaaaatcatcgataaaacacagctgaatagttcctctctccagaagctctttcgagaggtccggattatgaaggtactaaaccacccaaacattgtgaaactttttgaagtgattgagacggaaaagaccctttaccttgtgatggaatacgcaagcggtggcgaagtttttgattacctcgttgctcacgggcgtatgaaggagaaggaggctagggccaaatttaggcagatcgtgagtgccgtccagtactgtcatcaaaagttcattgtacaccgggatttgaaggcagaaaacctcctgctggatgccgacatgaacatcaagatcgctgacttcgggttttcgaacgagtttacattcggtaataagctcgataccttctgcgggagtccaccttatgcagctccagagttgtttcaggggaaaaaatatgatggccccgaagtggatgtttggagcctcggtgtcatcttgtataccctggtctctggatctctgcctttcgacggccaaaacttgaaagaattaagggaaagggtgctcagaggcaaatatcgtattcctttctacatgagcactgactgcgagaacctcttgaaaaagtttttaattctgaacccctccaagcgggggactctcgagcaaatcatgaaggaccgatggatgaacgttggccacgaggacgacgaattaaaaccatacgtcgagcctctgccggattacaaagatccaaggagaactgagctgatggtgtccatgggctacacacgggaagagatccaggacagccttgtagggcagagatataatgaagttatggccacatacctgttgctggggtacaagtcttctgaactagaaggagatactattaccctaaagccgagaccttccgccgacctgactaacagctcggccccatcgccgtcacataaggttcaacgcagtgtctctgctaatcccaagcaacgccgattcagcgaccaagctgggcccgccattcctacctccaattcatatagtaaaaagacacaatccaataatgcagaaaataaaagacctgaggaagacagagaatccggacggaaggcctcctccaccgccaaagtgccggcttccccactgccagggttggagcggaagaagaccactcctacaccctcaaccaattctgtcctgagcacctctaccaatcgaagccggaactctccgcttctggagcgggctagcctcggacaagcgtcaatccaaaacggaaaagactccactgctcctcaacgcgttcccgtggcaagcccttctgcccataacatctcttcaagtggcggtgccccagaccgcaccaattttccgaggggcgtgagttcaaggagcactttccatgccggacagctcagacaggtgagagatcagcagaatttaccttatggagtgacgcctgccagcccatctgggcactcccagggtcgcagaggagccagcgggtctattttttccaagtttacatccaagtttgtgcggcgcaatttaaatgagcctgaatcaaaagaccgggtcgaaacgctgagaccccacgtggttggctccgggggaaacgataaggaaaaagaagagttccgtgaagcaaagccaagatctcttcgctttacctggtctatgaagaccacgtcgagcatggaacctaacgaaatgatgcgcgaaataaggaaggttctcgacgccaattcttgccagtctgagctccatgaaaaatacatgctgttgtgtatgcacggaacacctggtcatgaggatttcgtgcagtgggagatggaagtctgcaaacttcccagactatcactgaatggagtgcggttcaagaggatatctggcactagtatggcctttaaaaatatcgcaagtaaaatagccaacgagctaaaactctag

SEQ ID NO: 194203 - DNA, 2205 bp, synthetic construct
  misc_feature 1..2205: note = Description of Artificial Sequence: Synthetic coding sequence
  source 1..2205: mol_type = other DNA
atgagcagcgcccggacccccctgcccaccctgaacgagcgggacacagagcagcccacactaggtcatctcgacagcaagccgtcctctaagagcaatatgatcagaggacgcaacagcgcaactagcgctgatgaacagccccatatcggaaattaccgcttgctgaagaccatcggaaaaggtaacttcgcaaaggttaagctagcaaggcatatcctgacgggaaaggaggtggctgtgaaaatcattgataagactcagcttaattccagtagccttcagaaattgttccgtgaggtgcgaatcatgaaagttctgaaccacccgaacatcgtgaaactgtttgaggtgattgagacggagaagacgctgtacctcgtcatggagtacgccagcggcggggaagtgtttgactacttagttgcgcacggtcgtatgaaggagaaggaggccagagcgaagtttcgacagatcgtgtccgcggtacagtattgtcaccaaaagtttatagtgcaccgggacctgaaagcagagaatctcctgctggatgccgacatgaacatcaaaattgccgatttcggttttagtaacgaattcacttttggaaacaagctggacacattctgcggcagccctccttacgctgcgcctgaactcttccagggcaaaaaatatgacggcccagaggtagatgtttggtcactaggcgtcatcctctacacactggtttctggctccctgccctttgacggacaaaacctcaaggagctgagagaacgtgttctcagggggaaatatagaatccctttctacatgagtacggattgcgagaacctcctgaagaagttcctgatactgaacccgagcaagcgtggcacacttgagcagataatgaaggatagatggatgaacgtgggacatgaggatgacgagctaaagccatacgtcgaaccactgcccgactataaggatcctcgaaggactgaactaatggtgtctatggggtacacccgcgaagagatccaagatagcttagtcggtcagcgttataacgaggtgatggcgacgtatttactgctgggctacaaatctagtgaactggagggggacacgattaccctgaaacctagacctagcgccgatctcaccaatagtagcgccccgtccccctcccataaagtccagagaagtgtctcagccaacccaaagcagaggcgattctccgaccaggccgctgggccagctatccctactagtaacagttacagtaaaaaaacccaatctaacaacgcggagaataaacgacctgaagaggaccgtgaatcaggccggaaagccagttccactgcaaaagtgccagcctctccattgcctggactggagcgaaagaagactacgcctaccccctctacaaactcagtactatctacaagcaccaatcggagcaggaactctccactgctggagagggcgtctcttggccaggcttccattcagaatgggaaggacagcaccgctccccagagggtgcccgtggctagtcctagcgcacacaacatttcaagcagcggaggcgcccccgatcgaacaaatttccctagaggggtgagcagcagatcgacgttccatgccgggcagctgagacaggtgagggatcagcagaacttaccatatggggtgaccccagctagtccttctggacacagtcaaggaaggaggggtgcctctggctccatattttctaaattcacgagtaaattcgttaggcgaaacttgagtttccgttttgctagacgcaatttgaatgagcccgaatcaaaggacagggttgaaacattgaggccccacgttgttggttctggcgggaatgataaagagaaggaggaatttcgggaagctaaaccaagatcgttacggttcacctggtcaatgaagactacaagcagtatggagccaaatgaaatgatgagagagatacggaaagtgctggacgccaatagctgtcagagcgagctccatgaaaaatacatgcttctctgcatgcacggtacgcccggtcacgaagacttcgtacagtgggagatggaggtttgtaagttaccccgccttagtcttaacggggtgaggttcaagcggatcagtggaacctcaatggccttcaaaaacatcgcaagcaagatcgccaacgagctgaagctgtag

SEQ ID NO: 194204 - DNA, 2343 bp, synthetic construct
  misc_feature 1..2343: note = Description of Artificial Sequence: Synthetic coding sequence
  source 1..2343: mol_type = other DNA
atgagcagcgcccggacccccctgcccaccctgaacgagcgggacacagagcagccaacactcggacacctcgattctaaaccctcatctaagtccaatatgattcgcgggcgcaactccgccaccagtgccgacgagcagcctcatatcggcaactataggttgctcaagacgattggcaaggggaactttgcaaaggtgaagcttgcacgacacatcttaactggtaaagaggtggccgtgaagattattgacaagacacagctcaattcatcatcgttgcagaaactgtttcgggaagttaggatcatgaaggttctgaaccacccaaatatcgtcaagcttttcgaagtgattgagacagaaaaaacactttacctggtgatggaatatgcctcaggaggcgaagtgtttgattacttggttgcacacggcagaatgaaggagaaggaggcacgtgccaaatttaggcaaattgtaagcgccgtgcaatattgtcaccaaaagtttatcgtccatagagatctcaaagccgagaatctgctcctggatgccgatatgaatatcaagatcgccgactttggcttctccaatgaatttacctttggcaataagcttgacaccttctgtgggtccccaccatatgccgccccagaactgtttcagggaaaaaagtatgacggccccgaagtggatgtttggtcgcttggggtgatcctgtacaccctcgtgtctggcagccttcccttcgacggccagaatcttaaggagctgagagagcgcgtgctcagggggaagtatcgcatcccgttctatatgagcacagattgcgagaacctacttaagaaatttctgattctgaatcccagcaagagaggaaccctggaacagatcatgaaggatagatggatgaatgtcggtcatgaggacgatgaactgaaaccttatgtggagcccctgcctgattacaaagacccacgccgcactgaattgatggttagcatgggatacacacgcgaggagatccaggactcactggtcggccagagatataatgaagttatggcaacatatctgctattgggctacaagagctctgaactggaaggggatacaataacactaaagccacgcccatccgccgacctgaccaacagttccgctccctcaccaagccataaagttcaaaggtcagtgtctgccaatcccaagcagagacgctttagcgaccaggccggtcctgccatccccacctcaaacagctattctaaaaaaacacaatctaacaacgccgagaataaaagacctgaggaggatcgcgagtctggtcgaaaagcttcctccacagccaaggtgcctgcgagccccctgcctggccttgagcgcaagaagacgactcccacacctagtacgaactctgtcctgtccactagcacaaacaggagtcggaattctcccctgctcgaacgagcctccctggggcaagccagcattcagaatgggaaagattcactgactatgcctgggtcaagagcctccaccgcgtcagcctccgccgcagtatcggccgccaggcctcgtcagcatcagaagtctatgtcagcaagcgtgcacccgaacaaggccagtggcctgccaccaacagagagcaattgtgaggtcccacggcctcgtcaggtgacagctcctcagcgggtgcctgttgcctctccttcggcgcacaacatctcttccagcggtggggcgcccgacaggaccaacttcccaagaggcgtctcaagtagatcgaccttccatgctgggcagctgagacaggttcgcgatcaacagaatctgccatatggcgttacaccggcctctccaagtgggcattcccagggtaggaggggggctagcggcagcatcttttctaagtttacaagcaaatttgtgaggcgcaacctcaacgaaccagaatccaaagatcgggtggagaccttgcggcctcatgtcgtgggttctggaggcaacgataaggaaaaggaagaatttagagaggccaaaccacgtagcttgcggtttacttggagtatgaagacaacctcctcgatggagcccaacgaaatgatgcgcgaaatcagaaaggtgctcgatgctaattcatgtcaaagcgagctgcacgagaaatatatgcttctctgtatgcatggaactcctggccacgaggactttgtgcaatgggagatggaggtctgcaaactgccgagactgtctttgaacggggtacggtttaaacgcattagtggcacgtcaatggcctttaagaacatagcttccaagattgctaacgaactaaaattatag

SEQ ID NO: 194205 - DNA, 126 bp, synthetic construct
  misc_feature 1..126: note = Description of Artificial Sequence: Synthetic coding sequence
  source 1..126: mol_type = other DNA
atgagcagcgcccggacccccctgcccaccctgaacgagcgggacactgaacagccaactttgggtcatctggactccaaaccctccagcaaatctaacatgatacggggacggaatagtgcttag

SEQ ID NO: 194206 - DNA, 2175 bp, synthetic construct
  misc_feature 1..2175: note = Description of Artificial Sequence: Synthetic coding sequence
  source 1..2175: mol_type = other DNA
atgagcagcgcccggacccccctgcccaccctgaacgagcgggacaccgaacagccgacactgggccatttagattccaagccgagttctaaatcgaatatgatacgtggccgtaattctgccacaagtgctgacgaacaacctcacatcggcaactacagattactgaagaccataggaaaaggcaactttgcaaaggttaagctcgcgaggcacatcctgacgggcaaggaggtggccgttaaaatcatagacaaaacccagctcaatagcagctcactccagaaattatttcgcgaagtcaggattatgaaagtattaaatcacccaaatattgtgaagctctttgaggtaatcgagactgagaaaacactgtacttggtcatggagtacgcctctgggggtgaagtatttgattaccttgtggcacacgggcgcatgaaggagaaggaagctcgtgccaagttcagacagattgtatccgccgtacagtattgccaccagaaattcatcgtccaccgggatctgaaggccgagaatctccttctagacgccgacatgaatataaaaatcgccgacttcggcttttcaaatgaattcacattcggcaacaagctggatacattctgtggatccccgccctatgccgcccccgaactgtttcaggggaaaaaatacgacggccccgaagtggatgtgtggagtctcggggtcatcctgtatactctggtcagcggatcattaccgttcgacggccaaaacctcaaagaacttagagagagggtcctccgggggaagtacagaatcccattttacatgtccactgattgtgaaaacctgctcaagaagtttctgatcttaaatccaagtaaaagaggaaccctggaacagatcatgaaagataggtggatgaatgtcgggcacgaagatgatgagctcaagccctacgtggaaccactacctgattataaggatccacgccggacagaattaatggtaagtatgggatacactcgagaggagatccaagacagtttggtgggacagcggtacaacgaagtcatggcaacatatctcctcctgggctataagagttccgagctagagggcgacaccataacattgaaacctcggccaagcgcagatctcacgaacagttcagcaccatcaccgtcccacaaagttcagagaagcgtctctgcaaacccaaaacagcggaggtttagcgatcaggccggcccagcaataccaaccagtaactcctatagcaagaaaacccagtctaataatgccgaaaacaaaagacccgaggaagaccgagagtccggcaggaaagcctccagcacagcaaaggtgccagcttctccgctgccggggctcgaaagaaagaagacaacccctactccctctactaattccgtgctttccaccagcacaaaccgttctaggaactcaccactgctggagcgggcttccctggggcaggccagtatccaaaacgggaaagactctaccgcaccccagcgggtccctgtggcttctccctctgctcataatatttcctcaagcgggggggcgccagacaggaccaacttccctcgcggcgtttccagccggagtacgttccacgccggacaattgcgccaagttagggaccagcagaatctcccctacggggtcaccccggcctccccctccggtcatagtcagggccgccggggtgccagcgggtcaatctttagtaaattcacctctaaattcgtgcgcaggaaccttaacgagcctgagagcaaggaccgagtagagactctgaggcctcatgtagtgggatccggcggcaatgacaaggagaaagaggagtttagagaagccaagcccagaagcctacgtttcacttggagcatgaagactacatcttccatggagccgaacgaaatgatgagagagatcagaaaagtcttggatgcaaactcatgccagtcagaactgcatgagaaatacatgctcctatgcatgcatgggacacctgggcacgaggactttgttcagtgggaaatggaggtttgtaagctccctaggctttccttgaatggggtccgcttcaaacgaatttctggaaccagtatggccttcaagaatatcgcttctaaaatcgctaacgagttgaagttatag

SEQ ID NO: 194207 - DNA, 186 bp, synthetic construct
  misc_feature 1..186: note = Description of Artificial Sequence: Synthetic coding sequence
  source 1..186: mol_type = other DNA
atggaggtggccggcagccccttccccttcctgcagagcgtggcctgcctgctgaccttggctcacatcccagccgtgggtaatatcctgcagcacaggcgaagaggggctgggccaacactggggcatcttgacagtaaacctagctcgaaatcaaatatgatccgggggcgaaattctgcttag

SEQ ID NO: 194208 - DNA, 339 bp, synthetic construct
  misc_feature 1..339: note = Description of Artificial Sequence: Synthetic coding sequence
  source 1..339: mol_type = other DNA
atgatccggggccggaacagcgccaccagcgccgacgagcagccccatattgggaactatcgcctgctgaagacgatcggaaaaggcaatttcgcgaaggtcaagctcgcacgccatatcctcacggggaaagaggtcgctgtaaaaataatcgataaaacccagcttaactccagctcccttcaaaagctttttcgagaggtccgcatcatgaaagttctgaaccacccaaacattgtgaaactgttcgaggttatcgagactgaaaaaactttgtacctggtgatggagtatgcgtcaggaggggaggtctttgattatctggtcgcccacggctag

SEQ ID NO: 194209 - DNA, 486 bp, synthetic construct
  misc_feature 1..486: note = Description of Artificial Sequence: Synthetic coding sequence
  source 1..486: mol_type = other DNA
atgatccggggccggaacagcgccaccagcgccgacgagcagccccacataggcaactaccggttgctcaaaaccattggaaagggcaatttcgccaaggtcaaactcgccaggcacatccttacgggtaaagaagtggccgttaagatcatcgacaaaacccaactcaactcctctagcctgcaaaaactgttccgggaggtgcggatcatgaaagtcctgaaccaccccaatatagtaaaactgttcgaagttattgagactgaaaaaacgttgtacctcgtgatggagtacgctagtgggggggaggtttttgattacctggtagctcatggacgaatgaaagaaaaggaggcaagggccaaatttcgccagatcgtctcagccgtgcagtactgccatcagaaatttattgtgcatagggatctgaaggcagaaaacctgctgctcgatgccgacatgaacataaagattgcggatttctag

SEQ ID NO: 194210 - DNA, 276 bp, synthetic construct
  misc_feature 1..276: note = Description of Artificial Sequence: Synthetic coding sequence
  source 1..276: mol_type = other DNA
atgggcggccagcggaacaccagcgtgggcaacatcgtgcagcggtggcgcgaccatgtggtatgccagaaggcaggcgtgatttattccggccgcaaggcccaggaacatgggactgggcgaacagacttcactcctgcccagcggctcatgatgccaacactgggacacttagactctaagccaagctcaaagagcaacatgatcaggggccgcaacagcgctacgtcggccgatgaacaacctcatatcggcaactaccgactgctcaagtag

SEQ ID NO: 194211 - DNA, 2238 bp, synthetic construct
  misc_feature 1..2238: note = Description of Artificial Sequence: Synthetic coding sequence
  source 1..2238: mol_type = other DNA
atgatccggggccggaacagcgccaccagcgccgacgagcagccccacatagggaattatcgcttgttaaagacgatcggcaaggggaatttcgctaaggtgaaactcgcaaggcacattttaaccggcaaggaggtggctgtcaaaattattgacaaaactcagctgaattccagtagccttcagaagctgttccgggaagtaaggattatgaaagtgctgaaccaccccaacattgtgaagctgttcgaggtgattgagactgaaaagactctgtatctggtcatggagtacgcttccgggggggaagttttcgattacctggtggcccacggtcggatgaaggagaaagaagcccgggccaagtttcggcagatcgtgagtgccgtccagtattgccaccaaaaatttattgtgcatagggatttgaaagccgaaaatttgctgttggatgccgatatgaatatcaaaatcgctgacttcgggttctccaatgaattcaccttcggtaataagctcgacacgttctgtgggtcaccgccctacgctgcgcctgaactgttccagggtaagaaatatgacgggccggaggtggatgtgtggagtctcggcgtgattctgtacactctggtttctgggagtctccccttcgacgggcagaatttgaaggagctcagagagagggtgctgaggggaaagtaccggattcctttttacatgtccactgactgcgagaatctgctcaaaaagttcttaatcctgaaccctagcaaacggggaacactggaacaaattatgaaagacaggtggatgaacgtgggccacgaggacgatgaacttaaaccctacgtggaaccccttcccgattataaagatcctaggaggacagagctgatggtgtctatgggttacaccagggaggaaattcaggattcacttgtgggacagaggtataatgaagtcatggccacatatcttctattaggctacaagtcctccgagctcgagggcgacaccatcaccctaaaaccaagaccttcagccgacttaacaaacagcagtgcccccagcccctcacataaggtccagcgctccgtgagcgccaatcctaaacagcggaggttcagtgaccaggccggccctgccatcccaactagcaatagttatagtaagaaaactcagagcaacaatgccgagaataagcggccagaagaggacagagagtctggtagaaaagcctcctccacagccaaagtgccagcatctccgctgcctgggctcgagagaaagaaaaccactcctactccatccacgaattccgtgctctccacctctactaacagaagccgcaactcccccctgcttgaaagggcttctttagggcaggcttccatccagaatgggaaggactcccttaccatgccagggtctcgcgcctccaccgcaagcgcctccgctgccgtttctgcagcgcgaccgagacagcaccaaaagtcaatgtccgcctccgtacatcctaataaggcctcgggcctcccgcctaccgaaagcaactgtgaagtgccgcggccatcgactgctccacaacgagtaccagtggcctcaccatcagcccacaacatttcctcctcagggggcgcgccagataggacaaatttcccaaggggagtcagtagtagatcgacctttcacgctggacagttacgccaagtgcgtgatcagcagaacctgccctatggcgtaaccccagcctcaccaagcgggcattcacagggccggaggggagccagtggcagcattttcagcaaatttacctctaaatttgttcgtcggaacttgaatgagccagaatctaaggaccgagtggagacactgcgccctcatgtggtcgggtccggcggcaacgacaaggagaaggaagaattcagagaggccaagcctcgtagtctgaggtttacatggtcaatgaaaactacatcatccatggagcctaacgagatgatgcgcgaaatcagaaaagtgctcgacgcgaatagctgccagagtgaattgcatgagaagtacatgctgctatgcatgcacgggactcctggacacgaggacttcgtgcaatgggaaatggaggtgtgcaagctgccccggctttcccttaatggggttcgttttaagagaatttctgggacgtcaatggcatttaagaacatcgccagtaaaattgccaatgaattaaagttgtag

SEQ ID NO: 194212 - DNA, 4128 bp, synthetic construct
  misc_feature 1..4128: note = Description of Artificial Sequence: Synthetic coding sequence
  source 1..4128: mol_type = other DNA
atggagggcgaccgggtggccggccggcccgtgctgagcagcctgccagtgctactgttgttgcctctgctgatgctgcgtgccgctgcacttcaccccgatgagctgtttccacatggggagtcatggggggatcagctccttcaggagggggacgatgagagctcagctgtggtcaagctggcgaatcctctccatttctatgaggcaagattctctaacctctacgtaggaacaaacggtattatctctacacaggatttcccaagagagacacagtatgtcgattatgacttccctacagactttcccgcaattgcccccttcctggccgatatcgacacctcccacggccgtgggcgggttttgtaccgcgaggatacctctccagcggtgctggggttggccgccaggtacgtccgagcagggtttccaaggtctgcacgctttacaccaacccatgcattcctggcaacctgggagcaggtaggagcatatgaggaggtcaaaagaggcgccctacctagtggggaactcaacacttttcaggctgttttggcgtcggacgggtctgacagctatgcgctgtttttatacccggctaatggcctgcaatttctagggacccggccgaaggagagctataacgttcagctccagctcccagcacgcgtaggattctgcagaggagaagctgacgacctaaagagtgaagggccttacttttcactaacaagcactgaacagtcagtgaagaacttgtaccagctgtctaatctgggaatccccggtgtctgggcgttccacatcggttccactagcccactagacaacgtccgacctgctgcagtgggagacctctcagctgcccatagctctgtcccccttggccgcagcttctcacacgccacagccctggaaagcgactacaatgaagacaatcttgattattatgatgtgaatgaagaagaagctgaatatctccctggcgagccagaggaggctttgaacgggcattcctctattgatgtgagctttcaaagtaaggtggacacaaagcccttggaagagtccagcactttggatccacatactaaagagggcaccagtctgggcgaggtggggggaccagatcttaagggccaggtggagccctgggacgaaagggaaacacggtctcccgcaccccctgaagtggacagggacagtctggcgccaagttgggaaacgccacctccctatcccgaaaatggatcaattcagccttaccccgacggggggccagtcccaagcgagatggatgtgcccccggcccacccggaagaagagattgtcctgagaagctatccagcctcaggtcatactaccccgctgagccgggggacctacgaagtcggcctggaggataatattggttcaaacacagaggtgttcacctacaacgctgctaataaggaaacctgcgagcataaccatcgtcagtgttctaggcatgctttttgcacagattatgccacaggcttttgttgtcactgccagagcaaattctacggaaatggaaaacattgcctgcctgagggggctcctcatcgtgttaacggcaaggttagtggtcacttgcatgtgggccacactccggtccattttacggacgtggacctgcacgcctacatcgtcggtaacgatggtcgggcttacaccgccatttctcacatcccccagccagcggctcaggcgttactccctctcaccccaattggcggactgttcgggtggctctttgctttggaaaagccagggagtgagaacgggttcagccttgcaggagccgcctttactcatgatatggaagtcacattctacccaggtgaggagacagttcgaattacacaaacagccgaaggtctcgacccagaaaattacctgagcatcaagacaaatatacagggccaggtcccgtacgttagcgcgaattttactgcacacatttctccatataaggaactgtaccactacagtgatagcactgtgacatccacgtcttcccgggattactctttgacattcggagccatcaaccagacgtggtcttacaggattcatcagaacattacttaccaggtgtgcagacacgctccaagacacccgagtttccctacaacccaacagcttaatgtggacagagttttcgccctttataatgatgaggagcgggtgttacgctttgcagtgaccaatcagattgggcccgtaaaggaagattctgacccaacacctggaaacccatgctacgatggatctcacatgtgtgacaccaccgctaggtgccacccagggactggagttgactatacttgtgaatgcgcctcaggttaccagggagacggcaggaactgcgtcgacgagaatgaatgtgctaccgggtttcaccgatgcggtcccaattctgtttgtataaaccttcccggcagttacagatgcgagtgtagatccggttatgagttcgccgacgaccgccacacatgcatcctgatcaccccacccgcgaatccctgtgaagacggatctcatacttgtgctccagctgggcaggcgagatgcgtccatcatggtgggagtactttctcttgcgcatgcctcccaggctacgcgggagatggtcaccaatgcacagacgtggacgaatgcagcgagaataggtgtcacccggccgcgacttgttacaatactcccggtagcttctcgtgtcgctgccagcctggttattatggtgatggctttcaatgcatcccagactcaacctcatccttgaccccctgcgagcagcagcagagacatgctcaggcacagtacgcctatccaggtgctcggtttcacatcccacaatgcgatgagcagggcaattttctacccttgcagtgtcatggctctactggattctgctggtgtgttgacccagacggacacgaggtgcctggaacccagacaccaccagggagcacacccccacattgcggaccatcacctgaaccaacgcaacggcccccaactatttgcgagagatggcgggaaaacttgctggagcactacggggggacaccccgagatgaccagtatgtcccccagtgcgacgacctggggcattttatcccactgcaatgtcacggaaagtccgacttttgctggtgtgtcgataaggacggtcgcgaggtgcaaggaacacggagtcagcccggaacgacacctgcttgtatcccaacagttgccccaccaatggtgcgccctaccccgcgccccgacgtgacacccccatctgtagggacctttctgttgtacactcaggggcagcagatcggttatctgccactaaatggcaccaggttacagaaagacgctgctaagaccctactctcacttcacgggagtattatcgttggcatagactatgattgtcgagaaaggatggtctattggactgatgtcgcggggcgcacaatcagcagagcaggcctggaactgggcgctgagcccgaaactatcgttaattcaggccttatctcgccggaggggctggcaatcgatcacatccgacgtactatgtactggaccgactcagtgttggacaagatcgagtctgccctgctggatggatccgaacggaaagttctgttttacactgacctggtaaaccccagagccattgccgtggaccccatccggggtaacttatattggaccgactggaaccgggaggccccaaaaatcgagacttcaagtctcgatggtgaaaatcgtagaatcttaatcaacacagatatcggtttgcctaatggactgacgttcgaccctttcagcaagttgctgtgttgggcagatgctggcactaagaagttagagtgcactttgccagatgggacaggcagacgggtgattcagaacaacctgaaatatccgttttctatagtaagctatgctgaccatttttaccatacagattggagaagggacggagtcgtttctgtaaacaaacacagtggccagtttacagacgagtacttgcctgaacagcgcagtcacttgtatgggatcacagcggtgtatccctactgccccacagggagaaagtag

SEQ ID NO: 194213 - DNA, 2190 bp, synthetic construct
  misc_feature 1..2190: note = Description of Artificial Sequence: Synthetic coding sequence
  source 1..2190: mol_type = other DNA
atgagcacccggacccccctgcccaccgtgaacgagcgggacaccgaaaatcacacaagccatggtgacggtaggcaagaagtcacttctagaactagcaggagcggtgctaggtgtagaaattctatagccagctgcgctgatgaacaacctcatattggaaactacagactgctaaagacgattggcaaggggaactttgcaaaagtgaagttagcccgccatatcctgacaggccgagaagtcgctataaagattattgacaaaacccagctcaatccaacgtctctgcagaagctgttccgagaggtgaggatcatgaaaatcctcaatcatcctaacattgtcaaactgtttgaagtaatagagaccgagaaaactctttacctgattatggagtatgcctctggaggcgaagtgtttgattatcttgtggctcatggccgcatgaaggagaaagaggctcgctccaagtttcgacagattgtaagcgccgtgcagtactgtcatcagaagagaattgtgcacagggatttgaaagcagaaaacctgctgctcgacgctgacatgaacatcaaaatcgctgactttggtttcagcaacgaatttaccgtgggaggaaagctggacactttttgtgggagtccaccttacgctgcccctgaacttttccagggaaagaagtacgacggccccgaagtggatgtctggagtctgggtgtgattctctacacattggtgagcgggagcctccctttcgacggccaaaatttgaaggaactgagagaacgcgttctgcgtggtaaatacagaattcccttctacatgtccacagactgcgaaaacctccttaaaagattcctagtgctgaaccctatcaagcgcggtactctggagcagatcatgaaggaccgatggatcaatgccggccacgaggaggatgagttgaagcccttcgttgagcccgagcttgacatttcggaccagaagcggatcgacattatggtgggaatgggttatagccaggaagagatccaggagtctttaagcaagatgaagtatgacgagatcacagccacctacctgctcctcggacggaaaagcagcgagctggatgcaagcgactcctcctcatcgtctaacctttctttagcgaaggtgaggccctctagtgatctaaacaacagcaccgggcagagcccccatcacaaggtgcaacggtctgttttttcttctcaaaaacagcgccgttattcggaccacgcaggcccagcaattccatctgtagtggcctatccaaagcgcagccagacaagcaccgcagacagcgaccttaaagaagatggaatttccagtcgaaaatcatctggctctgccgtcggcggcaaaggcattgctcccgcgtcgccaatgttaggcaacgcgtctaacccgaacaaagcggacatccctgagagaaaaaagtcatctaccgtcccatcatcgaacacggcctcagggggcatgaccaggagaaatacgtatgtttgcagtgagaggacaaccgcagataggcacagcgtgattcagaatggcaaagagaattctacgatccctgaccagcggactccagtagccagcactcacagcatttcatcagcggcgaccccagaccgcattaggtttccgagagggaccgccagccgctccacgtttcacgggcagccacgcgaaagacgcacagcaacctataacggcccgccggcttccccgtccctctcgcatgaagccacacccctgtcccagacaaggagtcgggggagtacaaacctgttttccaagctgacctcaaagctcaccagatctcgcaacgtgtctgccgagcagaaggatgaaaacaaagaggctaagccgaggagcttgcgctttacttggagcatgaagaccacatcgtctatggaccccggagatatgatgagagaaattagaaaggtgctggatgccaataattgcgattacgagcagagagaaagatttctgctgttttgtgtccacggggacgggcacgccgaaaacttggttcagtgggaaatggaagtgtgcaagctgccgaggctttcgctcaatggagtgagatttaagcgtatctctgggacctcaattgcgtttaaaaatatcgcctccaagatcgctaacgagttgaagctgtag

SEQ ID NO: 194214 - DNA, 1338 bp, synthetic construct
  misc_feature 1..1338: note = Description of Artificial Sequence: Synthetic coding sequence
  source 1..1338: mol_type = other DNA
atgaagtacgacgagatcaccgccacctacctgctgctgggccggaaatcttctgagttagacgctagtgactctagcagttcttctaatctgtcgctggcaaaagtgagaccatccagtgacctgaataactctaccgggcagtctccacatcataaagtgcagaggtctgtattttcgagccaaaagcagaggcggtattcagaccatgccggtcctgcaatcccttcagtggtggcctatccaaagcgctcgcagacatccacggctgattccgacctcaaggaggacgggatctccagtcgtaagtctagcgggagtgctgttggcggtaagggaatcgcccccgcttctccaatgctcggtaatgcatcaaaccccaacaaagccgatatccccgaaagaaagaagtcatccaccgtgcctagctccaacaccgcttccggcggtatgaccagacgtaacacgtacgtgtgctctgagaggacgactgcagatcgtcattctgttatacagaacggcaaagagaatagtctcacggaaatgtttgcctatgcggcatcacccgcttctgtttgcaccagtacctgtagactccggcaccaaaaaagcatgtcaatgtccgcaagtggccaccctaaaatgatgctgcctccaattgattccgagggcgacaattttaaggctattaccatccccgaccaaagaacaccagtggcctcgacccactcaatcagctcagccgcaaccccagataggattcgctttcctcgaggcactgcctcccggagcactttccacggccagcctagggagcggagaactgcgacgtacaatggtcccccagctagccctagtctctctcatgaggccactccactgtcacaaacacgctctaggggttcgacgaatctcttttccaagctcacatccaagctcacacgccgcctgcctactgagtatgagaggaatggcaggtatgaggggtcctcccgcaacgtatcggccgaacagaaggacgagaataaagaagctaagccccgttccctgcgttttacgtggtccatgaagaccacgtcctctatggaccctggcgacatgatgagagagataaggaaggtgttagatgccaacaactgcgattatgagcagcgcgagcggttcctcctattctgtgtgcatggcgatggacatgccgagaatctcgttcaatgggagatggaagtgtgcaaacttcctcgactttctctgaatggagttcgattcaagcggattagtggtaccagcatcgccttcaaaaacattgctagcaaaatcgctaacgaactcaagctgtag

SEQ ID NO: 194215 - DNA, 2259 bp, synthetic construct
  misc_feature 1..2259: note = Description of Artificial Sequence: Synthetic coding sequence
  source 1..2259: mol_type = other DNA
atgagcacccggacccccctgcccaccgtgaacgagcgggacaccgaaaaccatacatcccacggagacggacgtcaagaggtgactagcagaacctcaagatccggcgcccggtgtcgtaactcaatcgcttcttgtgctgacgagcagcctcacatcggaaactaccggctcctgaagaccattggcaagggaaattttgctaaggtgaaactggccaggcacattcttaccggcagggaggttgccattaagattattgataagacgcaactgaacccaacctccttgcaaaagcttttccgggaggtccgcatcatgaaaattctcaatcacccgaacatcgtgaagctctttgaagtgatcgagaccgagaagactttgtacctaattatggaatacgcttccggaggcgaagtgttcgattacctagttgcacatggcagaatgaaggagaaggaggcacgctcaaagttccgccagggctgccaggccggacagactatcaaggtgcaggtgtccttcgatctgctgagcctcatgttcacctttatcgtttccgctgttcaatattgccaccagaagagaattgtccatagagatttgaaggcagagaacctcctcctggacgccgacatgaatattaaaattgccgattttgggttcagtaacgaattcaccgtagggggaaagcttgataccttttgtgggagtcccccctacgctgcaccagaactgttccagggcaaaaaatatgacgggccagaagtggatgtatggtctttgggggtgatcctgtacaccctagtgagcggttcattgcccttcgacggacaaaacctgaaagagctgcgcgaacgagtcctgcggggcaagtataggattccattctacatgagcactgattgcgaaaatcttctgaaacgattcctcgtccttaacccgatcaagagaggaactctggagcaaatcatgaaagatcgctggattaatgctggacacgaagaggatgagctcaagccattcgtagagccagaattggacatcagcgaccaaaaaaggattgatattatggtgggcatgggatactcacaagaggagattcaagaaagcctatcaaagatgaagtacgacgagatcacggccacgtatctcctgttgggaaggaagtcaagcgaactcgacgcctctgacagcagtagttcgtcaaacttaagtttggccaaggtgaggccgagctctgatctgaataattccactggacagtctccgcaccacaaggtacagaggtcggtgtttagtagccagaaacagaggaggtattcagaccacgctggccccgccatcccttccgttgtagcttacccaaagcgctcacagacttcaacagccgattccgacctcaaagaagatggcattagcagcagaaaatcctcaggtagtgcagtcggtgggaaaggaattgcaccggcaagtcccatgttgggaaacgccagcaacccaaataaagcggatatcccagagaggaaaaaaagtagcacagttccatcttctaacactgctagcggaggcatgacccgtagaaatacttacgtctgctcagagcggaccacagcagatcgccactctgtcatccaaaacggcaaggagaactcgaccatccctgaccaacggacacccgtggcctccacacactcaatcagcagcgccgcaaccccggacaggattcgttttcccagaggaactgcttctcgcagcacctttcatggccaacccagggaacgaaggacagccacatacaatgggcctcctgcaagtccgtctctctctcacgaagccactcctctctctcagacaagatctcgcgggtcaacaaatttgttcagcaagctaactagtaaactgactagaagtcgaaatgtctctgctgaacagaaggacgagaacaaggaagcaaagccacgtagccttaggttcacatggagcatgaaaactacttccagcatggacccaggtgatatgatgcgggaaatacggaaggtccttgatgcaaacaactgtgactacgagcagagagagcgctttctgctgttctgcgtacacggggatggtcacgcagagaatcttgtgcagtgggaaatggaggtgtgcaagctgccgcgcctaagtctgaacggggtaagattcaagcgcatttccgggacttcaatcgcttttaagaacattgcaagcaagattgcaaacgagttgaagctgtag

SEQ ID NO: 194216 - DNA, 2262 bp, synthetic construct
  misc_feature 1..2262: note = Description of Artificial Sequence: Synthetic coding sequence
  source 1..2262: mol_type = other DNA
atgagcacccggacccccctgcccaccgtgaacgagcgggacaccgagaaccatacctctcatggagatgggcggcaagaggtaacgtcccgaactagtcgttcgggagcccgctgcagaaactctattgcatcctgtgctgacgagcagcctcacatcggcaattatcgcttgctgaagacgatagggaaagggaacttcgcgaaggtgaagctcgcacgtcacatcctgactggccgggaagtggcaatcaaaatcattgacaaaactcagttaaaccccacctctttgcaaaagctgtttagggaggtgaggattatgaaaatactgaatcatcctaatattgtcaagctgttcgaggtgatcgagacggagaaaacactctatcttatcatggagtatgcatctgggggagaggtcttcgactatcttgttgcccacggtcgcatgaaagaaaaggaggcccggtctaagtttaggcagattgtatccgcagtccaatactgccaccaaaaacggattgtgcatcgtgatttgaaagcagaaaaccttctgctggacgctgatatgaatattaagatcgccgacttcggtttctctaatgaatttacagtcgggggtaagcttgatacattctgcgggtcacctccctacgctgcccccgagctgttccagggcaagaaatatgacgggcccgaggtggatgtgtggtctctgggagtaattttatatacactggttagcggcagtctgccgttcgacggacagaatttaaaagagcttcgagagcgcgtcttgcggggcaagtaccggattcccttttatatgtcgactgattgcgaaaacctgctgaagagattcctcgtgctgaatccaattaagcgtggaacattggagcagataatgaaggacaggtggattaatgccggtcatgaggaggacgagctgaagccgttcgtggaaccggagctagacatttcagaccagaaacgtatcgacatcatggtgggtatgggatattcacaggaagagatccaggagtccctgagtaagatgaagtacgacgaaataacagcaacatatctgctactgggtcggaagagcagcgagctcgatgcttccgatagctcatctagctcgaatctgagcctcgccaaggtccgaccaagttccgatctcaacaactccaccggccaatcacctcatcacaaagttcagagatctgtgttctcatctcaaaagcagcgcaggtatagtgatcatgccggcccagcaataccgagcgtagtggcctatcctaagcggtcccagacttcaaccgctgactcagatctcaaagaagacggaatctccagccgaaagagtagcggaagcgcggttggcgggaaaggaatcgcgcctgcctctccgatgctggggaacgcatctaatcctaataaggctgacattcctgaaagaaagaagtcaagcacggtgccaagctcaaatacagctagcggaggcatgacccgccgaaacacctacgtgtgtagtgaacgcaccacggccgataggcattctgttatccagaacgggaaagagaatagcacaatccccgaccagcggacccctgtcgcatcaacacactccatcagttctgccgctaccccagatcggattcgattcccacgaggaacagcatcaagaagcactttccatgggcaacctcgggagcggcgaactgctacctacaacggtccgcctgcttctccatccttgtcacacgaggccaccccactatcacagaccagaagcagagggtctacaaatctatttagtaagttgacatcaaaattgactcgcagaaacatgtcatttcggtttattaagcgcctgcccacagagtatgaacgaaacggccggtatgagggatcatctcgtaacgtgagcgccgagcaaaaggatgagaacaaggaggctaagcccagatcgctacggttcacttggagcatgaaaacaactagcagtatggatcctggtgatatgatgagagagatcaggaaagttctcgacgcaaacaactgtgactatgagcaacgggaacgcttcttgcttttttgtgtgcatggagacggacacgccgaaaatctcgttcagtgggagatggaggtgtgtaagctgccccgtctcagccttaacggagtgcgtttcaagaggatctccggcacaagcatcgcctttaagaacatcgcctccaagatcgcgaacgagcttaagctgtag

SEQ ID NO: 194217 - DNA, 1980 bp, synthetic construct
  misc_feature 1..1980: note = Description of Artificial Sequence: Synthetic coding sequence
  source 1..1980: mol_type = other DNA
atgagcacccggacccccctgcccaccgtgaacgagcgggacaccgagaaccatacgagtcacggagacggtcgacaggaagtcacttctagaacttcgagatccggcgcgcggtgtaggaactcaattgccagctgcgccgacgagcaacctcacatagggaactataggctgctgaagactatcggcaaaggaaattttgcgaaagtaaagctcgcgcgtcatatcttgaccggaagagaggtcgccattaaaatcatcgacaagacccaactgaatcctaccagtcttcaaaagttatttcgggaagtcagaatcatgaaaatcctcaatcaccctaatatcgttaagctgttcgaagtgatagaaaccgagaaaacgttgtatctcatcatggagtacgccagcggaggcgaggtgttcgattacctggtggcacacggcagaatgaaagagaaggaggcccgctcaaaattcagacaaatcgtatctgccgttcagtactgtcaccagaagcggatcgtccaccgggatcttaaagagctaagggagcgggttctgcgaggaaagtataggatccccttctatatgtctaccgactgtgagaacctgctcaagcgctttttagttttaaatcctattaagcggggtaccctcgagcagatcatgaaggatcgctggatcaatgcaggtcatgaggaggacgagctgaaaccattcgtcgaaccagaattagatatatccgaccagaaacgcatcgacatcatggttgggatgggctacagccaggaggaaatacaggagtcactgtcaaaaatgaagtacgacgagatcacagctacttatctgctcctaggtagaaaatcttccgaactagatgccagcgattccagctcttcgagtaatttatccctggctaaggtgaggccctcgtccgaccttaacaactcaaccggacagagccctcatcataaggtgcagaggagcgtgttttctagccaaaagcagcgcagatacagtgatcacgcgggacctgcaatacctagcgtagtggcctatcctaaacgtagccaaaccagtacggccgactccgacctcaaagaagacggcatatcctctagaaagagcagtggaagcgccgttggcggtaagggaatcgcgccggcctctcccatgctggggaacgcgagtaatccaaacaaggctgacatccccgaacggaaaaagagtagtacagtgccttccagcaacactgctagcggaggtatgacccgccgcaatacttacgtgtgctctgagcggaccaccgcggaccggcactcggttattcagaacggcaaagagaacagtacaattccagatcagcgcacccctgtcgcttctacacactctattagcagcgctgccacaccagatagaattcgcttcccacgcggaactgcaagcagatctaccttccacgggcagccacgggagaggcgcacagccacctacaatgggccgcccgcctcacccagtctttcacacgaagcaactccactgtctcagactcgttcccgaggatctaccaatttattcagcaagctgaccagcaaactcaccagaaggaacatgtcgtttcgcttcattaagagccggaatgtctccgctgagcagaaggatgaaaataaggaggccaagcccaggagcctgagatttacgtggtcaatgaaaactacctccagcatggaccccggggatatgatgcgagagatcagaaaggtactcgatgccaataactgtgactatgaacaacgcgaaagattcttgttgttttgtgtgcacggcgacggtcatgccgaaaacctggtgcagtgggaaatggaagtgtgcaaactgcctagactgtcactgaatggcgtcaggtttaaaagaatttccggtacgagcattgcattcaaaaacatagctagtaagatcgcaaacgagctcaaactttag

SEQ ID NO: 194218 - DNA, 2235 bp, synthetic construct
  misc_feature 1..2235: note = Description of Artificial Sequence: Synthetic coding sequence
  source 1..2235: mol_type = other DNA
atgagcacccggacccccctgcccaccgtgaacgagcgggacaccgaaaatcacacgagccacggcgacggaagacaggaagtcacgagcagaacttcacgttccggcgctcggtgccgcaatagtatcgcctcatgtgctgacgagcagccccatatcggtaattatagactcttgaaaactattggtaagggcaacttcgcaaaagtgaagctggcaagacacattctgacgggaagggaagtggccatcaagatcattgataaaacacaattgaacccgacctctctccagaaactgttcagagaggtgcgtatcatgaagatcctgaaccatccaaacatcgtgaaactattcgaggtcattgaaaccgagaagaccctatacttgattatggagtacgccagtgggggcgaggtcttcgactatctggtcgcgcacggtagaatgaaggagaaagaagcccggagcaagttcaggcaaatcgtctctgcggtgcagtactgccaccagaagagaattgtccatcgagacttgaaggccgaaaatttgctgctggatgcggatatgaacataaaaatcgctgatttcggtttctccaacgagtttacagtcggcgggaaacttgacaccttctgcggaagccctccatacgcagcaccagagctgtttcagggaaaaaagtatgacgggccagaagtggacgtctggtctctgggagtgattttatacactttggtctccgggtctctgcctttcgacggacaaaatctgaaggagctacgtgagcgggtactccgtggaaaataccggattcctttttatatgagcacggattgtgagaacctcctgaaacggttcctcgttctgaatccaattaaaagaggcactctggaacaaattatgaaagaccggtggattaatgctggccacgaggaggatgagctgaagcctttcgttgagccagagctcgatatctctgatcagaagcggattgacattatggtgggcatgggttactcccaggaagaaatacaggaatcactttctaaaatgaaatatgatgagattaccgccacttacctactgctgggtcggaaatccagcgaactcgacgcgagtgactcctccagtagcagtaatttgagtctcgctaaggtgagaccatcaagcgacctcaacaattccaccggtcagtcccctcaccataaagtgcagaggtctgtgttctcatctcagaaacagcgcaggtattccgatcacgccggccctgctatcccaagcgttgtggcttacccaaagagatctcagactagcaccgccgactccgatctgaaggaggacggaatcagcagtaggaagtcctcaggctccgctgttggtggcaaaggaatcgcacctgcttcgcctatgctggggaatgcctctaacccgaacaaggctgacatccctgagaggaagaaaagcagtactgtcccctcttcaaacactgcgagtggcggtatgaccagacggaatacatacgtatgttctgagcggacaactgcagaccggcatagcgtgatacagaatggcaaggagaatagcacaatacctgaccaacgcactcctgtggcctccacacatagcatatctagcgctgccacccccgataggattcgcttccctcggggtaccgcctctagatctaccttccatggacagccaagggaacgacgcacagctacttacaatgggcctcctgcaagtccttcactgtctcacgaggccacaccattatctcaaaccaggtctagaggttctactaatctgttcagcaagttgacctccaagttgactagacgactgccaactgagtacgagcgcaatggcagatatgaagggtcctcacggaacgtgtcagcagagcagaaggatgaaaataaagaggccaagccacggtcgttaaggtttacatggagcatgaagactacaagtagcatggatccgggcgacatgatgcgtgagattagaaaggtgctagatgccaataactgtgactatgaacagcgggagcgattcctgttattttgcgtacacggagatggtcacgctgagaaccttgtccaatgggaaatggaggtgtgcaagctaccacgtctcagtttgaacggagtccggttcaaacgcatttcgggtacaagcatcgcatttaaaaatatcgctagtaagatcgctaacgaattaaaactctag

SEQ ID NO: 194219 - DNA, 1518 bp, synthetic construct
  misc_feature 1..1518: note = Description of Artificial Sequence: Synthetic coding sequence
  source 1..1518: mol_type = other DNA
tgagtggacgtgtggagcctgggcgtgatcctgtacaccctggtgagtggaagcctccctttcgacgggcaaaatctcaaggagttacgcgagagagtgctgcgggggaagtataggatccccttttacatgagcaccgactgtgaaaatctgctgaagagattcctcgtgctaaatcccatcaagagagggacattggaacagataatgaaggatcgatggatcaatgctggacacgaagaggacgagttaaaacccttcgtggagccagaattggatatctctgaccagaaaaggatagacattatggtgggaatgggatattcccaggaagagattcaagagtcactgagcaaaatgaaatatgacgaaatcaccgccacataccttcttctcggccgcaaatcgtccgaagttaggccctcatccgatctcaataacagcaccggtcagagtccccaccataaagtgcagcgctctgttttttccagtcagaaacagcgcaggtacagcgaccacgccggccccgccatcccaagtgtggttgcttaccccaaacgatcacagactagcaccgcagactccgacctgaaagaggacgggatctctagcagaaaatcgagcgggtcagctgtagggggtaaggggatcgctccagccagccctatgctcggcaacgcgtccaacccgaataaagccgacattccagagaggaagaagtccagcaccgtgccttcaagtaatacagccagcggaggtatgacacgccgtaacacctatgtatgcagcgagcgaaccacagcggaccggcacagcgtgatccagaatgggaaggaaaactctacgatccctgatcaaaggactcccgtggcaagtactcactcaattagctccgcagcaacaccagaccggatccggttccccagagggacggctagtcgcagtacctttcacgggcagccccgggagcggagaacggcaacctacaatggtcccccagctagtccctccctgtcccatgaggccactcccttgagccagacacgctccaggggttcaaccaatttgttctcgaagctgacaagtaaactcactaggaggaatatgtcctttaggtttatcaaaaggctccccaccgaatacgagcggaacggaagatatgaaggcagctcacgcaacgtctctgccgagcaaaaggacgaaaacaaggaggccaagcccaggtccttgcgctttacctggtcgatgaagaccactagcagcatggacccgggcgatatgatgagggaaattaggaaggtcctggatgcaaataactgtgattacgagcagcgggagcggttcctcctattttgtgttcacggcgatggacacgccgagaatctggtccagtgggagatggaagtatgtaaactaccaaggctgtccctcaatggagtgcggtttaaacgcattagtggtacgagcattgctttcaagaacattgctagcaaaattgcaaacgaacttaaactctag

SEQ ID NO: 194220 - DNA, 2259 bp, synthetic construct
  misc_feature 1..2259: note = Description of Artificial Sequence: Synthetic coding sequence
  source 1..2259: mol_type = other DNA
atgagcagccggaccgtgctggcccccggcaacgaccggaacagcgatacacatggcactctcggttcaggccgcagcagtgacaaagggccttcatggagttctaggagcttaggggccagatgccgtaactctatcgcatcctgtcctgaggaacaaccccacgtaggtaattacaggcttctccgcactatcgggaagggcaacttcgccaaggtgaaactcgcgcggcacatcctcacaggtcgggaggtggcaatcaaaataatagataagacacaactgaatcctagcagcctgcaaaagctgtttcgggaagtgagaatcatgaaaggcctcaatcaccctaacatagtcaaactatttgaggtcatagaaaccgagaagactctgtacttagttatggagtatgcttccgccggcgaggtctttgactacctcgtgagtcacggtcggatgaaggagaaagaggcaagggcgaaatttcggcagatcgttagtgccgtgcactattgtcatcaaaaaaatatcgtccacagagacttaaaggccgagaatctgctgcttgatgctgaagccaacatcaaaattgccgatttcggcttctctaacgagtttaccctgggttccaaactcgatactttttgtggcagccctccatacgcagcacccgagctctttcaaggtaagaagtacgatggaccagaagttgacatttggagtctgggagtgatcctgtataccctggtatcagggagcctgcccttcgatggtcacaatctgaaggaactgcgggaaagggtgctgcggggtaaatatcgggtccctttctacatgagcacagactgtgagtcaatcctacgcaggtttctagtgctcaatccagctaaacgttgcacgctggaacagataatgaaggacaagtggatcaacataggctatgaaggcgaggagctgaaaccttacaccgaacctgaggaagattttggagataccaagagaattgaggtcatggtcgggatgggttacacccgcgaggagattaaagaatccctgacctcccagaagtacaatgaggtgaccgcaacatacctgctgctcggccggaaaacagaggaggggggcgaccgcggagcgccaggcctggccctagctcgagtgagggctccatctgacacaactaatgggacgagcagtagcaagggcacaagtcatagtaaaggacaacggagttcaagtagcacgtaccaccgccagcgtcggcactctgacttttgtggcccgtcccccgctcctctgcaccctaaacggtcacctacctccacaggtgaagctgaactgaaggaggagaggctccctgggcgaaaggccagctgctctacagctgggagtgggtcaagggggctgccccccagcagccctatggtgtcctccgcccataacccgaacaaggccgaaattccggaacgtcgtaaggatagcacaagcacgccaaacaatctacctccgtctatgatgacgcgccgcaatacatatgtgtgcaccgagagaccaggggctgagagaccgtccctgctgccgaacgggaaagagaactcctcaggaactcctagggtgccgccggcttctccaagctcgcattctctggccccgcccagcggcgagcgaagccgtctggcacgaggcagtacgattaggagtaccttccacggcggccaagttagggaccggcgggccggtggaggaggcggcggaggagttcagaatggacctcccgctagcccaaccctggcccatgaggcagctccactaccagcagggcggccccgacctacgaccaatctgtttacaaagctgacttcaaagcttacacggcgtgtcgccgatgagcctgaacgcataggaggccccgaggtgacctcttgccacttgccatgggaccagactgagacagcccctaggctgctccgattcccttggagcgtgaaactgacatcctccagacctcccgaagcacttatggccgccctccgccaggccactgcggccgctcggtgcaggtgcagacagccccaaccctttttgctggcttgtttacacggcggtgctggggggcccgagccgctgtcccactttgaggtagaagtctgtcaattgccccggcctggcctgcggggggtgttgttcaggagggtggcggggactgccctggcttttagaaccctcgtaactcggatatctaatgatctggaactctag

SEQ ID NO: 194221 - DNA, 1389 bp, synthetic construct
  misc_feature 1..1389: note = Description of Artificial Sequence: Synthetic coding sequence
  source 1..1389: mol_type = other DNA
atgagcagccggaccgtgctggcccccggcaacgaccggaacagcgacacacacgggacactgggctccggcaggtcgagcgataagggcccgtcttggtcatcccgcagcctgggcgctcggtgccgcaactctatcgcgtcctgccctgaggaacagccacatgttggaaattaccgacttcttcgtacaataggtaaggggaactttgctaaggtgaaactcgcccggcacattcttactggaagggaggttgctataaagattatcgataaaacacagcttaatccaagcagtttacagaagttattccgagaagtccgaataatgaaggggttgaatcaccccaatattgtgaaattatttgaagtaattgaaaccgaaaaaactttgtatctggtaatggaatacgcgagcgcaggagaaccacccactctgtccgccctgcctctctgtcacctccccctgcccctccatctcacactcaccccactgggtctgtgccccgccggcgaagtgttcgactaccttgtctcacacgggagaatgaaagagaaggaggcacgggcaaaattcagacagattgtgagcgcggtgcattactgtcatcagaagaatatcgtgcacagagacttaaaggcagagaacctccttctcgacgcagaggccaacatcaaaatagcagacttcgggttttccaatgagttcacattgggctcgaagctggatactttctgcggtagtcccccgtatgcagctcccgagctcttccagggtaagaaatacgatggcccagaggttgacatctggagtctgggcgtaatcttatatacgctcgtgagcgggagcctgcctttcgatggccacaacctcaaggagctgcgagagagagtgctgcgcgggaaatacagagtgcccttttatatgtccactgactgcgagtctattctgagaaggtttctggtcttaaaccccgccaagcggtgtaccctggagcagattatgaaggataagtggatcaacatcgggtacgagggagaagagctgaaaccgtacaccgagcccgaggaagacttcggcgacacaaagaggatcgaagtgatggtaggaatgggctataccagagaggaaatcaaagaatccctcacctcacagaagtacaacgaggtgactgctacatatctgctactcggtcgcaaaacagaaccagatgaacacggaggaggcggtgcagagggaggtgcagctgcgcgacccgagggagaactgcagcaccgaggcgagtgggagagccgggcagcaccactgcagccccatggacagcagcggccacagcctcagcagggaagagatcctcgcgccgctgaagggcaacacgagcatccttag

SEQ ID NO: 194222 - DNA, 2067 bp, synthetic construct
  misc_feature 1..2067: note = Description of Artificial Sequence: Synthetic coding sequence
  source 1..2067: mol_type = other DNA
atgagcagccggaccgtgctggcccccggcaacgaccggaacagcgacacgcatgggactctcggcagtggtcggtctagcgataaaggaccgagctggtcttcccgctctctgggcgcccgttgcagaaactcgatcgcatcatgcccagaagaacagcctcacgtggggaattatcgactgttgcgaacgattggaaagggtaactttgccaaagttaaattggcacggcatattcttacaggtcgcgaagtcgccattaagattatcgataagacacagctcaatccgtcctctctacagaaattgtttcgggaggttagaataatgaaaggtctaaaccatcctaatatagtcaagctctttgaagtgattgagactgaaaaaacgctctatctggtaatggaatacgcctctgcgggagaggtattcgattatttagtttcacacggccgcatgaaagagaaggaggctagagctaaattccgccagatagtttccgccgtgcactattgccatcaaaagaatatagtgcaccgtgatctaaaagctgagaacctcctactggacgctgaggccaacattaagattgcagacttcggcttctctaatgagtttactctcgggagcaagctcgataccttttgcgggagtccgccttacgctgcccccgagcttttccagggcaagaaatacgatggccctgaggtggatatctggtccttaggtgttatattgtacacgctcgtgagcggctctctgcccttcgacggacacaacctgaaagagctgcgcgagcgggtccttagaggaaagtacagggtgcccttctatatgagtaccgactgtgagtctattctgagacgattcctagtcctaaacccagcaaagaggtgcacccttgagcagatcatgaaagataaatggatcaatatcggctacgagggcgaggagctgaaaccttatacagagccagaggaagattttggcgacactaagaggattgaggtgatggtcggaatgggctacactagggaagagatcaaagaatccctgacatcccagaagtacaacgaggttacggccacatacctgctgctggggagaaagacagaggaaggaggcgatagaggagctccaggcctcgccctcgcaagagtccgggccccgagcgacactacgaatggcacttcctcatcaaagggaacctcccactcaaaagggcagcggtccagcagcagcacatatcatagacagaggcgtcacagcgacttctgcggcccatcacccgcacctctgcatccgaagaggagtcctactagcactggtgaagctgaactgaaagaagaacgattgcctggaaggaaggccagctgtagcacagctggcagcggcagccgtggcctccctccatcttccccaatggtgagctccgcccataatccgaataaggctgagattcccgagcgccggaaagattcaacatccacacctaataatctgcctccatcaatgatgacgcgtagaaacacctacgtgtgtactgagaggcccggggccgagcggccatcactcttaccgaatgggaaggagaactcctctgggacaccaagggtccctcctgcctcaccctcctctcactccttggcgccccctagcggggaaagaagccggctggctcgcggctccaccattcggtccaccttccacggaggccaggtgagagataggcgagccggagggggaggcggcggcggggtgcagaatggaccgcccgcctcccctaccctggcacatgaggccgccccactaccggctggcaggccgcggcctacaaccaatctcttcactaagctaacctcgaaactcaccagacgtgtgactctcgacccctctaagcgacaaaattctaatcggtgtgtatctggcgcctctctgcctcagggtagtaaaatccggtcacaaaccaatctgcgcgagagcggtgatctgcgctcacaagtggctatctatcttggtatcaagcgcaaacccccccccgggtgctccgattcacctggggtgtag

SEQ ID NO: 194223 - DNA, 240 bp, synthetic construct
  misc_feature 1..240: note = Description of Artificial Sequence: Synthetic coding sequence
  source 1..240: mol_type = other DNA
atggccgccctgcggcaggccaccgccgccgcccggtgccggtgccgccagccacagccgtttctgctggcgtgtctgcatggaggcgccggcgggcctgagccactgagtcattttgaagtcgaagtctgccagttgccaagaccaggattaagaggcgtcctcttccggcgtgtcgctggcactgcactcgcttttaggactctcgtgacaagaatctccaatgatctcgagctctag

SEQ ID NO: 194224 - DNA, 1032 bp, synthetic construct
  misc_feature 1..1032: note = Description of Artificial Sequence: Synthetic coding sequence
  source 1..1032: mol_type = other DNA
atggccgccgccaccgagctgaaccggcccagcagcggcgaccggaatcttgagcgaagatgccgaccaaatctgtctagagaggtgctgtacgagatttttaggtcccttcacacattggttgggcagctcgacctacgggacgacgtggtgaagattactatcgactggaacaagctccagagtctgagcgcctttcagcctgccctgctgttcagtgccttggagcaacacatcctgtaccttcagccattcctggcaaaactgcagtctcctataaaagaggagaatacaaccgctgtagaagaaatcggaagaacggagatgggcaataagaacgaggtcaatgacaaattcagcatcggcgatctgcaggaggaggaaaagcacaaagaatctgatttaagagacgttaagaaaactcagatccacttcgatccagaagtcgtgcaaatcaaggctggcaaagcagagattgacaggcgaatctcagccttcattgaaaggaagcaagccgaaattaacgagaataacgtgagagaattttgcaatgtgattgattgtaatcaagagaatagctgcgccagaacggacgccattttcaccccttacccaggctttaaaagtcacgtgaaggtctctagggtcgttaatacttatgggccacaaaccagacccgaaggcataccggggtccggccataagccaaacagtatgctcagggattgtggtaaccaagcagtggaagagcggctgcaaaacattgaggcacatctacgcctgcagaccggagggcctgtgccaagggacatctaccaacgaatcaaaaagctggaggacaagatcttagagttggaagggatctcaccagagtattttcagagcgtcagtttctccggcaagcggcggaaggtgcagcccccacagaattactcgttggctgaactggatgaaaaaattagcgctttaaagcaagcattgctccgcaaatctagggaggcagagagcatggccactcaccaccttccatag

SEQ ID NO: 194225 - DNA, 1035 bp, synthetic construct
  misc_feature 1..1035: note = Description of Artificial Sequence: Synthetic coding sequence
  source 1..1035: mol_type = other DNA
atggccgccgccaccgagctgaaccggcccagcagcggcgaccggaatctcgagcggcgctgccgtcctaacctgtccagggaggtcctctatgagatcttcaggtcactacataccctggtgggacaactggaccttagggacgatgtcgtcaagattaccatcgactggaataaactacaatctctgagcgccttccagcccgccctgctgttctctgctctggaacagcacatcttgtacttacagccttttttggctaagctccagtcacccattaaagaggaaaatactacagcggtcgaggagatcgggaggacagaaatgggcaataagaatgaggtaaacgataaatttagcattggggacctgcaggaggaggaaaagcacaaggaatccgatctgcgggatgtcaaaaaaacccaaatacactttgatcctgaggtggttcagatcaaagctgggaaggcagaaatagatcgccgcattagcgcctttatcgagaggaagcaggcagagattaacgaaaacaatgtacgcgaattctgcaacgtaatcgattgcaatcaggagaacagctgtgcccgcacggatgccatattcaccccttatcctggctttaaatcccatgtcaaagtgtcccgggtggtcaatacgtacgggccacagaccagaccagaaggaatccccggcagcgggcataagccaaacagcatgctccgcgactgcggtaaccaggcagtggaagaaagactgcagaatatcgaagcgcacctgcgactacaaaccggcgggcctgttcctcgcgatatctaccaaagaataaagaagcttgaggacaaaatcctggaactggaaggcatttcaccagagtactttcagtcagtatccttttcaggcaagaggcgcaaagttcagcccccacaacagaactattccctagccgagctggatgagaagatctctgccctgaaacaagcgctcctgcggaagtccagggaggctgagtctatggcgacacaccacctgccgtag

SEQ ID NO: 194226 - DNA, 4944 bp, synthetic construct
  misc_feature 1..4944: note = Description of Artificial Sequence: Synthetic coding sequence
  source 1..4944: mol_type = other DNA
atggtgcagaagaagaagttctgcccccggctgctggactacctggtcattgttggggcccgccatccatcctcggattcagtcgcacagaccccagagctgcttagacgataccctcttgaagaccatactgagtttccccttcctcccgatgtggtgttcttctgtcagccagagggatgcttgtcagttaggcagagaaggatgtctctgagagatgataccagcttcgtttttaccctgaccgacaaggacaccggagttacaaggtatgggatctgtgtcaacttttaccgtagttttcagaaaaggattagtaaggagaaaggggaggggggtgccggtagtcgcggaaaagaggggactcatgcaacctgcgcatctgaagagggtggcacggagtcttcagagagcggcagtagcttgcagcccttgtctgcagacagtactccagatgtgaatcaatcccctaggggaaagcgcagagcaaaggcgggctctagatccaggaattccaccctgaccagcctatgcgtcttgagccactatccctttttctcaacatttcgagaatgcctatataccttgaagcgactggtggactgctgctctgagaggttactcggcaaaaagttgggcatacccagaggggtgcagagggatactatgtggagaatatttaccgggagcctgttagtggaagagaagtccagtgccctcctgcacgatctcagagaaattgaagcttggatctaccgcctgctgaggtcacctgtgcccgtaagcggacagaagcgtgtggatatagaggtcctgccgcaggaactccagccggccttaacttttgccctgcccgatccgtcccggtttacgctggtcgattttccgctccatctccccttagaattgttaggtgttgacgcctgtctgcaagtactgacctgtattctgctggaacataaggttgtattacagagtcgcgattataacgcactgagcatgtctgtgatggccttcgtcgctatgatctacccattggaatacatgttcccggttatacctcttctgccaacttgcatggcgtctgccgaacagctgcttctggcacccaccccatatattatcggggtcccggcaagtttcttcctctacaagctggactttaagatgccagacgacgtttggcttgtggacctggacagtaatagggtcattgcgcctactaatgcggaagtcctgccgatcctgcccgaacctgaatccctggagctgaagaagcatctgaagcaggccctggcaagtatgagtctgaatacacagcccattcttaacctggagaaatttcacgaaggccaagagatacctttgctcttgggacggccctccaatgacctgcagtctacaccgagcacggagtttaatcccctgatttatggaaatgacgtcgattctgtggacgtagccacccgggtggcaatggtccgcttcttcaactccgcaaatgtcttgcaagggttccagatgcacacacgtacactgcggttgttccctaggcctgtagtggcttttcaagctggatcttttctggcctctagaccaagacagacccccttcgcagaaaaactagctagaactcaggcagttgaatattttggcgaatggatcttgaacccaactaattatgcattccagaggatccacaacaatatgtttgaccccgcgttaattggagataagccaaaatggtatgcacaccaattgcagcctatccactaccgagtctacgattccaactctcaactggctgaggccttgagtgtacctccagaaagagactcggattccgaacctactgacgactctggctcagattccatggactacgatgacagttccagttcatattcttctttaggcgatttcgtgagtgagatgatgaagtgtgatatcaacggtgatactcctaacgtggacccgctgactcacgctgcactgggcgatgcgtcagaggtagaaatcgacgaactgcagaaccagaaagaggcggaggagcccggcccagactccgagaacagccaggagaatccaccgcttcgtagcagctctagtactacagcttcttcctcaccaagcacggttatccacggagctaattctgaaccggctgactctacagagatggatgacaaagctgccgtcggcgtgagcaagccgttgccgtctgttcctccttctattggtaagagtaacgtggaccggagacaggcggaaatcggagaagggagcgtgaggcgtaggatttacgacaacccctacttcgaacctcagtacggctttccccctgaagaagacgaagacgagcagggtgagagctatactccccgcttcagtcaacacgtatccggaaaccgggcacagaaactgcttagaccaaacagcctgagactcgcaagcgactccgacgccgaaagtgactcaagggctagcagcccaaattctacagtaagcaatacaagtaccgagggctttggtggaataatgtccttcgcgagctctctgtaccgcaaccattcaaccagcttctctctgtcgaacctgactctgccaacgaagggtgcccgggagaaagctactccatttcccagcttaaaggtgtttgggcttaatactctcatggagattgtgaccgaggccggaccaggttcaggggaagggaatcggagagctctggtggaccaaaagagctcagtgattaaacacagcccaactgtgaagagagagcctccatccccccagggccgctcatccaactcaagtgagaaccaacagttcctcaaagaggtggtgcacagcgtgctcgatgggcaaggcgttgggtggctcaatatgaagaaggtgaggagactgttggagtcagagcagctccgcgtgttcgtcctgtctaagctaaataggatggtgcaatctgaggatgacgcgcggcaggacatcattcctgacgtagagatctccaggaaagtgtataaaggaatgctggacctactcaaatgtacggtgcttagcctggagcaatcatacgcacatgccgggctggggggcatggcctcgatctttggattgctcgaaatagctcaaacccactattattcgaaggaaccagataaaaggaagcggtcccccacagaatcagtgaacaccccagtcggaaaggatccaggcctggctggtaggggagacccgaaagccatggcacagctgcgggtccctcagctgggaccccgagctcccagtgctacaggaaaaggacctaaggaactggacacacgttccctcaaggaagaaaattttattgcttcaatcgaattgtggaacaagcaccaagaggttaagaaacaaaaggccctcgaaaaacagagacccgaggtgattaagcctgtctttgacctgggtgagacagaagagaagaagtcccagatcagtgctgacagcggcgtatcccttacatcctcctctcagcggactgaccaggacagcgttatcggagtctccccagctgtcatgatacgcagctcaagtcaggatagcgaagtttcaactgtcgtttccaattcatccggcgaaacactcggcgccgactctgatttatcctctaatgcgggggatggccccgggggcgaaggatcagttcacttagcatcttctaggggtacgctaagcgactcggaaatcgagacaaactctgcaacatccacgatctttggaaaagcacattctctcaagccaagcatcaaggagaagctggcgggatctcctattcgcacatccgaggatgtgtcccagcgggtgtacttatacgaaggcctgctaggccgcgataaagggtctatgtgggatcagctggaagatgccgcgatggagacattttccatctcgaaagagcggtccactctctgggaccagatgcagttctgggaggatgcatttcttgatgctgtcatgctagaacgcgaaggcatgggtatggaccagggcccccaagagatgatcgaccgctatctgtcactgggcgaacacgacagaaagcgtttagaagacgacgaggaccgccttctggccaccttgctgcataacctgatctcttatatgctgcttatgaaagtgaataaaaacgatatccgaaaaaaggttaggagacttatgggaaaaagtcatatcggcctggtgtacagtcaacaaattaatgaagtcctggaccagctagctaatttgaacggtagggatttgtctatatggtcctctggaagtcggcatatgaaaaaacagacctttgtcgtgcacgcaggtactgataccaacggggacattttctttatggaggtgtgtgacgactgtgtcgtccttcggtctaacatcggcacagtctacgagcgctggtggtacgaaaagttgataaacatgacttattgccctaaaacaaaagtgctgtgcctgtggcgcagaaacgggtctgaaacacaattgaataaattctataccaaaaagtgtcgggagttgtactactgcgttaaagacagcatggaaagggccgcagcacgacaacagtccatcaaaccaggtcccgagctggggggggagtttccagtgcaggatctcaagactggggagggtgggctgcttcaagtgactcttgaaggtattaacctgaagtttatgcacaatcaggtgttcatcgaactgaaccacattaagaagtgtaatacagtccgcggagtttttgtcctagaggagtttgtcccggagatcaaggaggttgtgtcacataagtacaagacccctatggcccatgaaatatgttattccgtcctgtgtctgttctcatatgtggcggcagtgcatagctcagaggaagacctgagaactccaccacgtccagtaagctcatag

SEQ ID NO: 194227 - DNA, 4767 bp, synthetic construct
  misc_feature 1..4767: note = Description of Artificial Sequence: Synthetic coding sequence
  source 1..4767: mol_type = other DNA
atggtgcagaagaagaagttctgcccccggctgctggactacctggttatcgtaggggctagacatccctcctccgacagcgtggcccagactccggagttgttaaggaggtaccccttagaggatcacactgagtttccactccccccagatgtggtgtttttctgtcagccagagggatgcctttctgtccggcagaggcgcatgagccttcgggatgatactagcttcgtcttcactctgacggataaagacactggcgtgaccagatacgggatctgcgtcaatttctatagaagcttccaaaagaggatctctaaggagaaaggggaaggtggagcggggagtagagggaaggagggcacccacgccacttgtgcatctgaagaaggtggcacggagagttcagagtctggttcctctctacagcccctttctgctgattccactccagatgtcaaccagagtcctagggggaaacgaagagcaaaagccggcagccgttcccgaaacagcacactgacatctctctgtgtgctttcccactatcctttttttagcacgtttcgtgaatgcctgtatacactgaagcgtcttgtggattgttgtagtgagagactcctgggcaagaaattaggcataccgcgaggagtacagagagatacaatgtggagaatcttcaccggcagcttattggtcgaggaaaagtccagcgccctgttgcacgatctgagagaaattgaggcatggatctaccgcctgctgcggagcccagtgccagtttctgggcaaaaaagggtcgacattgaggttttgccccaggaactgcagccagctctcacgtttgcgctaccagatccttcaaggtttaccctggttgattttcctctgcacttgccacttgaactcctgggggtggatgcctgtctgcaggtccttacctgcattttgctcgaacacaaagtcgtcctacagtctagagactacaacgctctgagcatgagcgttatggctttcgtggcaatgatctatcctctggagtatatgtttcctgtgataccactgctgcctacctgcatggcttctgccgagcaactcctgctggctcccactccttacatcattggggtaccagcatccttcttcctttacaagctagatttcaaaatgcctgacgacgtgtggctcgtggacctagactctaatagggtgatagcccctacaaatgctgaggtgctcccaatcctgcctgaaccagaatcactcgagctgaagaaacacctgaagcaggctctggccagtatgagccttaacacacagccgatcctcaatctggagaaattccacgaagggcaggaaattcccttactccttgggaggccctctaacgatctgcagtcaactccaagtaccgaattcaatccactaatatacgggaacgacgttgattccgtcgacgtggcaacaagggtggccatggttcgattcttcaattctgcaaacgttctgcaaggatttcagatgcatactagaactttgcgactctttcctcgtcccgtcgtggcgttccaggcagggtcttttctggcgtcccgcccccgccagacaccctttgcagagaagcttgctaggactcaagcggtagaatatttcggtgagtggatcctgaaccccacaaactacgcctttcaacggatccacaataatatgtttgacccagcactcattggcgacaagcccaaatggtatgctcaccagcttcagcccattcattatcgcgtgtatgacagcaattcacagctcgcagaggcattgtctgtgcctccagagagggattccgactccgaacccacggatgatagtggcagtgattccatggactacgatgactcctccagctcctattctagccttggggacttcgtttccgagatgatgaaatgcgacattaatggcgacacgccaaacgttgacccacttactcacgccgcactgggggacgcgtcagaggtggagatagacgagctgcagaaccagaaggaggcagaagagcccggtccagacagcgagaactcccaggagaatcccccccttcggagtagctcctccactaccgctagctccagtccatccacagtgattcatggggccaactcagagcctgcagactccaccgaaatggacgacaaagcagccgtcggagtttcgaagccacttcccagtgtgcctccttctatagggaaaagcaacgtcgaccgaaggcaggcagagataggagaggggtctgtcagacgtcgtatttacgacaatccatattttgaacctcaatacgggttcccccccgaggaggatgaagatgagcagggggagtcttacaccccacggttttctcagcacgtgagtggcaaccgcgctcagaagttgctccgccccaattcattacggctcgcaagcgacagtgacgcagaatctgatagtagggcttctagccctaattcgacagtctccaacacttccactgaggggttcggcggcatcatgagcttcgctagtagtctataccgaaaccacagcacctcctttagtctttcaaacctcactctgcccacaaaaggtgcccgagagaaagcaaccccttttcctagcctgaagggcaatagacgagctctcgtagaccagaagtccagtgtgatcaaacattcacctaccgtcaagcgcgagcctccatcaccccagggtcgaagttcaaacagtagcgaaaaccagcagtttctcaaagaggtcgtgcactctgtactcgatggtcaaggggtggggtggctcaacatgaaaaaagtccgccgcttgttggagtcagaacagctcagggtgttcgtactttccaagctgaatcgtatggttcaatcagaagatgatgcacggcaggacataatccccgatgttgagatcagccggaaggtttacaagggaatgctggacctcctgaaatgcaccgtgttatcactagagcaatcctatgcacatgcggggctcggcggcatggcctcaatcttcgggctactggagatcgcccagactcattactacagcaaagagcctgataaacgcaaacggtcacccacggagtctgtcaacactccagtaggcaaggatccaggactggccggccgtggcgatccaaaggccatggcccagttacgggtgcctcagctcggtccccgagccccaagcgccaccggaaagggccctaaggaacttgacacgaggtctttgaaggaagagaacttcattgcaagtatcgggcctgaagttatcaagccggtgtttgacctgggtgagaccgaagaaaagaagtcacagatcagcgcagacagcggtgtgtccctgacctccagtagccagagaacggatcaggacagcgttattggggtctcacctgccgtgatgataagatcgtccagtcaggactctgaggtgtctactgtggtctccaatagctcgggtgaaactcttggcgctgatagcgatttgtcctccaacgctggggatggtccaggaggggagggcagcgtgcacctggcttcatcaaggggcaccctgtccgactccgaaattgagacaaactctgctacgagcaccatctttggcaaggcccacagcctaaagcccagtatcaaagagaaactagcaggttccccaattcgtacttccgaagacgtttctcaacgggtctatctgtatgaggggctgctaggcaaggagcgatcgactctgtgggatcagatgcaattctgggaggacgccttcttggatgctgtaatgctagagagggaagggatggggatggatcagggcccccaggaaatgattgatcgatacctcagcctgggggaacacgatagaaagcggcttgaagatgacgaggacagattgctcgctacgcttctgcacaatctgatctcttatatgctgttaatgaaagtgaataaaaatgatattagaaaaaaagtccgcaggttaatgggtaaatcacacattggactcgtgtactcacagcagatcaatgaagttcttgatcagcttgctaacctgaatggtcgtgatctcagcatttggagtagcggaagtagacacatgaagaagcagaccttcgtggttcatgccggaaccgatactaacggcgatatcttcttcatggaggtgtgcgacgactgcgtagtgttgagatccaacataggcactgtgtatgaacgctggtggtacgagaagcttataaacatgacctactgccctaagaccaaagtgctgtgcctgtggagaagaaacggtagcgagacccagcttaacaagttttatacaaaaaagtgtagggagctgtactactgcgtgaaggacagcatggaacgcgctgccgctcgacaacaatctatcaaacccggaccagagctcggaggagaattccccgtacaagacctcaaaactggagaaggcggtctgctgcaagtgacgcttgaggggattaaccttaaatttatgcataaccaagtatttatcgaattaaatcacattaagaagtgcaataccgtgcggggagtttttgtcttagaggagttcgtgcccgagattaaagaggtggtgagccacaagtacaagactccaatggcgcacgagatctgttactctgtcctgtgcctgttctcctatgtcgcagccgtgcatagctccgaggaggatctgcgaaccccaccacgacccgttagctcctag

SEQ ID NO: 194228 - DNA, 4827 bp, synthetic construct
  misc_feature 1..4827: note = Description of Artificial Sequence: Synthetic coding sequence
  source 1..4827: mol_type = other DNA
atggtgcagaagaagaagttctgcccccggctgctggactacctggtgatcgtgggcgcaaggcacccttccagcgattctgtcgcccagacccctgagctgctccgacgatatcctctggaggaccatactgagttccccctgccccctgacgttgtatttttttgccaaccagaggggtgcctctcagtgcggcaaaggcggatgtcactccgggacgatacgagcttcgtgttcactctcaccgataaggacacaggcgtgactagatacggcatttgtgtgaatttttatcgatccttccagaagcgcatcagcaaagaaaaaggagagggcggcgcgggctctaggggtaaggagggaacacatgccacttgtgcctcagaagaaggaggcaccgaaagctctgaatccgggtccagcctccagccactgtccgcagattcgacacctgacgtcaaccagagcccccgagggaaacgccgggctaaggctggttcgaggagccgcaactccactctcacctcactgtgcgtcctctcccattatcccttcttttccacatttagagagtgtctctacactctgaagaggctcgttgactgttgttcggagcggctgcttggaaaaaagcttggcatccccaggggagtgcagagagataccatgtggaggatcttcaccggtagcctcttagttgaggaaaaaagctcagccttgctacacgatcttcgagaaatcgaggcttggatttaccggctgttaagatctccagtgccagtgagcgggcagaagcgggtcgatattgaggtgcttcctcaggagctccagcctgcactaacatttgctctaccagaccccagccgatttaccctagtggatttccccctccatctgccactggagctgctcggagtggacgcctgcctgcaggtgctcacgtgtatcctcctggaacacaaggtggtcttgcaatcaagagactacaacgctttatccatgtcagttatggcgttcgttgctatgatttatccactggagtacatgttccccgtgatcccattgctgcctacctgcatggccagcgctgaacagttgttgttagctccaaccccatatattattggagtgccagcttccttctttctgtacaaactagacttcaaaatgccggatgatgtatggctggttgacctggactcgaacagagtgatagcccccaccaacgccgaagtgctacctattttgccagaacctgagagtctggaactaaaaaagcacctgaagcaggctctggcaagcatgtccctaaacactcagcccatacttaatctagaaaagtttcacgaaggacaggaaattcccctcctgcttgggaggccgagtaatgacctgcaatctaccccgtccactgagttcaatcccttgatttatggaaacgacgtagactccgtcgatgttgcgaccagggtagctatggtcaggttcttcaatagcgccaacgtgctgcagggttttcagatgcacacacgtactttgcgtttgttcccaagacctgtggtggctttccaagcgggcagctttctagccagtaggccccgccagacgccattcgctgagaaattggcccgcacacaggctgtggaatacttcggcgagtggattttaaaccccaccaactatgcctttcagagaatccacaataatatgttcgaccccgctctgattggagacaaacctaaatggtacgctcaccaactccagccaatccattacagggtgtacgatagcaacagccagctagcagaggcactgtcggtgccacctgagcgtgacagcgactcagagcctacagatgattcaggctcggactcaatggactatgacgattccagcagctcttatagcagtctaggggattttgtctctgagatgatgaaatgcgacatcaatggggacacgcccaacgttgacccacttactcatgccgcactgggagatgctagtgaggtggaaatcgacgagctgcagaaccagaaggaggctgaggagccgggacctgactctgagaattcccaggagaatcctccgcttcgctccagttctagcacaaccgcctcaagctcacccagcactgtgattcatggagctaactcagagcctgccgatagtacagaaatggatgacaaggccgctgtgggtgtaagtaaaccgttgccttctgtccccccctccatcgggaaaagcaacgtggaccggcggcaggccgaaatcggtgagggctctgtccggaggagaatctatgataatccgtatttcgagccccaatacggcttccccccagaagaagatgaggatgagcagggagaatcttacacaccccggttcagccagcacgtttcaggtaatcgcgcgcaaaaactgctgcgcccaaattcccttcgactcgccagcgattctgacgccgaaagcgattctcgtgcgagctcgccgaacagtacggtctcgaacaccagcaccgaagggtttggaggaattatgtcctttgcctcgtctctgtatagaaatcactccacttcgtttagcctttctaatctaacactgcctaccaagggtgctcgggaaaaggccacaccgtttccttctctcaaagtgttcgggttaaacacacttatggagatcgtcaccgaggctggccctggatctggtgagggaaacagacgcgctttggtggatcaaaagtcaagtgtgataaagcattcccccacagtaaagagggaaccccccagcccacaagggaggtcttccaatagcagcgagaatcagcagtttcttaaagaggtggtgcactccgttctggatggccagggcgtgggctggttaaatatgaaaaaggtgcgaaggttgcttgagagcgaacagttgcgcgtattcgtgctgagtaagctgaaccggatggtacagagcgaagatgacgcaagacaggacattatcccagatgtggagatttctaggaaagtgtataagggaatgctggatttgctgaagtgcaccgttcttagccttgaacagagctatgctcacgctggcctggggggcatggcctctatcttcgggctgctggaaatagcccaaacccattactactccaaagaacccgataagagaaagaggagcccaacagagagcgtcaacacgccagtcggtaaggaccccgggctcgccggaaggggagaccccaaggcgatggcacagctgcgtgttccgcagctagggccacgcgctccatccgcaaccggaaaaggccctaaagaacttgacacacggagtctaaaagaggaaaatttcattgcgtcgattggcccagaggtcataaaaccagtgtttgacttgggagaaactgaggagaagaagtctcaaatcagcgccgacagtggagtgtccctgacttcaagctcccagagaacagaccaagatagcgtgatcggcgtgagcccagccgttatgatcagatccagttctcaggattctgaggtgtccaccgtggtatcaaacagcagcggcgagacactaggagccgatagcgacctgagcagtaacgccggggatggaccggggggcgaagggagtgtgcatctcgcatcaagtcggggcacactgagcgattcagagattgaaacaaatagcgctacctccactattttcggtaaagcacactctctgaaaccgtcaatcaaagagaagttagcaggcagtccaatacgcacgtcggaagatgtgtcccaacgggtgtatctatatgaaggacttttaggtaaggaaagatcaacgctgtgggaccagatgcagttttgggaagatgcgtttctggatgccgtgatgttggagagggagggcatggggatggaccagggcccccaagagatgatagacagatatctctcacttggagaacatgaccgcaagcggctggaggatgacgaggacagacttctagctactctgctccacaatcttatctcttacatgctgctcatgaaagttaacaagaatgacatacgcaaaaaggtgcggagattgatgggtaaaagccacatcgggttggtgtacagccaacagattaacgaggtgcttgaccagctggcgaacctcaacggcagagatctcagcatatggagctctggctcaaggcacatgaaaaagcagaccttcgtcgtgcatgctgggactgacaccaacggggatatcttcttcatggaagtgtgcgatgattgcgtagtccttagatcaaacattggcacggtctatgaaagatggtggtatgaaaagcttatcaacatgacctattgtcctaaaaccaaggtgctgtgcttatggaggagaaatggtagcgagacccaattaaacaaattctatacaaagaaatgtagggaattgtactactgcgtgaaggattctatggagcgagctgctgcgcgtcaacagagcattaagcccggaccagaacttggtggagagttccctgtccaggacctcaaaactggggagggaggacttttacaagtaaccctggaagggattaatctaaagttcatgcataatcaggtgtttatagaactgaatcacatcaaaaagtgtaataccgtgaggggtgtttttgtgctggaggaatttgtgcccgagattaaagaagtggtcagtcataagtacaaaacacctatggctcacgaaatctgttattcagtgttgtgcttgttttcatatgtggctgctgtgcactcaagcgaagaggatctccggactccccctagacctgtaagcagttag

SEQ ID NO: 194229 - DNA, 4746 bp, synthetic construct
  misc_feature 1..4746: note = Description of Artificial Sequence: Synthetic coding sequence
  source 1..4746: mol_type = other DNA
atggtgcagaagaagaagttctgcccccggctgctggactacctggtgatagtcggggctagacatccatccagcgattcagtggcccagactcccgaattgctgcgtcgctatccactcgaggaccataccgaattcccgttgcctcccgatgtcgtcttcttttgtcagccggaggggtgcctgtcggttagacagaggaggatgagcctccgggacgacacatcctttgttttcacattaaccgataaagacacaggcgttacaagatacggaatctgtgtgaatttttaccgaagtttccagaaacgcatatctaaagagaagggggagggcggcgcgggcagccggggcaaggaggggacacatgccacatgcgccagtgaagaaggaggcaccgaatcatcagaatctggttccagcctgcagccgctttccgctgacagcactccagatgttaaccagagccccaggggtaagcggcgggctaaagctggtagcagaagcaggaacagtacgctgacctcactttgtgttcttagccactacccctttttttcaacgtttcgagaatgtctttacactctcaaacggttggtggactgttgctccgaacggctactgggaaagaagctggggatcccacggggtgtgcaaagagacactatgtggaggatctttacaggatccctcctagtggaggagaagagcagcgccctgttacacgatctacgggagattgaggcctggatttataggctgctgcgttcacccgtgcccgtgagtgggcagaagcgggtggacattgaagtgttaccccaagagcttcagccggctcttacctttgcgctgcccgaccccagccgcttcacgctcgtggacttccctctacatttgccgcttgagcttctcggcgttgacgcttgtctccaggtgttaacgtgtatattgctagagcacaaggtggtcctacagtcacgagattacaatgcccttagtatgtcggtgatggccttcgtggcgatgatttaccccctggagtacatgttcccagtgatccccctcctaccaacctgcatggccagcgccgaacagctcctgttggctcctactccatacatcattggcgtgcctgcatcatttttcctatacaaactggacttcaaaatgcccgacgatgtgtggctggtcgacctcgactccaatagagtcatcgctcccacaaatgcagaagttcttccaatcttaccagagcccgaatcccttgagctgaaaaaacatctgaagcaagccctggcctccatgtccctgaatacccagccgatcttgaatctggaaaagttccacgaaggccaagagatccccctcttactcgggaggccgagcaatgacttacaaagcacccctagcactgaatttaaccctcttatctacgggaacgacgttgactctgtggacgtagccacaagagtggccatggtgcggttcttcaactctgcaaacgtacttcagggatttcagatgcacactcgcaccctaaggctttttcctagaccagtggtagcctttcaggccggctcattcctggcatctcgtcccaggcagactccgttcgccgaaaaactcgctaggacccaagctgtcgagtatttcggcgagtggatcctcaacccaacaaattacgcatttcagagaatacacaacaacatgttcgatcccgcattgattggagacaagccgaagtggtatgcccatcagttgcagcccatccactacagagtatacgacagtaactcgcagctggcagaggcactctcagtgccacccgagcgcgacagtgatagtgagcccaccgatgattctgggtctgactcaatggattacgatgattcctcctcaagttatagctccctgggcgactttgtgagcgagatgatgaaatgtgatatcaatggcgacacaccgaacgtggatcctctgacccatgcggccctgggcgatgctagtgaagtggaaatcgacgaacttcaaaaccaaaaagaggccgaggagccagggcccgacagcgagaatagccaggaaaatccacccctgcgaagttcatctagtaccactgcctcctctagtccctcaacggttatacatggagccaattccgaacccgctgattcaaccgagatggatgataaagccgctgtgggggtgagtaaacccctgccatccgtccctccctcgataggcaagtcaaacgtagacaggcgtcaagcggaaatcggcgaaggttctgtgcgtagacggatctatgacaatccctacttcgagccccagtatggttttccacctgaagaggacgaagacgaacagggtgagtcctacacccctcgtttctcgcaacacgtctctggaaatcgagcacagaagctgttgcggcccaattcattgagactcgcaagcgactcagacgccgagagcgattctcgggcgtcgtcccccaattctacagtttcaaatacctctaccgaaggttttggcggcattatgtcattcgcatcttccttgtacagaaaccacagtacttcattcagcctaagcaacctgaccctgcccacaaagggggcacgagaaaaggcgacaccttttccaagcctgaaagtcttcggactaaataccctgatggaaatcgtgactgaagcgggcccaggtagtggcgaggggaaccgacgggctctggtggatcagaagagtagcgtcattaaacacagccctaccgttaaacgggaacctccgtccccgcaaggccgatcatccaacagcagcgaaaaccaacaatttctaaaggaggtcgttcatagcgtgctggacgggcagggggtgggatggttgaatatgaaaaaagtccgacggctcctggagagcgagcagctgcgggtatttgtactgagtaagctgaatagaatggttcagtccgaagacgacgctagacaagacatcatccccgatgtggagataagccgaaaggtgtacaagggaatgctcgatctgctgaagtgcaccgtgctgtcgctcgagcagtcttacgcacacgccggcttaggcggaatggcctctatctttgggctgcttgaaattgctcaaacacattattattccaaagaaccagataagcgcaagaggtccccaactgagtctgtaaacaccccagttggaaaagatccaggccttgccgggagaggcgaccccaaagctatggcccaattgagagttcctcaactaggaccgcgcgcaccatctgccaccggcaaaggtcctaaggaactggataccagaagcttaaaggaagaaaactttattgcaagtatcgagctttggaacaaacaccaggaagtgaagaaacaaaaggctctcgaaaagcaaaggcccgaggtgatcaaacctgttttcgacctcggcgaaaccgaggaaaaaaagagtcaaatctctgccgactcaggcgtatcactgacatcatcttctcagagaacagatcaggattctgtcattggagtatcacctgccgtgatgattcggtcaagttctcaagacagcgaagtctccaccgtcgtcagcaattcgagcggtgagacattgggagccgactccgacctaagttctaacgctggagacggccccgggggtgaaggttccgtccatttggcctcaagccgcgggaccctgtctgactctgaaatcgagaccaactccgcaacctccaccatcttcgggaaagctcacagcctgaaaccttctatcaaagaaaagctagccgggagccccatccggaccagcgaggacgtatctcaacgcgtttacctctacgagggattgctgggtagagataaaggctcaatgtgggatcagttggaggatgcggcgatggaaacattctctatctctaaagaacggagcactctgtgggaccagatgcagttctgggaagatgcatttcttgacgctgtgatgctggagagagagggaatgggcatggaccaggggccccaggagatgattgatcgctacctgagcctgggagaacatgatagaaagcgcttggaagacgatgaggacagactgctggcaactcttctgcacaacctgatctcatacatgctcttgatgaaagtgaacaagaacgacattcgcaagaaggttagacgcctaatgggaaaatctcatatcgggctggtctatagtcagcagattaatgaggttctggatcaactggccaatttgaatggtagagatctgtccatatggtcatccggaagcagacatatgaagaaacagaccttcgttgtacatgccggaacagatactaacggagatatcttcttcatggaagtctgcgatgattgtgtcgtgctccgtagtaacattggcaccgtgtatgagaggtggtggtatgaaaagctgattaacatgacgtactgccctaagaccaaagtgctgtgtctttggaggcgcaatggtagcgaaactcagttgaacaaattttatacaaagaaatgtcgggaactttactactgcgtcaaggacagcatggagcgcgccgctgctcggcagcagagtatcaaacccggccccgaactcggtggagaatttccagtgcaggatcttaaaaccggtgaggggggccttctgcaggtgacactggaggggatcaatctgaaattcatgcacaatcaattccttaagctaaaaaagtggtag

SEQ ID NO: 194230 - DNA, 4440 bp, synthetic construct
  misc_feature 1..4440: note = Description of Artificial Sequence: Synthetic coding sequence
  source 1..4440: mol_type = other DNA
atggtgcagaagaagaagttctgcccccggctgctggactacctggtgatagtcggcgccagacatccttcatccgatagcgtcgcccagacacccgaattgttacgccgatatcctttggaagaccacacagagttcccgttgcctcctgatgtcgtttttttttgtcagccagaggggtgtctgtccgttcggcagcggagaatgagtctgagagacgatactagcttcgtgtttactcttacagacaaagacactggagtcaccagatacggcatctgtgtaaatttctaccgttcatttcagaaaagaattagtaaggagaaaggagagggaggagccggtagccgcggtaaagagggaacacacgctacttgtgcctccgaggaaggtggcaccgagtcatctgagtccggcagcagcctgcagccgctgtcagccgatagcacacccgacgtcaaccagtcccctagaggcaaaagaagggccaaagccggaagtaggtcaagaaatagcactcttacctccttgtgcgtgttgagtcactacccgtttttttccacgtttagggaatgcttatacaccctgaagagattggtggattgttgcagtgaacgattgttgggaaagaagttgggcatcccaaggggtgtccagagagacaccatgtggcgaatcttcaccgggtctctgctcgtcgaggaaaagtcgtccgccctcctacacgacctaagggaaatcgaggcctggatctatcggctgctgcggagccccgtgcccgtctcgggccaaaaacgggtggatattgaagtgctgcctcaggagctccaacccgctctgacctttgcgcttccagatccttcacgatttacgctggtggacttccccttgcacctgccactagagctgctcggggttgatgcgtgtctgcaggtcctcacatgcatactgctggagcacaaagtagtgctgcaaagtcgtgattacaatgccttgagcatgtctgtgatggcttttgttgctatgatctaccccctggaatatatgttccccgttatacccttactgcccacttgtatggcttcggctgagcagctgctgcttgcccctactccgtatatcatcggcgtgcccgccagtttcttcctgtacaaacttgactttaaaatgcctgacgacgtttggctcgtggacttggacagtaaccgcgtgatcgcccctacaaatgctgaagtccttcctatcttgccagaacccgagagtctagagctgaagaagcatttgaaacaggcactggctagtatgagtctcaacacccaacccatcctaaatctggaaaaatttcacgaggggcaagagatccctcttttgctgggtcggccgtccaacgacttacagagcacgccttccacagaattcaatccattgatctatgggaacgacgtcgactccgtagatgtagccacgcgggtggccatggtgcggttcttcaactctgcaaatgtgttgcaggggttccagatgcacacacgcactttaaggttatttcctagaccggtggttgctttccaggcagggagtttcctcgcctcacgcccgcgacagaccccctttgccgaaaagctcgcccgcacccaggccgttgaatactttggcgagtggattcttaaccctactaactatgcctttcagcggattcacaacaatatgttcgatcccgccctgattggcgacaagcctaagtggtatgcgcatcagttgcagcccatccactaccgcgtgtatgattcgaacagccagctcgcagaggcactctctgtccctccggaacgcgattctgactctgagccgacggacgatagcgggagcgatagtatggattatgatgattcctcctcttcttattcgagtcttggcgattttgtgagtgaaatgatgaagtgtgacatcaatggtgacacccccaatgtcgacccactgactcacgcagcccttggcgacgcctctgaggtggagattgacgaactgcagaaccagaaagaagcggaggagccgggcccggactctgagaattcgcaagaaaatcccccattacgctctagctcctccaccactgcctctagctccccatccacagttattcacggggccaactccgaacccgctgacagcaccgagatggacgacaaggccgcagtgggcgtgtctaaaccactgcccagtgtgccacctagcattggtaagtctaacgtggacagacgacaagctgaaataggggagggggcccagaaactgctccggcccaactccctccgccttgcctcagatagtgacgctgagagtgacagccgggctagcagccctaacagtaccgtcagcaacaccagcactgagggattcggtgggatcatgtctttcgcctccagtctctaccgaaatcactctacctcattctcattaagtaacttgactctgccaacaaagggagcaagggagaaggccacccccttcccctcactgaagggaaaccggagggctctcgtagatcagaagagttctgttattaagcacagtccaacggtcaagagggaaccacccagccctcaggggaggagtagcaacagctcagaaaaccagcagttcctcaaggaggtggtccatagtgtcctcgacgggcaaggggtcggctggctcaatatgaagaaagtacgcaggcttctagagtcagaacagctgagggttttcgtgcttagcaagctgaacaggatggtccagtccgaagacgatgcccgccaggatatcatacctgacgtggagatctctcgaaaagtctataagggaatgctcgacttgcttaagtgcacagttctttcactggaacagagctatgctcacgctgggctgggagggatggcaagcatttttggactgctggagatcgcccagactcattattactccaaagagcccgataaacgtaaaaggtcacccactgagagcgtcaatacacccgtgggaaaagatcccggcctcgccggccgaggagaccccaaggctatggcccagctgcgcgtgccgcagctgggtccaagagcaccgtcagctaccggcaaggggcccaaagaactcgatacacgttcgcttaaggaggagaatttcatcgccagcattggaccagaggtgattaaaccagtatttgatctgggggagacagaagagaaaaaatcacagatcagcgccgattctggagtaagtttgaccagctcctcacaacgtaccgaccaagatagtgtcatcggggtcagccccgcggttatgatacgatctagttcacaggattccgaagtgtcaactgtcgtgtctaattcctccggcgaaaccttgggcgcggactccgatctgtcttccaacgccggggacggacccggcggagagggctctgtgcatctggcctcatctcggggaacactcagcgacagcgagattgagactaacagcgcaacctctacaattttcggcaaggcccattctctaaaaccctctataaaagagaagctagctggcagcccaatccgcacctccgaggacgtgagccagcgagtctatctgtacgagggattgcttggtaaggaacggtctacactatgggaccagatgcaattctgggaggacgcctttctggatgccgtcatgctggaacgggagggaatgggtatggaccagggcccccaggaaatgatcgacagatacctgtcactgggcgagcacgatcgtaaacgactggaggatgatgaagaccggttactggccactctgcttcacaacctaatctcttacatgctcctgatgaaggtgaacaagaatgatatcaggaagaaagttcggcgactaatgggtaaatctcacattggactagtttattcccaacaaattaacgaggtgcttgaccagctggccaacctcaatggccgagatcttagtatctggagttccggaagccgacatatgaagaagcaaacatttgtggttcacgccggcaccgataccaacggggatatcttctttatggaggtatgtgacgactgcgtcgttttgcggagcaatatcggcacagtttatgagcgctggtggtatgagaagctgatcaacatgacctactgccccaaaaccaaagtattgtgtctgtggcgacggaatgggtcagaaactcagctaaacaagttttataccaagaagtgtcgggagctttactactgcgtgaaagacagcatggagcgggcggcagcacgccagcagagtattaaacccggtcctgaactcggaggagagttccccgtgcaggaccttaagaccggagaaggcggactgctccaggtcacactcgaaggcatcaatcttaagtttatgcacaaccaattacttaggcggcttcggtggtag

SEQ ID NO: 194231 - DNA, 4626 bp, synthetic construct
  misc_feature 1..4626: note = Description of Artificial Sequence: Synthetic coding sequence
  source 1..4626: mol_type = other DNA
atggtgcagaagaagaagttctgcccccggctgctggactacctggtcattgtaggggcccgccacccatcctccgactcagtggctcaaaccccagagctactgcgaaggtacccgctcgaggaccacactgaatttccgctcccccccgatgtcgtattcttttgccagccagagggctgcttaagcgtgcgacagcgccgtatgagcctccgggacgacacaagctttgtatttacgttaacagacaaagacaccggagtaactaggtacggaatctgcgtcaacttctaccgcagcttccaaaaaaggatctccaaagagaagggagaggggggggcaggcagcaggggcaaagaaggcacacacgccacttgtgcttcggaagaaggcggcacggaatcatcagagtctggctcgtccctgcaaccgctgtcagcagatagcactccggatgttaatcagagcccgcgggggaagcgacgggccaaagctgggtctagatctcgtaactctaccctgaccagcctgtgcgtcctgtcacattatccttttttttctacattccgcgagtgtttgtacacactcaaacggcttgtggattgctgttcagaacgattactgggcaagaagctcgggattccgcgaggcgtgcaacgcgacacgatgtggaggatcttcaccggcagcttgctcgtcgaggagaaaagcagtgcccttctgcatgatctacgcgagatcgaagcgtggatttatcggctgctgcgaagccccgtcccagtctctggtcaaaaaagagtagacatcgaagtgctgccgcaggaactgcagcctgccctgacctttgcactgcctgatccatcgaggtttacattggttgattttcctttacaccttcccttagaactgctgggcgtcgacgcctgcctccaagtgctcacctgtatcctcctcgagcataaggtggtgttgcagtcgcgcgactacaatgccctgagtatgtcagtgatggcttttgttgcaatgatctatcctctagagtatatgtttcctgttatccctctgctgcccacatgtatggcaagtgccgagcagctgttactggctccaaccccatacatcatcggagtgccggcgagtttttttttgtataagctggattttaagatgccagatgacgtgtggctggttgatctcgattcaaatcgcgtgatcgctcctacaaatgctgaggtcctccccatcctcccagaaccagaaagccttgagctcaaaaaacatctgaagcaggctctcgcctccatgtcccttaacacacagccaatactgaacctagagaagttccacgagggtcaagaaattccactgcttttaggtcgtccatccaacgacttgcagtccacaccgtccacggagtttaatccactgatttatggaaatgacgttgactctgtggatgtcgcaacgagggtggctatggtccggttctttaactctgcgaatgtgctccagggtttccagatgcacactcgcactcttagactatttccccgtcctgtagttgcctttcaggctggttcgttcctggcctccagaccccggcaaacaccctttgccgaaaaactggcaaggacccaggccgtggagtattttggcgagtggattcttaatccaacaaactacgcttttcagcggattcacaacaacatgttcgacccagctctcattggagataagcctaagtggtatgcgcatcagctgcagcctattcactatcgagtgtacgattcgaatagtcagctggccgaagcactgagcgtgcctccagagagggactcagattcggagcctaccgacgatagtgggtccgactccatggactacgacgactcaagttcatcttactcaagcctgggagattttgtttcagagatgatgaagtgtgacattaacggtgacaccccgaatgtcgacccactgacacacgccgcccttggtgacgctagcgaagtcgagattgatgagctacagaatcagaaggaggctgaggagccaggcccagactctgagaactcacaggagaacccccccctcaggagttcttcttcgacgacagcctcttcatcaccatcaacggtgatacacggagccaactctgagcctgctgatagtactgaaatggatgacaaggcagccgtcggggtaagcaaaccactacctagtgtgcccccatccataggcaaatcaaatgttgatcgaagacaggccgaaattggggagggagcacagaaactgcttcgtccaaattctttgcggctcgcctctgattccgatgccgagtcagacagtcgagccagttctcctaattccactgtgtctaatacctcaacggaggggtttggagggatcatgtcttttgccagttctttatatagaaatcatagcactagcttcagcctttctaatctgaccctccccaccaagggtgcaagagagaaggccacccctttcccttctttgaaggggaaccggagagcattggtggaccagaagtcaagcgtcatcaagcactccccaactgtgaaaagggaacccccctcgccgcagggacgctccagcaatagttccgagaatcaacagtttttgaaggaggtcgtccacagcgtgctggatggccaaggggtcgggtggctcaatatgaaaaaggtccgtcgtttacttgaaagcgagcagctgagggtgtttgtgttgtctaaattaaacagaatggtccagtccgaggacgatgctcgacaagacatcatccccgacgtggaaatctcccgaaaagtgtacaaggggatgctggatctactcaagtgcaccgttttgtcactggagcagtcctacgcacatgctggcctgggtgggatggcatctatcttcggcctgctggagattgctcagacccactattattcaaaggagcctgacaagcgcaagaggagtccaacagagtctgtgaacacaccagtgggaaaggatcctgggttggcagggaggggcgatccaaaggccatggcgcaactgcgcgtgccacagctgggaccccgtgccccctctgcgacagggaaggggcccaaagaactggatactcgctcccttaaagaagagaacttcatcgccagcattggtccagaggttatcaaacctgtctttgacctcggcgagaccgaggaaaagaaatctcagatctccgccgacagtggggttagcctgaccagtagcagccagcggactgatcaggatagcgttatcggtgtaagccccgccgtgatgattcggtctagtagccaggacagcgaggttagcaatagctcaggcgagacccttggtgctgacagtgacctgtcttccaatgctggagatggtcccggaggagagggcagcgtgcatcttgccagttcaagaggtactctgtctgatagcgagatcgaaaccaattcagccacgtccactatctttggaaaagcccactcacttaagccctccattaaggaaaaattagctgggagcccgatcagaaccagtgaggacgtaagccagcgcgtctacttgtacgaggggctgttggggaaggagcgaagtactctgtgggatcagatgcaattctgggaagatgcattcttagacgctgtcatgttggagagagaaggaatggggatggaccagggaccccaagagatgatcgatcggtacttaagcctcggtgaacacgaccggaagaggctggaggacgatgaggatagacttctggccacgctgcttcataacctgatttcctatatgctcctgatgaaggtcaataaaaacgatatccggaaaaaggtgcggaggctgatgggcaaatcacacattggcttagtgtattctcaacagatcaacgaggtgcttgatcaactcgccaacctgaatggccgggatctgtccatctggagttctgggtcaagacacatgaagaaacagaccttcgtggtgcacgctggtacagatacaaatggcgatatcttcttcatggaagtgtgtgatgattgcgtggtcctcagaagcaacatcggcaccgtctacgaaaggtggtggtatgagaaactcatcaacatgacttattgcccaaagacaaaggtgctgtgtctgtggcggcgtaatggctccgagacccaactaaacaaattttatacaaaaaaatgtagagagctatactattgcgtcaaagacagtatggagcgggctgcagctcgccagcagtccatcaagccaggacctgagctggggggagagttccccgtccaagacctcaaaacaggcgaggggggactcctccaggtgacactggaagggatcaatcttaagtttatgcataaccaggtgttcattgagctgaatcacatcaagaagtgtaacacggtgcgcggcgtgttcgttcttgaagagttcgtgcctgaaattaaggaagtggtgagccataaatacaaaactccaatggcccacgagatctgttactccgtgttatgtttgtttagctacgtggccgctgtacattcatcagaggaggatcttcggactccccctagacccgtctcctcttag

SEQ ID NO: 194232 - DNA, 4764 bp, synthetic construct
  misc_feature 1..4764: note = Description of Artificial Sequence: Synthetic coding sequence
  source 1..4764: mol_type = other DNA
atggtgcagaagaagaagttctgcccccggctgctggactacctggtgatcgtgggggcccgccatcccagttccgattctgtggcccaaacacccgaactgctccgacggtatcctttagaagatcacacagagtttcctttaccacctgacgtcgtgttcttttgtcagcctgaaggctgtctgagtgtgcggcaacggcgaatgtccctgcgggatgataccagtttcgtgtttacgctgaccgataaggacaccggagtcactcggtatggcatatgtgtaaacttttataggtcatttcagaaacgaattagcaaggagaagggggaaggtggggccggatccaggggcaaggagggaacacacgctacttgtgctagcgaagaggggggcacggaaagcagcgaaagtgggagctcactacagcctctcagcgccgattcgaccccggacgtgaatcagagcccccggggcaagagacgagccaaagcaggatcaaggtcacggaatagcactctgacctctctgtgtgtgctgtctcactatccattcttcagcacattccgggagtgtctgtacacgctgaaacgcctcgtggattgctgttcagagcggctgctgggaaagaaactgggaataccgcgtggagtgcaaagggacaccatgtggagaatcttcacgggaagtctactagtggaagagaaaagctccgctctgctccacgacctgcgtgagattgaggcatggatatatcgcctcttacggagccccgtgcccgtgagtggacagaagcgtgttgatatcgaggtcctcccccaagaactgcagcccgctcttacatttgcactccctgaccccagccggtttactttagtcgatttccccctgcatctgccgctagaactcttgggtgtcgacgcatgtctgcaggtgctgacttgcatacttcttgagcataaagtggtcctgcagagcagagattataacgctttgtcaatgtccgtgatggctttcgtcgcaatgatatatcctctcgagtacatgttcccggtaatacctctactcccaacgtgcatggcctctgctgaacagctgctactggcacctactccctatattatcggagttccagcaagtttttttctctacaagctggatttcaaaatgccagacgatgtatggctcgtggacctggattctaatcgcgtcatcgctcccaccaatgccgaagttcttcccatattgcctgagccagagtccctcgagttgaaaaaacatctgaagcaggcactggcttctatgtctctgaatacccagccaatattaaacttagaaaagttccatgagggtcaggaaattccactcttattaggccggccctctaatgacctgcaatcaacgccttccactgaattcaaccccctgatatatgggaatgacgtcgatagcgtggatgttgcgactcgagttgcaatggttagattcttcaactcggcaaacgtgctgcaggggttccagatgcatacacgaacactcaggctttttccccggccagtagttgccttccaagccgggtcttttcttgcgtcacgtccccgtcaaacaccctttgccgaaaagctggcaaggacgcaggccgtggaatatttcggagaatggatccttaatccgacaaattatgccttccagcgtattcataataacatgttcgacccagcgctgatcggtgataagcccaagtggtatgcacaccagctccagcctatccactacagagtatatgactccaacagtcagctcgccgaagcactgtccgtcccacccgagagagactccgattcagaacctactgacgacagtggctccgattcaatggactacgacgacagttcctcatcttactcctctctgggggatttcgtcagcgaaatgatgaagtgcgatattaacggtgacaccccaaatgtggacccgctgactcatgcggccctaggggatgcttccgaagtggagatcgacgaactgcaaaaccagaaggaagccgaggaaccagggccagactcagagaattctcaggagaaccctcctttacgaagctcttcttccactactgccagctcgtccccatctacagtgattcacggtgccaattccgaacccgccgattctaccgaaatggacgataaagccgcagtgggcgtgtctaagcctctcccgagcgtgcccccatcgataggcaagtccaatgtcgatcgtagacaggcagaaataggcgagggttctgtgcggagaaggatatatgacaacccatatttcgaaccacaatatgggttcccccccgaagaagatgaagacgagcagggagaaagctacaccccccgcttcagccagcatgtgtctggaaatcgcgcccaaaagcttctgaggccaaatagcctgcgactggcatctgatagcgacgccgagtctgactctcgcgcctcaagtccgaatagtactgtttccaatacgtccactgagggttttgggggcatcatgtccttcgccagctctctgtatcgcaatcacagcacttcctttagtctaagcaatctgaccctgccaaccaagggcgcccgcgaaaaagctacgcccttcccttccctcaaggggaacaggagagccctagtggatcaaaagtcgtctgtgatcaagcattcacccaccgtgaaaagggagcccccatctccacagggcagatcaagcaatagtagcgagaaccagcaatttctgaaggaagtggtccatagcgtacttgatggccagggagttggctggctcaacatgaagaaagtgagaagactcctggagtctgagcagctgcgggtgtttgtattgagcaaactcaataggatggttcaatccgaagacgacgctcgacaagatatcattcctgatgtggaaatcagccgaaaggtgtacaaggggatgcttgacctgcttaagtgcacagtgctatctttggagcaatcatacgcccatgcgggcctcgggggaatggcaagcatcttcggtctcctggagattgcccaaacacactattactcaaaagagccggacaaacggaaacgctcacctacagagtcagtgaacactcctgtaggaaaggatcctggactcgctggccggggcgatccaaaggccatggcccagctgcgggttccccagctgggccccagagcgcccagtgccacagggaagggtccgaaggagttggacacacgcagcctgaaggaagagaattttatcgccagtataggccccgaagtgatcaagccagtctttgatctgggcgaaacagaagagaagaagtcgcaaatttcggctgattccggcgtgtctctgacctcctcttcccaacgcacagatcaagactctgtaataggtgtgagcccggccgtaatgatcaggtctagcagtcaggattccgaggtctcaactgtatccaattctagcggggaaacactcggtgctgactcagacctcagcagtaatgcaggggatggccccggcggagagggctcagtgcacttggcctcatctcgcgggactttgtcagactcggagattgagaccaactccgcgaccagtaccatttttggaaaggcgcatagcctgaagccgtcgatcaaggagaagctcgctggttcccctatacgcacctcagaggatgtatctcagagggtgtatctgtatgagggcttgctgggcaaggaacgcagcaccctttgggatcaaatgcagttctgggaagatgcgtttttggatgcagtcatgcttgagagggaaggaatggggatggatcagggtccccaggagatgatcgaccgttacctatcattaggcgagcacgaccgaaaacgactcgaggacgacgaggataggcttttagctactctgctgcacaatctgattagttacatgctactcatgaaagtaaataaaaacgacataaggaaaaaggtgcgaagactcatgggcaaaagccacatcgggctggtatacagtcagcagattaacgaagtcctggatcagctggcgaacctgaacggccgggatctgagcatttggtctagcggcagcagacacatgaaaaagcagacatttgtcgtacacgccgggaccgatacaaatggcgacattttcttcatggaggtttgtgacgattgcgtagtgttgcggtctaatataggcactgtttatgagaggtggtggtatgagaaacttatcaatatgacctactgcccgaagaccaaggtgctgtgtttgtggcgacgcaacggttcggaaactcagctcaacaagttctacactaaaaaatgtcgggaattgtactattgcgtaaaggatagcatggaacgtgctgcggctcggcagcagtcaataaaacccggacctgaactgggcggagagtttccagtccaggatttgaaaaccggggaaggtggactgctacaggtgaccttagaaggcatcaacctcaagtttatgcacaaccaggttttcattgagttgaaccacatcaaaaaatgcaacacagttaggggcgtgttcgtgctggaagaatttgtacccgaaattaaggaggtcgttagccataagtacaagacccctatggcccatgagatttgctattcagtgctgtgcctgttctcctatgttgctgccgtgcactcctcagaggaggatctcagaacccccccaaggccagtgtcctcatag

SEQ ID NO: 194233 - DNA, 4638 bp, synthetic construct
  misc_feature 1..4638: note = Description of Artificial Sequence: Synthetic coding sequence
  source 1..4638: mol_type = other DNA
atggtgcagaagaagaagttctgcccccggctgctggactacctggtgatagtcggagcccgccatccttcctccgactctgttgcacagacccccgagctgctgagacgatatcccttggaggatcacacagaattcccactgccccccgacgtcgtgtttttttgccagccagaaggctgcttaagcgtccgccagcggagaatgtctcttcgcgatgacaccagcttcgtatttactctgaccgataaagacacaggcgtcaccaggtacggcatctgcgttaacttttatagaagcttccagaaacgaatctctaaggaaaagggagaggggggcgcaggtagcagggggaaagaagggacacacgctacgtgcgcaagcgaggaaggagggacagagtcatctgagtcaggctccagtctgcaacctctcagcgctgattccacacctgatgttaatcagtctccccggggaaagcgcagggcaaaggccgggtcccggtctaggaattctactctgacctctttgtgtgtgctgagccattacccatttttctcaaccttcagagaatgtttgtataccttgaagcgcctggtcgactgctgctccgaaaggcttctcgggaaaaagttagggatcccacggggtgtacagagagacacaatgtggcgaatttttacagggtccctgctcgtggaagaaaaaagcagtgccttattacatgatctgcgcgagatcgaagcctggatatatcggttgctgcgatcgcccgtgcccgtttcagggcaaaagagagtggatatagaagtgcttccccaggagttgcaacccgcactcacttttgccctgccagacccctcaagattcacactggtggactttcccctccatttgcctctggaacttttgggggtcgacgcgtgccttcaggtacttacttgtatcctgctggaacataaggtcgtcctccagtctagggactataacgcattgagcatgtccgtgatggctttcgtggcaatgatttatcctttagaatatatgttcccagtgattcctcttctaccaacatgcatggcatctgcagagcagctcttacttgctccaactccttacatcatcggagtgccagccagcttcttcctgtacaagctggattttaaaatgccagacgatgtgtggctggttgacctcgacagcaacagggtgatcgctccaacaaatgcggaagttctgcccatcctgcccgaacccgaaagtttggaactgaagaagcatctgaaacaggccctcgcaagcatgtcccttaacactcagcctatcctgaacttagagaaatttcatgagggtcaagagatcccgctccttttaggcaggccttcaaacgatctgcagtccaccccctccaccgaattcaatccgctgatctatggcaacgacgtcgatagcgtcgacgtggcgacgcgcgtcgccatggtcagatttttcaattcagcaaacgtcttgcagggcttccagatgcatacccgcacacttcgactgtttccaaggcctgttgttgctttccaagctggcagcttcctggctagccgccctagacagacgccctttgccgaaaagttggccaggacacaggccgtcgagtatttcggagagtggatcctgaacccaactaactatgcctttcagaggattcacaataatatgtttgaccctgccctaattggggacaagcctaaatggtacgctcaccaactccagccaatccactaccgcgtttatgacagtaatagccagcttgcagaggccctgagtgtgcctcccgagcgggactcagacagtgagcctactgacgatagcggctctgatagtatggactatgacgattcttcctccagttattcctcactgggcgattttgtgtccgagatgatgaaatgtgacattaatggggatactcccaacgttgaccccttgacacacgcagctctgggtgacgctagtgaagtggagatcgatgaactgcaaaatcagaaggaggcagaggagccaggcccggactccgagaattcccaggagaaccctccgttgcgcagttccagctctactacagcctctagttcaccaagtaccgtgattcatggagctaacagcgagcccgctgactcgaccgagatggatgacaaggctgccgtcggggtgtcaaagcccctgccttccgtccctcctagtataggcaaatctaatgttgaccgccggcaggcagaaatcggagagggggcccaaaaattgttgcgccccaatagtcttagactcgcgtcggacagcgatgctgagtctgactctcgagcttctagcccaaatagcacagtgagtaacacctcaacagagggcttcgggggaattatgtccttcgcttccagtttgtacaggaaccacagcacctcgttctccctgtccaaccttactctaccgacaaaaggggctcgcgaaaaggctactccttttcccagtctcaaagggaatagaagggctctagtcgaccagaagagttccgtgatcaaacactcccccacagtgaagagggagcccccgagtccacagggtcggtcctccaattccagcgaaaaccagcagtttcttaaggaggtggttcactccgtgctcgatggccagggcgtgggttggttgaacatgaagaaggtaaggaggctgctggaaagcgagcagctgcgcgtattcgtgttgtctaaactgaacaggatggtgcaaagtgaagatgacgcgcgccaggatataattcctgacgtcgagataagcaggaaggtctacaaggggatgttagacctgctaaagtgtaccgtcctatcactggagcagtcctatgctcacgctggtctgggcggcatggcttccatctttggtctcctcgagatcgcccagacgcattattattccaaagaacccgacaaacggaagcggagcccaacagaaagtgtaaacactcctgttgggaaagatcctggcctggcaggaaggggcgatcctaaggccatggcccaactgcgggtgcctcagcttggcccccgcgcacctagtgccactggaaaagggcccaaggagcttgatacacgatccttgaaggaggaaaacttcatcgcgtcaattgggccagaggtgattaaacctgtgtttgatctgggagagacagaggaaaaaaaatcccagatttccgccgactccggcgtctctctgacctccagttcacagcgcacagatcaggactctgtgataggcgtctcaccggcggtgatgatcagatcttcttcgcaagatagcgaggtctcgacggtagtatccaactcatcgggggaaactttgggcgccgactccgatttaagtagtaacgccggcgatgggccaggtggagaggggtcagtgcacctggcatcttcacgcgggaccctatcagacagcgagatcgaaacgaactcagccacatcaacaatcttcgggaaagcccatagtctcaaaccaagtattaaggaaaaactggcaggatccccgatcaggaccagtgaggacgtaagccagcgcgtgtatttgtatgaggggctgctcggtaaggaaaggagtaccctgtgggaccagatgcagttttgggaagacgctttcctggacgctgtgatgctcgagagagaaggtatgggaatggatcaggggccccaggagatgattgaccgctacctgtcgctgggggagcatgacagaaaacgtctcgaagacgatgaggatcgtttgctagcgactttgctgcacaatctcatatcctacatgctactgatgaaggtgaacaaaaatgacataaggaagaaggtgcgccgcctgatgggaaagtcacacatcggcctggtctacagccagcagattaatgaagtcctggatcagttggccaaccttaatggcagggatctgagcatctggtcatccgggtctagacacatgaagaaacaaactttcgtcgtgcacgctggtacagatactaatggtgacatcttctttatggaagtatgcgatgattgcgttgtgttacgctctaatatcgggacagtgtacgagcgttggtggtatgagaagctgattaatatgacatactgccccaagacaaaggttttatgtctgtggcgccgtaacggttccgagactcagcttaacaaattctatacgaagaaatgccgagaactgtattattgtgtgaaagatagcatggagcgggccgccgcaagacagcaatcaattaaaccgggcccagagttggggggtgaatttccagttcaggacctcaaaactggcgagggggggctcctccaagtgacgctcgaagggatcaacttgaaattcatgcataaccaggtttttatcgaattgaaccatatcaagaaatgcaacactgtcaggggtgtgttcgttctggaggagttcgttccagaaatcaaagaggtggtgtcacacaagtacaaaactcctatggcccatgaaatttgctattctgtcctgtgtctgttcagctacgtagctgcagttcattcctcggaggaagacctccgaacgcctcctaggccggtgtccagctag

SEQ ID NO: 194234 - DNA, 4440 bp, synthetic construct
  misc_feature 1..4440: note = Description of Artificial Sequence: Synthetic coding sequence
  source 1..4440: mol_type = other DNA
atggtgcagaagaagaagttctgcccccggctgctggactacctggtaatcgtgggtgctaggcacccatccagtgactcagtggctcagacccctgagctgctgcggcggtatcctctggaggatcatacagaatttccactgcctccagacgtagtattcttttgtcaacccgagggatgcctatctgtacggcagagacgcatgtctctccgagacgatacatcgttcgtgtttaccctaaccgataaagatactggcgtaacccgctatgggatctgtgttaacttctacagatcgttccaaaagagaatttctaaggagaagggcgagggcggtgccggctcaagaggaaaagaagggacccatgcaacgtgtgcaagcgaggagggtggaactgaatcctccgagagcggaagctccttgcagcctttgtccgccgatagtaccccagacgtcaatcagtcaccgcgcggcaagcgacgggccaaggccggatctcgctctcgcaactccaccctgactagtctgtgtgttctaagccactatcccttcttctctacttttcgggagtgtttatatactcttaaaaggttggttgattgctgcagcgagcggctgctgggcaagaagctaggcattccccgcggagtacagagggacacaatgtggcgtatatttacaggctcgctgcttgtggaagagaagtcaagtgctctcctgcacgatttgcgggagattgaagcttggatatatcggctgcttcggtcccccgtgcctgtgagcgggcaaaaaagggttgatattgaagtgcttccgcaggaactccaacctgcgctcacattcgctttgcctgatccatctagatttacattggtggacttccccctccacctccccttggagctgctcggggtggatgcttgtctgcaggtgctgacctgcattttacttgagcacaaggttgtgctgcagtcccgagattacaatgcattatcaatgagcgtaatggcatttgtagccatgatctatccgttagaatatatgtttcccgtcatccctctcctgcctacatgtatggccagtgccgaacaactgcttttagcgcccacaccttatataatcggcgtgccagctagtttttttctgtataaattggactttaaaatgccggacgacgtttggctggtcgatctggacagcaatagggtgatcgcaccgaccaacgccgaagtgctgccaattcttccagagcccgagagcctagagctgaagaaacaccttaagcaggcactggcctcaatgagcttaaacacacagcccatactaaacttggaaaaattccatgaggggcaagaaatccctttactacttggaagaccttctaatgatctgcaaagcaccccatccaccgaatttaacccacttatctacggaaacgatgtggacagtgtagatgtggcgacccgggttgctatggtcagattctttaatagcgcaaatgttctgcaggggttccagatgcatacccggaccttgcgattgtttcctcgccccgtagttgcttttcaagccgggagttttctggccagtagacccagacagacaccattcgccgaaaagcttgccagaactcaggcagtagaatactttggagaatggatcctcaaccctactaattacgcatttcaaagaatccacaacaatatgttcgatccggcattaattggagacaagccaaagtggtacgcacatcaacttcagcccattcattaccgggtgtacgatagtaacagccaactggcggaggccctgagcgtaccccccgaacgcgattcagattccgaacccacagatgactcaggatctgatagcatggattatgatgacagctcatcaagttacagcagtctcggcgatttcgtctcagagatgatgaaatgcgacataaacggagacacaccgaacgtggacccactgacgcatgctgcattaggtgatgcttccgaggttgagattgacgaattacagaatcagaaggaggcagaggagccagggcccgatagcgaaaacagccaggagaaccccccactccgcagttcatcatctactactgcctcatccagcccctccactgtgattcacggagcaaactccgaacccgcagactcaaccgagatggatgacaaggctgccgtgggcgtcagtaagccgctgccgagtgtgccgccgtctattggtaagagcaatgtggacaggaggcaggccgagatcggggagggggcacagaaactcctccgcccaaacagcctcagactcgccagcgactcggacgcagagtccgactctcgcgcgtcaagccccaattcaacagtgagtaatactagtacagagggattcggagggataatgagtttcgcaagttctctttaccgtaatcacagcacttccttctcactaagcaacctaacgctgcccactaagggtgccagggagaaggccacacctttcccttctctcaagggtaacagaagggctcttgttgatcagaagagtagtgtgattaagcactctccaacagtaaaacgcgaacccccttcacctcaaggaaggtcatccaatagttcggaaaaccagcagttcctgaaagaggtggtgcactctgtactggatggtcagggcgtgggttggcttaacatgaagaaggtcagacgcctcttggagagtgaacagctcagggtctttgttctgagcaaacttaacaggatggtgcagagtgaagacgatgctaggcaggatattattccagatgtggaaatttcacgtaaagtgtacaaggggatgcttgatctgctcaaatgcactgtcctgagcctcgagcagagctatgcgcatgctggcctagggggtatggctagcatcttcgggctcctcgagatagcacagacccattactacagcaaagagcccgacaaaaggaagaggtccccaaccgaaagcgtaaacaccccggtggggaaggaccctggcttggcgggaaggggtgatcccaaggctatggcccagcttcgcgtgccgcagcttggcccccgcgcgccatccgctacaggaaagggccctaaagagctagatacaagatctcttaaggaggagaacttcatagccagtattggtcctgaagtgatcaagccagtgtttgatctcggtgaaacagaagagaagaaatcacagatttctgcagatagcggagtatctctcacaagctcgtcccagcggaccgaccaggactcagtcataggggtaagccctgccgtgatgatcaggtcctcctctcaggactccgaggtaagcaccgtggtgtctaattcctcgggggagactttgggagctgatagcgacctgtccagtaacgccggtgatggtcccggcggagaagggtcagtgcatctcgcctcttcgcgcggaaccctatcagatagcgaaattgagactaattctgccacctctaccatctttggtaaggcacactccctcaaaccatccataaaggaaaagctcgctggcagccccatccggacatctgaggacgtcagtcaacgggtttacctgtatgagggtctcctcggaaaagagcgttccaccctgtgggatcagatgcaattctgggaggatgctttcctcgacgcagtgatgctcgagcgagaagggatgggcatggatcagggcccgcaggaaatgatcgatagatacctgtcgctgggtgagcatgatcgcaagcggcttgaggatgacgaggaccggcttcttgctactctgctgcacaaccttatctcctatatgctgctgatgaaggtcaacaaaaatgatatacgtaaaaaagtacggcggctaatgggcaagagtcacatcggtttagtctattcacagcaaattaacgaagtcttggatcagttagcaaacctcaacgggcgggatctgtccatatggtcaagcggctctaggcacatgaaaaagcagaccttcgtggtgcatgctggaactgacacgaatggagacatctttttcatggaagtctgcgatgactgtgtggtgctgcggagtaatattggtacagtttatgaacgctggtggtacgaaaaactgattaacatgacttattgcccaaaaaccaaggttttgtgcctctggcgccgcaatgggagtgagactcagttgaacaaattttacacaaagaagtgcagagaactgtactattgtgtcaaggactcaatggagcgggctgccgcaagacagcagtccatcaaacccgggcccgagcttggaggcgaattccctgtgcaggatttgaaaaccggggaaggtgggctcctccaggtgaccctcgagggcataaacctgaaattcatgcacaatcagttccttaagctgaagaagtggtag

SEQ ID NO: 194235 - DNA, 4698 bp, synthetic construct
  misc_feature 1..4698: note = Description of Artificial Sequence: Synthetic coding sequence
  source 1..4698: mol_type = other DNA
atggtgcagaagaagaagttctgcccccggctgctggactacctggttatcgttggagcgcggcacccaagctctgattccgtggcccagacccccgagctcctgcgcagatatcccctcgaagaccatacagagttccccctgccacctgatgtggttttcttctgccagcccgaaggatgtctcagcgttcggcagcggcggatgagcctgcgcgacgacacttctttcgtgttcactctcactgacaaagacaccggcgttactagatatggcatctgcgttaacttttataggtctttccaaaagcggatttctaaggaaaaaggcgaaggtggagctggttctaggggtaaagaaggcactcacgcgacctgtgccagcgaagagggtggtaccgagagtagcgagagcggaagcagccttcagcccctctctgcagattccaccccagacgtgaatcagtcaccacgggggaagcgccgtgccaaagctgggagccgttcccgcaactctacgttgaccagcctctgcgtgctcagtcactaccccttcttttccacattcagagagtgtttgtacaccctgaagagactagtggactgctgctctgaacgcctgttaggcaagaagctgggcatcccccgtggcgtgcagcgggacaccatgtggcggatattcacaggatcccttttggtggaagaaaaatcctctgcattgctgcacgacctgagggagatcgaggcatggatttatcgattactgcgctcccctgtgccggtgtccggccagaagagggtggatattgaggtgctcccccaggaactgcagcctgcccttacatttgccttacccgatccctcgagatttactttagtggacttcccactgcacctgccattggaactgctgggggtggacgcttgcctgcaggttctgacctgcatcttactggaacataaagtcgtcctccagtctcgagattacaatgcactctccatgtctgtcatggcgtttgtcgccatgatttatccccttgaatacatgttccccgtcataccccttctccccacctgtatggcgagcgccgagcagctgctgctcgccccgaccccgtacatcattggagtgccagctagcttcttcctgtacaaactcgactttaaaatgcccgacgacgtgtggctcgtggacttagattcaaatagagtgatcgctcctactaatgctgaggttctccctatccttcccgaaccggagtccttggagctcaagaaacacctcaagcaggcactggctagtatgagtttgaacacgcaacccatcctcaacctggagaagtttcacgagggccaagaaatacccttattgctgggccgaccatccaacgatttgcaatccacgccgagcaccgagttcaatcccctaatctatggaaatgacgtggacagcgtagatgtggccacaagagttgccatggtgaggttctttaattcagctaatgtgttgcaggggtttcagatgcacacgcgcactctgcggctcttcccaagaccggtggtggcatttcaggctggctcgttcctggcgtccagaccccgtcagactccttttgcggaaaagctggcccggacccaggctgtggaatactttggtgagtggatcctgaaccccaccaattatgcctttcagagaattcataacaacatgtttgaccccgcccttattggcgataaacctaagtggtacgcccatcaattacagccaatccactatagagtctacgacagcaattcccagctggctgaggccctctcagtcccacccgagagggactctgacagcgagccaactgacgactcaggtagtgacagtatggactatgacgactcttccagctcctacagttcgttgggtgatttcgtaagcgagatgatgaaatgtgacattaatggtgatacacctaacgttgatccattgacacacgcggcattgggggatgccagtgaggtggagatcgatgaacttcagaaccagaaggaagcagaagagccgggtccagattcggagaactctcaggagaaccctccactccgcagctcctcctccaccactgcttcaagcagtcccagtaccgtgattcacggagccaacagtgaacctgccgactctactgagatggacgataaggcagctgtgggggttagtaagcctttgccttcagtaccccctagcattggaaaaagcaacgttgataggaggcaagcggaaatcggagagggtgcccaaaaactgctgcggcccaattcactgcgccttgcaagtgatagcgacgcggaatctgactctagggccagtagtcctaattctaccgtgagtaacaccagcacagaaggctttggcggcattatgtctttcgcttcaagtctatataggaaccacagtacttccttcagtctgtctaacctgacacttcccactaaaggagcacgagaaaaggcaacgccctttccttcattgaaggtgttcggcttgaataccctgatggagatagtgacggaggccggccctggatctggcgaagggaaccgaagggccctcgttgatcaaaagtcctcggtgattaaacactcccccaccgtcaagagagagccaccatccccacaaggtcgcagtagtaattcaagcgaaaatcagcagttcctaaaagaggtagtccacagtgtgctagatggccaaggagtagggtggctaaacatgaaaaaggtgaggcgcttgctggagagtgagcagctgagagttttcgtactgagtaagctcaacagaatggtgcagagtgaggatgatgctcggcaggatatcattccagatgtcgaaattagtaggaaagtttacaagggaatgttggacctcctcaagtgtactgtgctctctctagagcaatcatatgctcacgcaggtctcggcggcatggcaagcatctttggccttctcgagattgcacaaacacattactatagcaaagaaccggacaagcggaagcgctccccaactgaatcagtcaatacgcccgtcgggaaggaccctggccttgccggcaggggtgaccctaaggccatggctcagctacgagtacctcagctaggtccaagggccccctctgcaaccggaaagggcccaaaagagttagacacgcggtcccttaaagaggaaaatttcatcgccagtattggtccagaagtcattaagcctgtcttcgatctcggggagaccgaagagaaaaaatctcagatctccgccgatagcggagtcagtctcacatctagttcacagcggaccgatcaggactcagtgataggggtcagtccagcagtcatgatccgcagctcctcgcaggattctgaagtctcgacagtcgtcagtaactcctcgggagagaccctaggtgcagattctgacctctcttctaacgctggagatggaccagggggagagggtagtgtgcacctggcctctagtaggggaacattgagcgatagcgagatagagacgaattccgccacctctacaattttcggaaaagcacactctctgaaaccttccataaaagaaaaacttgccggaagccctattcggactagcgaggatgtctctcagcgcgtgtatttatacgaagggttactcggtaaagaacgatccacactatgggaccagatgcaattctgggaggacgcttttctcgacgccgtcatgcttgaacgcgagggaatggggatggatcagggaccacaggagatgattgatcggtacttgagcctgggcgagcatgatagaaagaggctggaagacgacgaggataggttgctagccaccctcttgcacaatctgatttcctatatgctgttgatgaaagtcaacaagaatgatatccgcaagaaggtgcgacggctgatgggtaagtcccatatcggattggtgtattctcagcagatcaacgaggttctggatcagctggccaacctgaacggtagagacctctccatatggagctccggcagtcgccacatgaaaaagcaaacgttcgtggttcacgccggtacggatacgaatggcgatattttttttatggaagtttgcgacgactgcgtagtcttaagatcaaacattggcacagtgtatgagcgttggtggtatgagaaactgattaacatgacgtactgtccaaaaactaaggtgctgtgcctctggagaagaaacgggtcagagacgcagctgaacaagttttacacaaagaaatgtagagagctatactactgcgtgaaggatagcatggagcgagcagcagcaaggcagcagtctatcaaacccggaccagagctgggtggcgaatttccagtacaggacctgaaaaccggtgagggtggcctcctgcaggtcaccttagaggggattaatctaaagttcatgcacaaccaagtattcatagagcttaaccatatcaaaaagtgtaacactgtcagaggagtgtttgtgctcgaggagtttgtacccgaaattaaagaggtggtgagtcataagtataaaacccccatggcccacgaaatctgttactcagtgctgtgcctctttagctatgtggccgccgttcattcgagcgaagaggatttacggaccccgcctcggcccgtcagcagctag

SEQ ID NO: 194236 - DNA, 588 bp, synthetic construct
  misc_feature 1..588: note = Description of Artificial Sequence: Synthetic coding sequence
  source 1..588: mol_type = other DNA
atgggcagccagagcagcaaggccccccggggcgacgtgaccgccgaagaggccgctggtgctagcccggcaaaggccaacggccaggaaaatgggcacgtaaagagcaacggggatctgagtccaaaaggggagggagagtctccccctgtaaatggtaccgatgaagcggccggagccaccggcgatgctatcgagcccgccccaccgagtcagggcgcagaagctaagggagaggtgcctcctaaggaaactcctaagaagaagaaaaagttttcctttaagaagcccttcaaactgagcggcctcagttttaagagaaataggaaagaaggtggcggtgactctagcgccagtagcccaacagaagaagaacaggaacagggcgagattggagcttgctcggatgaaggcacggcacaggaggggaaagctgccgcgacgccggagagccaggaaccccaagctaagggcgccgaagcttctgctgccagtgaagaggaggcaggcccccaagcaactgaaccaagcaccccttccggcccagaatctggccccacccctgcctctgccgaacagaacgaatag

SEQ ID NO: 194237 - DNA, 1377 bp, synthetic construct
  misc_feature 1..1377: note = Description of Artificial Sequence: Synthetic coding sequence
  source 1..1377: mol_type = other DNA
atgagcaacgacggccggagccggaaccgggaccggcggtacgacgaagtaccatccgacttaccttaccaggataccactatccgcactcaccccactttgcacgacagcgagcgcgctgtctctgcagacccactgccaccaccacctcttccactccagcctcctttcggacccgatttttattccagtgataccgaagaacctgccattgctccagacttgaagccagtgagacggttcgtgcccgactcctggaagaacttttttcggggaaagaagaaggatccagagtgggataagcccgttagtgatatccgctatatttctgatggcgttgagtgttcacctccagcctctcctgctcggccgaatcaccggtctccgctgaactcatgcaaggatccatacgggggtagcgaagggacattcagtagtcgaaaagaagctgacgccgttttccccagggacccctacggatcattggatcgccacactcagaccgtacgaacctactccgaaaaggtggaagaatataaccttcgttatagctatatgaaaagctgggccggactgctgagaattctgggagtggtggagctgctcctgggggcgggggtgttcgcttgcgtcactgcctacatccataaggattctgaatggtacaatctgtttggctacagtcagccgtacggaatgggaggcgtgggcggcctggggtccatgtatgggggctactactacactggccccaagacaccctttgtgctcgtggtggctgggcttgcctggataacgaccataatcatcttagtattgggaatgagcatgtattacaggactatccttctagattccaactggtggccattgaccgagttcggaatcaatgtcgcccttttcatcttgtatatggctgccgctatcgtttacgtcaacgatacgaataggggaggcctgtgctactatcccctgtttaatacacccgtaaacgcagtgttctgtcgtgtcgaaggcggacaaatcgcagctatgattttcctgtttgtaactatgattgtgtacctgatcagcgcgttggtgtgcttgaaactgtggcgacacgaggccgctcggcgacatcgggagtacatggaacaacaggaaatcaacgagccaagcttaagcagcaaaagaaaaatgtgcgagatggcgacctccggggaccgacaaagggattccgaagtcaattttaaggaactgagaacagccaaaatgaagcctgagctcttaagcgggcatatccctccaccacggccagccaacttctttgtttttctggtggaaatgggctttcaccgggtgagccaggacgatctcgatcttttgacgtcatag

SEQ ID NO: 194238 - DNA, 1677 bp, synthetic construct
  misc_feature 1..1677: note = Description of Artificial Sequence: Synthetic coding sequence
  source 1..1677: mol_type = other DNA
atgagcaacgacggccggagccggaaccgggaccggcggtacgacgaagtgccctccgatttgccttatcaagataccacaattagaacccacccgactctgcacgattccgaaagagccgtttcagccgaccccctgccccccccccctttgccacttcaacccccctttggccctgacttttactcctctgatactgaggaacctgctattgcccccgacctgaaacctgtgcgccgtttcgtcccagattcctggaaaaattttttccgaggcaaaaagaaggaccccgagtgggataagccagtgtcagacatcagatacatcagcgacggggtggagtgtagtcctccggcatcccccgctcgcccaaaccataggtccccactcaatagctgcaaagatccctacggcggcagtgagggcacatttagtagccgtaaggaggcagacgccgtatttccgcgcgatccctacgggagcctagacaggcacacacagaccgtaaggacatacagtgaaaaggtggaagagtataaccttaggtactcctacatgaagagctgggcgggtctactgagaatcttaggtgtggtcgaactactgttgggcgccggcgtcttcgcatgcgtgactgcctatatccataaggacagcgagtggtataatctattcgggtattcccagccttatggcatggggggggtgggagggctagggtccatgtacggaggttattattacactgggcccaagacccctttcgtgcttgtggtagccggtcttgcatggatcacaaccattataattctggtgctgggcatgagcatgtattatcgaacgatattgctggactctaactggtggcccctcaccgaatttggcatcaacgtggccctcttcattctatacatggcagcggcaattgtatatgttaatgacacaaatcgtggcggtctgtgctactaccctctttttaacactccagttaatgcagtgttctgtagggtagaagggggccagattgccgcgatgatcttcctgttcgtgactatgattgtctacctgatctccgcgcttgtatgtttgaagctctggcgccacgaggcagctcgaaggcatcgcgaatacatggagcagcaggaaatcaatgagccatccctgtcctctaaaaggaaaatgtgtgaaatggccacttccggagacagacagagagatagtgaagtgaacttcaaagaactgaggacagcgaagatgaagccagaactgctctcggggcacatccccccaggccacatccccaagcctatagtgatgcctgactacgtcgcaaagtaccccgtgatacagacagatgacgagagagagcggtacaaggcggtgttccaggaccagtttagcgagtataaagagctcagcgccgaggttcaggcagtcctacggaaatttgatgagctcgacgccgtaatgagtaggctgcctcaccactcagagtctcggcaggagcatgaaaggatcagcagaatccacgaggagtttaaaaagaagaaaaatgaccccacatttttggaaaaaaaagagagatgcgactatttaaaaaacaagcttagccacatcaaacagcgcatccaagagtacgataaggtgatgaattgggatgttcaaggctattcatag

SEQ ID NO: 194239 - DNA, 1329 bp, synthetic construct
  misc_feature 1..1329: note = Description of Artificial Sequence: Synthetic coding sequence
  source 1..1329: mol_type = other DNA
atgagcaacgacggccggagccggaaccgggaccggcggtacgacgaggttccatctgaccttccctatcaggataccaccattcgcacacaccctactttgcacgactccgagcgcgctgttagcgctgatccgctcccgccaccccctctgcccttgcagccaccgttcggccctgacttttactccagtgacactgaggagcccgcaattgcacctgatctcaaacctgtgcgacgattcgttccagatagttggaaaaatttcttcagagggaagaagaaggatcccgaatgggataaacctgtatccgatatcaggtacatatcagacggggttgagtgttcacctccagcctcacctgccaggcctaaccacaggtcgccccttaacagttgtaaggacccctatggaggatccgagggcacttttagctctaggaaagaggccgacgcggtgtttcctagggacccctacggctccctggaccggcacactcagacagtccgtacgtactctgagaaagttgaagaatacaacctccgttattcttatatgaagtcctgggcgggactgctgaggattctcggagtggtcgagctgttactgggcgccggggtgttcgcatgcgttaccgcatacattcacaaagacagcgagtggtacaacctgttcggatactctcagccctatgggatggggggcgtaggcgggcttgggagcatcgccttggtgtgcctcaaactgtggaggcacgaggctgcgcggagacaccgggaatacatggaacagcaggagatcaacgagccatccctgagcagcaaacgtaagatgtgtgagatggctacgagtggagatcggcaaagagatagtgaagtgaacttcaaagaattgagaactgctaagatgaagccggagctgctgtccggccacattccccctgggcatatccctaaacccatcgtgatgcccgattacgtggctaaatatccagtgattcagactgacgatgaacgagaacggtacaaggccgtgttccaggatcaatttagtgaatacaaagagttgtccgcagaagtgcaagccgtgctgagaaagttcgatgagctggatgccgtcatgtcaagacttccgcaccacagcgaaagccgacaagagcatgagaggatctctcggatccacgaggagtttaaaaaaaagaaaaacgatcccacgttcctcgagaaaaaggagcgctgtgattatttgaaaaacaagctctcgcatattaaacagagaattcaggaatatgacaaagtcatgaactgggacgtgcagggctactcgtag

SEQ ID NO: 194240 - DNA, 1641 bp, synthetic construct
  misc_feature 1..1641: note = Description of Artificial Sequence: Synthetic coding sequence
  source 1..1641: mol_type = other DNA
atgagcaacgacggccggagccggaaccgggaccggcggtacgacgaagtgccatcagacctgccataccaagacaccaccattaggacacaccctacacttcacgactccgagcgtgccgtgtctgcggacccacttcctcctccgcctctccctctgcagcccccgtttgggcccgacttttattcctccgacaccgaagagcccgcgatagctccagatctcaagcctgtgcgccgctttgtccccgactcttggaagaactttttccggggaaagaagaaggaccctgagtgggataagccagtgagtgatatccggtacatcagtgatggagtggagtgttcgcccccagctagccctgcccgacccaaccatcggagccccttgaacagttgcaaagatccctacggaggctctgagggtaccttcagctcccgaaaggaagctgatgccgtgttcccacgagacccatacggatctctggatagacacactcagaccgtccggacatactccgaaaaggtggaggagtataacctgagatactcatatatgaagtcatgggctggtctgctgcgcatacttggcgtagtggagttattattgggcgcaggggtctttgcatgcgtaacggcttacattcacaaggattccgagtggtataacctgttcggatatagccagccctatggcatgggtggcgttggggggctcggaagcatgtacggtgggtattactatactggcccaaagaccccttttgtcctggtcgtggcgggactggcctggattacaacgattatcatcctggtgcttggaatgagcatgtattatagaaccattttgctggattccaactggtggccactgactgagtttgggattaatgtggccctattcattctctacatggcagccgccattgtttatgtgaacgacactaatagagggggcctgtgttactatcctctgtttaataccccagtgaatgcggtattttgtcgtgtggagggcggacagattgccgccatgattttcctgtttgtgaccatgatagtctacctcatctctgcactcgtgtgtctcaagctgtggagacacgaggccgcacgaaggcacagggagtatatggaacagcaagaatgtgagatggccacctcaggcgaccgtcagcgcgacagcgaggtcaatttcaaggagttgaggacagccaagatgaagccggagctgctaagcggacatattcctcccggtcatatccctaagcccatcgtgatgcctgactatgttgccaaatacccagttatccagacagatgacgagcgggaacggtacaaggcggtgttccaggatcagttctctgagtataaagaactgagcgcagaggtccaggctgtgcttcgaaaattcgacgagctggatgcagtcatgtccagactgccgcatcacagcgagtctagacaggagcacgagagaatatctagaattcacgaggagttcaagaaaaagaaaaatgatcctaccttcctggagaagaaagagcgctgtgactatttgaaaaataaactctcgcatatcaagcagcggatccaggagtatgataaggtgatgaattgggatgttcaaggatacagctag

SEQ ID NO: 194241 - DNA, 1551 bp, synthetic construct
  misc_feature 1..1551: note = Description of Artificial Sequence: Synthetic coding sequence
  source 1..1551: mol_type = other DNA
atgagcaacgacggccggagccggaaccgggaccggcggtacgacgaagttccatctgatctgccttaccaggacaccaccatccgcacacaccctacactgcacgattccgagagagcagtgtccgcagatccactcccccccccccctttaccgttgcaacccccattcggtcccgatttttactcttccgacaccgaggagcccgcaatagctccggacttgaaacccgtgcggcgtttcgtgccagattcttggaagaattttttcagaggcaagaagaaggatcccgagtgggacaagcccgtctccgatatcaggtatatcagcgacggtgtggagtgtagtccaccagctagtccagcccggcccaaccacagaagcccattgaattcctgcaaagatccctacggcgggtccgagggcactttctcctcacgcaaggaagccgacgcagtcttccctcgggacccctatgggtccttggaccgtcacacacagaccgtcagaacgtattcagaaaaggtggaagagtacaatttaaggtatagctacatgaagtcatgggccggtctactgcggatcctcggtgttgtggagttgttgcttggtgcaggagttttcgcttgcgtcactgcctatatacacaaagatagcgaatggtataacctgtttggctacagtcagccgtacgggatgggtggcgtggggggcctggggagcatgtatggcggctattactacactggacctaaaacccccttcgttctggtggtggctggactggcctggataacaaccattatcattcttgtcttgggcatgagcatgtattatcgcactatattgctggatagtaactggtggccattgactgaatttggtattaatgtagctttattcatcttgtacatggccgccgctatagtctacgtcaacgataccaaccgcggggggctgtgctactaccctctgtttaacactccggttaatgcggtgttttgtagggtggaaggaggacagattgcagcaatgatctttctgtttgtgaccatgatcgtctacttgatctccgcgctcgtatgcctgaaactgtggcgccacgaagctgccaggcgccatcgcgagtatatggagcaacaggagatcaatgaaccttcactgtccagtaagcggaagatgtgcgagatggccaccagtggagatagacagagggactccgaagtgaattttaaggagctcaggacggccaaaatgaaaccagaattgttatcagggcacattcccccagggcacatacctaaaccaatcgtgatgcccgattacgtcgcaaagtacccggtgatacagaccgacgacgagagggagagatataaggctgtgtttcaggatcagttttcagaatataaagagctgtccgccgaggttcaggctgtactacggaagtttgatgagctcgacgctgttatgtcacgcctgcctcaccactcagagtcccgccaggagcatgaacgtatcagtaggattcatgaggagtttaagaagaagtag

SEQ ID NO: 194242 - DNA, 438 bp, synthetic construct
  misc_feature 1..438: note = Description of Artificial Sequence: Synthetic coding sequence
  source 1..438: mol_type = other DNA
atgagcaacgacggccggagccggaaccgggaccggcggtacgacgaagtcccatctgatttaccttatcaggacaccaccatccggactcaccctactcttcatgattctgaaagagccgtctccgcagaccctctccctcctcctcctctcccccttcagccacctttcgggcctgacttttattccagcgatactgaagagccagccatcgccccagatcttaagcctgtgcgccgattcgtgcccgactcttggaagaacttcttcaggggaaaaaaaaaagacccagaatgggataagcctgtatctgatatcaggtatattagcgatggagttgaatgtagtcctccggcgagtccagcccggcctaaccacagatcaccacttaactcctgcaaggacccctatgggggatctgaaggcacatttagttag

SEQ ID NO: 194243 - DNA, 1206 bp, synthetic construct
  misc_feature 1..1206: note = Description of Artificial Sequence: Synthetic coding sequence
  source 1..1206: mol_type = other DNA
atggaggaccccagcggcgcccgggagccccgggcccggccccgggagcgagaccctggtaggcgtccacaccccgaccagggtagaacccacgataggccccgggaccggccgggagaccctcgtcgcaagcgctcgagtgatggcaacaggcgtcgagacggcgaccgtgatccggagagagaccaggagcgggatgggaatcgagacaggaacagggacagggagcgcgagcgtgagagagagcgggaccccgaccgcgggcctcgaagggatacacatcgcgacgcgggaccaagagctggcgagcacggagtgtgggagaagccccggcagtccagaactcgtgatggcgcacggggcttgacttgggacgctgctgcaccaccaggcccggccccttgggaggcccctgagcccccacagcctcagcggaaaggagacccgggccgcaggcggcctgagagcgagcccccttccgaacggtatcttcctagcacgccacgcccagggagagaagaagtggagtactatcaaagcgaggccgaaggtctgcttgaatgtcacaaatgtaagtatttgtgtactggacgggcttgctgccagatgcttgaagtgctcctgaacctgctaatcctggcttgctcttcagtgtcctattcgtccacgggaggatacacggggatcacctcccttggagggatctattattatcagttcggaggagcgtattccggcttcgacggggccgacggtgagaaggcacagcaactggacgtacaattctaccaactgaagctgccaatggtgaccgtcgcgatggcgtgttcaggcgccttgacagccctgtgttgcttgtttgtggcaatgggcgttctgcgagtgccatggcactgtcctctcctgctcgttactgaagggttgcttgacatgttaattgccggcggatacattccagctttgtatttctactttcactacctgtccgccgcctacggctcacctgtgtgtaaagagaggcaggccctgtaccagagcaaggggtactctggatttgggtgctctttccatggagctgacatcggggctggtatatttgctgctcttggcattgttgtgttcgcactcggagccgtgctcgcaataaaaggatacagaaaagtacggaagttaaaggagaagccagctgaaatgtttgagttctag

SEQ ID NO: 194244 - DNA, 1233 bp, synthetic construct
  misc_feature 1..1233: note = Description of Artificial Sequence: Synthetic coding sequence
  source 1..1233: mol_type = other DNA
atggaggaccccagcggcgcccgggagccccgggcccggccccgggagagggatccagggcgccgcccgcaccctgatcaggggaggacccacgaccgcccacgagaccgtcctggggacccccggcggaaacgcagttccgatggaaataggaggagagatggtgacagggaccctgagagggaccaggagagggacggaaacagagatcgaaacagagaccgggaacgcgagagggaacgcgaacgcgatccagataggggtcccaggcgggacacccaccgggatgcgggacccagagcaggagaacacggcgtttgggaaaagcccagacaatcgcgtacgcgagacggtgcccgaggtctgacatgggacgctgccgccccccccgggccggctccttgggaggccccagaaccgccacagcctcagaggaagggagaccctggtcgacgtagacccgagtctgagcccccctccgagaggtatctcccatcaacccctcgcccaggccgcgaagaggtggagtactaccagtcagaggccgaaggtctgctggagtgtcacaaatgcaagtatctgtgtacggggcgcggcgtcgttcagatcgttgaagtggtgctgaatggtatggtcctgatttgcattgtggcctcctacttcgtgctggctgggttctccgcctctttcagctccggaggagggtttggaaataactattatagccccttcgaaggcaccgagctggagcaggtgcggcagctcgatcagcaatatacaattttgcgctcgcctctgatctacggcggagtggccgtgtctctggggctcggcgtgctgacgatgggcgttttactccagggtgcaaaatctcggacgatgctgtccggaaagtggctactcacagaggccgcattttctctcctcgctgcagtaggatactgcacaggtatcggggtatacctgcacgtggccttacagattaacagtaccgacacatgcaagacaagggaacggctatacgccagaaaaggcctgacatggatggattgccaactcgcaggaaccgacggcgccgcagcgactttcgcctgtctgctagtaatcatgtacggtgcctcagttgtcctagcactcagatcctacagagaacaaaagcgatataaagggtcccgagagcaacccggatcttactcagacgcacctgagtacctttggagcggtaccttgtag

SEQ ID NO: 194245 - DNA, 978 bp, synthetic construct
  misc_feature 1..978: note = Description of Artificial Sequence: Synthetic coding sequence
  source 1..978: mol_type = other DNA
atggacggcagcaacgtgaccagcttcgtggtggaggagcccaccaatatttccactggacggaatgcctctgtcggcaatgcgcacagacagatccctatcgtgcactgggtcattatgagtataagtcctgtgggttttgtggagaatggtattctgctctggtttttgtgctttagaatgaggcgcaatccctttactgtctacatcacgcatctctccattgctgacatctctctgctgttttgtatattcattctttccatcgactatgccctagattatgaactgagctccggtcattactacactattgtgacattgtctgtgacatttctatttggatacaataccggtctatacctgcttaccgccatttccgtcgagcgttgcttaagtgtgctttacccaatatggtacagatgccaccgccccaagtaccagagcgcactggtatgcgcccttctgtgggccctctcttgtctggttaccacaatggagtacgtgatgtgcatcgaccgagaggaagagagccacagccgtaacgattgtcgagccgtgatcatcttcattgcgattttgagctttctcgtgttcacccccctgatgctcgttagtagcaccatacttgtggtgaaaatccgtaagaatacctgggccagccatagttccaagctgtacattgttatcatggtgacgataatcatttttctgatctttgccatgcctatgagactgctctatctcctttattacgagtattggagcacatttggtaatcttcatcatatctctttgctgttctctactatcaattcctctgcaaaccccttcatttatttcttcgtcggctctagtaaaaagaagagattcaaagaatccctcaaggtcgttctcacacgggccttcaaggatgaaatgcagcctagaagacaaaaggacaactgtaacactgtgaccgttgagactgtggtctag

SEQ ID NO: 194246 - DNA, 1137 bp, synthetic construct
  misc_feature 1..1137: note = Description of Artificial Sequence: Synthetic coding sequence
  source 1..1137: mol_type = other DNA
atggtgtggggcaagatctgctggttcagccagcgggccggctggactgtgttcgcggaaagtcagatctcattgagttgcagcttgtgcctgcactcaggagatcaggaggctcagaaccctaacctggtttcccagctgtgcggtgtttttcttcaaaacgagacaaacgagaccatacacatgcagatgagcatggcagtgggtcagcaggctcttccccttaacataatagctccaaaagccgtactagtcagcctgtgcggcgtattgctgaacggcacagtgttttggttgctgtgttgcggagccacaaacccttacatggtctacattttgcatctggtcgcagccgacgttatctatttgtgctgctccgccgtaggatttttgcaggttactctgctgacataccatggcgtggtgtttttcatccccgacttcctggccattctgagccccttttctttcgaggtttgcctatgcctgctggtagccatttcaactgagagatgcgtctgtgtgctattccctatttggtatcggtgccatcggccaaagtataccagtaacgtggtctgcaccctgatctgggggttgccattttgcatcaatattgttaagtcgctctttctgacttactggaaacatgttaaagcctgtgtgatctttctgaagctctcaggcctgtttcatgctattttatctcttgtcatgtgcgttagcagtctgacgcttctcattcgattcctttgctgtagccagcagcagaaagcgacacgcgtctatgctgtggtacaaatcagcgcacctatgtttctgttgtgggccttaccactgtccgtcgctccactgatcacagattttaaaatgttcgtcacaacaagctatctgatttcactctttctgatcattaatagctccgcaaaccctatcatctatttcttcgtaggcagtctgcgcaaaaagagactcaaagagagcttgcgagtaatactgcagagagcccttgccgataaacctgaggttggcaggaacaagaaagccgcaggtattgacccaatggagcaaccacatagcacccagcatgtcgaaaacttactccccagagagcatagggtggacgtagagacttag

SEQ ID NO: 194247 - DNA, 1137 bp, synthetic construct
  misc_feature 1..1137: note = Description of Artificial Sequence: Synthetic coding sequence
  source 1..1137: mol_type = other DNA
atggtgtggggcaagatctgctggttcagccagcgggccggctggacagtatttgcagagagccaaatctccctgtcttgctcattgtgcttgcactccggagatcaggaagcccaaaaccccaatctagtgtctcaattatgtggtgtttttttacagaacgagactaacgaaacgatacatatgcagatgtctatggctgtcggccagcaagcgctccctttaaacatcattgcccctaaggctgtgctcgtcagtttgtgcggagtgctgcttaatggtacagtgttctggcttctgtgttgtggagccacaaacccatatatggtgtacatcttacacttggtggccgcagacgtgatctacctgtgttgcagcgccgttggtttcctgcaggtgaccttgctgacctaccatggcgtggttttcttcatacctgactttcttgcgatcctgtctcccttttccttcgaggtgtgtctatgtctattagttgctatttccacagaacgctgcgtctgtgtgcttttccccatatggtatcgctgtcacagaccgaaatataccagtaacgtcgtgtgcacactgatctggggccttcccttctgcatcaacatcgttaaaagtctctttctcacttattggaagcacgtaaaggcatgtgttatcttcctcaagctgagtggactcttccatgctatcctgagccttgtgatgtgtgtatctagtctgacgctgttgataagatttctgtgttgctctcagcaacaaaaggctactcgtgtctacgcagtggtccagatttccgctccgatgttcctgctttgggctttacccctgagtgtggctcccttgattacagacttcaaaatgtttgtaacaacgtcatatctaatcagcctcttcctgatcatcaactctagtgcgaaccccattatctattttttcgtaggttctctgagaaagaagagactcaaagagtcgctgagagtgatcctgcaaagagccctggccgacaaacccgaggtcggccgaaataagaaggccgctggcattgatcccatggaacagccacatagcacacagcacgtggagaacctcctgccacgcgagcaccgtgtggacgtggaaacctag

SEQ ID NO: 194248 - DNA, 1137 bp, synthetic construct
  misc_feature 1..1137: note = Description of Artificial Sequence: Synthetic coding sequence
  source 1..1137: mol_type = other DNA
atggtgtggggcaagatctgctggttcagccagcgggccggctggaccgtgtttgccgagagtcaaatcagtctctcctgctcactgtgcctgcacagcggagatcaagaagcccagaatcccaatctggtaagccaactttgtggcgtgttcttgcagaacgagacaaacgaaacgattcatatgcagatgtccatggcagtgggccagcaggccttacctctaaatatcatcgcccctaaggcggtccttgtatcgctttgcggagtcttactcaacggaactgtgttttggttgttatgctgtggtgcaactaacccttacatggtgtacatcctgcacttggtggccgccgatgtgatttatctgtgctgctcggccgttggatttctgcaggtcaccctgctgacttaccacggagtagtgttcttcatacccgatttcctcgccattctttcgccgttttctttcgaagtgtgcctatgtctgctggtcgccatctcgacggaacgttgcgtgtgtgtcctgttccccatctggtacagatgtcatcgccctaaatacacatccaacgtggtttgtacacttatatggggacttccattctgcattaatatcgtgaagtccctgtttctcacttactggaagcacgttaaggcctgtgtgattttcttaaaactctccggactgttccacgcaatcctgagtcttgtgatgtgcgtgtcctcacttaccctcctcatccggttcctgtgctgttcccagcagcaaaaggcaaccagggtgtatgccgtggtgcagatttctgcacctatgtttctgctctgggctctgccactcagcgtagccccactgatcactgactttaaaatgtttgtgaccacctcctacctgatctcgctctttctcattataaattcatccgcaaacccaatcatttatttcttcgtgggatcccttcgcaaaaagcgcctcaaggagtccctgagagtgatcctccagagagcactcgccgacaaaccagaggtgggtaggaacaaaaaagcggccggcatcgacccaatggagcagccacactccactcagcatgtagagaacctgctgccaagagagcatcgggttgatgtggagacatag

SEQ ID NO: 194249 - DNA, 1137 bp, synthetic construct
  misc_feature 1..1137: note = Description of Artificial Sequence: Synthetic coding sequence
  source 1..1137: mol_type = other DNA
atggtgtggggcaagatctgctggttcagccagcgggccggctggacggtcttcgccgagagccagatttccttaagctgttcgctctgtctccacagcggcgaccaggaggcccaaaatccgaacttagtgagtcagctttgcggagtctttctccaaaacgagactaacgaaacgatccatatgcagatgagcatggcagtgggacagcaggcactcccactcaacataattgcccccaaggctgtcctcgtgtcattgtgcggcgtgcttttgaatggaaccgtgttttggctgctgtgctgcggcgccaccaatccatacatggtgtacattctgcaccttgtggcggccgatgtaatctatttgtgctgttccgcggtgggattccttcaggtaacattactgacgtatcatggagtggtttttttcatccctgactttttagcaatactgtctcccttttcttttgaggtgtgtttgtgcttactcgtggctatttcaaccgaacgatgtgtctgcgtgctgtttccaatctggtacagatgtcacaggcccaagtatacttctaatgtggtctgcactctcatatggggcctgcctttctgcataaatatcgtgaaatccttatttctgacatattggaagcacgtaaaggcttgtgtcatttttttaaaattaagcggcttgttccacgcaatcctgtcccttgtgatgtgcgtaagctctttgacactcctgatcagatttctctgctgttcgcagcagcagaaggccactcgcgtgtacgccgttgtgcagatctcagcccctatgtttctgttgtgggccctcccactctctgtggcccctctgatcactgacttcaaaatgttcgtgacgacatcttacctgatctccctcttcctcattatcaattcttccgccaatccgataatctacttctttgtgggctccttacgaaagaagaggctgaaagagagcctgagggtgattctgcagcgggcccttgcagataaacccgaggtcggacgtaacaagaaggctgccggcatcgatcctatggaacagccacacagcacacagcacgtggaaaatctgctgccaagggagcacagggtcgatgtggaaacttag

SEQ ID NO: 194250 - DNA, 1137 bp, synthetic construct
  misc_feature 1..1137: note = Description of Artificial Sequence: Synthetic coding sequence
  source 1..1137: mol_type = other DNA
atggtgtggggcaagatctgctggttcagccagcgggccggctggacagttttcgctgaatcacagatcagcctgtcttgcagcctttgtctgcattccggggaccaagaagcccaaaaccccaatttggtatctcagctgtgtggggtgttccttcagaatgagacaaacgagacaattcatatgcagatgagtatggccgttgggcagcaggctctgcccctcaacattattgctcctaaggccgttttggtctccctctgcggcgtgctgcttaacggcaccgtcttctggctgttatgctgcggtgccacaaacccttatatggtttacatcctgcatctggtggccgctgatgttatctacctctgctgcagtgctgtcggattcctgcaagtcaccctactcacctaccatggagttgtctttttcatcccagactttctcgccatccttagtccattttcctttgaggtatgcctgtgcctcttggtcgccataagcacagagcgttgcgtgtgtgttctgtttccaatatggtacagatgccatcgcccaaagtatacgtcaaatgtggtctgtacacttatatggggcctgcctttttgtattaatattgtgaagagcctcttcttgacttattggaagcacgtgaaagcttgcgtgatttttcttaaacttagtggactgtttcacgccatcctcagtctggttatgtgcgtgagcagcttgaccctgcttattcgctttctatgttgtagtcaacagcaaaaagcaacaagggtctacgccgtcgtccagatttcagcaccaatgttcttgctgtgggcactgccactttcggtggcgccgctaataaccgacttcaagatgtttgtcacaacttcatacctgatttctcttttcctgatcatcaatagctccgcaaaccccattatttacttcttcgttggcagtctgcgaaagaagaggctgaaggagtctctaagggtaatactacagcgagcattggccgacaagcccgaagtgggccgaaacaagaaggctgcaggcatcgaccccatggaacagccccatagcacccagcatgtggaaaatctcttgcctcgggaacatcgggtggatgtagagacctag

SEQ ID NO: 194251 - DNA, 1137 bp, synthetic construct
  misc_feature 1..1137: note = Description of Artificial Sequence: Synthetic coding sequence
  source 1..1137: mol_type = other DNA
atggtgtggggcaagatctgctggttcagccagcgggccggctggaccgtgtttgctgaatcccagatctctctttcctgtagtttgtgtctccactctggcgatcaagaggcccagaatccaaatttagtgagccagctctgcggagttttccttcagaatgagactaacgaaactatacacatgcagatgagcatggcagttggtcagcaggcgttgcctctcaacatcattgcacccaaggccgttctcgtatccttgtgtggggtgttgctgaacggtacggtgttttggctcctatgttgcggcgccaccaatccatacatggtttacatactccatcttgtcgccgctgatgtaatctacttatgctgcagcgccgtcggcttcttgcaggtgaccctgcttacctatcatggggtcgtcttctttattcccgactttctggccatcttgtctcccttcagtttcgaggtttgtttatgcctcctcgtcgcaatctccacggaacgttgcgtttgcgtactatttcccatttggtaccgatgccacaggccgaaatacacatcaaatgtggtgtgtacactcatttggggtctccccttctgcatcaatattgtcaagagtctatttctcacatactggaagcatgtgaaagcgtgcgttatcttcctgaagctgagcggcttgtttcacgcgatactctctctggtcatgtgtgtaagttcgcttacactgcttattcggttcttgtgctgctcccagcagcaaaaggctacaagggtgtacgccgtcgtgcagatctccgcaccaatgtttctcctctgggccctgcctctcagcgtggcacctctgatcaccgacttcaagatgtttgtaacgacatcctacctgatctccctcttcctgattattaacagcagtgcaaaccccataatttactttttcgtagggagcctgaggaaaaagaggctgaaggaatccctgagagtgatactgcagcgcgctctggcagataaacctgaggtgggacggaataagaaagcagccggaatagacccaatggagcagccccatagcacccagcacgtggagaatctgcttccacgggaacacagggtggacgtggagacctag

SEQ ID NO: 194252 - DNA, 1137 bp, synthetic construct
  misc_feature 1..1137: note = Description of Artificial Sequence: Synthetic coding sequence
  source 1..1137: mol_type = other DNA
atggtgtggggcaagatctgctggttcagccagcgggccggctggacagttttcgctgagtctcagatctctttaagctgctctctgtgcctgcactctggggaccaggaagcccagaacccaaatttggtgtcccagctctgtggcgtcttcctgcagaatgaaaccaacgaaacaatccacatgcagatgtcgatggctgtgggacagcaggctttgcccctgaatattattgctcctaaagcagtgctggtttctctctgtggggtgctcctgaacggaactgtgttttggcttctgtgttgtggcgcaactaatccttatatggtgtacatccttcacctggttgctgccgatgttatctatctctgctgctcggccgttggctttctgcaagtaactcttctgacttatcacggagtcgtgttttttatccctgacttcctcgctattttatcacctttctcatttgaggtatgcctgtgtttactggtcgctatatcaacagaacggtgcgtgtgcgtgcttttccccatctggtataggtgccataggcctaaatataccagcaatgtggtctgcactttgatttggggacttccattctgcatcaacatcgttaagtcactgtttctgacttactggaaacacgtgaaagcctgtgttatcttcctgaagctcagcggattatttcacgcgatcctgagtcttgtaatgtgcgtgagctcactgacactactgattcgtttcctctgctgcagtcagcagcaaaaagccactcgcgtgtacgccgtggtccagattagcgccccaatgtttcttctttgggctctgccgctatcagtcgcgcccttgataacagatttcaagatgttcgtcacaacaagctacctgatctccctcttcttaatcattaacagctccgctaatccaatcatctattttttcgtgggctctttgcgcaagaagcgtttgaaggaaagcctccgggtcattctacagagggctcttgctgataagccagaggttggtcggaataaaaaagccgccggcatcgatccaatggaacagccacacagtacgcagcatgtggaaaaccttctccctcgcgagcaccgggtagacgtggagacttag

SEQ ID NO: 194253 - DNA, 1137 bp, synthetic construct
  misc_feature 1..1137: note = Description of Artificial Sequence: Synthetic coding sequence
  source 1..1137: mol_type = other DNA
atggtgtggggcaagatctgctggttcagccagcgggccggctggacagtgttcgcggaatcccagatcagtctctcctgtagcctctgcctgcacagcggggaccaggaagcacaaaatccgaacttagtatcccagttgtgtggagtgtttttacaaaacgaaactaacgaaactattcatatgcagatgagcatggcggtggggcagcaggccttacctttaaatattatcgcacccaaagcagtgttggtgtctctctgcggggtgttgctgaatgggactgtgttctggctgctgtgctgcggggctaccaacccttacatggtgtacatcctgcacctcgtcgctgcagacgtcatctacctctgctgctccgccgtgggttttctgcaggtcactcttctgacgtaccatggggtggtcttctttatcccagactttctggctatcctgtctcccttttccttcgaggtgtgcctgtgtttgctggttgctatcagtactgagagatgcgtatgcgtgctttttcctatatggtaccgatgtcatcggccaaaatatacgtccaacgtggtttgcaccttgatctggggcctccccttctgcattaatatcgtgaagtctctgttcctcacatattggaaacacgtgaaggcctgcgtgatcttccttaagctgtccggcttatttcatgcaattctaagcctggtcatgtgcgtctcaagcctgactttattgatccggttcctgtgttgcagccaacagcagaaggccacacgggtgtatgccgtggtccaaatcagtgcaccaatgtttcttctgtgggccctgccactatctgttgcccctctgataacagacttcaaaatgtttgttactacttcatacctaataagcctgttcttaattatcaatagcagcgctaatccaataatttatttcttcgtgggctccctacggaagaaacggcttaaggagagtctgagagtgatactccagagggccctcgctgacaagccagaggtcgggaggaataagaaagcagctggaatagatcccatggaacaacctcactccacccagcacgtcgagaacctactcccaagggagcacagggtggacgtcgaaacctag

SEQ ID NO: 194254 - DNA, 966 bp, synthetic construct
  misc_feature 1..966: note = Description of Artificial Sequence: Synthetic coding sequence
  source 1..966: mol_type = other DNA
atgaaccagaccctgaacagcagcggcaccgtggagagcgccctgaattattcacggggctcaacggtccacaccgcttacttggtgcttagctctctggcaatgtttacttgcttgtgcggaatggctgggaatagcatggtaatttggctgctaggcttccgcatgcatagaaacccattctgcatctatattctaaatctcgcagccgccgatttactgttcttgttctcgatggcaagtacactgagcctcgaaacacagccactggtgaatactactgacaaagtgcacgagctcatgaagcggctgatgtattttgcctacactgttggactgagtctgctgactgcaataagtacccagaggtgcctgtctgtcctgttccccatatggtttaagtgccaccgccctcgtcatctttcggcctgggtgtgcggactgttgtggacactttgcttactaatgaatggcctgactagcagcttctgttcgaagttcctgaagttcaacgaggatcgctgctttcgggtcgatatggtgcaggccgcccttataatgggagtactgacccctgtgatgacactgtcttccctcaccttgttcgtttgggttcggcgttcatcacagcagtggagacgacagccgacccgtctcttcgtggtcgtactcgcgagcgtcctcgtctttctgatttgcagccttcccctgtctatctactggtttgtcctgtattggctatccctgccacccgaaatgcaggtactgtgtttctccctgtcacggttgagttcttctgtatccagttcagccaatcctgtgatctactttctggtcggttctcgcagatctcatagattaccaacccggtccctggggactgtattacaacaggctttgagggaggagcccgaacttgaaggcggcgagaccccgacggtggggaccaatgagatgggggcctag

SEQ ID NO: 194255 - DNA, 936 bp, synthetic construct
  misc_feature 1..936: note = Description of Artificial Sequence: Synthetic coding sequence
  source 1..936: mol_type = other DNA
atggagccccgggaggccggccagcacgtgggcgccgccaacggcgcccaagaagatgtggcttttaatctgatcatccttagcctgacagagggtctgggactcggcggactgttgggaaatggcgctgtgctgtggctgctgagttcaaatgtgtataggaatccgtttgcgatatatcttctggacgtcgcctgtgccgacctgatttttctgggctgccacatggtagctattgtgcctgaccttctgcaggggcgcttagattttccgggtttcgtgcagacttccctcgctactttgcggtttttctgttacatcgtaggcctctcattgcttgccgcagtcagcgtagaacagtgccttgccgccttgttcccagcatggtacagttgtaggcgccccagacacttaaccacctgcgtttgtgccctgacatgggcactgtgtcttctgctccatttattactgagcggagcttgtactcaattctttggtgagccctccagacacctatgcaggactctgtggttagtggccgccgtactgttggctttactctgctgtacaatgtgtggtgcctctcttatgttgttgctccgtgtggagaggggaccccagaggcccccaccccgcggctttcctggtctcattctcctgacagtcctcctcttcctcttctgcgggttgcccttcggtatttactggctgtcacggaacctcttgtggtatattccgcactacttttatcacttctctttcttgatggccgctgtgcattgcgccgccaagcccgtggtgtatttttgcctagggtccgcacagggccgcagacttccgctgaggttagtcctccagagagcactcggtgatgaggctgaactgggggctgttcgcgaaacaagccgccgcggtcttgtcgatatagctgcctag

SEQ ID NO: 194256 - DNA, 939 bp, synthetic construct
  misc_feature 1..939: note = Description of Artificial Sequence: Synthetic coding sequence
  source 1..939: mol_type = other DNA
atgatggagccccgggaggccggccagcacgtgggcgccgccaacggcgcccaggaggacgttgccttcaacctcatcattttgtctctcacagagggcctgggcttaggcggacttctgggcaatggcgcagtgctgtggcttctaagcagcaacgtataccggaaccctttcgccatctacttgctggacgtggcatgtgccgatttaatttttctcgggtgtcatatggtggcgatcgtgcctgacttgctacagggacgacttgatttccccggctttgtgcagacctccctggctacactgcggttcttctgctacattgtgggattgagcctgctggcagctgtcagcgtagaacagtgcctggccgcactcttccccgcatggtattcatgtaggagacccagacacctcacaacctgtgtatgtgccttgacgtgggccttatgtctgttactgcatcttctcctgagcggtgcgtgcacacagttttttggcgagccatctaggcacctgtgcagaaccctgtggctagtggcggcggtcctgctggcccttttgtgctgtaccatgtgtggggcatcacttatgttgctcctccgcgtggagagaggcccacagcggcctccccccagaggatttcccggcctgatactgcttaccgttctgttgttcctgttctgtgggctcccctttggcatctactggctttcacgaaacctgctgtggtatattccccactacttctatcatttttccttcctcatggctgctgtccactgtgctgctaaaccggtggtatatttctgcctgggaagcgcacaaggccggagacttccactgaggctggttctccaacgagcattgggagatgaggccgagcttggcgccgtacgggagacttcaagaaggggcctggtcgatattgccgcttag

SEQ ID NO: 194257 - DNA, 1032 bp, synthetic construct
  misc_feature 1..1032: note = Description of Artificial Sequence: Synthetic coding sequence
  source 1..1032: mol_type = other DNA
atggccggcaactgcagctgggaggcccaccccggcaaccggaacaaaatgtgtccgggactgagcgaagctccggagctgtactctaggggctttttgacaatcgagcagatcgcgatgctacctccaccagcagtcatgaactatatattcctgctcctctgcctatgtgggctcgttggcaatggcctcgtgctatggttttttggatttagtataaagcgtaatccgttctcaatttatttcctgcatctggcctccgcggatgtcggctatctgtttagcaaggctgttttttcgattctgaatacaggtggatttctcggtacatttgccgattatattcggtcggtgtgcagagttctgggcttgtgtatgtttctgacaggcgtttccctgttaccagccgtatcagccgagcgctgtgcctccgtcatttttcccgcatggtattggagacggaggcccaagcgcctgagcgctgttgtatgcgctcttctctgggtcctctcgttattggtaacatgcctccataactacttttgcgtcttcctgggcaggggggcccccggcgccgcttgcagacacatggatatctttctcggaatcctcctcttccttctttgttgtcctctgatggttctgccttgcctggcactcattctccacgtcgagtgccgagccagaaggcgacagcgatctgccaaactcaaccatgtaatccttgccatggtgtccgtttttctcgtctcaagtatctacctgggaattgattggtttctattttgggtttttcagatcccagcccccttcccggaatatgtaacagatctgtgtatctgcataaactcatctgctaagcccatcgtttatttcctggctggaagggataagagccagcgcctgtgggaaccattacgggtcgtcttccagcgggctctcagggacggcgctgagttgggcgaagctggcgggtctactccaaacacggtcacgatggaaatgcagtgcccccccggtaacgctagttag

SEQ ID NO: 194258 - DNA, 948 bp, synthetic construct
  misc_feature 1..948: note = Description of Artificial Sequence: Synthetic coding sequence
  source 1..948: mol_type = other DNA
atggccggcaactgcagctgggaggcccaccccggcaaccggaacaaaatgtgccccggtctgagcgaagcacctgagttgtattcaaggggctttttaacaatcgagcagattgctatgttgccgccacctgctgtgatgaactacatctttctactattgtgcctgtgcggtctcgtggggaacggtcttgtgctctggttttttgggttctctatcctgaatacaggaggttttttgggtacctttgctgactatattcgttctgtgtgccgggtgctgggtctctgtatgtttcttactggcgtgtcactgttgccagctgtttccgctgagcgctgcgcctctgtgatttttcctgcctggtactggcggcggcgtcctaaacgactctccgcggtcgtgtgtgctctcctgtgggtgctgagcctactcgtgacgtgtctccacaattatttctgcgttttcctgggcaggggcgcaccaggcgccgcctgtagacacatggatatctttctcggcattcttctgttcttactgtgctgcccactaatggtgctgccatgccttgccctcatactccatgttgagtgccgagcacgacgtcgtcagcgtagtgccaaactgaatcatgtgatcctagccatggtcagcgtattcctggtgtcttccatttacctcggtatagattggtttctgttttgggtgtttcagattccagcgccatttcctgagtacgtgactgacctgtgtatctgtatcaatagcagcgctaagcccattgtttacttcctggccggacgagataaaagtcagagactgtgggaacccctgcgcgttgttttccagcgagcccttcgcgacggcgcggagctcggggaagccggagggtcgacgcccaacaccgttacaatggaaatgcagtgccctcctggaaacgcctcctag

SEQ ID NO: 194259 - DNA, 1032 bp, synthetic construct
  misc_feature 1..1032: note = Description of Artificial Sequence: Synthetic coding sequence
  source 1..1032: mol_type = other DNA
atggccggcaactgcagctgggaggcccaccccggcaaccggaacaaaatgtgcccagggctgtcagaagcaccggaactatactcgcgcggcttcttgacaatcgaacagatagctatgctgcctccccctgccgtaatgaattatatttttctcctgctctgcctttgtggactcgtgggtaacgggttggtgctttggttcttcgggttcagcatcaagcgcaacccgtttagtatttactttctgcacctggcatctgcggacgttgggtacttattctccaaggccgtcttctctatcctcaacaccggggggttcctaggcacattcgcagattatattagatccgtgtgcagagtactgggcctgtgtatgttccttaccggggtcagcttgctaccagcagtgagcgctgaaaggtgcgcatccgtgattttccccgcgtggtactggcgccgcaggcctaagcggctgagcgcagtcgtgtgtgcactactgtgggtgttgtcactgttggtaacatgtctgcataattacttctgcgtgttcctcggtcgtggggcgcccggcgcagcttgtaggcacatggatatatttctcggcattctcttgtttctgctctgttgcccccttatggtgttaccctgcctggccctcatcctgcacgtggaatgtagagctagaagacgccaaaggtccgctaaactcaaccacgtgattctggccatggtctctgtcttcttagtgagctccatttacctggggattgactggttcttgttctgggttttccaaattccagcgcccttcccggagtatgtgactgacctgtgcatatgtatcaacagtagtgccaagccaatcgtgtacttcttagctggccgggataagtcccagagactgtgggagcctctgagagtggtcttccagcgggccttgcgcgatggggcggaactcggggaagccggcgggagcacacccaacactgtgacgatggagatgcagtgccctccaggcaacgcttcatag

SEQ ID NO: 194260 - DNA, 870 bp, synthetic construct
  misc_feature 1..870: note = Description of Artificial Sequence: Synthetic coding sequence
  source 1..870: mol_type = other DNA
atgttcggcctgttcggcctgtggcggaccttcgacagcgtggtgttctatttaactcttattgtgggactcggagggccagtgggtaacgggcttgtgctatggaatctgggattccgcattaaaaaggggccattctctatttacctcctgcacctggcggccgctgactttttattcttaagctgtcgagtgggctttagcgtggcccaggcagccctgggcgcacaggatacattgtactttgtgctcacgttcctttggttcgcggtaggactgtggcttctggcggccttcagcgtcgagcggtgtctgagtgacctctttcccgcctgctaccagggctgtcgtcctaggcatgcttctgccgtgctgtgtgccttggtgtggacacctacactacctgccgtgcctctgcctgcaaacgcctgcggcctcctgaggaactccgcatgccctttggtctgcccccgatatcacgtggccagcgtgacctggtttctagttctggctcgagtcgcctggaccgctggagtggtgctgttcgtgtgggtaacgtgctgctctacccggccacgaccccgcttatacggcattgtgctaggggcccttctgctgttgttcttttgcggtctccccagcgtattctattggtctcttcagcccttactgaactttctgcttcctgtcttctctcctctagcaacactcttagcgtgtgtgaactcttctagcaagcctttaatttattccgggctaggacggcagcctgggaagagagagcctctaaggagtgtccttcgccgcgctttgggggagggagccgagctcggggcaaggggccagagtttacccatgggactcctgtag

SEQ ID NO: 194261 - DNA, 969 bp, synthetic construct
  misc_feature 1..969: note = Description of Artificial Sequence: Synthetic coding sequence
  source 1..969: mol_type = other DNA
atggaccccaccatcagcaccctggacaccgagctgacccccatcaatggtactgaggaaacgctgtgctacaagcagaccttaagtctcaccgtcctaacttgtatagtgtccttggttgggctcacaggcaatgccgtggtactgtggctgctcgggtgccgtatgcggcgtaacgccttcagtatctacattctcaatctggccgccgcagactttctgttcctgtccgggagactgatatactcactgctgtcgttcatctcaatccctcacaccatttccaaaatcctctatccagtgatgatgttcagttattttgcgggattgtcctttctatctgctgtttccactgagcgctgcctctctgtcctctggcccatttggtacagatgccataggcctactcatctttctgcagtggtatgtgtgctgctgtgggccctctcactgttgcgatctatcctggagtggatgctgtgtggtttcctgttcagcggggctgactctgcatggtgccaaacgtcagattttatcactgtggcttggcttatattcctttgtgttgtgctctgtgggtcttcccttgtgcttcttatccgcatcttgtgcggcagtaggaagattcccttaacccgcctgtatgtgacgattttgctgactgtgctcgtattcctcctttgcggcttgcctttcggcattcaatttttcctctttctatggatacatgttgaccgggaagtcctcttctgccatgtgcatctcgtgtctatctttttgtcagccttaaacagtagtgccaaccccattatttacttttttgtgggaagttttcgtcagagacagaaccgacagaatctgaaattagtgttgcagagggctctgcaggatgcctcagaggtcgatgagggcggcgggcagctgcccgaagagattcttgaactatcagggagtaggctcgaacagtag

SEQ ID NO: 194262 - DNA, 993 bp, synthetic construct
  misc_feature 1..993: note = Description of Artificial Sequence: Synthetic coding sequence
  source 1..993: mol_type = other DNA
atggaccccaccacccccgcctggggcaccgagagcaccaccgtgaatggaaacgaccaggcactcctcctattatgcggaaaggaaacactcatccctgtcttcttaattctgtttatagcccttgtcggcctagtcggcaacgggttcgtgctctggttgctgggtttcagaatgcgtcgtaacgccttttccgtgtacgtgctttccctcgcaggagccgactttcttttcctgtgtttccagatcattaactgcctggtgtacctgagcaattttttctgctcaatctctattaacttcccatccttcttcacgaccgtgatgacctgtgcatacttagcaggactgagtatgctctcaactgtttctaccgagcggtgtcttagcgttctgtggcctatctggtacagatgcaggagaccacgtcatttgagtgcagttgtgtgcgtgctcttatgggccctctcactgctgttgtctatcttggagggaaagttttgtggcttcctgtttagcgatggtgattctggatggtgtcagacattcgattttatcacagccgcctggctgatatttctgttcatggtcctttgtggtagcagtctcgccctgctcgtgcgaattctctgcggctccagaggactgcctttaactcggttgtatcttaccattttattgaccgtcctggtcttcctgctttgtggactcccttttgggatacagtggtttttgattctctggatctggaaagatagcgatgtgcttttctgccacatccatcctgtgtcagtggtgctgagctccctgaactccagcgcgaatccaataatctatttctttgtagggtcttttaggaagcagtggagacttcagcaacctattctgaagctggcattacaaagggccctgcaggacatagccgaagtggaccattcagaaggctgcttccgccagggaactcccgaaatgtcacgttcatcacttgtttag

SEQ ID NO: 194263 - DNA, 969 bp, synthetic construct
  misc_feature 1..969: note = Description of Artificial Sequence: Synthetic coding sequence
  source 1..969: mol_type = other DNA
atggacagcaccatccccgtgctgggcaccgagctgacccccatcaacgggcgagaggagaccccctgttacaagcagaccctgagttttacgggccttacttgtatcgtgtcgctggtggccctgaccggtaacgccgtcgtgctgtggttgctgggttgcaggatgcgtaggaacgctgtgtccatatatattctgaacctggtggctgcagattttctgttcctaagcggacacataatttgctcaccacttcgtcttatcaatattcggcatcctatctcgaagattctgtcaccagtaatgacctttccttactttattggactgtccatgttgagcgccatttctacggagagatgcctatccattctgtggccaatctggtatcactgcaggcgtcctagatacctttcctcggtaatgtgcgttttgctgtgggcactgagcctgctccgaagtattctggaatggatgttctgtgactttctgtttagcggcgcgaattcagtatggtgcgagacctctgattttataactattgcctggctggtatttctgtgtgtggttctttgtgggtccagcctggttctgttggttcgcattctatgtggaagccgaaaaatgcccctcaccagactgtatgtgaccatcttgctcacagtgctggtgtttttattatgcgggcttccattcggtatccaatgggccctgttcagtcggatccacctggactggaaagtgctgttctgtcatgttcacctcgtctcaatctttctttccgctctcaatagcagtgccaaccctataatttattttttcgtgggtagctttagacagagacaaaaccgtcaaaatctgaagttagtactccagagagcattgcaagacacccccgaggtcgacgagggcggcggctggctcccacaagagactctggagctctccggaagtagactagaacagtag

SEQ ID NO: 194264 - DNA, 741 bp, synthetic construct
  misc_feature 1..741: note = Description of Artificial Sequence: Synthetic coding sequence
  source 1..741: mol_type = other DNA
atggacagcaccatccccgtgctgggcaccgagctgacccccatcaatggccgcgaagaaactccctgttacaaacaaactctcagcttcaccgggcttacctgcatcgtgtctctggtcgcactgaccggcaatgctgtcgtcctgtggctgttaggctgccggatgcgccgtaacgccgtctcgatctacatattaaacctggtcgccgcagattttttgtttctgagcggtcacatcatatgtagccccctgcgcctgatcaacatccggcatcccatcagtaaaattctgtccccagtcatgaccttcccatatttcatcggcctctctatgctgtccgccataagtacagagaggtgtctaagcatcctgtggccgatctggtaccattgccgcagacccagatatctgtccagcgtgatgtgcgtgctgctgtgggccctgtccctcctgcgaagcattctggagtggatgttttgtgatttcctgttttccggcgctaatagtgtctggtgcgagactagtgatttcattactattgcttggctggtattcctttgcgttgtcctgtgtggctcaagcctcgtgctgctggtacggatactttgtggcagcagaaaaatgccactgaccagactgtatgttaccatcctgctgactgtgttggtattcctgctatgcggcttgccttttggtatccaatgggctctgttcagcaggatccacttagattggtag

SEQ ID NO: 194265 - DNA, 969 bp, synthetic construct
  misc_feature 1..969: note = Description of Artificial Sequence: Synthetic coding sequence
  source 1..969: mol_type = other DNA
atggaccccaccgtgcccgtgttcggcaccaagctgacccccatcaatggcagagaagagaccccatgttataaccagacactcagctttactgtgctgacatgcataatatcccttgtcggtcttactggaaacgcagtggtcttgtggctgttgggatacaggatgcgacggaacgcagttagcatttatatactgaatctggccgcggccgattttttattcctttcatttcaaattattcgactcccattgagactgatcaacatctctcacttgatacgcaaaatactggtttccgtaatgaccttcccctattttaccggcctgagtatgcttagcgccatttccacggaaagatgtctgtcggttctgtggcctatctggtatagatgtcggcggcctacacatctgagcgcggttgtgtgtgtactcctgtggggactgtccttattgttttctatgctcgagtggcgtttctgcgatttcctcttcagcggggccgatagctcctggtgtgagacttccgatttcatccctgtggcatggcttatattcctgtgcgtggtcctttgcgtgagcagtctcgtgttattggtgcggatcctctgcggctccagaaagatgccattaactagactatacgtcactatcctgcttaccgtgctcgtcttccttctctgcgggctaccctttggaatcctgggcgccctgatataccgcatgcatctgaacttggaagttttatattgtcacgtgtatctcgtctgcatgtccctcagcagcctgaatagttccgccaatcctattatctactttttcgtcgggtccttccggcagaggcagaatagacaaaaccttaagctggtgctgcagagagcccttcaggacaagccagaagtggataagggggaagggcagcttcccgaagagtcactggaactgagcggcagccgactggggccgtag

SEQ ID NO: 194266 - DNA, 3051 bp, synthetic construct
  misc_feature 1..3051: note = Description of Artificial Sequence: Synthetic coding sequence
  source 1..3051: mol_type = other DNA
atggtgctgcccacctgccccatggccgagttcgccctgccccggcatagcgcggtgatggaaagattacggcggaggatcgagctgtgtcggcggcaccatagtacttgcgaggctcgttatgaggcggtaagccctgaacgccttgagctggagagacagcatacctttgctctacaccagcgctgtattcaggccaaggcgaagagagctgggaaacatcgacaacccccagcagccactgcacccgcaccggccgcgcccgcccccagactcgatgctgcagatggccccgaacatggtagacccgcaacgcacctgcacgacacggtcaagcgcaacttggattcggccacatcaccccagaatggagaccaacagaacggttacggcgacttgtttccaggacataagaaaacacggagagaagccccactcggagtcgctatctccagtaacgggctgccccctgctagcccactaggccagagtgacaagccttccggagctgacgcgctgcagagttccgggaagcatagcctaggcttagattcgctgaacaagaagcgcctcgcagattcttccttgcacctcaacggaggctccaatccgagtgagagttttccgttatccctcaataaggagctaaagcaagagcctgtggaagacctgccttgcatgatcaccggtacagttggcagcataagccaatcaaaccttatgcccgacctaaatctgaatgagcaagagtggaaggaactgatagaggagcttaatcgtagtgtgcccgatgaagatatgaaagatctcttcaacgaggatttcgaagagaagaaggacccagagagttcaggatccgccacccagactcctctggctcaggatataaatatcaaaactgagttctcccccgcagcttttgagcaagagcaactaggaagccctcaggttcgagctggtagtgccgggcagaccttccttggcccctcgtctgcacccgtgtctactgattcaccatcactagggggttcgcagactctgttccatacttccggacagccccgtgccgacaacccctcaccaaacctgatgccagcgtccgcgcaagcccagaacgctcagcgtgctctagctggggttgtcttacccagccaaggacccggaggagcgtccgagctgagcagcgctcaccagctgcagcaaatcgcagcaaaacaaaagcgtgaacagatgcttcagaacccccagcaagccacgcctgcaccagcccccggacagatgagtacttggcaacagactggcccgtcccatagttccctggatgtgccataccctatggagaagccagctagtccttcctcctataagcaagatttcacgaattctaaactcttgatgatgccttcagttaataaatccagcccgcgtccgggagggccctatttacagccctcccatgtgaatttgttaagccatcagcctcctagtaatcttaatcagaatagtgccaacaaccagggatcggtcttagattatgggaacacaaaacctctgtctcattacaaagcagattgtgggcagggttctccaggctccggtcaatccaaacctgcactgatggcctacctcccccagcagctgagccatatcagccacgagcaaaattcactctttctaatgaaacctaaacccggaaacatgcccttccgaagcctcgttccgcccggccaggagcagaacccatccagcgttccggtgcaggctcaggctacctcagtgggcactcagcccccagccgtatctgtagcttccagccacaattcttcaccttatttgagtagccagcaacaggctgcagtgatgaagcagcatcaactgctgctggaccagcagaaacagcgggagcagcaacagaagcatctgcagcagcagcaattcttacaacgccagcagcatttgttggcagaacaggagaaacaacaatttcagcggcatctcacaagacctccgcctcagtaccaggaccccacccagggctcctttccccaacaagtgggccagtttactgggtcttccgccgccgtgccaggtatgaacactctgggcccctccaacagctcatgtccgcgtgtatttccccaggctggcaatctgatgcctatgggccccgggcacgcctcagtgagtagcctgccaacgaactctgggcagcaggatcgcggagtcgctcagtttccaggaagccaaaacatgccccaaagttcactgtatggaatggcatccgggatcacgcagattgtcgctcaaccaccccctcaggccaccaatggccatgctcacattccgcggcagaccaatgtcggacaaaacacatctgtgtcggccgcatacggtcagaattctctgggatcttcgggactgtcacaacaacataacaagggcacccttaatccgggactgacgaagccccctgtgccccgagtgtcccctgccatggggggacagaacagctcctggcagcaccaggggatgcctaacctcagcgggcaaactcctggcaattccaacgtttcaccatttacggctgcctccagtttccatatgcagcagcaggcccacctgaagatgtcctcaccccaattctctcaggcagttcccaaccgccctatggctcctatgtcaagcgcggccgccgtcggtagcctgttaccgcccgtttccgctcagcagcgcacctctgcccctgcccccgcgcctccacctaccgcccctcagcaaggtctgcccggactgagtcctgccgggcctgagctgggtgccttctcccagagcccggcctctcagatgggcgggagggccggtttacattgtacgcaggcatacccagtccggacagcagggcaggagctgccgtttgcttattcgggccagccaggggggtcaggattatcctcagtggccggtcatacagacctgattgattcccttctcaagaaccggacctcggaggagtggatgagtgaccttgacgacctcttaggcagccaatag

SEQ ID NO: 194267 - DNA, 2286 bp, synthetic construct
  misc_feature 1..2286: note = Description of Artificial Sequence: Synthetic coding sequence
  source 1..2286: mol_type = other DNA
cggggcaagcagtggggccggggcggcggcgagcggccccggctggaagtgggatctaagaggcggttaggagtgggaccctctggggccgggggaaagcctgcagccgcgcgcgagccagctccactgccatccggggcctggagaggccgcgaggctgaacgcggctcccgcggtgagagaagccctcagtgccagccggcaccccgcggtcctgcacctggccccgcacgagctgccagaggaccctggtgttgtcccccagccccttggaggtcctcacggtgtagaggaacagccaggagctggtcggctttcgcaggcgctagctcttgtgccggcgcaactaccgcccctgcgcgccccgccgcccctgccccacggttggatgcagccgatggtccagaacatggccgacctgcgacacacctgcacgacacagtgaagagaaacttggatagcgcaaccagtcctcagaatggagaccaacagaatggctacggtgaccttttcccagggcataagaaaacacgccgggaggcgcctctgggcgtggcgatttcctccaatggactgccccccgcctcccccttggggcagtccgataaacccagtggggccgacgcactccagagctcaggcaagcattccctgggccttgattctctaaacaagaaaaggctggccgattcgagcttacaccttaacggcgggtctaacccatccgaatcctttccgttgtcactcaataaagaactgaagcaggaacctgtggaggacctgccatgcatgattacgggcactgtgggctccatcagccaaagcaacctgatgccggacctgaatctcaacgagcaagaatggaaggagctgatagaagaattgaataggagtgtcccagatgaggacatgaaagacctgttcaacgaggatttcgaggagaagaaagaccctgagtcctctggtagcgccacgcagactccactggcccaggacattaatataaagactgaattctcgccagccgctttcgagcaggagcagctgggcagcccgcaagtacgggctggttcggcagggcaaacattcctcgggcccagttcggcgcctgtcagcactgactcgccatccctcggcgggtcccagacactcttccatacgtccgggcagccccgtgccgacaacccaagccccaacctcatgccagccagtgctcaggctcagaatgcacagcgcgcgctggcaggagtggtgctgcccagccaaggacccgggggggccagcgagttatcctcagcccaccagctgcagcagatagccgccaagcaaaaacgggagcagatgctgcaaaatccacagcaggcgaccccagcacctgctcccggccagatgagcacctggcagcagaccggaccctcccacagttcactggatgtgccatatcctatggaaaagccagcgagtcccagctcctataaacaggactttactaatagcaaattgcttatgatgccgagcgtgaataagtcctccccaaggccaggaggcccctacctgcagccttctcatgtgaacttactcagtcaccagccaccatcgaatctcaatcagaattccgcaaacaatcaaggctccgttctggactacggcaacacaaaaccactctcccactataaggcggactgtgggcagggaagccccggtagcggtcagtcaaagcccgccctgatggcatatcttccacagcaattgagccatatatcccatgagcaaaatagtttgttcctgatgaagccaaaacctggtaatatgccattccggtcgctggtgccgccagggcaggagcagaatccaagttctgtcccagtccaggctcaagcaacttctgtgggaactcagccccccgccgtgagcgttgcctcttcccacaactcttccccgtacctctctagccagcagcaggccgcggtcatgaagcagcatcagctgctgttggatcagcagaagcagcgggaacagcagcagaagcacctgcagcagcagcagttcctacaacgtcagcagcatttgctagcggaacaggagaagcaacagttccaaagacacctgacccgaccccctccacagtatcaggatcccactcagggaagctttcctcagcaggtgggacaattcaccgcccaggggctcagttgcgccctgcctatgattcatagtacggaggtgctgatctcaagtctttgcaacgggagtgctggcctgtctgccgcccagcggtcatggtag

SEQ ID NO: 194268 - DNA, 3471 bp, synthetic construct
  misc_feature 1..3471: note = Description of Artificial Sequence: Synthetic coding sequence
  source 1..3471: mol_type = other DNA
atgggcgacaccgcccccccccaggcccccgccggcggcctgggcggggccagcggagccggcctgcttggaggaggtagtgtgacgccacgggtccattcagctatcgttgagagattgagagctcgcatagcggtttgtcggcagcatcatttgtcatgcgagggaaggtacgaaaggggccgcgccgaatcttctgatcgggagcgcgagtcaaccctccagctactgagcctagtccagcatggtcaaggcgccagaaaggccggtaaacacacaaaagcaactgccaccgctgccactacaacggcccctcctccgccacccgctgccccccctgcagccagccaggccgcggcaaccgcagctcccccccctcctccagattatcatcaccaccaccaacagcatcttttgaactcctccaacaacggcggctctggtggaatcaatggcgagcagcagccccctgctagcaccccgggtgaccagaggaatagcgcacttatcgctctgcaaggcagcctgaaaaggaagcaggtggttaacctgtctccagctaactccaagcgcccaaatgggttcgtcgataactccttcctcgacatcaagaggattcgggttggggaaaatctgtctgcagggcagggtggccttcagattaacaacggccaaagccaaattatgagcggtacactaccaatgtctcaagctcctctgcgtaagaccaacacactgccaagccacactcactctccaggtaatggcctgtttaatatgggccttaaggaggtgaagaaagagcctggagagacactgtcatgtagcaagcacatggacggccaaatgacccaggagaacatattccccaaccgctatggcgacgatcccggtgagcagctgatggatcccgaactccaggaactgttcaatgagctcaccaacatatctgtcccccccatgtccgatttggaactggaaaacatgatcaatgcaacgataaaacaagacgacccttttaatatcgatctgggacagcagagccagagatctacccctaggccgagtctgcccatggagaagatagtgatcaaatccgagtactcacctgggctgacacagggaccgtccggatccccacagctcagaccgccaagcgctgggcctgcgtttagcatggcaaatagcgcgctgagtacatctagcccaattccttctgtgcctcaatcccaggctcagccgcaaaccggctctggtgcgagccgcgcgctcccctcctggcaggaggtgagccacgctcaacagctaaaacagattgcagcgaatagacagcagcatgccagaatgcagcagcatcaacaacagcaccagccaacaaattggtccgcgctaccatcctctgcaggaccctctcccgggccatttgggcaggaaaaaatcccaagtccttcgttcggacagcagaccttctccccacaaagttcccctatgcccggggtagccggcgggtccggacagagtaaagtaatggcaaactacatgtacaaagccggcccaagcgcccaggggggacatttagatgtgttaatgcaacaaaaaccccaggatctatctaggtcgttcattaacaatccacatcccgctatggagcctcgccagggcaacacaaagccactgttccatttcaactccgaccaagcaaaccaacagatgccatccgtgcttccctcccagaataagcctagtttgttgcactacacccagcagcagcagcagcagcagcagcaacaacagcagcagcagcagcagcagcaacagcagcagcagcaacagcagcagcagcagcagcaacagcagcaacagtcctctatctcagcccagcagcagcagcaacaacagtcaagtatctccgctcaacagcaacaacagcagcaacagcagcagcagcagcagcagcagcagcaacagcagcagcagcagcagcagcagcaacaaccatcgtcccagccagctcagagcctcccctcccaacccctgttacgatctcccttgccactacagcagaaactattgcttcagcagatgcagaaccagccaatcgctggcatgggctaccaggtgagccagcagcagaggcaggatcagcattcggtggtcggacagaacacggggcctagtcccagccccaatccttgttccaatcctaatacagggtcaggatatatgaattcacagcagagcctcctgaatcagcagcttatgggtaaaaagcagaccctgcagcggcagatcatggaacagaagcagcagttactcctccagcagcaaatgctagcagacgctgagaagattgcccctcaggaccagattaatagacacctgtctcgcccgccaccagattacaaagatcaaagacgcaacgtcggcaatatgcaacctacggctcagtactctggtggcagttccactatttccctcaattccaaccaagccctcgccaatccagtcagcacgcataccatcctcactcctaacagcagcctgctttccacaagtcacgggacaagaatgccctccctctcgactgcggtgcagaatatgggcatgtatggcaacctgccgtgcaatcagcccaacacatattccgtaacaagcggcatgaaccagttaacccagcaaaggaacccaaaacagctcctggcaaaccagaacaatcccatgatgccaagacccccgacactcggccccagcaataataataatgttgctaccttcggtgccgggtctgtggggaatagtcagcagctgcggcccaacctgacccacagcatggctagcatgccgcctcaacgtacaagtaacgtaatgattacatctaatacaacagcacctaactgggccagccaggagggaacttccaagcaacaggaagctctcacctctgccggagtacggtttccaacaggcacacctgccgcatatacgccaaaccaatccttgcagcaggcagtgggctcccagcagttctcacagagggctgtggcccccccgaaccaactgacacctgctgtccaaatgcggccaatgaatcagatgagtcagacattgaacggacagacgatgggaccactgcgggggttgaaccttcgccctaatcagctctctacgcagatcttgcctaatctgaaccagtctggtacaggtctgaatcagtccaggacgggcattaaccagcctccttcgctgacccctagcaatttccctagcccaaatcagagttccagagcctttcagggtactgaccactccagcgatctcgcgtttgactttctgtctcagcagaatgataacatgggccctgccctgaacagtgatgcagacttcatcgattccctacttaagaccgagcctgggaatgacgactggatgaaggacattaacctcgacgaaatactcgggaataacagctag

SEQ ID NO: 194269 - DNA, 3471 bp, synthetic construct
  misc_feature 1..3471: note = Description of Artificial Sequence: Synthetic coding sequence
  source 1..3471: mol_type = other DNA
atgggcgacaccgcccccccccaggcccccgccggcggcctgggcggtgcgtccggtgccggcttattaggcgggggctccgtgactccacgggtacactccgccatcgtggaacgcctgcgggccagaatcgcagtgtgccgtcaacatcacctgtcatgtgaaggccgttacgagagaggtagagccgagagctccgacagagagcgagagagcaccctgcagttgctgtctctggtgcagcatggccagggagcccgcaaggccggtaaacatactaaggcgacagcgactgcagctaccactacagcccccccccccccccccgccgctccccctgccgcgtctcaggctgctgccactgcagcgccccctccgccacctgattatcatcaccaccatcagcagcacctgctgaactcatcaaataatggaggctcagggggcatcaacggagagcagcagcccccagcttccactcccggggaccagagaaattcagcactcattgcgctgcaaggatcccttaagcggaaacaagtagtgaacctctctcccgctaattctaaaagacccaatggtttcgtggataattcttttctggacataaagcggatcagggtcggagagaacttgagcgctgggcagggtggcttacagatcaacaacgggcagtcccagattatgagcggaaccctgcctatgtcgcaggccccactccgcaaaacaaatactctgccgtctcatacccactccccagggaatggactgtttaatatggggctaaaggaggtcaagaaggagcccggcgagactttgagctgttccaagcacatggatggacaaatgacacaggagaatatttttccgaacagatatggtgacgacccaggtgagcagctgatggaccctgaattacaggaactcttcaatgagttaacgaacatttcagtacctccaatgtcagatttggagttggaaaatatgatcaacgcgactatcaagcaggacgaccccttcaacatcgacctcgggcaacaaagccagaggagcacaccacgacctagtctccctatggaaaaaattgttatcaaatcagaatactccccaggcctcacccagggtccctccggcagtccacaactgaggcctcccagcgcaggcccagcattctctatggcgaacagcgcgttgtccaccagtagtcccatcccatcagtccctcagagtcaggctcagccacagacagggagcggagcatcgcgtgctcttccttcctggcaggaagtctctcatgcacagcaacttaagcaaatcgccgcaaaccgacagcaacacgcacgaatgcagcaacaccagcagcagcatcagcccactaattggtccgccttaccctcctcggccggaccctccccaggaccatttggtcaggagaagattccgtctcccagttttggtcagcaaactttttcaccacagtctagtccaatgccaggcgtggcggggggcagtggccagtccaaggtgatggcaaattatatgtacaaggcaggaccctccgcgcagggtggacatctggacgtgctgatgcaacagaagccccaggatctcagtcgcagttttattaacaaccctcatcctgccatggagccacgtcagggcaataccaagcctcttttccactttaatagcgaccaggcaaatcaacagatgcccagcgtgctgcctagccaaaataagccttcactgttgcattacactcagcagcagcagcagcagcagcagcagcagcaacagcagcagcagcagcagcagcagcagcaacagcagcaacagcaacaacagcagcagcagcagcagcagtcaagcatatctgctcaacagcagcagcagcaacagtcgtccatttccgctcaacagcagcaacaacagcaacaacagcaacagcagcaacagcagcagcagcaacagcagcagcaacagcagcagcagcagccctcatcccagccagcgcagtctcttcccagccagcccctgttgagaagtcctcttccactccagcagaagttgctcctccagcagatgcaaaaccagccaatagccggcatggggtaccaggtatcccagcaacagcggcaagaccagcactcggttgtgggacagaatacaggtccaagcccatcacccaatccttgtagcaatcccaacacaggtagtggatatatgaactcccagcagtccctgctcaatcagcagctgatgggcaaaaagcagacactccagagacagatcatggaacagaaacagcagcttctccttcagcagcagatgcttgccgatgccgaaaagatcgcgccacaggaccaaatcaaccgacacctgtcacgtcccccaccagactacaaggaccagaggcgcaatgtaggcaacatgcagcctaccgctcagtattctggtggctcctccacaatcagtctgaactccaatcaggccctggccaaccctgtctctacacacacaatccttactcccaactccagcctgttgtctacatctcacggtacgagaatgcctagcctcagcaccgctgtgcagaatatgggcatgtacggaaacttgccttgtaatcagcccaatacctactccgtaacatcaggtatgaatcagcttactcagcagagaaatccaaagcagttactggccaaccaaaataatcctatgatgccgcgtccacctacgttgggacctagcaataataacaatgtagccacatttggcgctggttctgtgggaaattcacaacagctgcggcctaatcttacccatagtatggcgagcatgcctccacagcgcacttctaatgtgatgatcacctcaaacactacagctcctaactgggcatcacaggaaggcaccagcaaacagcaggaagccctcactagcgcaggagttagattccctaccggcactcccgccgcatacactccgaaccaatcactgcaacaggccgtgggctcacaacagttttctcagcgagcagtggcgccgccaaaccaactcacaccagccgtgcagatgcgccctatgaaccaaatgagtcagactctaaatggccagacaatgggacccctacgcggcctcaatctgagacctaaccagcttagtacccagatcctcccaaatctgaaccaaagcggcacaggtttaaaccaatcacgaactggtattaatcagcccccgtctctgacaccttccaacttcccctctccaaatcagtcctctagagctttccaaggcacagaccactcctctgacctcgcctttgacttcttatcgcagcagaacgataacatgggccccgctctgaactcagatgccgactttatcgactcacttttgaagactgaacccggcaatgacgattggatgaaagatattaaccttgacgagatccttggaaataatagttag

SEQ ID NO: 194270 - DNA, 1632 bp, synthetic construct
  misc_feature 1..1632: note = Description of Artificial Sequence: Synthetic coding sequence
  source 1..1632: mol_type = other DNA
ctgcaggagaccgtgaagcggaagctggagggcgcccggagccccttgaatggagatcaacagaacggcgcttgcgacggcaacttctccccaacatcaaagcgcatcaggaaagacatttcagccgggatggaagctataaacaacctgcccagtaacatgcctctgccatccgcttcacctctgcaccagctagatctgaagcccagtctgcccctacaaaactcgggcacccacaccccaggattactggaggatctttctaagaacgggcgtttacctgagattaaactgccagtgaatggctgctctgacttggaggattcttttaccattctccagagcaaagatttgaagcaagagcctctggacgacccgacctgcatcgatacatctgagacatcactctcaaatcagaacaaactgttctccgacattaatctgaacgaccaggagtggcaggaattgatcgatgagttggcgaacacagtgcctgaggacgatatccaggacttgtttaacgaagattttgaagagaaaaaagaaccagagttctctcagcccgccactgagactccgttgagtcaggaaagcgcttctgtgaaaagcgaccccagtcactctccattcgcccatgtcagtatgggctccccccaggcccgaccctcctcatcaggtccccctttctctaccgtttcaactgccaccagtcttcccagcgtggcatctacacccgctgcacccaaccctgctagttctcccgcaaactgcgcggtacaatccccgcagacccccaatcaggcccacaccccagggcaggctcctccgaggcctggcaacgggtatctactcaacccagcagcagtgactgtcgctggatccgcatccggccccgttgccgttccctcctcggatatgagcccagctgagcagttgaagcagatggccgcacagcagcagcaacgcgccaagctgatgcaacaaaagcagcagcagcaacagcagcagcaacagcagcagcaacagcagcaacagcaacagcagcagcagcaacagcagcagcattccaaccaaacaagtaattggtcgccacttggccccccaagcagtccttatggagccgctttcacagcggaaaaacccaattccccaatgatgtacccccaagccttcaacaaccagaatcctatcgttccccccatggctaataatttgcagaaaactacaatgaataattatctaccccagaatcacatgaacatgattaaccagcagcctaataacctggggacaaactctctgaataagcagcacaatattttgacttatgggaacacaaagcccctgactcattttaacgccgacctgtctcagagaatgacaccaccagtcgcaaatcctaacaagaaccctttgatgccctatatccaacaacaacaacagcagcagcagcagcagcagcaacagcagcaacaacaacagcccccccccccccagctacaggccccccgcgcacacctcagtgaggaccagaagcgcttgcttttaatgaaacagaagggcgtgatgaaccagcctatggcttatgcggcactcccttctcacgggcaggaacagcagcccgttggttag

SEQ ID NO: 194271 - DNA, 831 bp, synthetic construct
  misc_feature 1..831: note = Description of Artificial Sequence: Synthetic coding sequence
  source 1..831: mol_type = other DNA
atgagccccgccgagcagctgaagcagatggccgcccagcagcagcagcgcgcaaaactcatgcaacaaaagcagcaacagcaacagcagcagcagcaacagcagcaacaacagcatagcaaccaaaccagcaactggagccctctaggtcccccatcctctccctacggggccgcattcacagcagagaaaccaaactccccaatgatgtatccacaggccttcaataatcagaatccaattgtgcctcctatggccaacaacctgcagaagacaactatgaacaactacctaccacaaaatcatatgaacatgatcaatcagcagcctaacaacctgggcaccaattcacttaataaacagcacaatatcttgacttatggcaatactaaacctttgacccactttaacgccgatctaagccagcgcatgaccccgcccgtggcgaatccaaataaaaatccactgatgccgtatatacaacaacaacaacaacaacagcagcagcagcagcagcagcagcagcagcagcaacctccccccccacaactacaagctccaagagcccatttatccgaggatcagaaacgcctgctcctaatgaagcagaaaggagtcatgaatcagcctatggcatatgctgctctgccctcccacggccaggtcagcgtaaaggtcacgcacagctctagctcttcttgcggggcctttgactgccggtgtgttatgttttataagtctactgttgttggctccaactgccttcagaaaacctctctgcacccccaggtggtagccagattcggcgtgttcttttttcattttagttag

SEQ ID NO: 194272 - DNA, 3417 bp, synthetic construct
  misc_feature 1..3417: note = Description of Artificial Sequence: Synthetic coding sequence
  source 1..3417: mol_type = other DNA
atgggcgacttcgccgcccccgccgccgccgccaacggcagcagcatatgcatcaacagtagtctgaattctagtctgggtggcgcagggatcggcgtcaacaatactcctaattctactcccgctgcccccagctctaatcacccggcagccggaggttgcgggggaagtggaggccctggtggcggaagcgctgccgtccctaagcatagtactgtcgtagaaagactgcgccaaaggatcgaaggttgtcgaaggcaccacgttaactgtgagaatagatatcagcaggcgcaggtagagcagctcgagctggagcgccgggataccgtctcgctctatcagagaactcttgagcaacgtgctaaaaagtctggcgctggtacgggcaagcagcagcatccgagcaaaccgcagcaggacgcagaggccgcatcagccgagcagaggaaccacacccttatcatgctgcaagaaaccgtgaagaggaagctggagggcgcccgcagtcccttgaacggagaccagcagaacggggcttgcgacggcaatttcagccccactagtaaacgtattaggaaagatatttccgccggcatggaagctattaataacctgccatctaacatgcccttaccaagtgcgtctcctctgcaccagctcgatttgaagccatctcttcccctgcagaattctgggacccacacgcccggtttgttagaggacctcagtaagaacggccggcttcctgagattaagttgcccgtaaatggatgttctgacctggaagactcatttactatcctgcagagtaaggacctgaagcaagaacctctggatgacccaacgtgtatcgacactagtgagaccagtctttcaaatcaaaacaaactgtttagcgacatcaatctgaatgatcaggaatggcaggaactcattgatgagctggcgaatactgtccctgaagatgatatccaggatttgtttaacgaagacttcgaagagaagaaggaaccagaattctcccagcccgccacagaaacaccactgagtcaggagagcgcttcagtgaaaagtgaccccagccatagcccgtttgcccacgtttcaatgggatctcctcaggcccggccctcaagttccggtccccccttcagcactgtgagcaccgcgacatcactgccaagcgtggccagcactcccgccgcacccaaccccgccagcagtccagccaactgcgcggtccagtcccctcagacccctaaccaggcccacactcctgggcaagcgccccctcgccccggaaacggctaccttctgaaccccgcagctgtaaccgtggcaggttccgcctcaggacctgtggcagttccatccagtgacatgagccctgctgagcagctgaaacagatggccgcccagcagcagcaacgtgccaagcttatgcagcagaagcagcagcaacagcaacagcagcagcagcagcagcagcaacagcagcaacagcagcaacagcaacagcagcagcagcactctaatcagactagcaactggtctcccttaggaccaccatccagtccatatggcgctgcttttacagcagagaaacctaactctcccatgatgtacccgcaggcatttaacaaccagaacccgatcgtgccaccgatggcaaacaacctgcaaaagaccacgatgaacaactacctaccacaaaatcacatgaatatgataaatcagcaacccaacaacctgggtacaaattcactcaacaagcagcataatattcttacctatgggaacactaagccactcactcatttcaacgcggacctgtcccagcgtatgacacctcctgtggccaacccgaataaaaaccccttaatgccttatattcagcagcagcagcaacagcagcagcagcagcagcagcagcaacaacagcagcagccaccccccccgcaactgcaggctcccagggcacacctcagcgaggatcagaagcgcctcctgctcatgaaacagaagggggtgatgaaccaaccgatggcatacgcagcgctgccgagccacggtcaagaacaacatcctgtcggactgccccggactacaggacctatgcagtcctccgttccaccaggttctggtggaatggtctctggagcatcccccgcgggcccagggtttcttggctcccaaccccaggcagccattatgaaacaaatgctgatcgatcagcgggcacagcttattgagcagcaaaagcagcaattcctccgcgaacagcgccagcagcagcagcagcagcagcagcagatcctggctgagcagcagcttcagcagtctcacttaccgcggcaacacttacagccccagcgtaatccataccccgttcaacaggtcaaccagttccagggttccccgcaggacattgccgccgtcaggtcacaggctgcgttgcagtcaatgagaacttcacgcctgatggcacaaaatgcgggcatgatgggcatcggcccgagccagaatcccggcacaatggccacagccgctgctcaatctgaaatgggactggcgccatattccacgacaccaacttcccagcccggaatgtacaacatgtcgactgggatgacacaaatgctacagcatcccaaccaatctgggatgtccattactcacaaccaggcccagggtcctcgacaaccggccagtggacagggagtcggaatggtttcggggttcggccagtcaatgctggtcaactctgccattacgcagcagcacccacagatgaagggcccagtcggccaggccctgcccagaccacaagccccaccgaggctgcaatcactgatgggcaccgtgcagcaaggagcccaatcatggcagcaacgctccctccaaggcatgcctggaagaacatccggggagctggggccttttaacaatggcgcttcgtatcctctgcaggccggccagccacgactgacaaagcagcattttcctcaaggcctgtctcagagcgtcgtggatgctaatacaggcactgtacgaacgcttaaccctgccgccatgggccgtcagatgatgccctctctgccaggccaacagggcacgtcccaggcccgcccaatggtgatgagcgggctctctcaaggcgtgcctgggatgcccgcattcagccagcctcctgcccaacaacagatcccctccggttctttcgccccgagttctcagtctcaggcatacgaacggaacgccccacaggacgtgtcttataattactctggcgatggagctggtgggtcatttcccggactgcccgatggtgctgacctggtagatagcattatcaaaggaggccccggggacgagtggatgcaagagctggacgaattgttcggcaacccatag

SEQ ID NO: 194273 - DNA, 1338 bp, synthetic construct
  misc_feature 1..1338: note = Description of Artificial Sequence: Synthetic coding sequence
  source 1..1338: mol_type = other DNA
gagcagcaccccgtgggcctgccccggaccaccggccccatgcagtccagcgttcccccaggatccgggggcatggtctctggcgcctctccagcgggcccgggcttcctgggctcacagccccaggctgcaattatgaaacagatgctcatcgaccagagagctcaactgattgaacagcagaagcagcaatttttgcgcgaacaacggcagcagcagcagcagcaacagcagcagatcctggccgagcagcaattacagcagtctcatctgcctcgacagcacctgcagcctcagagaaatccttatcccgtgcaacaggtcaatcaattccagggatccccacaggatatcgccgctgtccgatcgcaggctgccctccagtcgatgcgcaccagccgcctcatggcacagaatgccggcatgatgggcatcggaccctctcagaatcctggcacaatggcaaccgccgccgcacagtcagagatgggattggctccgtacagcactacccccactagccagcctggcatgtataatatgtctacaggaatgactcagatgctacagcaccctaaccagtctggaatgagtatcacgcataaccaagcccaggggcctcgtcagcctgcttccggacagggtgttggaatggttagcggcttcggacagagtatgttagtgaacagcgccatcacacaacagcatccacagatgaagggcccagtgggacaagccctgccacgtcctcaggctcccccaagacttcagtcactcatgggcaccgtgcagcagggcgcccaatcttggcagcagagaagcctccagggaatgcccggcaggacttcgggcgagctggggccgtttaataatggggcatcctacccgcttcaagccgggcagccccgattgaccaagcagcattttccacagggcctaagccagagcgtagtggacgccaacactgggaccgtccggacgctcaacccagcagcaatgggaagacagatgatgccgagcctgccaggccagcagggaacgtctcaggcgagacctatggttatgagcggcctcagccagggggtccccggcatgcctgcgttttcgcagccccccgctcaacagcagatcccttcggggtctttcgcaccatcaagccagtctcaggcctatgagagaaatgcaccccaggatgtctcatataattactctggcgatggagccggagggtcgttccccgggctgccagatggggccgacctagtagatagcatcattaagggaggccccggggatgagtggatgcaagaactcgacgaactttttggaaatccgtag

SEQ ID NO: 194274 - DNA, 2325 bp, synthetic construct
  misc_feature 1..2325: note = Description of Artificial Sequence: Synthetic coding sequence
  source 1..2325: mol_type = other DNA
atggacgactggaagagccggctggtgatcaagagcatgctgccccactttgctatggtaggcaatcggcaagaaccccggaaacttcaggaaagcggaaaaaagcccagctggatggaggaggaagatctgtcttttctgtacaaatcctctcccggccgtaagcaccagggcaccgtgaaacggcggcaagaggaagatcacttccagttccccgatatggcagacggaggctatccaaataaaatcaaaagaccatgtttggaggacgtcactctggcaatgggacccggtgcccacccttcaacagcctgcgccgaactccaagttcctcccctgaccatcaatccaagtccagccgccatgggggtggccggtcagtcattgctgcttgaaaataaccccatgaatgggaatattatgggatccccctttgtggtacctcagacgactgaagtgggtcttaagggccccacggtcccgtactatgaaaagattaacagcgtgcccgcggtggatcaggaattacaggagctcctcgaggaactcacaaagattcaggacccctcgccaaacgagctggacttggaaaagattttgggaaccaaacctgaggaacctttagtgctggaccaccctcaggccactctctctactacccctaagccttccgtgcaaatgagtcatctggagtcactggcgtcttccaaggagttcgcatcatcatgtagccaggtcacagggatgtcacttcaaatccctagctcctccacaggtatcagctattcgatcccctcaaccagcaaacagattgttagcccatcttccagcatggcccagagtaagagtcaagtgcaagcgatgttacctgtggccctacccccccttcccgtgccacagtggcatcacgcccatcaactgaaggccctggccgccagcaagcagggaagcgcaaccaagcagcagggccccactccctcttggtctggtctcccccctcccggcttaagtccaccatatcgcccagtcccatcaccacatccccccccacttcctctgcctccacctccgccgcctttcagcccccaatccctcatggtctcctgcatgtcgtcaaacacactctctgggtccacactgaggggatcccctaacgcccttctgagctctatgacctcttcaagtaacgctgcactgggtccagcaatgccatatgcccctgagaaactaccatcacctgctctcacgcagcagccacaattcgggccccagtcaagcatcctagccaacctgatgtcttcaacaattaagacccctcaaggacacctcatgtcagccctccctgcatctaaccccggtccttcacccccgtatcgtcccgaaaagctatcatcacccggcttacctcagcagagttttaccccacagtgctccttaattcgaagtctcaccccaacctccaacttgctttcacagcagcagcagcaacagcagcaacaacagcaggccaatgtgatttttaagcctattagttccaacagctctaagacactgtcaatgatcatgcagcagggaatggcctcttcatctcccggggccactgagcccttcacttttggcaataccaaacctctttcccatttcgtttccgaacctggcccgcagaaaatgcctagtatgcctacgacttccaggcagcctagtctgcttcattacctgcagcagcccactcctactcaggcgtccagtgctactgcttcctcaaccgccaccgcaacactccaattgcaacagcagcagcaacagcagcaacagcaacctgaccacagcagctttctcttgcagcagatgatgcagcagccgcagagattccagcgctctgtggctagtgattctatgcccgctctaccccgacaggggtgctgccacctgttcgcatggacttcagcggcttcatcggtgaaaccccagcaccagcatggcaactctttcacgtcccggcaggaccctcagccgggagacgtgtctccctcaaacataacccatgtggataaggcctgtaagctgggagaggcgcgccacccccaggtgagcctgggaagacagcctcccagttgtcaagcactgggatcggagtccttcctccctggttcatctttcgcccatgagctcgcccgagtaactagctcatacagcaccagtgaagcggcaccgtggggaagctgggatcccaaagcttggcgccaggttccagcccctttattgccttcatgcgatgctaccgcaagggggactgaaattcgcagctatggtaatgatccttag

SEQ ID NO: 194275 - DNA, 411 bp, synthetic construct
  misc_feature 1..411: note = Description of Artificial Sequence: Synthetic coding sequence
  source 1..411: mol_type = other DNA
atggacgactggaagagccggctggtgatcaagagcatgctgccccactttgccatggtcggtaacagacaagagcccaggaagttacaggaaagcgggaagaagccttcttggatggaagaggaggatctttcattcctgtataaatcttcccctggccgcaaacatcagggaactgtcaagagacgacaggaagaggaccatttccaattccccgacatggcagacggcggttaccccaacaaaattaagcggccatgtcttgaggacgtcacattggccatgggtcctggagcccatccatccactgcttgcgccgaactacaggtcccgcccttaacaattaatccatccccggcagcaatgggtgtggcaggccagagcctgctgctggagaataacccaatgtag

SEQ ID NO: 194276 - DNA, 2325 bp, synthetic construct
  misc_feature 1..2325: note = Description of Artificial Sequence: Synthetic coding sequence
  source 1..2325: mol_type = other DNA
atggacgactggaagagccggctggtgatcaagagcatgctgccccacttcgcaatggtgggcaataggcaagagccacgcaagttgcaagaaagcggcaagaagccgtcttggatggaagaggaagatttgtcatttctttacaagtcgagccccggacgaaagcaccagggtaccgtcaagagaagacaggaagaggaccattttcagttccccgacatggctgacggcggctacccaaataaaatcaaaaggccatgtctggaggacgtgacactcgcaatgggacccggagcgcatcccagcactgcctgtgcagagttgcaagtgcccccactgaccataaacccgagccctgcggccatgggagtagctgggcagtcgctgctcctcgagaataaccccatgaatggcaacatcatgggcagcccctttgtggtcccccagacgacggaggttggattaaaggggccaactgtcccatactacgaaaagatcaattccgtgcctgccgtggaccaggaattgcaggaactgctggaggagctcacaaaaatacaagacccgagccctaatgagcttgacctagaaaagattctgggaacaaagccagaagagccattggtcctggaccacccccaggcaacgctgtccacgacacctaaaccaagtgtccagatgtctcacttggagtcgttagccagctcaaaagaattcgctagctcttgttctcaggtgacagggatgtcactccaaatccccagctcctctaccggtatttcgtacagtattccaagcacttccaagcagatcgtgagccccagcagctccatggcccagagtaagagtcaagttcaggctatgttgcctgttgctctccctcccctgcccgtgcctcagtggcaccatgcccaccagctgaaggccctggccgccagtaagcaggggtccgcaaccaagcaacagggaccaaccccgagttggtctggtcttcccccccccgggctatctcccccctaccggcctgtgcctagcccccacccacctccccttccactgccaccccccccaccaccctttagccctcagtcgctcatggttagttgcatgtcgtcaaacacactctccggtagcactctacgagggagcccaaacgccctgttatccagcatgactagctcttcgaatgcagctctggggcccgccatgccctatgcacccgagaaactgccgagccccgcgcttactcagcaaccccagtttggaccacagtcctcgatcctggcgaacctcatgagcagtactatcaagacacctcagggccatctgatgtctgcgcttccagccagcaatcccggcccttcacccccttataggcctgaaaagttatccagtcccggtttacctcagcagtctttcacaccccagtgtagcttgatcaggagcctcaccccaacttccaacctgctctctcagcaacagcagcagcaacagcagcaacagcaggccaatgtaatcttcaagcccatatcctccaattcctctaagacgctctcaatgataatgcagcagggaatggcttcttcaagtcccggcgcgacagagcccttcacatttggtaataccaagcccttaagtcacttcgtttccgagcctggtccacaaaagatgccttctatgcccactacgtctcgtcagccttccttactccactatctgcagcagcctacgccaacacaggcgtcaagcgccaccgctagcagtaccgcaacggctaccctccagttacagcagcagcaacagcagcaacagcagcagccagaccactcttcatttcttctgcagcagatgatgcagcagccccagagatttcagaggtcggtcgcttcggattccatgccagctctcccgcgacaaggctgttgtcacctatttgcctggacttcggccgctagcagtgttaaaccccagcatcagcatggaaacagctttacttcccggcaagatccccagccaggagatgtgtctcccagcaacataacacacgtggataaggcctgtaagctcggagaagcccgtcatccccaggtctctcttgggaggcagcccccaagttgccaggctctgggcagcgagtccttcttacccggttccagttttgctcacgaactggcccgggtgacctcctcttactctaccagcgaagcagccccgtggggatcttgggacccgaaggcctggcggcaagtccccgccccactattgccttcatgtgacgcgacagcacggggaacggaaatccgaagctacggaaacgatccgtag

SEQ ID NO: 194277 - DNA, 2250 bp, synthetic construct
  misc_feature 1..2250: note = Description of Artificial Sequence: Synthetic coding sequence
  source 1..2250: mol_type = other DNA
atggacgactggaagagccggctggtgatcaagagcatgctgccccacttcgcgatggtgggcaacagacaagaacctcgaaagctgcaggagtccgggacagtaaaacggcgccaagaggaggaccacttccaatttcctgacatggctgacggagggtacccaaacaagatcaagcggccctgcctggaagacgttacgcttgctatgggtcctggggcgcacccctctactgcctgcgccgagctgcaagtgcctcccctcactataaaccctagtcctgcagccatgggggtcgccgggcagtccttgctcttagagaataatcctatgaatgggaatatcatgggtagcccctttgttgtgcctcagactacagaagtgggactgaaggggcccacggtgccctactacgaaaaaataaacagtgtcccagccgtagaccaagagctgcaggaacttctggaagagctcaccaaaattcaagatccaagtccgaacgagctggatctcgagaagatcctgggcacaaagccagaagagccactagtgctggaccatccccaggctaccctgagcactacacctaagccctcagtccaaatgagccatctggaaagtttagcaagctctaaggagttcgcctcatcttgtagccaggtgacaggaatgagcctacaaatcccgtcaagttccacgggcataagttattccattccctccacaagtaagcagatagtgtcacctagcagctctatggcacaaagtaaaagccaagtccaagccatgctccccgtcgccctgccccctctccccgtgcctcaatggcaccatgcacatcagttaaaagccctggcagcatccaaacagggctcggctaccaagcagcagggccctaccccttcatggagcggtttgcccccgcccggactcagccccccgtaccggcctgtgccatctcctcacccaccacccttgcctctgcctccacctccccctccattcagcccacaaagcttgatggtatcatgcatgagctccaacacacttagcggctccacccttcgggggtcccccaacgctcttctcagcagtatgacctcaagcagcaacgctgccttgggcccggcaatgccatacgcacctgaaaaactgcccagccccgccctcacacagcagccacagttcggccctcaatcgtctattctcgctaaccttatgtctagtaccattaagaccccgcaaggccacctgatgtcagctcttcctgcgtctaatcccggcccaagcccgccatacagacctgagaagctctcatcgccgggtctaccccaacagtctttcactccgcagtgcagtctgatccgaagccttactccaactagcaacctgctaagccagcagcagcagcaacagcagcagcagcaacaggccaacgtcatctttaagccaataagtagcaatagcagtaaaacactgtcaatgattatgcagcagggaatggccagcagctccccgggagctaccgaacccttcacatttggcaatactaagccgttgagtcactttgttagtgagccgggcccacagaaaatgccatcaatgccgactaccagccgccagccatcactgctgcactatttacagcagcccactccaacccaagcgtcaagcgccaccgcttcctctaccgccacggccactctgcaactgcagcaacaacagcagcagcagcagcaacagcctgatcacagcagctttctgttacagcaaatgatgcagcagccacagcggttccagcgcagtgtggctagcgacagcatgcctgcgctccccaggcagggctgctgtcatctgttcgcctggactagcgcagcctcgagtgtgaagcctcagcaccagcacggtaactcctttactagccgtcaggatcctcagccaggggacgttagtccatctaacattactcacgtcgataaggcttgtaagttgggtgaggctagacacccccaggtgagcctgggtcggcaacctcctagttgccaggccttggggagtgaatccttcctccctggcagttccttcgcacacgagctggcgcgggtcaccagttcatactcaacatcggaggccgcaccgtggggttcttgggaccctaaagcatggaggcaggtgcctgcaccactgttgccaagctgcgatgcaacggcgagggggactgaaatcaggtcgtatggcaatgatccctag

SEQ ID NO: 194278 - DNA, 2997 bp, synthetic construct
  misc_feature 1..2997: note = Description of Artificial Sequence: Synthetic coding sequence
  source 1..2997: mol_type = other DNA
atggacgactggaagagccggctggtgatcaagagcatgctgccccacttcgccatggtaggcaaccgtcaggagccacggaaacttcaggagtccggaacagtgaaaagacgccaggaggaagaccatttccaatttcccgacatggctgatggcggatacccaaacaaaattaaacgaccttgccttgaagacgttacactggcaatgggccctggtgcacatccctccaccgcatgtgctgagctacaagtgccgccattgacaataaacccgtcaccagctgcgatgggggttgcaggacagtccctactgctcgagaataatccaatgaatggaaacataatgggaagcccctttgtcgtgcctcagactacagaggtgggtctcaaggggccaacggtgccatactatgaaaaaatcaactcagtcccagccgtcgatcaggagctgcaggaactactcgaggaacttacgaaaatccaagacccctctccaaatgaacttgatctggagaagattctgggcaccaagcccgaagaaccccttgtgcttgatcaccctcaggctactctaagcactacgcccaaaccttctgttcagatgagtcatctcgagagcctggcctcatcaaaggagttcgcttccagttgtagtcaggttacaggcatgagtctccagatcccgtcttcctctaccgggatttcttacagtatcccaagcaccagtaagcagatcgtatcacccagcagctcaatggctcagagtaagagccaggtgcaggctatgctgccagtcgcactgccgccactcccagtcccccaatggcaccacgcgcaccagctgaaggccctggcggcgtccaagcagggctctgctaccaaacagcaaggccctactccttcatggagcggcctgccgccgccgggactgtcaccgccgtatcgacccgtaccaagccctcaccccccaccccttcctcttcccccccctccccctcccttctctccacaatctttaatggtctcatgcatgtccagcaatacgctctcgggcagtactttgcgcggttcccctaacgcactgctcagtagtatgacgtcaagcagtaacgcagcattgggccccgcaatgccgtatgcccctgagaagttgcctagccccgccctcacccagcagccccagttcggaccccagagctcaatactagcaaacttaatgtcttctactataaagaccccccaaggccatctgatgtcggcactcccagctagcaatcctggaccctctcctccgtatcgccctgagaaactctcaagcccaggcctcccccaacaaagtttcacacctcagtgttccctgattaggtctctcacccctaccagtaacttactgtcgcagcagcaacaacagcaacagcagcaacagcaagctaatgtgatctttaaacccatttctagcaattcatccaaaacgctgagcatgattatgcagcaggggatggccagctcctctccgggggccacagaacccttcacttttggtaacaccaagccactgagccatttcgtgtctgagcctggtcctcagaaaatgccttctatgcctaccacgtcgcgacagccatccctcctccactacctacagcagccaaccccaacccaggcatcttcagccacagccagctcaaccgctacagccacactgcagctccagcagcagcaacagcagcagcagcaacaacctgaccactcttctttcctacttcagcagatgatgcagcagccccagagattccagcgctccgtcgcatccgattctatgccagccctgcctagacagcaggaagaacagagatccggactgatggccatgacacctgaaagacagaatgcctacattagtcagcaaatgtccccatttgaagcagtgcaggagcaagtgacaagcaagtgctctcgcatcaaggcaagtccaccatcaagcaaacaccttatgcctccgaggacgggtcttctgcaaaacaacttaagccccggcatgatccccttgacccgtcaccagtcatgtgagggaatgggggttatctccccaaccctgggaaaaaggcaaggcatttttacctcgtcaccacaatgtccaatcctgtcgcactcagggcagacccccctgggaaggctcgactccgtttgccagcatatgcaaagtcccaaagcaaccccccctgaggtgccactgccgggtttttgtccttctagccttggcacccagagcctgtcgccacaccagttgcgacgaccctccgtacctcgcatgccaactgcgttcaacaacgccgcctgggtgacagcagcagcggctgtgactacggctgtaagcgggaaaaccccactcagccaagtcgataacagtgttcaacaacactcaccgtctggccaggcctgcttacaacgcccctccgattgggaagcacaggtacctgccgctatgggaacccaggtgcctctggctaacaatccatctttcagcctgttaggctcccagtctttacggcagagtccagtgcagggtccggtgccggtcgccaacaccacgaaatttctgcaacagggtatggcttccttcagccccctcagtcccatccagggcatagagccgcccagttacgtggctgccgccgctactgcggctgccgcctccgcggtggcagcgtcccagttccccggtccattcgaccgaacagatattcctcctgagctgccgccagccgacttccttaggcaaccacagcctccccttaacgatttgatctcaagtcctgactgtaacgaagttgactttattgaagccctgttaaagggaagttgcgttagcccagacgaggattgggtttgcaatctgcggttgatagacgacattcttgaacagcatgcagccgcacaaaatgcgacagctcaaaacagtgggcaggtcactcaggacgcaggcgccctctag

SEQ ID NO: 194279 - DNA, 1941 bp, synthetic construct
  misc_feature 1..1941: note = Description of Artificial Sequence: Synthetic coding sequence
  source 1..1941: mol_type = other DNA
atggaggaggaggacctgagcttcctgtacaagagcagccccggccgaaaacatcagggaaccgtcaaacgcagacaggaagaggatcactttcagttccctgacatggccgatggtggatacccaaataaaataaagaggccctgtctcgaagacgtgacgcttgcaatgggtcctggggctcatccttcaaccgcatgtgccgaacttcaggtcccgcctctcacaataaaccctagtccagctgccatgggggtcgcgggacagagcctgctcctcgagaacaatcccatgaacggtaatatcatgggctccccgtttgtggtgccccagacgactgaagttgggctcaagggcccaacagtgccttactacgagaagataaatagcgtccctgccgtcgatcaggaattacaggaattgttggaagagctgaccaaaattcaggacccctccccaaatgagttagacctcgagaaaattctcggaacgaaaccggaggagccactggtgcttgaccaccctcaggctaccctttccacaacccccaagccctccgtgcagatgtcacacctggaatccctggccagctctaaagaattcgctagtagctgttctcaggttactggtatgtctttacagatcccatcttcctcgaccgggatttcctattcgataccctctacatccaaacagatcgtaagccccagtagcagtatggcacaatcaaaaagtcaagttcaagcaatgttgcccgttgctctgcctcccctccccgttccccagtggcaccatgctcaccagctgaaggccctggcagctagtaaacagggaagtgccactaaacagcagggccctacaccatcttggagtgggctgcccccccccggtctctctccaccctatcgaccagttccttcgccacacccacccccactgccacttccccctccccccccgccattcagtcctcagtccctcatggtgtcctgtatgagcagtaacaccctgagtggatcaaccctccgcgggagtccaaacgccctgctttcatccatgaccagctcctccaacgctgcactgggaccagcgatgccctacgctccggaaaaactgccctcaccagcccttacccaacagccccagttcggacctcaatcttccatcctggccaacctgatgtcctcaactatcaagacgccacaggggcatttaatgtcagccctgccggcctccaatcccgggcccagtcctccataccgtcctgaaaaacttagctccccaggcttgccccagcagtcatttacaccacagtgttccttactgcattacctccagcagcccacgcccacacaggcaagcagtgccaccgcctcgagtacagcgaccgccacactccaattacaacaacaacagcagcagcagcaacagcaacccgatcatagctcctttctgcttcagcaaatgatgcagcagccacagcgttttcagcgttccgtggcctctgactctatgccagccctgccccgtcaaggatgttgccacctgttcgcctggacatccgccgcaagttcagttaagccacaacaccagcacggcaatagctttacttcgagacaggatcctcaacccggcgatgtcagcccctcaaacatcactcatgtcgacaaagcctgcaagctgggagaagctcggcatcctcaggtgtcactgggccggcagcctcctagttgtcaggcactgggttctgaaagtttcctgcccggctcaagtttcgcccacgaactcgctcgggtcacaagctcttacagtactagcgaggccgctccctggggcagttgggaccctaaagcctggcggcaagtacccgcgccccttttgccatcttgtgatgcgaccgctagaggcaccgagatacggagttacggcaacgatccatag

SEQ ID NO: 194280 - DNA, 645 bp, synthetic construct
  misc_feature 1..645: note = Description of Artificial Sequence: Synthetic coding sequence
  source 1..645: mol_type = other DNA
atgatcatgcagcagggcatggccagcagcagccccggcgccaccgagccgttcacttttggcaacactaaacccctaagccactttgtaagcgaacccggcccccagaaaatgccttccatgccaacaacttcccgtcagcccagcctactgcattatcttcaacagcctactccaacccaagcctctagtgccaccgcttcttccaccgcaacggcaaccttacagcttcagcaacagcagcagcagcagcagcagcaaccagatcactccagcttcttgttacagcaaatgatgcagcaaccccagagatttcaacgatcagtggcctccgatagcatgcctgcactcccacggcagacccatgtggataaggcgtgcaaactcggggaggcccgacatccacaggtgagtctgggaaggcagccccctagctgtcaggcgctgggatctgagtccttcctcccgggaagctcgtttgcccacgagctggccagggtgacaagctcttactcgacctcagaggctgctccctggggcagctgggaccccaaagcttggcggcaggtgcctgcaccgctccttccctcatgcgacgccacagcccgggggaccgagatacgtagctacggcaacgacccctag

SEQ ID NO: 194281 - DNA, 1956 bp, synthetic construct
  misc_feature 1..1956: note = Description of Artificial Sequence: Synthetic coding sequence
  source 1..1956: mol_type = other DNA
atgaaggactacgacgagctgctgaagtactacgagctgcacgagaccattgggaccggaggcttcgccaaagttaaactggcgtgccatatccttactggcgagatggtcgctatcaagataatggacaaaaacactctaggctccgacctgccaagaatcaaaaccgagattgaagctttgaaaaatctgcgccatcagcacatctgccagctgtaccatgttctggaaaccgcaaacaaaatatttatggtgctcgaatactgtccagggggagagctgttcgactacattatctcacaggatcggctgagcgaggaggagacaagggttgtgtttcgccaaattgtctccgccgttgcttacgttcacagccagggttacgcccatagggacctaaaacccgagaacctgctattcgacgaataccacaaattaaaattaatcgatttcgggctctgcgctaaacccaagggtaacaaggactaccacctacagacctgttgtggttcacttgcatacgctgcccccgagctgatccagggaaagtcatacctcggcagcgaggccgatgtgtggtctatggggatcctgctgtacgtcttgatgtgtggctttctgccttttgacgacgacaatgtcatggccctttataaaaaaattatgaggggcaagtatgacgtccccaagtggttgtcaccaagctccatcctgctgctgcagcagatgcttcaggtcgacccgaaaaaaaggataagcatgaagaatctgctcaatcatccttggattatgcaagactacaattaccctgtggaatggcagagcaaaaatccctttattcatctggacgacgactgtgtgaccgagctgtctgttcaccaccggaataaccggcagaccatggaagatctgatatcgctttggcagtatgatcacttgactgccacgtacttgcttcttcttgccaagaaagctagggggaaacccgtacgactgcggttgagctcattctcgtgtggccaggcttccgcgactccattcactgatatcaagagcaacaattggagcctggaagacgtcacagcatccgataagaactatgtggcagggctgatcgactacgattggtgtgaagacgatttatctacaggtgccgcaacgcctcgaacctcccagttcacgaaatactggacagagtcaaatggcgtcgaaagtaaaagcttaacgccagctctgtgtcggaccccagcaaataagctaaaaaataaggagaatgtatacacacctaaatcagctgttaagaacgaagagtattttatgttccccgagccaaaaactcctgtgaataagaatcaacacaagcgggaaatccttacaactccgaaccgttacactaccccgagtaaggcccgtaatcaatgtctgaaagaaacacccatcaagatacctgtcaatagtactggcacggacaaactgatgacgggcgttatctcacctgagcgcagatgccgtagtgtggaactggacctgaaccaggcgcacatggaggagactcccaaacgcaagggcgcaaaggtcttcggctcactggaaagaggcctggataaggtgattacggttctgacccggtccaaacgcaaaggaagcgctcgagatggtccccgccgcttaaagctgcactacaacgtaacaacaacaagactggttaaccctgaccaactcttaaatgagattatgtcaattctcccaaaaaaacacgtggacttcgtccaaaagggatatacactcaaatgccagacccagtcagattttggaaaggtgactatgcaattcgagctggaggtgtgtcagctccagaaaccagacgtggtgggaatcaggcgccagcggttgaagggcgacgcttgggtctataagcgattggtggaggatatcttgagctcatgtaaagtttag

SEQ ID NO: 194282 - DNA, 1743 bp, synthetic construct
  misc_feature 1..1743: note = Description of Artificial Sequence: Synthetic coding sequence
  source 1..1743: mol_type = other DNA
atgatgaacttcagcaacatcatgaactacatgaagctgctgggccaatactgcccaggaggcgaactgttcgactacatcatctcccaggaccgcttgagcgaggaggaaactcgtgtggttttcagacagattgtctctgctgtggcttacgtccatagtcagggctacgcacatagagacctcaagccagagaacctgttattcgacgaatatcataagctgaagctgatagacttcggactgtgtgctaaacccaaaggcaacaaggactaccacttacaaacttgttgtgggagtctggcatacgctgcacctgagttgattcaaggtaagtcctacctggggtccgaagctgatgtgtggagcatgggtattcttctctacgtgctcatgtgtggcttcctgccatttgatgacgataacgtgatggctctgtataaaaaaataatgcgaggtaaatatgatgttcccaaatggctgtcaccctcaagcattctgctcctacagcagatgctgcaagtagaccctaagaagaggatcagtatgaagaatttgctgaaccatccctggataatgcaagactataactatcccgttgagtggcagtccaagaatccctttatccaccttgacgatgattgcgtgacggagttaagtgtccatcatagaaacaataggcagacaatggaagacttgatatcattatggcagtacgaccatttgacagcgacctatcttcttttgctggctaaaaaagctcgcgggaagcctgtgcgattgcgcctgtctagtttttcttgcggccaggcgtccgctactcccttcaccgatatcaaatccaataattggtccctggaagacgtaacagctagcgataaaaactacgtggccggactgattgactacgattggtgcgaggatgatctttccaccggtgcggcaacaccccgcactagtcagtttactaaatactggactgaaagtaacggagtggagagcaaaagtctcacaccagccttgtgtcgaacccccgcaaacaagttgaaaaataaagagaacgtctatacccctaagtctgctgtgaagaatgaggaatacttcatgttccctgaaccaaaaactcctgtgaataagaatcaacacaagcgggaaatccttaccaccccaaatagatacactaccccaagcaaggcgaggaaccagtgcctaaaagagactcctattaagattcctgttaactctaccgggaccgacaaactaatgactggggtgatctcacccgagcgacgttgtcgcagcgtggaactggatcttaaccaggctcacatggaggaaacaccaaaacggaagggcgctaaggtgttcggttccctcgagcgagggctagataaggtgattaccgtactgactaggagcaagagaaaggggtccgctcgggacggtccaagacggctgaagcttcattataatgttactactacaagattagtcaacccagatcaactgctgaacgaaataatgtctatactcccaaaaaaacacgtagattttgtgcagaagggctacacactgaagtgccagacccagtcggatttcggaaaggttacgatgcaattcgaactcgaggtctgccagctccagaagccagatgtggttggaatacgccggcagcggttaaaaggggatgcctgggtttacaagcggctcgtggaagacatcttgtcttcatgcaaggtgtag

SEQ ID NO: 194283 - DNA, 1812 bp, synthetic construct
  misc_feature 1..1812: note = Description of Artificial Sequence: Synthetic coding sequence
  source 1..1812: mol_type = other DNA
atgaaggactacgacgagctgctgaagtactacgagctgcacgagacaataggcacaggcggctttgctaaggtcaagctggcgtgccacatcctcactggcgaaatggtggccattaaaattatggacaagaacacccttggttccgaccttccacggattaagacagaaatcgaggccctgaagaacctgagacaccagcatatttgccagttgtatcacgtcctcgaaactgccaataagatctttatggtgttagaagagaaccttctgtttgatgagtatcacaagctgaagctgattgacttcggactgtgcgccaagcccaaagggaacaaggactaccaccttcagacctgctgtggttcgctggcgtacgccgctcccgaattgatccaaggaaagtcatacctcggttccgaggccgatgtttggagcatgggtatcctcttgtacgtcctgatgtgcgggtttctgccatttgatgatgacaatgtaatggccctgtacaagaagattatgcgcgggaaatacgatgttcccaagtggttatcgccgtcatcgatcctcctcctccagcagatgctccaggttgatccgaaaaagagaatctccatgaaaaacttgctgaatcatccgtggataatgcaagactacaactatcctgtggaatggcaatctaagaacccatttatccacctggatgacgactgcgtaacagagcttagtgtgcaccaccgtaacaacagacagacaatggaggacctcatttcattatggcagtatgatcacctgacagctacatacttattgctgttggctaaaaaagcaagggggaaacccgtgcgcctgaggttgagttcgttttcctgcggccaggcaagtgctactccgttcactgatatcaagtcgaataattggtcactggaagatgtaacagctagtgataagaactatgtggccggcttgattgactatgactggtgtgaagatgatctatcaacaggcgctgccaccccccgaacctcccaattcactaagtactggaccgagtctaatggagttgagagtaaaagccttacacccgccctgtgccggactcccgcaaataagttaaagaataaagaaaatgtctacacccccaagtcagcagttaaaaacgaggaatattttatgtttcctgaacctaagactccggtcaacaaaaatcagcataagagagagattctgacaacccctaacaggtacactaccccttctaaagcaagaaatcaatgcctgaaggaaacccccataaagattccggtaaacagcactggcacagacaagctgatgactggtgtgatctcaccggaacggcggtgtcgctctgtggagctagatctgaatcaggcccatatggaggagactcccaagcgaaagggagccaaggtgttcggctcgctggagaggggccttgacaaggtcatcactgtgctgacccgcagcaagagaaagggcagcgctagagatggacccagacggctgaagttgcactacaatgtcacaaccaccagattggtgaatccagaccagcttcttaatgagattatgtccatcttgcccaagaaacacgttgacttcgttcaaaaaggctacactcttaagtgccagacccagagtgattttggaaaggtgacgatgcagtttgaattagaggtttgccagttacagaagcctgacgtcgtgggcatccgcagacaaaggctcaagggagacgcctgggtgtataaacgcctagtcgaagatattctttctagttgcaaagtgtag

SEQ ID NO: 194284 - DNA, 1563 bp, synthetic construct
  misc_feature 1..1563: note = Description of Artificial Sequence: Synthetic coding sequence
  source 1..1563: mol_type = other DNA
atggtgctggaggagaacctgctgttcgacgagtaccacaagctgaagctgatcgatttcggtctgtgtgctaagcccaagggtaacaaagactatcacttgcagacctgctgtgggtccttagcttatgccgctcctgagttgattcaagggaaatcttacctgggatcagaagctgacgtctggtccatgggcattctcctgtatgttctgatgtgtggtttcctcccattcgatgacgacaatgtgatggccctctacaagaaaattatgcgcgggaagtatgatgtgcctaaatggctgtccccatcttcgatactcctgttacaacagatgctgcaggttgatccaaaaaagagaatttccatgaagaatctactgaaccatccatggatcatgcaggactataattaccccgtggagtggcagtccaagaacccgttcatccacctggacgatgactgcgtcaccgagctgtcggtgcatcatagaaacaacagacagacaatggaagacctcataagcttgtggcagtacgatcacctgacagcaacctacctgttacttctcgccaagaaagcaagagggaaaccggtcaggctgagactgtcatcgttttcctgcggccaggccagtgcgacaccgttcacagacatcaaatctaacaattggagcctggaagatgtgactgcctcggataagaattatgtggcaggtctcatagattacgactggtgtgaagatgatctctctactggcgccgcaacccctcgcacttcccaattcacaaaatattggaccgagtccaacggggtcgagagcaagagcctgacccctgcactctgccggactccagctaataaactcaaaaataaggagaatgtgtacacccctaagtccgcggtaaaaaatgaggagtacttcatgttcccagaacctaaaacccccgtgaataagaatcaacacaaacgtgagatcctgactacgcctaataggtacaccactccctctaaagcaagaaaccaatgtttgaaagagacccccatcaagattccagtgaactccaccgggacggacaaattgatgacaggggtcattagcccagagcgacgctgcaggagcgttgagctggacttgaatcaggcccatatggaggagacgccaaagagaaagggagccaaggtgttcggctctttggaaagaggactggataaagtaatcaccgtgctgacgcggtcgaagaggaaagggtccgcgagagatggccccaggaggctcaaactacattataacgtgaccacgacacggttggtgaaccctgaccagctactgaatgaaataatgtcgatacttccaaagaagcatgtggacttcgtgcagaaaggttacactctcaagtgtcagacacagagtgacttcggcaaagtgaccatgcaatttgagctggaggtctgtcaattgcaaaagccagatgtagtgggaatcaggagacagagacttaaaggggatgcttgggtctataaaagactcgtggaggacatactgtcatcttgcaaggtttag

SEQ ID NO: 194285 - DNA, 1374 bp, synthetic construct
  misc_feature 1..1374: note = Description of Artificial Sequence: Synthetic coding sequence
  source 1..1374: mol_type = other DNA
atgggcatcctgctgtacgtgctgatgtgcggcttcctgcccttcgacgacgacaacgtgatggctctctataagaaaattatgcgcggaaaatatgacgtgcctaaatggctgagcccctctagcattctgctgctgcagcaaatgttacaggtggaccctaaaaaacggatcagtatgaagaatttgctcaaccatccctggatcatgcaagattataattatcccgtggagtggcagagcaagaacccttttattcacctggacgatgattgtgtcaccgagctttcagtacaccataggaataacagacagacaatggaggacctaatcagcctgtggcagtacgaccatctgacagctacgtacttgctgctgctggcgaaaaaagcccggggcaagccggtacggctgaggctttcttcatttagttgcggccaagcctctgccacccctttcacagatatcaagtcaaataactggtcgctcgaagacgtgacagcgagtgacaagaactacgtggccggtctcatagattacgactggtgtgaggacgaccttagcacaggagctgcaactccaaggaccagtcagttcacaaagtattggaccgagtccaatggagtggaatccaagtcactaacacccgctctgtgtcgtacgccagcgaataagttaaagaacaaagaaaatgtctacactcccaaaagtgccgtaaaaaatgaggagtattttatgtttcctgaacctaagaccccagttaataaaaatcagcacaaaagagagatcctgactacgcccaaccgctacaccaccccgagtaaggccaggaatcagtgcttgaaggagactccaattaagatcccggtgaactccactgggaccgataagctcatgaccggagtgatttcccccgaacggcggtgtcgttccgtggaactggacctcaaccaggctcatatggaggaaacacccaagcgtaagggggcaaaggtttttggatccctggagagggggctggataaggtaattaccgtgctgactcggtccaagcgcaaggggagtgcgagggatggtccccggcgcttgaaactgcactacaacgttaccaccactaggctggtcaaccccgatcagctgctcaatgagataatgagtatccttccgaagaagcacgttgatttcgtacagaagggctacacactgaagtgtcagacgcaatccgatttcggtaaagtaaccatgcagttcgagttggaggtgtgccagttgcaaaaaccagatgtcgtcggaattaggcggcagaggttgaaaggtgacgcctgggtgtataagcggctggtggaggacattctgtcctcctgtaaggtctag

SEQ ID NO: 194286 - DNA, 1833 bp, synthetic construct
  misc_feature 1..1833: note = Description of Artificial Sequence: Synthetic coding sequence
  source 1..1833: mol_type = other DNA
atgaaggactacgacgagctgctgaagtactacgagctgcacgagacaatcgggacaggcggctttgctaaggtcaaattggcatgtcacatcttaaccggagaaatggtggctattaaaatcatggacaagaacacactcggttcagacctgccacgtatcaagaccgaaattgaagccctgaaaaatctacgacaccagcacatttgccagctgtatcatgtgctggaaactgccaataaaattttcatggtccttgaatattgtcccggcggcgagctgtttgactatatcatttcccaggataggctgtctgaggaggaaacccgtgttgtattcaggcagatagtatcggctgtagcttatgtgcactcgcagggctatgcacaccgcgacttgaaaccagagaatctactcttcgacgaataccacaaactcaaacttatagacttcggcctgtgtgccaagccaaagggcaataaggattaccaccttcagacctgctgcgggagcttggcatatgctgcccccgaactaatacagggaaagtcatacctgggtagtgaggccgacgtttggtcaatgggcattctcctttacgttcttatgtgtggtttcttgccattcgatgatgataatgtgatggccttgtataagaagattatgcgcggcaagtatgacgtgcctaagtggctcagcccctccagcatcttactactccagcaaatgcttcaagtcgatccaaagaaaaggatctctatgaagaacttactaaaccacccctggattatgcaggattacaactaccccgtggagtggcagagcaaaaacccttttattcacctggacgacgactgcgttacagaactgtctgtgcatcaccggaataacaggcagactatggaagatctgatcagcttgtggcagtatgaccatttaactgctacgtacctgctattgcttgcaaagaaggctagaggcaagcctgtccgcctccgcctgagctcattctcgtgtgggcaggcgtccgccacaccctttacagacattaagttcactaaatactggactgaatccaatggagtggaatcaaagtcactgaccccagccctgtgccggacaccggcaaataagctgaagaacaaagagaacgtgtacacccccaaaagcgcagtcaagaacgaagagtattttatgttccccgagccaaagacacctgttaacaagaaccagcataagagggagatcctgaccacccctaaccggtatacaacaccaagcaaagcacgcaaccagtgcctgaaagaaacacccataaaaatacctgtaaattctacgggcaccgataaattgatgaccggcgtgatcagcccagagaggcggtgcagatcagtggagctcgatctgaatcaggctcatatggaagagacccctaagcgcaagggcgccaaagtcttcggctctctcgaaaggggcctggacaaagttattaccgttctgacacggagcaagcgtaagggaagcgcgagagacggcccgagacggctgaagctgcactataatgtaactaccaccaggctagtgaatccagaccaactcttgaacgaaattatgtccatccttccgaagaaacatgtggacttcgtgcagaagggctatactcttaaatgccagacacaatccgatttcggcaaagtcacgatgcagttcgaactggaagtttgtcaacttcagaaaccagatgtggttggtattcgcagacagcggctaaaaggcgacgcttgggtctacaaacgcctcgtggaggatattctgagctcatgtaaagtctag

SEQ ID NO: 194287 - DNA, 1860 bp, synthetic construct
  misc_feature 1..1860: note = Description of Artificial Sequence: Synthetic coding sequence
  source 1..1860: mol_type = other DNA
atgatgaacttcagcaacatcatgaactacatgaagctgctgggccagtctgacctcccaagaataaagacggagatcgaggctctgaagaacttgcggcaccaacacatctgccaactataccatgtactggagactgccaacaagatcttcatggttctggaatactgccctgggggtgagcttttcgactacatcatctcccaggatcggctgtccgaagaggaaacccgggtagtattccgccagatcgtgtctgccgtggcctacgtgcatagtcaggggtacgcccacagagatcttaagcccgagaacttgttgttcgatgaatatcacaagctgaagctgattgatttcggcttgtgtgctaaacccaagggcaacaaagactatcacctgcagacatgttgtggttcccttgcatatgcagcacctgagcttattcaaggcaaatcgtatctcgggtctgaagccgatgtttggtctatgggcattctgctgtacgtcctcatgtgcgggtttcttccgttcgatgacgataatgtgatggcactgtacaaaaagattatgcgtggcaaatatgacgtccccaagtggctcagtccaagttcaatactcctgctgcaacagatgttgcaggtcgacccaaagaagagaattagcatgaagaatctcctaaaccatccgtggattatgcaggactacaattaccccgtcgagtggcagtcaaaaaatccattcattcacctcgacgatgattgtgtcaccgaacttagcgtacaccatagaaataatcggcagacaatggaagacctgatttcactgtggcagtatgaccacctcacagcaacatatcttttgctcctggccaagaaggctcgcggaaagccagttcgcttgcgactgtcttcctttagttgtggccaagcatccgccaccccctttacggacatcaaaagcaacaattggagcctggaagacgtcaccgcaagtgacaagaactacgtcgcgggattgattgattacgattggtgtgaggatgacctttcgaccggcgccgctactcccagaacctctcagttcacgaagtactggaccgaatccaacggggtggaaagcaagagtctgactccggcattgtgcaggactcccgccaataaactgaagaataaagaaaacgtctatacgcccaagtctgcagtgaagaatgaggagtattttatgtttcctgaacctaagacccccgtcaataagaaccagcacaagcgtgagatccttaccacgccaaacagatatacgacgccctccaaagcaagaaaccagtgtcttaaggaaactccaattaaaatcccagtgaacagcacaggaacagacaagctcatgacaggagtgatctctcccgagaggcgctgccggtccgtcgagcttgatctgaaccaggctcacatggaggagacccctaagcgcaaaggcgctaaggtgttcgggtccctggagaggggattagataaggtgattacagtgttgacgaggtcaaaaaggaagggctctgctcgcgacggtccccgccgccttaagctgcactataacgtgaccactaccaggctggtgaatcccgatcaactgctgaatgaaattatgtctattctgcccaagaagcatgtggacttcgtgcaaaaggggtatacactgaagtgccagactcagtctgactttgggaaggtaacaatgcagttcgagcttgaggtttgtcaactgcaaaaacccgacgtggtgggcatcagacggcaacggctgaaaggggacgcatgggtgtacaaacgccttgtggaggacattttaagctcttgtaaggtgtag

SEQ ID NO: 194288 - DNA, 1743 bp, synthetic construct
  misc_feature 1..1743: note = Description of Artificial Sequence: Synthetic coding sequence
  source 1..1743: mol_type = other DNA
atgaaggactacgacgagctgctgaagtactacgagctgcacgagacaatagggaccgggggattcgccaaagtgaagttagcctgccacatcctaaccggggagatggtggccattaaaatcatggacaagaacacattgggctccgatctacccaggattaaaaccgagatagaagccttgaagaacttgcgtcaccagcatatctgccagctctaccacgtcttagaaacagcgaataagatattcatggtccttgagggtaataaagattatcacctgcagacttgctgcgggagcctagcctacgcagcgccagagcttattcaggggaaatcatacttgggctctgaagctgacgtgtggagcatgggaattctgctatacgttctaatgtgtgggttcctacccttcgacgatgacaatgtgatggccctttacaagaagatcatgagaggcaagtacgatgttcctaagtggttatctcccagctcgatcttgctcctccaacagatgctgcaggtcgacccaaaaaaacgcatctctatgaagaatctgctcaatcatccttggattatgcaggactacaactaccccgtggaatggcaatccaagaacccatttatccatttggacgatgactgtgtcactgagctgtctgttcaccacagaaacaatcggcagaccatggaggatctcattagcttatggcagtacgaccacctgaccgcaacatacctgcttttactagccaagaaggccaggggcaagcccgtgagactgcggctgagcagcttttcctgcgggcaagcctccgcaacccccttcactgatatcaaatccaacaactggagcctcgaagacgtgaccgcctcagacaagaattatgtggctgggctgatcgattacgattggtgcgaggatgacctgtccaccggagcagccacccctaggacgtctcagttcacaaagtattggaccgaatccaacggagtcgagtctaaatccctcacacctgccctttgtcggaccccagcaaataagctcaagaacaaagaaaacgtgtacacacccaaaagcgccgttaaaaacgaggagtatttcatgttccctgaacccaaaacacctgtcaataagaaccagcataagcgtgagatcctcactactccgaatagatacactactccttccaaagcgcggaatcaatgcctaaaggaaacccctattaagatcccagtcaattctactggcaccgacaagttaatgacaggggtcatctcccccgaacgacggtgcagatccgttgagctcgatctgaaccaggcacacatggaagagacccctaagaggaagggcgccaaggtatttggcagcttggagcggggcctcgataaagttataaccgtgctcactagatcgaagcgcaaaggctccgcccgagatgggcctcgtagactcaagctgcactacaacgttacgacaacccggctcgtgaaccctgaccaactccttaacgaaataatgagcatcctaccgaaaaaacatgtggattttgtacagaaagggtacaccctgaaatgtcaaacacaatctgatttcggaaaagtcaccatgcagtttgagctggaagtgtgtcagttacagaagcccgatgtcgtcggcattcgtagacagcgcctgaaaggtgatgcctgggtttataagcgcctggtggaagatatcctgtcaagttgtaaagtctag

SEQ ID NO: 194289 - DNA, 1491 bp, synthetic construct
  misc_feature 1..1491: note = Description of Artificial Sequence: Synthetic coding sequence
  source 1..1491: mol_type = other DNA
atgcgggtgctgagcggcaccagcctgatgctgtgcagcctgctgttgttactccaagccctgtgcagtcctgggctggcccctcagagcagagggcacctttgccgtactcggcccacagatcttgttttcgtcgtagattcctctcgctcagtgagaccagtcgaattcgagaaggttaaggtgtttctgtcacaagttatcgaaagtctggatgtgggacccaacgcaacacgtgtggggatggttaactacgccagcacagttaaacaggagttctcacttcgagctcacgtcagcaaagccgctctcttgcaggctgttcggagaatccagcccctttccacagggacgatgaccgggttggcaatccagttcgcaattaccaaggcctttggggatgccgagggcggaagaagcaggtcacccgatatcagcaaggtggtcatagtggtcaccgacggccgccctcaggattccgtgcaggacgtctccgcaagagctcgggccagtggcgtggagctctttgcaattggcgtgggatccgtggataaagccaccctgcggcaaatcgccagcgagcctcaagacgagcatgtggactacgtggaatcttattctgtgatcgagaaacttagtcgcaagtttcaagaggccttctgcgttgtttccgacctctgcgctactggcgaccacgattgcgagcaggtctgcatttcctctcctggatcttatacttgcgcctgtcacgaaggttttaccttaaactccgacggaaagacttgcaacgtgtgctctggaggaggaggctccagtgcaactgacctggtctttctgatcgatggcagtaaaagtgtcaggccagagaacttcgaactcgtgaaaaagtttatcagccagatcgtggacaccctggacgtgtctgataagctggctcaggtggggctggtccaatactccagcagtgtacgccaagagtttcccctgggaagatttcacactaaaaaggacattaaggctgcagtccgtaacatgagttacatggagaaaggcaccatgacaggcgccgccttgaagtatcttatcgataactcatttaccgtgtcttccggagctaggccgggcgctcaaaaggttggcatcgtatttactgatgggcgctcacaagattacataaacgatgcggccaaaaaagcaaaggacttgggattcaagatgttcgcggttggcgtcggaaatgccgtcgaagatgagctccgggaaatcgctagcgagccagtggccgaacactatttttacaccgccgacttcaaaaccattaatcaaatcggcaagaaactccaaaagaaaatttgtgtcgaggaggacccttgcgcctgcgaaagcctagtcaaattccaggccaaggtcgaaggcctgctgcaagcgctgacccgcaaactggaggcagtgagtaaacgtctcgccatcttggagaatacggtggtatag

SEQ ID NO: 194290 - DNA, 2874 bp, synthetic construct
  misc_feature 1..2874: note = Description of Artificial Sequence: Synthetic coding sequence
  source 1..2874: mol_type = other DNA
atggagaagatgctggccggctgcttcctgctgatcctgggccagatagtgctgttgcctgcagaggcccgcgagaggtcgagaggacggagcatatcccgagggcgacacgctcgaacccatccccagaccgcccttttggaaagctcatgcgaaaataagagagcagatcttgtgttcattatcgacagttccagatcagtgaacacacatgactatgctaaagtcaaggaattcatcgtggacattctgcagtttctcgatatcggtcctgacgttacaagagtcgggctgctgcaatatggcagtacagtaaagaatgaattttcactgaagactttcaaaagaaaaagcgaagtcgagagagcagtcaaacggatgagacacctctcaacggggacaatgaccgggcttgctatccagtatgccttgaacattgcctttagcgaagcagaaggagccagaccccttagagagaatgtaccccgagtgattatgatcgtgactgacggccggccccaggactctgtggctgaagtcgctgcaaaggcccgtgacactggcatacttatattcgcaataggggtggggcaggtcgacttcaatacattgaaatctattggaagcgaacctcacgaagaccatgtctttttggtcgccaacttcagccaaatagagacactgacatctgtctttcagaaaaagctgtgtacagcccacatgtgtagtaccttagagcacaactgcgcccatttctgcataaacataccaggcagctatgtgtgccggtgtaaacagggctatatactaaactcagatcagaccacttgtcggattcaagacttatgtgccatggaggaccataactgtgaacagctttgcgttaacgttccagggtcatttgtgtgtcagtgttactccggatatgcactggcagaggatggcaagcgctgcgttgcagtggactactgcgcgtctgaaaaccatggatgcgagcatgaatgtgtgaatgcagatggctcgtacctgtgtcagtgtcacgaggggtttgcccttaaccctgacaagaaaacttgtaccaagatcgactactgcgcaagcagtaatcacggctgccaacatgagtgtgtgaacaccgacgacagctacagttgccactgtctgaaagggttcacactcaatccagataaaaaaacctgtcgccggataaattactgcgcacttaacaagccgggctgcgaacacgaatgcgtcaacatggaggagtcctattattgtcgctgccataggggctataccctcgaccctaacggaaaaacttgctctagggtggatcactgcgcccagcaggaccatgggtgcgagcaactgtgtctcaacaccgaagattcctttgtgtgtcagtgttccgagggttttctcataaacgaagaccttaagacatgctctagagtggattattgcctcctgtctgaccatggctgtgagtactcgtgcgtgaacatggatcgctccttcgcttgtcagtgtccagagggccatgttttgcgctccgacggaaaaacctgtgcaaaactggattcttgcgctctgggggatcacggttgcgaacacagttgcgtgtccagcgaggatagcttcgtttgccagtgtttcgaagggtatattctgcgtgaagatggcaagacttgtcgccgcaaggacgtttgtcaggcaattgaccacgggtgtgagcacatctgcgtcaactctgacgactcatatacctgcgagtgtctagaaggcttcagactggccgaagatggcaaaaggtgccgaaggaaggacgtctgtaaatcaactcatcatggatgcgaacatatctgtgtcaataacggcaattcatacatatgcaagtgcagtgaggggttcgttctcgcagaagatgggcgaagatgcaagaagtgcaccgaaggtccaattgatctggtgttcgtgatcgatggaagtaagagtctgggggaggaaaatttcgaggtggtgaaacaattcgttaccgggatcatcgactccctgactatttccccaaaggctgctagagttggtctcctgcagtacagcacccaggtccatactgagttcactttacggaacttcaattctgcaaaggatatgaagaaagcagtggctcatatgaagtatatggggaaggggagtatgaccggactggcacttaagcacatgttcgagcgaagcttcacacagggggagggagctcggcccctctccacacgcgtgccgagagctgcaattgttttcactgatggacgcgcccaggacgatgtgtctgaatgggcctcaaaggcaaaagctaatggcattaccatgtatgccgtgggcgtcgggaaagcaatcgaggaggaactgcaggagatagcgtcagaaccgacaaataaacacctgttctacgccgaggacttttctacaatggacgaaatctccgaaaagttaaagaagggcatatgtgaggccctggaggacagcgatggaagacaggattcgcctgccggcgagctacccaagaccgttcagcagcccacagaaagtgaacccgtgactattaacatacaggacctgctcagttgttcaaactttgccgttcaacatcggtacctgtttgaggaagataatttgctgcgctctactcagaaactcagccattccacaaagcctagcggctctcctctggaggagaaacacgaccagtgtaagtgtgagaacctgatcatgttccagaacttagctaatgaggaggtccgtaagctgacgcagcgactgctggaagagatgacacagagaatggaggcgttggagaatcggctgagataccgttag

SEQ ID NO: 194291 - DNA, 2754 bp, synthetic construct
  misc_feature 1..2754: note = Description of Artificial Sequence: Synthetic coding sequence
  source 1..2754: mol_type = other DNA
atggagaagatgctggccggctgcttcctgctgatcctgggccagattgtactgttgccagccgaagcccgggaacgatcgcggggccgctccatctcgcgagggaggcacgccaggactcaccctcaaacggccctgctggagtcttcttgtgagaacaagagggcagacctcgtctttattattgacagtagcaggagcgtgaatacccacgactacgccaaagttaaagagttcatcgtggacatcctccaattccttgacatcggaccagacgtgaccagggtgggtctacttcagtatggatctaccgtcaaaaacgaatttagcctgaagacattcaaaagaaaatccgaggtagagagggcagtaaaacgcatgaggcacttatcaaccggaacgatgactggcctcgcaatccagtatgcattaaacatagcattcagcgaggcggaaggagcgaggccgctgcgcgagaacgtacccagagttatcatgatcgtgacagacggaaggcctcaagattctgtggctgaagtggccgcaaaagctagggacactggtatactcatcttcgccattggcgtgggccaagttgattttaacacacttaagagcattgggagtgagccccacgaagatcacgtgtttctggtcgcaaacttcagtcaaatcgagaccttgaccagtgtattccagaaaaagctgtgcacagcccacatgtgttcgactttggaacataattgtgcccacttttgcataaatatacccgggagttacgtgtgtcgttgcaaacagggctacattttgaatagtgatcagaccacttgtaggattcaggacctgtgcgccatggaggatcacaactgcgagcaactgtgtgtcaacgtgcctgggtcttttgtttgtcagtgttactctgggtacgccctcgccgaggacgggaagagatgtgtcgctgttgattactgcgcgagtgagaaccatggttgcgagcatgaatgtgttaatgccgatgggagctacctgtgccagtgtcacgaaggatttgccctcaatcctgacaagaaaacctgcaccaggatcaactactgcgcactaaacaagccaggatgcgagcacgaatgcgtgaatatggaagagagttattattgcaggtgccatagggggtacactctcgatccaaatggaaaaacctgcagtcgggtagaccactgcgcgcagcaggatcatgggtgtgagcagctctgcttaaacactgaagacagcttcgtttgccagtgctccgagggcttcctgatcaacgaagatctaaagacctgttccagagtggattattgtctgctatcagaccacgggtgcgagtatagttgtgtcaatatggaccgttcctttgcctgccagtgtcctgagggccatgtgttgaggtctgatggtaagacctgcgctaaactcgattcttgcgccttaggggaccatggctgtgaacactcctgcgtatcctctgaggactccttcgtgtgccaatgttttgagggctatatcctgcgagaggatggcaagacttgccgaaggaaggatgtgtgtcaggcaatagaccacggatgcgagcacatttgcgtgaacagtgacgattcttacacatgtgagtgtctcgaaggattcaggttggccgaggatgggaagcgatgccggaggaaggacgtgtgtaagtcaactcaccacggatgtgagcacatttgtgtcaacaacggaaacagttatatatgtaagtgcagcgagggctttgtattagccgaggacggaagacggtgtaaaaaatgcaccgaagggcctattgacttggtctttgtcatcgatggaagtaagtcactgggggaggaaaatttcgaagtggtgaagcagttcgtaactggcatcatagattcattgacaattagccctaaagcagcccgagtaggactcctccagtattcaacacaagttcacactgagtttacactaaggaatttcaattctgcaaaagacatgaaaaaagccgtggcccatatgaagtacatgggcaaaggcagcatgacaggtttggctctaaagcacatgttcgagcgttccttcacacaaggcgagggggcccgccctttgagtaccagagtgcctcgggcagctatcgtatttacggacgggagggcacaggacgacgtgagtgagtgggcgtccaaagccaaggccaacgggatcactatgtatgcagtaggagtgggtaaagccatcgaggaagaacttcaggaaattgcctcggaacccactaacaaacatctgttctacgctgaagacttttcaacaatggatgagatttccgaaaagctcaagaagggcatttgcgaggctctggaagactcggatggccgtcaagattcacctgcgggcgagctgcccaaaaccgtgcagcaaccaactgagtccgaacccgtgaccattaatattcaggatctgctgtcatgcagcaacttcgctgtccagcaccggtatttattcgaagaggataatctgttgcgctccacccagaagctatctcactcaaccaagccttctggttcccccctggaggagaagcacgatcagtgcaagtgtgaaaaccttatcatgttccagaaccttgccaatgaagaagttcggaagctaactcaacgatatttactggaagagatgacacagcgcatggaagctctggaaaaccgcctcaggtacagatag

SEQ ID NO: 194292 - DNA, 348 bp, synthetic construct
  misc_feature 1..348: note = Description of Artificial Sequence: Synthetic coding sequence
  source 1..348: mol_type = other DNA
atggaggaccacaactgcgagcagctgtgcgtgaacgtgcccggcagcttcgtgtgtcagtgctatagcggctacgcactggctgaggatgggaagaggtgcgttgctgtggactattgcgcaagtgagaatcacggctgtgaacacgaatgtgttaatgcggacggctcctacctgtgtcaatgccatgagggattcgccttgaatcctgataagaagacatgtacgaagatagattactgcgcaagtagcaaccacggctgtcagcatgagtgcgtcaatactgatgacagctactcatgccattgccttaaggggtttacgttgaaccctgataagaaaacttag

SEQ ID NO: 194293 - DNA, 2871 bp, synthetic construct
  misc_feature 1..2871: note = Description of Artificial Sequence: Synthetic coding sequence
  source 1..2871: mol_type = other DNA
atggagaagatgctggccggctgcttcctgctgatcctgggccagatcgtgctactgcctgccgaggctagggaaagaagcagagggcgctctattagtcgggggagacatgctcggacccacccacaaacggcgctgctcgaaagctcatgcgagaataagcgggctgacttggtgttcattattgatagttctcgctcagtgaatactcatgactacgctaaggtgaaggaattcattgtggacattctgcaattcttagatattggccctgatgtcactagggtggggctcctccagtatggatccactgtgaaaaatgaatttagcctcaaaacctttaaaaggaaatctgaagtcgagagggccgtcaaacgcatgcgccacctctcaacgggaaccatgaccggactagctattcaatatgccctgaacattgccttctctgaggccgagggagcacgacctttacgggaaaatgttccccgcgtaatcatgatcgttaccgatggccgaccacaggatagcgtcgctgaggtcgccgccaaggcgcgagacacaggtatcctgatatttgccataggcgtggggcaggtggatttcaacacgctcaagagtataggaagtgaaccacacgaagaccacgtttttctagtagccaatttcagccaaatcgagacgttaacctcggtcttccagaaaaagctttgcacagctcacatgtgttcaaccctcgaacataattgcgcgcacttttgcatcaatatacccgggagctacgtgtgtcgttgcaaacaaggttatatattgaactctgatcagactacttgccggatccaggatctctgtgcaatggaggaccataactgtgagcaattgtgcgtcaatgtccctgggagtttcgtgtgccagtgttactctggctatgcgctggcagaagacggcaaacggtgcgtggccgtggattactgcgcttccgaaaatcatgggtgcgagcacgagtgcgtcaacgccgatggttcttacctgtgccaatgccatgaaggctttgccctgaaccccgataagaagacatgtactaaaattgattattgtgcttcctccaaccacgggtgccaacacgagtgtgtcaacaccgatgattcttactcttgccattgcctcaagggctttactttaaatcccgacaagaaaacttgtcgccgcattaattactgcgctctgaacaaacctggctgcgaacacgagtgtgtgaatatggaggagtcctactactgccgatgccaccgaggttacactcttgatcctaatgggaaaacatgcagccgggtggatcactgcgcccagcaggatcatggctgtgagcaattatgcctgaacactgaagatagtttcgtgtgtcagtgcagcgaaggcttcctgatcaacgaagacctaaagacctgtagtagagttgattactgtctgctgtcagaccatgggtgtgagtacagctgcgtcaatatggatagatcattcgcatgtcaatgcccagaagggcatgtgctaaggtccgacgggaagacctgcgccaagctcgattcctgcgccctgggcgaccatggttgcgagcacagctgcgtaagcagtgaggacagtttcgtttgtcagtgctttgaaggctacatactcagagaggacggcaaaacgtgtagaaggaaagacgtgtgtcaagcaattgaccacggttgcgagcacatatgcgtgaacagtgatgacagttacacatgcgaatgcctggagggatttcgcctggcagaagatgggaaaaggtgtagacggaaggacgtgtgcaagtctactcaccacggttgtgaacacatctgtgtcaacaatggcaatagttacatctgtaagtgctccgagggcttcgtgcttgctgaagatggtagaaggtgtaagaagtgtactgagggaccaattgaccttgtgttcgtaatcgatggatcgaagtccttaggagaggagaatttcgaagtcgtgaagcaattcgttaccgggataattgactctcttactatctcccccaaggccgcaagagtgggcctgctccaatactccactcaggtgcacaccgaattcacattgcgtaatttcaatagtgctaaggacatgaagaaggctgtggcccacatgaagtacatgggcaaagggagtatgacaggtctggcccttaagcatatgtttgaaagatcttttacgcaaggcgaaggagcacgtcccctttccaccagggttccgcgggccgctatcgtgtttaccgacgggcgggcacaggacgatgtctctgaatgggcttcaaaagcaaaggctaatgggattactatgtacgcggtcggcgtcggtaaagcgattgaagaggagctacaggagatcgcgtcggagcctaccaacaagcacttgttttacgccgaagacttcagcactatggatgagatatctgaaaaactgaaaaagggaatttgcgaagcgctggaggactccgatggcaggcaggatagcccagcaggcgagctcccaaaaactgtccagcagcccacagagtctgagccggtcaccatcaatatacaggacctccttagctgtagcaactttgccgtacaacacagatatctgttcgaagaagacaatctattacggagtacgcagaagttgtctcactcaactaagccttctgggtcacctctggaggagaagcatgaccaatgcaagtgtgagaatttgatcatgtttcaaaacctggccaatgaggaggtcaggaaactcacacagcgcctggaagagatgacacagagaatggaggccctcgaaaaccgtcttcgctacaggtag

SEQ ID NO: 194294 - DNA, 2814 bp, synthetic construct
  misc_feature 1..2814: note = Description of Artificial Sequence: Synthetic coding sequence
  source 1..2814: mol_type = other DNA
atggagaagatgctggccggctgcttcctgctgatcctgggccagattgtgttactgcctgccgaggcaagggagcgaagtcgagggagatccatttccagaggaagacatgcgagaactcacccacaaacagctttgctcgaaagcagctgtgagaataaaagggcagacctggtgtttatcatcgatagcagccgcagcgtgaacacgcatgattacgcaaaagtcaaagaatttatagtagatatactgcagttcctggatattggacctgatgtaacccgcgtcggtcttttacagtatggctccacagtcaagaacgaattctctctcaaaaccttcaaacggaagtcagaggtagagagggctgttaaacgtatgagacacctgagtacgggcaccatgactggcctagctatccagtacgctctcaacattgcgtttagcgaggccgaaggcgctcgacccctgagagagaatgtgccgcgagtgattatgatcgtgactgatggtagaccccaggacagcgttgccgaggttgcagcaaaggctcgcgataccggcatactcatcttcgctattggcgtgggtcaggtggatttcaataccctgaaaagtatcggctccgaaccacacgaggatcatgtctttctggttgcaaatttttcacagatagagacccttacctcagttttccagaaaaaactgtgtacagcacatatgtgctctaccctggagcacaactgcgcccatttctgcataaacattcccgggtcctatgtgtgcagatgcaagcagggctatatcctgaattcagatcaaaccacatgccggatacaggacctctgtgcaatggaggaccacaattgtgaacagctgtgcgtcaatgtcccagggtctttcgtctgccaatgctatagcggttatgcactggccgaagacggtaagcggtgcgtggcagtggactactgcgcctctgaaaatcatggttgtgagcacgagtgcgtgaacgccgacggaagttacctgtgtcaatgccatgagggctttgcactgaatcctgataagaagacatgcacaaagatagactactgtgccagctccaaccacggctgccagcatgaatgcgtgaacactgacgattcctatagctgccactgcttgaaggggttcacattgaaccctgacaagaaaacctgtcgcagaattaattattgcgcattaaacaaacctgggtgtgaacacgaatgtgtcaacatggaggaatcctactactgccgctgccaccgaggctacactctggacccaaacggaaagacctgttcacgagtggaccactgtgcccagcaggaccacggctgcgaacagctctgcctgaatacagaggacagtttcgtctgccagtgttccgaaggctttcttatcaacgaggacctcaagacttgtagccgcgtcgactactgtttattgagcgatcatggatgcgagtatagctgtgttaatatggacagatcatttgcttgccagtgccccgagggccacgttctcagaagtgacggaaagacatgcgcgaagctggactcgtgcgcgctgggtgaccatggatgtgaacacagttgcgtgagttccgaagacagcttcgtttgtcaatgctttgaagggtacatcctccgcgaagacgggaaaacatgccgccggaaggatgtttgtcaggccatcgaccatggctgcgagcatatttgtgtcaattccgacgacagttacacgtgcgaatgcctcgaggggtttcggttggccgaagacggcaagagatgtaggcggaaagatgtgtgcaagagcacccatcatggttgcgaacacatctgcgttaacaacggcaactcttatatttgtaaatgctcggaggggtttgtcctggcagaggatggccgcagatgcaaaaaatgtaccgaaggccccattgacctcgtttttgtaattgatgggagcaagagcctgggtgaagagaactttgaagtggtaaaacagtttgtgacaggaattatagatagcctgaccatctctcccaaagcggccagagtcggcttgctgcagtattccactcaggtgcacacagagttcacccttcgtaactttaattctgccaaagatatgaagaaagctgtcgcccacatgaagtacatgggcaagggatctatgactggacttgccctgaagcatatgttcgaaaggtcctttactcaaggcgagggtgctaggcctctgtccacccgcgttcccagagctgccatagtattcactgatgggagggctcaggatgacgtgagcgagtgggcttccaaagccaaggcaaatgggataaccatgtatgccgtcggtgtgggcaaggctattgaagaagaactgcaggagatcgcttccgaacccacgaacaagcacttgttctatgctgaggatttcagcactatggacgaaatttctgaaaagctgaagaagggtatctgcgaagccttagaagactccgatgggcgccaggacagtcccgctggggagttacccaagacagttcagcagcctactgtgcagcaccgatacctattcgaagaggacaatctgctgcgctctacgcaaaagctgagccactctaccaaaccttctggcagccctttggaagagaagcatgatcagtgcaaatgcgagaacctaatcatgttccaaaacctggccaacgaagaggttcggaaactcacccagcggctggaggagatgacacagcgtatggaggcattagagaatcggctgcgataccggtag

SEQ ID NO: 194295 - DNA, 2019 bp, synthetic construct
  misc_feature 1..2019: note = Description of Artificial Sequence: Synthetic coding sequence
  source 1..2019: mol_type = other DNA
atggaggaccacaactgcgagcagctgtgcgtgaacgtgcccggctcctttgtctgccagtgttactccgggtacgcactggctgaagacgggaagcggtgcgtggcagtggattactgtgctagcgagaaccacggctgtgaacacgagtgtgtcaacgccgatgggtcctatctgtgccagtgtcatgagggttttgccctaaatccggacaagaaaacttgcactaagatcgactattgtgcctcatccaaccatggctgtcaacatgaatgcgtcaacacagacgattcatattcttgccactgccttaaaggcttcacgctcaaccctgacaagaagacctgccgccgcatcaactactgcgcactgaacaagcccgggtgtgagcacgagtgtgtgaatatggaggagtcatactattgtcgctgccaccggggctataccctagaccccaacggcaagacatgcagcagggttgatcattgtgcccagcaggatcatggctgcgaacagttgtgcctgaacactgaggactcgtttgtgtgtcagtgttcggaaggctttcttataaacgaggacctcaaaacctgttctagggtcgactattgcttgctcagcgaccacgggtgcgagtattcttgtgtcaatatggaccggtccttcgcttgccagtgtcccgaaggtcacgtcctgaggagtgacggcaagacctgcgccaaactcgatagttgtgctttgggcgatcatggatgcgagcactcctgtgtctcaagtgaggattccttcgtgtgtcagtgctttgaaggatacatcctcagagaagacgggaaaacctgcaggagaaaagacgtatgccaggcaattgaccatggatgcgaacacatatgcgtcaatagcgacgatagctatacatgcgagtgtctggaaggtttccgactggccgaggacgggaagaggtgccgccgcaaagacgtgtgcaagtccactcaccacggatgcgagcacatttgcgtgaataacggcaacagttatatttgtaaatgctccgagggctttgttctggccgaggacggtcgccggtgtaaaaaatgtacggagggccccattgatttggtgttcgtcattgatggctctaagtccttgggggaagagaacttcgaggtggttaagcaattcgtgacaggtataatcgactctctgaccatttcgccgaaagctgcccgagtagggctcctgcaatattctacacaagtacacactgagtttacattacggaattttaattcagcaaaggacatgaaaaaggccgtggcccatatgaaatatatgggtaagggctccatgactgggttggccctgaaacatatgtttgaacgctcatttacccaaggcgagggggcacggcctctgtccacccgggtcccaagggccgccatcgtgttcacagacggaagagctcaggatgatgtgagtgagtgggcctccaaagctaaggctaatggcatcacaatgtacgctgtcggtgtgggaaaggctatcgaggaggagctacaggaaatcgcttcagagccaacgaataaacatctcttttatgcagaggacttctctaccatggacgagatctctgaaaaactgaaaaaaggaatttgcgaggcgctggaggatagcgatggacggcaagattcccccgcaggggagctgcctaagactgtacagcagccgacagagtctgaacctgtgaccataaatatccaggacctactgtcttgcagcaattttgctgttcagcatcgttatctatttgaagaagacaacttgctgagatcaacacagaaactgtcccacagcactaaaccttctggctctcctcttgaggagaagcacgaccaatgcaagtgtgagaacctaattatgtttcagaatctggcaaacgaggaggtgcgaaagttaacgcagaggttagaagaaatgacccagaggatggaggctctggagaatcggctgcgatataggtag

SEQ ID NO: 194296 - DNA, 2748 bp, synthetic construct
  misc_feature 1..2748: note = Description of Artificial Sequence: Synthetic coding sequence
  source 1..2748: mol_type = other DNA
atggagaagatgctggccggctgcttcctgctgatcctgggccagatagttctcctgcctgcagaggcgagagagcggtcacggggaagaagcatctcccgcgggagacacgctagaactcaccctcagaccgccctgctcgagtcttcatgcgagaataagcgagccgatctggttttcatcattgactctagccgaagtgttaacacccacgactacgcaaaagtcaaggagttcatcgtggacatattacagttcttagatattgggcctgatgtgaccagggtcggcctgctacaatacggaagtaccgtcaagaatgagtttagcctgaagaccttcaaaagaaagtccgaagtggaaagggccgtaaagagaatgaggcatctgtccactggaacaatgactgggctggcaatccagtatgccctgaacattgctttctctgaagctgagggcgccaggccactgcgtgagaatgttccgagagtgattatgattgtgacggacgggagaccccaggactccgtggccgaagtcgcagccaaggccagagataccggtatcctgatctttgccattggcgtggggcaggtggattttaacaccctcaaaagcatcggatccgaaccgcacgaagaccatgtgtttctggttgcaaacttctcacagattgagaccctgacaagcgtgttccagaagaaactgtgtactgcgcatatgtgtagcaccttagaacacaactgtgctcacttttgcatcaacattcctggatcttacgtatgccgctgtaaacagggatatattctcaattcggaccagaccacatgtcggatacaagatctatgcgctatggaagatcacaattgtgaacagctgtgcgtgaacgttcctggtagtttcgtgtgccagtgctatagcgggtatgccttggccgaggatggcaaacgatgcgtggccgtggattattgcgcttctgaaaatcatggctgcgaacacgagtgcgttaacgctgatgggagctacttgtgtcagtgccatgagggcttcgctctcaacccagataaaaaaacatgtactcgcattaattactgcgcactcaataaacccggatgtgaacacgagtgtgtgaatatggaggaatcatattactgccggtgccacagaggttataccctcgatcccaacggcaagacatgctctcgggtcgatcactgcgctcaacaggaccacggatgtgagcagctttgcttgaatacggaggattctttcgtatgccaatgttctgagggcttcttgatcaacgaagacctcaagacttgttctagagttgactactgtctcttgagcgaccacggatgcgaatacagttgcgtaaatatggaccggagcttcgcctgtcagtgtccagagggccacgtgctgcggagtgatgggaaaacttgtgcaaagctggattcctgcgcattaggtgaccacggctgcgaacattcttgcgtctcttcagaagactcgtttgtttgtcagtgtttcgaaggctatatcttgagggaagacgggaagacatgcaggaggaaagacgtctgccaggcaattgaccacggctgtgagcacatttgcgtcaattcagatgattcttatacctgcgaatgcctcgaagggttccgcctggctgaagacggaaagcggtgtcggcgcaaagatgtttgcaagtctacgcatcatggctgtgaacacatttgcgtcaacaatggtaactcgtacatctgcaaatgtagtgaggggtttgttctggcagaggatggaagacgctgcaagaagtgtaccgaagggccaatagacttggtatttgtcattgacgggtcaaagagccttggggaagaaaacttcgaagtagtcaagcagtttgtcacgggcatcattgattcactaacaatctcgccgaaggctgctcgggtggggctgctgcagtacagtacccaagtgcacacggaattcaccctgaggaatttcaattccgccaaagacatgaaaaaggctgtcgcccatatgaagtacatgggcaaaggctcgatgacgggactggcactaaaacatatgtttgagaggtcattcactcaaggggaaggtgcccgccccctgtcaaccagggtgccccgcgccgctatagtttttaccgatgggcgggcccaagatgacgtgagcgagtgggcttcgaaagcaaaagcaaatggcatcacaatgtatgcagtgggggtgggcaaggcaatcgaagaggaacttcaggagatcgcctccgagcctacaaataaacatctcttctacgccgaggatttcagcacaatggacgaaatatcagaaaaactgaagaagggcatctgcgaggccctggaagattctgacggtcgccaggactctcctgccggtgaacttccaaagacagtgcagcagccgactgagagcgagcccgtgacgataaacatccaggacctgctcagctgctcaaatttcgctgtgcagcaccgttatctcttcgaggaggacaacctccttaggtctacacagaaattgtctcattctaccaaacctagcggctctccacttgaggagaagcacgatcagtgtaaatgcgaaaatcttattatgttccaaaacctcgcaaacgaagaagtgaggaaattaactcaaaggctggaagagatgacccagcgcatggaagccctcgaaaaccgcctgcgatatcggtag

SEQ ID NO: 194297 - DNA, 1461 bp, synthetic construct
  misc_feature 1..1461: note = Description of Artificial Sequence: Synthetic coding sequence
  source 1..1461: mol_type = other DNA
atgccccggcccgcccccgcccggcggctgcccggcctgctgctgctcctgtggcctctgctgcttctgccaagcgccgcaccagacccagtagctaggccaggcttcagacgcctggaaacacggggaccgggcggcagccctggccgtagaccatctcctgcagctcccgacggggcccctgcgtcagggacatcagagccagggagggctcggggtgccggggtgtgtaagagtcgaccattagacctcgtgttcataattgattcatccagaagcgtgcggccccttgagtttaccaaggttaagacctttgtttccaggatcatcgacaccctggatatcggccccgcggataccagagtggccgtggtaaactatgcgagcacggtgaaaattgagtttcagttgcaagcctatacagataaacagtcactcaagcaggccgttggccgaatcaccccattatcaaccgggactatgtctggcctcgctatccagactgctatggacgaggcgttcactgtagaggccggcgcaagggaacccagttccaatattccgaaggtggccataatcgtgaccgacggccggccacaagaccaggttaacgaggtggctgctagggcgcaagcaagtggtatcgaactttatgcagtgggcgtcgatcgggctgacatggctagtctgaagatgatggcaagcgaaccactcgaggaacacgttttctacgtggagacatatggcgtgattgaaaagttatccagccggttccaggaaacattttgcgccttggatccctgcgtcctggggactcaccagtgccagcatgtgtgtatatcagacggtgaaggcaaacaccactgcgaatgtagccaaggctacacgcttaatgccgacaagaaaacatgcagtgctctagacaggtgcgccctgaatacccatggatgtgaacacatttgtgtaaacgacaggagcggatcctatcactgcgaatgctatgagggttacaccctcaacgaagacaggaagacctgcagtgcgcaagacaagtgtgcactggggactcacggttgtcagcacatttgcgtgaatgaccgcaccgggtctcatcactgtgaatgctatgaagggtataccctaaacgccgacaagaaaacatgcagcgttcgggacaaatgcgcgcttgggagccatggatgccagcatatttgtgtctctgacggtgccgcgtcataccactgcgactgctaccccggctacactctgaatgaggacaaaaagacatgctcggccacagaagaggctagacgcttagtctcaacagaagatgcctgtggatgcgaggcaacactggcttttcaggacaaagtaagtagttacctgcagcggctgaacacaaaacttgacgatattctggaaaagctcaaaatcaacgaatacggccaaattcaccggtag

SEQ ID NO: 194298 - DNA, 1335 bp, synthetic construct
  misc_feature 1..1335: note = Description of Artificial Sequence: Synthetic coding sequence
  source 1..1335: mol_type = other DNA
atgccccggcccgcccccgcccggcggctgcccggcctgctgctgctcctgtggccattattactcctcccatctgccgcccctgaccccgtggcacgaccgggatttagacgactcgaaactagaggcccgggggggtcaccaggtaggagacctagcccagccgctcctgacggcgcaccagcctccggaacaagcgaaccaggccgcgcccgcggcgccggggtatgtaagtccaggccacttgatctcgtgtttattattgattcctctaggagcgtgaggccattggagttcaccaaagtgaagacattcgttagcagaattattgatactttggacatcggcccagcggatacacgggtggcagttgtgaattacgcaagcactgtaaaaattgaattccagctccaggcttatactgacaagcaatccctcaagcaggccgtcggtagaatcacccctctgtccacaggtacaatgagtggtttggccatccaaaccgcgatggatgaggcatttaccgtcgaggccggagcccgtgagccctcctctaatatacccaaagtggctatcatcgtgaccgacgggaggccgcaggatcaggtcaatgaggtggcggctcgagcccaagcttctggaattgagctttacgctgtaggggttgatagggccgatatggcctccctcaagatgatggccagcgagccattagaggagcatgtgttttacgtcgaaacatacggcgtcatcgaaaagttatctagcaggttccaagagacgttctgcgctctcgatcgatgcgcgctcaacacccacggctgcgagcatatctgtgtgaatgatagatccggtagctatcactgtgaatgctacgagggatacaccttaaacgaggatagaaagacttgcagcgcgcaggacaaatgcgccctggggacacacgggtgccaacacatctgtgtcaatgacagaactggttcacaccattgcgaatgttatgagggatacactctgaacgccgataaaaaaacctgctctgtccgggacaaatgcgcactaggcagccacgggtgccagcacatctgtgtttctgatggagcagcctcctaccactgtgactgctacccgggatacactctcaacgaagataaaaagacctgttcagcgactgaggaggctagacgtctcgtgtctacagaggatgcctgcggctgcgaggcgactctagcctttcaggacaaggtatctagctacctccagcgcttaaacactaaactggacgacattttggaaaagcttaagattaacgaatatggtcagatccatagatag

SEQ ID NO: 194299 - DNA, 1869 bp, synthetic construct
  misc_feature 1..1869: note = Description of Artificial Sequence: Synthetic coding sequence
  source 1..1869: mol_type = other DNA
atgcggggcctgctgtgctggcccgtgctgctgctgctgctgcagccctgggagacacaattgcagttaaccggccccagatgccacaccggaccgctggacctagtatttgttatcgacagttctaggtcagttagaccatttgagttcgaaacaatgagacagtttctcatggggttgctgagagggttaaacgtggggccaaatgcgacacgtgttggtgtcattcagtacagttctcaagtacaaagtgtatttccacttagggctttctcgaggcgcgaggatatggagagggcaatcagggacctagttcccctggctcaggggacaatgactgggctggctatccaatacgccatgaacgtggctttcagcgtggcggaaggcgctagacccccagaggaacgtgtcccccgggtcgccgtcattgtgaccgacggccggcctcaagaccgagtggcagaggtagccgctcaagctagagcaagaggaatcgaaatctatgcggttggagtccagagagccgacgtcggctcgctgagagccatggcctccccgcctctcgacgaacatgtgtttcttgtagagtccttcgacttgattcaggagttcggactgcagtttcagagcaggctgtgcggcaaggaccagtgtgccgaggggggccatggctgccagcatcagtgtgtgaacgcttgggctatgttccactgcacttgcaatcctggttacaagttggctgctgataacaagtcatgtctggctatagatttatgtgctgaaggaacccacggctgcgagcatcactgtgtgaattcacccggcagctacttctgtcactgtcaggtggggtttgttctgcagcaagaccaacgatcttgtagggctattgactactgtagtttcggcaaccattcctgccagcacgaatgcgtttctacccctggcggaccaagatgccactgtcgcgagggtcatgacctgcaacccgacggtcgcagttgtcaagtgcgggacctgtgcaatggggtcgatcatggatgtgaattccagtgcgtgtctgagggcctgagttacaggtgcttgtgccccgaaggcaggcagctgcaagctgatggcaagagttgtaatagatgtagggagggacacgtcgatctagtgctgctggtcgacgggtctaagtccgtgagaccccagaacttcgagttggtgaagaggttcgtcaaccagatcgtggatttcctggacgtcagcccagaaggcacgcgcgttgggctggtgcagtttagtagtcgggtgaggactgagttccccctgggccggtacggaacagcagctgaagtcaagcaggctgttttggccgtggagtacatggagcgcgggactatgacaggactggcattgcgacatatggttgaacatagtttctcagaagcccagggagctcgcccccgggccttgaatgtacctagagtgggattggtcttcacagacgggcgaagtcaggatgacatcagcgtgtgggccgcaagggcgaaagaggaaggaattgtcatgtacgcggtcggcgtcggcaaggctgtggaagctgagcttcgggaaattgccagcgagcctgcagagttgcacgtgagttatgcccccgacttcgggacgatgacccatctcctcgaaaatctaagaggctcaatctgtccagaagagggtatctctgccggaactgagctaaggtccccctgcgaatgcgagtcattggtcgagttccagggcaggacgctcggtgccctggagtccctgaccttgaacctggctcagcttacagctcgcctggaagaccttgagaatcagcttgcgaaccagaagtag

SEQ ID NO: 194300 - DNA, 1746 bp, synthetic construct
  misc_feature 1..1746: note = Description of Artificial Sequence: Synthetic coding sequence
  source 1..1746: mol_type = other DNA
atgcggggcctgctgtgctggcccgtgctgctgctgctgctgcagccatgggaaacacagctccagttaaccggtcctaggtgccataccggccctctggatcttgtctttgtgatcgactccagccgcagcgtcaggcctttcgagtttgagaccatgagacagtttctcatgggacttctcaggggccttaatgtgggcccaaacgcaacacgcgtaggggtgattcaatatagcagtcaggtgcaatctgtgtttccactacgggccttcagccgcagagaggacatggaacgggctatccgagacctggtcccccttgcccaggggaccatgaccggcctggctatccagtacgctatgaacgtcgccttcagtgttgccgaaggggctcgccccccagaagagcgtgtccctcgcgtggctgtgattgtgactgacggcagaccccaggatcgggttgctgaggttgccgcccaggctagagcccgaggaatagaaatttacgcagtgggcgtccaacgggccgacgtcgggtccctgcgcgcgatggccagccctccactggacgaacacgtcttcctggtggagtcgtttgatctgatacaggagtttggcctgcagttccagtcccgactgtgcgccatcgacctctgcgcagagggcacccacgggtgcgaacaccactgtgtcaattcacctggctcatatttttgccactgccaggtggggtttgtgttgcagcaggaccaaaggagctgccgggccatcgactattgttcttttggcaaccattcatgccagcacgagtgtgtcagcacacccggaggacctcggtgtcattgtcgcgaaggacatgatctccaacccgacggcaggagctgccaggtaagagacctgtgtaacggagtagaccacggttgcgaattccagtgtgtttcagaagggctgagctatcgatgcttgtgccctgaaggcaggcagctgcaggccgacggcaaatcttgcaaccggtgtcgggaaggccacgttgatttggtgctgctggtagatggatctaaatcagttaggccccaaaactttgaactcgtcaaaagatttgtgaaccagattgtggactttttggacgtgtctccagaggggacacgcgtcggattggtacagttctcgagtcgggtgagaacagagtttccccttgggagatacggaacagctgccgaagttaaacaggccgtcctggctgttgagtacatggagcggggcacaatgacaggactggctctgcgccatatggtggaacattcattcagcgaagcccagggagccaggccacgcgctctaaacgttccgagagtcgggttggttttcacagacggccgaagtcaggatgacatcagcgtgtgggccgcccgcgctaaagaggagggcatcgtgatgtacgcagtcggagttggcaaggcggtggaggccgaattgcgcgaaattgcgtctgagccagccgaacttcacgtgagttatgctccggactttggaacaatgacgcatctcctcgagaacctgcgaggttccatctgtcccgaggaaggcatctcagctgggacagaactgagaagcccttgtgagtgtgaatccctggttgagttccagggacggacactgggggcccttgaatcgctcaccctgaacctggcccaactgactgcaagactggaagacctggaaaatcagctggctaaccaaaagtag
